United States Patent Application Publication US 2005/0228172 A9 - sequence listing, part 131

SEQ ID NO: 615143 - DNA, 563 bp, Homo sapiens
aagcaatacatctctttctatcatatactgatatcttgaaaacttttataacgtttctagtcacattcagtattttaaaaataggattgattctaagttttgagtttatggtgtatttgaatattagagatattatctcttatacatttcaaagctttgctgcattctaaactcagtcctgccttagccttagtaayggcaatgaagtgcggggatagaatgttcactatttttttatgtgctgttaaaatttcatacctcctgttctatcttgaagtcttacagttttggaatggtgagtgggggaaacaagcataaaactattacataattcatgcagttttcactgggcaacagtatctatcctctgaatggtgaaatggctacttttcatttatttatttttttctctcctggggtaaagcgcttgaaaactgcaccactgggaaattgcagctatagtccatgtttcaacatagtccatgcttctttgagttggccacttactgtttactctcatctccttaggtttagcagtaaagacctgtaagatttcttctgtt

SEQ ID NO: 615144 - DNA, 563 bp, Homo sapiens
aagcaatacatctctttctatcatatactgatatcttgaaaacttttataacgtttctagtcacattcagtattttaaaaataggattgattctaagttttgagtttatggtgtatttgaatattagagatattatctcttatacatttcaaagctttgctgcattctaaactcagtcctgccttagccttagtaacggcaatgaagtgcggggatagaatgttcactatttttttatgtgctgttaaaatttcatacctcctgttctatcttgaagtcttacagttttggaatggtgagtgggggaaacaagcataaaactattacataattcatgcagttttcactgggcaacagtatctatcctctgaatggtgaaatggctacttttcatttatttatttttttctctcctggggtaaagcrcttgaaaactgcaccactgggaaattgcagctatagtccatgtttcaacatagtccatgcttctttgagttggccacttactgtttactctcatctccttaggtttagcagtaaagacctgtaagatttcttctgtt

SEQ ID NO: 615145 - DNA, 552 bp, Homo sapiens
aaaaccttaatgcacataacaataaaagtatcaactatctatgcattgtttcaaaacacagaatccattctaaatakttcttcatctatctcatctttaaaatagatccatcccttatctaggaacatgagacactgacatttttaaacacatagctttattataagaatttcaaaccaggtgagagaaatgggaggtgccaacttatattcagctcttcaagcaaagtgttttgaaaacaaaagtcaggatctgtattagtccattttcatgctgctgataaagacacacctggaactgggaagaaaaagaggtttaatggacttacagttccacatggctggagaggcctcacaatcatggcagaaggcaaggaggagcaagtcacgtcttacatggatggtggcaagcaaagagaagagagcttctgcagtgaaactcccattttaaaaccatcagatctcgtgagacttattcactatcagaacagcacaggaaagacctgcccccatgactcaatcacctcccactgggttcctcccataacatgtg

SEQ ID NO: 615146 - DNA, 200 bp, Homo sapiens
cattgtttgaaaatcaatactgccatttactagttttagattttgggctgtttttcttatctttcaaaaataacaattgtgaagattaaataaaataatgaayataaaacatccctcatactgtctggcacaaagtgcgttctcagtaatcatattttctttttcctgtcattctattttttaattatttccttctaagt

SEQ ID NO: 615147 - DNA, 200 bp, Homo sapiens
cattgtttgaaaatcaatactgccatttactagttttagattttgggctgtttttcttatctttcaaaaataacaattgtgaagattaaataaaataatgaacataaaacatccctcatactgtctggmacaaagtgcgttctcagtaatcatattttctttttcctgtcattctattttttaattatttccttctaagt

SEQ ID NO: 615148 - DNA, 420 bp, Homo sapiens
aaatgtgcagaaagaggaggtaaagatgagaagcaagttgattttccaccaatttccagaaaggctcaggaattgaagggactagggactctaacaggtgggcgtgaagtattgaccgaaaactaagggaactagtggacaaatctgtttaaagcacagttcggcaactagattacagactcccatcctgtgcagccaagtgactaacccaccaccgattccaaagcaataaaaattctcccctatcctttcatggagagattattgagaagggccttggatgcaaggacaccaagaacrttggagggtggagattaaacagaaacctgtgaatgaacaataagactgtcagctctttttcctttccattaggccagcagccaggcttattctccaaggtaagaaaatatacatataaaa

SEQ ID NO: 615149 - DNA, 415 bp, Homo sapiens
tacttaaatgataagttagtttattatatcccacaggtttctaataaaggatccaaagcttactaagacattacatgtaataagtattgaaaaccaaatattaatattaattaatattcaattattatagtcatattttatctccaataattcatagataaatatgatatatgcaacttttacttacatgtgcttgctggaaaatagttatgaaaggcagttgaaaaatccaataaaagaaatctttaccaaagatgatgaagtgtaataaaacaaatccttagcacttaaaatctgttgacaaaaataaataaaaaggcagggtcttgctytgtcatccaggctggagtgtggtggcacagtcatagctcagcttactgcagcttccaactcctgggttcgagggatcctcctg

SEQ ID NO: 615150 - DNA, 587 bp, Homo sapiens
aaattagttcaaatgtaggaatgacaccgaatgctacaagtagtagttaacctgaaatccattatccaaagttgttcagttaatgggatctatccccatgcaatatattaattactgctacagacttggtgggtgcgtgatcacactgtgagttaatacagagtacggaattcaatatctgttagaactaaagagctatgaattgaatagagttggccccagctggaaagctgttggacatgctgtkggaaaacaattatatttccttacttataggaattaataccaccagaataaacacaagtcaatggtagctatgcgaagtaacaagaaaggattcacttaaaaataaatttcattgacaaataaatgatttttcatgagctgttacattcctgaagaaggcatataattcattttacccagctaatcattagaataaactactagtgaagaaaacagtgatagtaacagcagtttttgaacctaaatacacagacctcttctaacaatacaagtttcattctcttcaatattgaatgtggtatgtatacaaaagctttccttataaaaggtagttgtaaata

SEQ ID NO: 615151 - DNA, 592 bp, Homo sapiens
tcagaaaaaataaatttataaatcacaagctaggcttggcaatatgagtgggcagacaatctgtgatcacaaagcatggctgtcagcaactaccatctcaccagagctggcaggaaaacattagcaattctccgctctgtgttccagcaccttctgctaccttgcccagggcacagtcatatatttttcatgtattcctagaagaaaagagatgatgaagccctagaattttgcaggtgaacacagaaaaaaagaataaatattggctcacaagcccttactgatagccagaatctaaaattttgaatgatatgtaggtgacaggaggttcaggatggcccttggtgatggaaggaggacagttcctcccaaggggctgttctcrttgtccctggctgtcatgctctgattccttgtttttccattatttggtccacaggacaagctggcccaaagcatagccctatgggaagggacaggaataggttcctggtgtcaggatgagctcttaggaagatgagtctacagctcaataacaatactgcatcataactgcataatattttataatttatccagtggtttcatatca

SEQ ID NO: 615152 - DNA, 575 bp, Homo sapiens
aaatgtattcttacaatcaaaagattttaaatgacactcccatcaccgagtaagctggctctggtgataacatatatccagagttcttgggtaagatgggtgagatcaaaagatagagaattgcagcatcaagtggcacttacattaagaaatattgtaagcagaaagtgttctctgagaaatcaagtgataaacacactaaagagaagaaaaaaattcaaacacacacattagagactgagtctattgggcctcaagttaaagtaaaatggcatctcctgtgcttacatagctatccttaagagaacaagctctctagccacacaacttgggtttgaattcaggctctgacacttgatggctgtttcagctcagytcccagaaaaaaatcagaaagtatgctccgaagggtttaactgaaaacattataaagaaatgcttattttcagagatgtaggcaaggttgatgaagaaagatggaaaggcacctgaggatgagcaacagtgcaaagcagttatcaccgcagttccaaaggagaaagtagagggccccaagttagctgctacctgcaccc

SEQ ID NO: 615153 - DNA, 613 bp, Homo sapiens
atgacaaaacatatatatttggtgatagtatcactaagcacacatcatttaggacacaagaaaagtgatggtgcttaatgatgcaatgcaaattcaacaaatccacatgaaacaatagcataatttcagccatcattttattatcagtatttattcattcagaaaatacttatgaaggaacttactacatgttggccccattgcaggtgttagaaatgccataaaacaaatcaaatacacaagtatctgccttatagaatgcatattttattggaagaaaaaggcaccagaggaaasataagtcaatgtattatactggatagttgtacgtgataagaataaatcataacaaagcagggaacaggaagcttaaatataacagagtgaccaggaccttactaaaaggtttgagtgaacactcgaagggataacacctgatgaactaatcagtattcaactggagaaaaataaccagtaggtgaaaaatattgagatacttattgcaagatattgggttatgaactgtgagggctggctaagaaaacctggaataaatagagcaggccatcaggaagggcattgcagaactcttggatatgagagctaaacttgt

SEQ ID NO: 615154 - DNA, 383 bp, Homo sapiens
gttatcaacttcagtatgtttactctcggtatagtactgtaatctgccattacattctaattttgttagcttgtccattaatagctttttctctcctccagtgcaatgtccagtgtagattacatatgacattaagttgtcatgtatctcctagtgtattttaacctgaagtatttccaaggccattttatcracaatgacattttcaattatagttctcccaatccaccccccccttatttaataataaaaacaaatcttcaatttgattttgtttgatacaatctcatgatttaaacaagtttatatattttcagccagaatactataaaagatatgttgtgtgattttcagaacatcacttcatgaggcatgtgatgtct

SEQ ID NO: 615155 - DNA, 454 bp, Homo sapiens
aaatcttcaatttgattttgtttgatacaatctcatgatttaaacaagtttatatattttcagccagaatactataaaagatatgttgtgtgattttcagaacatcacttcatgaggcatgtgatgtctgtctgttgctcatcagtgatattaatttcagttgcttgtttttcttttgtagttactgttcttttccttgtagtctgtggaaacacactttaagttcatgcaaatatctycctctctctctttttttttttgctcagaacttccctcctcaagttttcaaccgttggtgactatacttctctctttcaccagtctttaatttgcaaaaaggattattaatatcaaaacctgcaattacgtttgtaccaacctaatatttaaacgacatcacttaatctgcatttatcaagaagtactcagcatttcaaggtaagaaatagtattc

SEQ ID NO: 615156 - DNA, 597 bp, Homo sapiens
gtgtctaaactgtctttgtgtggctgagtcacttccaaaaaggggcctcaggaccaagttttgtctcttggtctgtcaaaatgctaaatctgaaaaatgtctcaaagaccagttttttagttttcmcaataatgacgttatttatagagtagttggagaagttatcatttctttttttttttttttttttttttgagatgaagtctcactctgtcgccaggctggagtgcagtggcacgatctcagcacactgcaacctccgcctcccagcctcctgagtagctaggactataggcgcatgccaccatgcccagctaatttttgtatttttggtagagacggggtttcaccatgttggccaggatggtctcaatctcttgacctcatgatccacccacttcagcctcccaaagtgctgggattacaggcataagtcaccgcacccggccattataaatttttggacttccagttatgtgactctggggtcataagcaacttatagaaaagtaaactaaggaatggcaggttattgtttaacaacatatatatatataataatgatatatatatataaaataatgatatatacatata

SEQ ID NO: 615157 - DNA, 597 bp, Homo sapiens
gtgtctaaactgtctttgtgtggctgagtcacttccaaaaaggggcctcaggaccaagttttgtctcttggtctgtcaaaatgctaaatctgaaaaatgtctcaaagaccagttttttagttttcacaataatgacgttatttatagagtagttggagaagttatcatttctttttttttttttttttttttttgagatgaagtctcactctgtcgccaggctggagtgcagtggcacgatctcagcacactgcaacctccgcctcccagcctcctgagtagctaggactataggcgcatgccaccatgcccagctaatttttgtatttttggtagagacggggtttcaccatgttggccaggatggtctcaatctcttgacctcatgatccacccacttcagcctcccaaagtgctgggattacaggcataagtcaccgcacccggccattataaatttttkgacttccagttatgtgactctggggtcataagcaacttatagaaaagtaaactaaggaatggcaggttattgtttaacaacatatatatatataataatgatatatatatataaaataatgatatatacatata

SEQ ID NO: 615158 - DNA, 462 bp, Homo sapiens
caataatattagtgatgatgatgatgatgaaaatggtagttacaaattgttgggccttgtgtaccatgttttgggatttattatgcaaaactgtctttatacaaatctgtgaggtatatattcttatatcccttctacaaaaaaacaaaaacaactgaggctcagtcagcataagtggcttctttgaagtcacagaactagtgagaggcagagccaatcttcatctctatgaccccaagtttgagctcataaccagcatactgtaccacttctactaccaaggcactaggtacacagcagtgagctgtgaagagggaactactcttgttcttrtgacagtttgactcattttatagtgactaatttaactcattaaggtaatgatatgttaagagactatacgttagaaaataacggtaagttttagcttacttatattttggtttaagtatatgatcctat

SEQ ID NO: 615159 - DNA, 181 bp, Homo sapiens
aaactgcatatcacaggggatttagtgtacggattattttgtcacccaggtaataagtatcgtacctagtaggtagttttttgatccccctcctacacccctcaaccctcaagtargccctagtgtctgttgttttcctctttgtgtctatgtgttctgttgtttagcttccacttgtaag

SEQ ID NO: 615160 - DNA, 582 bp, Homo sapiens
tgtctcctggtgcaaagacccagagggaaaagaggcaggtggtgggtaggcatcaaactttcttagaaactaacaaagttgaaagctctgaatagaaaactttgaaaactctggttactgagatataaagggagccagattgggaaacctctgaagtagaccccaaagaggaatgctaacaccaaagtaatccattcctgggagaacattcacagtaagaagtaaacccataacagataattccccccacctgtttttactttgaacatgtgtctagaggctggaaaactatctcaactgacaaagatgtttatagcacagttaaaaatgtaataatttagcrtgagctagagatgctatccaggaaaccaagaagcagagtaacagacaatacagcggctctatagtatagctaagatgcttcttcaaagcagagtgggtccccagtgaagtgcaagacaggatttcctaggagcttttttcttgtatatacttataaacaaacataatcagatgcccatttttcagatacaaattacagagatgaacttatagatgtattaatgttctcagcaatgatat

SEQ ID NO: 615161 - DNA, 582 bp, Homo sapiens
tgtctcctggtgcaaagacccagagggaaaagaggcaggtggtgggtaggcatcaaactttcttagaaactaacaaagttgaaagctctgaatagaaaactttgaaaactctggttactgagatataaagggagccagattgggaaacctctgaagtagaccccaaagaggaatgctaacaccaaagtaatccattcctgggagaacattcacagtaagaagtaaacccataacagataattccccccacctgtttttactttgaacatgtgtctagaggctggaaaactatctcaactgacaaagatgtttatagcacagttaaaaatgtaataatttagcatgagctagagatgctatccaggaaaccaagaagcagagtaacagacaatacagcggctctatagtatagctaagaygcttcttcaaagcagagtgggtccccagtgaagtgcaagacaggatttcctaggagcttttttcttgtatatacttataaacaaacataatcagatgcccatttttcagatacaaattacagagatgaacttatagatgtattaatgttctcagcaatgatat

SEQ ID NO: 615162 - DNA, 582 bp, Homo sapiens
tgtctcctggtgcaaagacccagagggaaaagaggcaggtggtgggtaggcatcaaactttcttagaaactaacaaagttgaaagctctgaatagaaaactttgaaaactctggttactgagatataaagggagccagattgggaaacctctgaagtagaccccaaagaggaatgctaacaccaaagtaatccattcctgggagaacattcacagtaagaagtaaacccataacagataattccccccacctgtttttactttgaacatgtgtctagaggctggaaaactatctcaactgacaaagatgtttatagcacagttaaaaatgtaataatttagcatgagctagagatgctatccaggaaaccaagaagcagagtaacagacaatacagcggctctatagtatagctaagatgcttcttcaaagcagagtgggtccccagtgaagtgcaagacaggatttcctaggagcttttttcttgtatatacttataaayaaacataatcagatgcccatttttcagatacaaattacagagatgaacttatagatgtattaatgttctcagcaatgatat

SEQ ID NO: 615163 - DNA, 404 bp, Homo sapiens
cttttaactttcttccttatactttcctgttttsaaaatactctatgatgaacatgttagcttttaaaccagaaaagcataaattgttattctttaaaatatttgcagtttgagcctcccattctaaccttctcccatttccaacaaatgggtattggttaatgaaattaacaggctactaatgcagaaagtcagaccttgaggaacacaacaaaaaaaaacaggtaaatgtcaatatcaaaaaacaaaaatataaactctcaactttaaaaaaagaggaagaagtatgtgtgctgggacaaaaatcaaagaaaagaaaggcaagttctgggtcaactttgataaacacttaaagcaaaagccacctccaatctcatggtagagctgagaggaagaaagataca

SEQ ID NO: 615164 - DNA, 404 bp, Homo sapiens
cttttaactttcttccttatactttcctgttttcaaaatactctatgatgaacatgttagcttttaaacyagaaaagcataaattgttattctttaaaatatttgcagtttgagcctcccattctaaccttctcccatttccaacaaatgggtattggttaatgaaattaacaggctactaatgcagaaagtcagaccttgaggaacacaacaaaaaaaaacaggtaaatgtcaatatcaaaaaacaaaaatataaactctcaactttaaaaaaagaggaagaagtatgtgtgctgggacaaaaatcaaagaaaagaaaggcaagttctgggtcaactttgataaacacttaaagcaaaagccacctccaatctcatggtagagctgagaggaagaaagataca

SEQ ID NO: 615165 - DNA, 549 bp, Homo sapiens
aaaaatgggtggccgggcacagtggctcacgcctgtaatcagcactttgggaggctgaggtgggtggatcatgaggtcaggtgatcgagaccatcctggctaacacggtgaaacccgatctctactaaaaatacaaaaaaattagcygggtgtggtggcgggcatctgtagtcccagctactcgggaggccgaggcagaagaatggcatgaacccgggaggcggaggttgcagtgagccgagatcgcgccactgcactccagcctgcgcgtcagagtgagactctgtcttgcaaaaaaaaaaaaaaaaaaaaggcaaaagataggaacagacatttctccaaaggagataaacaaataaacacatgaaaagatgctcaacaacatcatgagccatcacggaaacacaaatcaaaatcacaatgagatgggacttcactccccctacaacggctagaataaaaatgacagacaacaacaagtgttggtgaggatatggagaaattggaacacccatacgtgctggtgggaatcaaaaatggtacagccaa

SEQ ID NO: 615166 - DNA, 570 bp, Homo sapiens
gctgcactacagcctgggcaaaagattaggcccttgtctccataaaataaaaaatagtaataatatgcccaaatccwaaaaactacaattgaatttactgaggacctggaaaatcaaatgttttaagtaagttatttctgttaactttatctcaataaacatgctaaacacttaaaatacagactatataattttaaaaattatgtattaaattgctcaaccacttcttggttgtttttagacaaagtctcactctgtcacccaagctgaagtgcagtggcacaatcgtggcttactgcagcccctacctcccaggctcaggtgatcctcccacctcagcctcctaagtagctgggactacaggtgtgtgccaccatgcccagctaattttttgtacaatcagggttttaccaagttgcataggctgaactcctggactcaagcaacctactcatcttggcctcccaaaatgctgggatcacaggcatgagccacaacacccgccatgctcaaccacatcctaacacagagatattctaggcaaaatagtaatgaaaaatgttaatacat

SEQ ID NO: 615167 - DNA, 557 bp, Homo sapiens
caaattggggggagtcaaaatggttgaatttatgtgcttatttccagagtatacagagcagagtgccaaaatcaactacagatgaaatgtagtttaaaaaaaaataataacatgaatcgccaaggtttttcrtatcagtttgttcttagttttagaaagatagtgttccttatagagaaaaaataattatctaagatgtaataatctcctcaatttcacatcagagagccttattgtttcattatatgaaaaaaaaacctaaaattattagttaccaaaagaacatgtgcaatatagtcccttttatttaaaaacatctgtctacccaatcttcaatttataaatcaggactgagaaaaatgtagaacaatgctcacagaattttatggctgttaattctctagggatgcatttttagtctaacgtttttttcttttaccttctttgtacttttctgtactgcatgtatttatttttacataattcacgtttatcatttataccaaaataactatagcacagttcacagtaaaaacaaaacaacttatttttatcca

SEQ ID NO: 615168 - DNA, 552 bp, Homo sapiens
ttaaaattaggtgttttaaatatattataaaattaattttaattacttttgcaaagaactaaatatatatctaaataaagtatgccaacagaaacaccatacattcattatttccaaacataaacaccaagttttagataaagcactagaaattcctaattatctgtaaaaaaagaaaagacaatgatagataaataacaaaggtttataaacaactagatggaggaaggagaggaagacagaggggagaaaataagggcagaaggaggsagggagggaaagcaagcctttttaaaaacttactctatctttgtgcccaacatatacagaggtggcagatgttcaactactgacagttaggagtaaatgtatttttatgcttagcaggggaaagaatccaaactcagaaaatgaaactggggactacagaagggctctcatactcttaaaaaagaaaccaaaaacagattatgactatggtctggagacacagaagaaattttttaacacaccacagataggatctgggtaaagctgctcatctcaagattc

SEQ ID NO: 615169 - DNA, 511 bp, Homo sapiens
tatcttctgaggactaagaatttcgtctttataaattcattttatatatatctaaaaatgaaaattgatctcatgtgctatatattggaagtagttgactgtgccacacacggtggcttatgcctgtaattccagcattttgggaggctgaggcaggaggatcatttgataccaggagttcgagaccagccttggcaacagagtgagaccctgtttctacaaaaataaaataaaaaattggctgggtgtgatactgtatgcctgtagtcctagctacttgggaggctgacatgggaagattgcytgagcccaggagtttgagactgcagtgagctttgaactccagcctgggccacagagggaagccctgtttccagaaaaataaaaataaataaaaaagaagtagttgactataattgtctaacctaggtattgacacaacaaagcaatgtttggatggcttgttttataacctctttaagagttgtaagcctagctttcccattccagt

SEQ ID NO: 615170 - DNA, 439 bp, Homo sapiens
ttatatcttaccttaccaatacagacagcccttgacttaaaatggtttaccttatgatttttcaactttacaatggtgtgaaagcaatatgcattcagtacactccttgacttatgatatggctamaaccagataaaccaattataagctgaaaatattatgtcaaaaatgcactttcaacttgcaatattttcaacttacaataggtttatcaggacatagccccatcctaagttaaagagcatacattaagccctcaaattataggtggaatttaagacagaataaattttaaaatcataattcaactatatggtgtctacaagagaaacgttttagattaaaaggcacatatattgaatgtaaaagtatggaaaacgatacaacatgcaaacagttaccaaaaggaagctgtggtggctatattaatatcagacaa

SEQ ID NO: 615171 - DNA, 561 bp, Homo sapiens
tctattcaagaattcaatatagatgggtaaaacatcagagtaaccacaacagaaaagagaatgtgtgaactcaaggaaacatcaaggttcaagcaaacagaaaaaaatctttgaagatacaaaaaagagctcaaaatatatatggaatacagtgaaaaggtctaatatgtgtgtaattggaatctcacaaggacaggagagaaagaatgtgcagaagtcatatttgaagacatttttaccacaaattttctaagaatgaagaaaaccaaagccacaggccatggctgacaaaagctttaamaactgaaaaaccaggaaaaggagaaacactaccacattgaaatcatataaaaactgctagaaaccaaaaataaagagaagctataaaaagtaaacacaaaaaggacacactactgttaaagttgcaacaataagagacatgccttctcaatacaaaatacaaaaaacaacatatatcatctttaaaataaagacagaaaagatggtgcaaatcaacagttctatccatctaaaaaatactgttcagaaataaaggcaaaa

SEQ ID NO: 615172 - DNA, 576 bp, Homo sapiens
aatccgcctaaattaaaattaagaggtggccaggcacggtggctcatgcctgtaatcccagcactttggaaggccacggcgggtggatcacctgaggtcaggagttcaggaccagcttgaccaacatggtgaaaccccgtctatactaaaaataaaaagattagccaggtgtggtggcaggcgcctataatcccagctactcgggaggctgaggcaggagaattgcttgaacccaggaggtagaggttccaatgagctgagatcgcaccatkgcactccagcctggacaacaaaagcaaaactctgtctcaaaaaaaaaagaagtaatttaatttctgttcatcaaatgacaccttgaagaaaatcaaaagaaaagacaagtacacagtgagatatctgccatatattaacttactagggattaatattaagaatatataaagagcttttgaaaatcagtaagaaaaaatccaatagaagattgaacaaaaaagacataaacagatagttcacaaaagaagacacatactggctagtcagtgatatgcacataaaaaacaaaataaaatattattt

SEQ ID NO: 615173 - DNA, 576 bp, Homo sapiens
aatccgcctaaattaaaattaagaggtggccaggcacggtggctcatgcctgtaatcccagcactttggaaggccacggcgggtggatcacctgaggtcaggagttcaggaccagcttgaccaacatggtgaaaccccgtctatactaaaaataaaaagattagccaggtgtggtggcaggcgcctataatcccagctactcgggaggctgaggcaggagaattgcttgaacccaggaggtagaggttccaatgagctgagatcgcaccattgcactccagcctggrcaacaaaagcaaaactctgtctcaaaaaaaaaagaagtaatttaatttctgttcatcaaatgacaccttgaagaaaatcaaaagaaaagacaagtacacagtgagatatctgccatatattaacttactagggattaatattaagaatatataaagagcttttgaaaatcagtaagaaaaaatccaatagaagattgaacaaaaaagacataaacagatagttcacaaaagaagacacatactggctagtcagtgatatgcacataaaaaacaaaataaaatattattt

SEQ ID NO: 615174 - DNA, 576 bp, Homo sapiens
aatccgcctaaattaaaattaagaggtggccaggcacggtggctcatgcctgtaatcccagcactttggaaggccacggcgggtggatcacctgaggtcaggagttcaggaccagcttgaccaacatggtgaaaccccgtctatactaaaaataaaaagattagccaggtgtggtggcaggcgcctataatcccagctactcgggaggctgaggcaggagaattgcttgaacccaggaggtagaggttccaatgagctgagatcgcaccattgcactccagcctggacaacaaaagcaaaactctgtctcaaaaaaaaaagaagtaatttaatttctgttcatcaratgacaccttgaagaaaatcaaaagaaaagacaagtacacagtgagatatctgccatatattaacttactagggattaatattaagaatatataaagagcttttgaaaatcagtaagaaaaaatccaatagaagattgaacaaaaaagacataaacagatagttcacaaaagaagacacatactggctagtcagtgatatgcacataaaaaacaaaataaaatattattt

SEQ ID NO: 615175 - DNA, 576 bp, Homo sapiens
aatccgcctaaattaaaattaagaggtggccaggcacggtggctcatgcctgtaatcccagcactttggaaggccacggcgggtggatcacctgaggtcaggagttcaggaccagcttgaccaacatggtgaaaccccgtctatactaaaaataaaaagattagccaggtgtggtggcaggcgcctataatcccagctactcgggaggctgaggcaggagaattgcttgaacccaggaggtagaggttccaatgagctgagatcgcaccattgcactccagcctggacaacaaaagcaaaactctgtctcaaaaaaaaaagaagtaatttaatttctgttcatcaaatgacaycttgaagaaaatcaaaagaaaagacaagtacacagtgagatatctgccatatattaacttactagggattaatattaagaatatataaagagcttttgaaaatcagtaagaaaaaatccaatagaagattgaacaaaaaagacataaacagatagttcacaaaagaagacacatactggctagtcagtgatatgcacataaaaaacaaaataaaatattattt

SEQ ID NO: 615176 - DNA, 516 bp, Homo sapiens
ataaagttttaaaatacaattatgatttttaaattgcattatccaaagtgggacatcatagcatgcaatgtctcaagtttcagtaacaacgtttactgatcatgtagtaggcaggtccccttagaatccatgacccccgtacattcttattatggcataattttaaaagggtatgttatgtacgaactaattaaaagtgaattgggccaggcacagtggctcacacctataatcccagcactttgggaggctgaagcggatggatcacctgaggtaaggagttcgagaccagcctagtcaacatggtgaaactcagtctctatcgaaaagtacaaaaattagctkagtgtggtggcacgcgcctgtagtcccagctactggggaggctaaggtgggggaattgcttgaagcctgggaggcagaggttgcagtgagtcgagatcgtgccactgcactccagcctaggcaacagagtgagacactgtcaaaaaaaaaaaaaaagtgaattgcatatgg

SEQ ID NO: 615177 - DNA, 513 bp, Homo sapiens
aaaatgtaccccagatcacaatttaggttatggcaagttcgccaaataggggcatataagctctacttctcccaatgtagtaaagacatacactagggaatttctggtttgaactagagtccatttggaaaagttatcagaaattaatttgtctctttgatatcttatcttctcagcaaagtwttactggtatgacaccatcaaggagagctttctttatccttagtcttggaacaggcccccagttatgctcccatatttccctctactactattacaacatacatcattcttttcttgcttctaccatttaatgtctgctatcaactaattttaaactgtaagagttttagaataaaggaagtaaaatggtatctatgcagataactgggcaggaaagctttcaggcactggaagaaagtattaccttgaaaggttaaatacctgttatgttcaaggaataaaaacatggtttgtgttgctggagtgaataagaaaagaaggcaaagatga

SEQ ID NO: 615178 - DNA, 513 bp, Homo sapiens
aaaatgtaccccagatcacaatttaggttatggcaagttcgccaaataggggcatataagctctacttctcccaatgtagtaaagacatacactagggaatttctggtttgaactagagtccatttggaaaagttatcagaaattaatttgtctctttgatatcttatcttctcagcaaagttttactggtatgacaccatcaaggagagctttctttatccttagtcttggaacaggcccccagttatgctcccatatttccctctactactattacaacatacatcattcttttcttgcttctaccatttaatgtctgctatcaactaattttaaactgtaagagttktagaataaaggaagtaaaatggtatctatgcagataactgggcaggaaagctttcaggcactggaagaaagtattaccttgaaaggttaaatacctgttatgttcaaggaataaaaacatggtttgtgttgctggagtgaataagaaaagaaggcaaagatga

SEQ ID NO: 615179 - DNA, 591 bp, Homo sapiens
gagccttgttctgtcacccaggctggagtgcagtggcgygatctcggcccactgcaagctctgcctcctgggttcacgccattctcctgtctcagcctcccgagtagctgggactacaggcgcctgccaccatgcccgactaatttttttgtatttttagtagagatggggtttcaccgtgttagccaggatggtctcgatctcctgacctcgtgatctgcctgtctcggcctcccaaagtactgagattacaggcgtgagccaccttgcccggcccgtaacatgaaatttatatgaaatcagaaacacagttacaatgttaaacttcacaaagctaattcatttaaatataaagatcgaaattaaaatataatgaagcacttggaagtagaaaataaacagtctaaaatattttaaaagtgtgggcttaaggaatagcataaaataaaaagagggtgttacacatggctttcaagctagctagaggaattaaagatagcatgttcaaattcccctgattcatccagcgagctaataggatcgagttcatcaagtccccagcttaaagacattttatttttaaggcaagga

SEQ ID NO: 615180 - DNA, 591 bp, Homo sapiens
gagccttgttctgtcacccaggctggagtgcagtggcgtgatctcggcccactgcaagctctgcctcctgggttcacgccattctcctgtctcagcctcccgagtagctgggactacaggcgcctgccaccatgcccgactaatttttttgtatttttagtagagatggggtttcaccgtgttagccaggatggtctcgatctcctgacctcgtgatctgcctgtctcggcctcccaaagtactgrgattacaggcgtgagccaccttgcccggcccgtaacatgaaatttatatgaaatcagaaacacagttacaatgttaaacttcacaaagctaattcatttaaatataaagatcgaaattaaaatataatgaagcacttggaagtagaaaataaacagtctaaaatattttaaaagtgtgggcttaaggaatagcataaaataaaaagagggtgttacacatggctttcaagctagctagaggaattaaagatagcatgttcaaattcccctgattcatccagcgagctaataggatcgagttcatcaagtccccagcttaaagacattttatttttaaggcaagga

SEQ ID NO: 615181 - DNA, 592 bp, Homo sapiens
aaaccttgtgtgaatccttaatttaaattcataattcaaaatcattggcttgccaaaatggggtaaaaaaaatcaatgttagtgaaataaatgtgtaaacacttgtgcttccattgatgtagattaacattattttcaaaaggtgaaatggagagaatgagaaaaatagaaattayagaaatgtagactatatgtgcttgttagttataacttagtttaaagtatattttaataagactgctgtacttccacaaatatagagatttataatatttgatctaaaatactgagcatagttatagttttgccacagtaaaatggtaatatgtttatagttttaatgttaaacatgaaaatatacgtgactcttctcattttagataaaaatttataccagtatgatttagtacagcattttatgttttaataagatcatccatgtaaaccttagtcatattataacatgtctatcattaatagtaaaatactgttttaaaatattaatatttacctttataattttatacttaatttgcatttttataaataaatacattgttatcaagttcaattaagtggatctaattattaa

SEQ ID NO: 615182 - DNA, 529 bp, Homo sapiens
aaagtattactaggcgcggtggctcacgcctgtaatcctagcactttgcaggccgacgcaggtggatcacctgaggtcaggagtttgagaccagcctggccaacatgacaaaactctctactaaaaatacagaaattagccgggcgtagtggtgcgtgcytgtaatcccagctacctggtaggctgagacaggataatcccttgaacacagtgggcagaggttgcagtgagccaagattgcgtcattgcactgcagcctgggcgccacttcactccagcctgggtgaaggagcaagactctgtgtcaaaaaaacaaaaaacaaaaaacaagcatttttttcaagaaggaatgaaagtagccatatttgtaagaacctagatgtttgagaatatgattcaacagggattaaatgggctgggtataattttattgggttacacccttttttcctcagaactttctagatgttactcatttatagaatcagtggttgctgtgaggatgtgttacagagaggtgtctgaattc

SEQ ID NO: 615183 - DNA, 549 bp, Homo sapiens
aaaaagtttttgtagaacttaagctgattttaaattcattttgaagagtaaaggaccaagaagagactcttgatgaacaagaaggtgggaaacttgttcaacatgcaatcaagactactaaaatgtaactaagacagcatgatactgatacatttactgaaggaacagaagaaaaagcctagagaaatatccctatgtttacgtacattggatttacaataaaggtggcacctttgaataaagtaaggaaaaagttaatgacaaatattggggaaaaattggtaaacttaatccctatctcacatcacatgaaaaaatcaatgctagacattgatgtgaaaatcaaaacagaaaaatataggaaatcagaaaaatataggaaaagacaacatggaaggtagcataggatatatctacattgcagtaagcaatgcattatacaggacacaaaatgtgctattcataaacaaaaaattggtaagtttggccacattaraattgagatgttatattcttcagaagactccagtgagaaaagaaaaaaggcac

SEQ ID NO: 615184 - DNA, 576 bp, Homo sapiens
ctacagattgctttgggtagtatagacattttaacagcattaattcttctcaaccaggaacatgaactctctttccatttatctttgtcttctttaatttccctcataaatattttatacttttcactgtacaggtcattcatgtatttggttacatttattcctaagtatattattattactattaatttgctcttgtgaatggaattggattcttcttttttttgtaaaacattaacaaaagatttttttatttcttctaagacaaaaaatgggacaaatgtacagaacgtgcaggtttgttacataggtatacatgtgccayggtggtttgctacacctattgactcattctctaagtctcctcacctcactcccatccccaacaggccctggtgtatgttgttccactctctgtgtccatgtgttctcattgttcaactcccacttatgagagaacatgcagtatttggttttcttggcctgtgttagtttgctgagaatgatggcttccagcttcacccatgtccctgaaaaggacattatctcattcctttttatggctgaatagtattc

SEQ ID NO: 615185 - DNA, 576 bp, Homo sapiens
ctacagattgctttgggtagtatagacattttaacagcattaattcttctcaaccaggaacatgaactctctttccatttatctttgtcttctttaatttccctcataaatattttatacttttcactgtacaggtcattcatgtatttggttacatttattcctaagtatattattattactattaatttgctcttgtgaatggaattggattcttcttttttttgtaaaacattaacaaaagatttttttatttcttctaagacaaaaaatgggacaaatgtacagaacgtgcaggtttgttacataggtatacatgtgccatggtggtttgctacacctattgactcattctctaagtcycctcacctcactcccatccccaacaggccctggtgtatgttgttccactctctgtgtccatgtgttctcattgttcaactcccacttatgagagaacatgcagtatttggttttcttggcctgtgttagtttgctgagaatgatggcttccagcttcacccatgtccctgaaaaggacattatctcattcctttttatggctgaatagtattc

SEQ ID NO: 615186 - DNA, 576 bp, Homo sapiens
ctacagattgctttgggtagtatagacattttaacagcattaattcttctcaaccaggaacatgaactctctttccatttatctttgtcttctttaatttccctcataaatattttatacttttcactgtacaggtcattcatgtatttggttacatttattcctaagtatattattattactattaatttgctcttgtgaatggaattggattcttcttttttttgtaaaacattaacaaaagatttttttatttcttctaagacaaaaaatgggacaaatgtacagaacgtgcaggtttgttacataggtatacatgtgccatggtggtttgctacacctattgactcattctctaagtctcctcacctcactcccatccccaacaggccctggtgtatgttgttccactctctgtgtccatgtgttctcattgttcaactcccacttatgagagaacatgcrgtatttggttttcttggcctgtgttagtttgctgagaatgatggcttccagcttcacccatgtccctgaaaaggacattatctcattcctttttatggctgaatagtattc

SEQ ID NO: 615187 - DNA, 576 bp, Homo sapiens
ctacagattgctttgggtagtatagacattttaacagcattaattcttctcaaccaggaacatgaactctctttccatttatctttgtcttctttaatttccctcataaatattttatacttttcactgtacaggtcattcatgtatttggttacatttattcctaagtatattattattactattaatttgctcttgtgaatggaattggattcttcttttttttgtaaaacattaacaaaagatttttttatttcttctaagacaaaaaatgggacaaatgtacagaacgtgcaggtttgttacataggtatacatgtgccatggtggtttgctacacctattgactcattctctaagtctcctcacctcactcccatccccaacaggccctggtgtatgttgttccactctctgtgtccatgtgttctcattgttcaactcccacttatgagagaacatgcagtatttggttttcttggcctgtgttagtttgctgagaatgatggcttccagyttcacccatgtccctgaaaaggacattatctcattcctttttatggctgaatagtattc

SEQ ID NO: 615188 - DNA, 575 bp, Homo sapiens
  misc_feature 65, 66: n = A,T,C or G
aagcttctagaggaaggatcaggcagcaatatttgctgttctgcaatatttgctgttctgcagcnnctccactggtgatacccaggcaaacaggtctggagtggacctccagcaaactccaaaagacctgcagctgaggttcctgactgttagaaggaaaagtaacaaacagaaaggaatagcatcaacataaacaaaaacgacatccacaccaaaaccctatctgtaggtcaccaacatcaaagaccaaaagtagataaaaccacaaagacggagagaagtcagagcagaaaagctgaaaattctaaaaaccagagcgcctcttctcttccaaaggatcgcagctccttgccagcaacggaacaargctggactgagaaggactttgacaagttcacagcagtaggcttcagaaggtcggtaataacaaacatctccgagctaaaggaggatgttcgaacccatcgcaaggaagctaaaaaccttgaaaaaagattagatgaatggctaactagaacaaacagcatagagaagaccttaaatgacctgatggaactgaaaaccatgacactaga

SEQ ID NO: 615189 - DNA, 562 bp, Homo sapiens
tgtttttccagaaatttattttttggatgtaactttacctaataaccactcgttggtatacattttaataataaaaattcacaataggttgaattaaaaagctaatactaartaagtaccctttttccattctccatagacaataggctgaatcagagtagggttggcttcatgaccaagaagtattaagatttctcacaagactcagaagggcactcattatgttaaaggaaggttgcttcctagcttggctgacaacataattcaccccaatgactcagctatcctgtgtctctagataaaattcttgtgtatagtcattatgggggtcatggcttggagtgcagtggcacgatcatggctcactgcaacctccacctcccaggttcaatcgattctcctgcctcagcctcccgagtagctggaattacaggcatgtgctaccacgcccaaataatttttgtatttttcagtagatacggggtttcaccatgttggccaggatggtctcgatctcttgaccttgtgatctaccccctcagcctccaaaagtgctgtgatt

SEQ ID NO: 615190 - DNA, 585 bp, Homo sapiens
cgaaccaagaccacataaactttttttttcccaaaagttttatcattctggattttaagtttgtatctacgatctactttgagttactatttttataaggtgtgagatttaggtcaaagttcattgtttttggtatatggatgtccagttgttccagtatcatttgttgaaatatgatgttgttaccgtcctgctcaaaaactttcggtgctttctccattgcacttggaataaaatccaractccttttgtatggtctgtaaagcatactgctttcatgcctacttatttctgaaacctcattttgtgttgtattcccttttgtctgtcagacttcagcctccctggcttctcttttctgtgaattctcaacactcttttccagcgtagagcctttgcacaagtttgtgtcctcaacctgaaatatttttccattatgttgttcaatagttgccttatattggttcccctaagtttattttttattctctcccctggcattctgcccttttccttaatcatacttattacaatttttaactttatagttatctctaaactaatcactcattgtctggatttccc

SEQ ID NO: 615191 - DNA, 570 bp, Homo sapiens
gcagagatgaacaaaagtcatacccaagaacattctatagctaccttccttttcattgtctccaaaatacgcgtcaaaacacactaaagacaccacagtgggcatcagcccatgctgtggtgtgtgctgcaaacatggactggagctggtagttttaataactcttccttctttattagaaaatgtgcttgggaataggaacatttatgaatgtttgatgtgtttagaaaacatgaatattcagctttaagtctgtgcatgcaatgttctattatgtacatacagactgagcgctgctcagtgaggacygctgtactgcccacctgggaatgaactgatgtggaggtcgcggtggctgtttctggaagctctgccatgtgtggtggcttgatctggaaacccaagatcaagtctttggcaaggtaggttctgtcctggagcctcttcccttggtttgcaggcagccacaatcttgctgtgtgctcacaggacctcttgtgtgtgtgtgtgtgtgcgtgcgtacgtgtgtgcgtgcatgcgcccatgtgcacgtgaaggggcttcctggtg

SEQ ID NO: 615192 - DNA, 570 bp, Homo sapiens
gcagagatgaacaaaagtcatacccaagaacattctatagctaccttccttttcattgtctccaaaatacgcgtcaaaacacactaaagacaccacagtgggcatcagcccatgctgtggtgtgtgctgcaaacatggactggagctggtagttttaataactcttccttctttattagaaaatgtgcttgggaataggaacatttatgaatgtttgatgtgtttagaaaacatgaatattcagctttaagtctgtgcatgcaatgttctattatgtacatacagactgagcgctgctcagtgaggactgctgtactgcccacctgggaatgaactgatgtggaggtcgcggtggctgtttctggaagctctgccatgtgtggtggcttgatctggaaacccaagatcaagtctttggcaaggtaggttctgtcctggagcctcttcccttggtttgcaggcagccacaatcttgctgtgtgctcacakgacctcttgtgtgtgtgtgtgtgtgcgtgcgtacgtgtgtgcgtgcatgcgcccatgtgcacgtgaaggggcttcctggtg

SEQ ID NO: 615193 - DNA, 640 bp, Homo sapiens
tcctgtttttagggcaccagtcatgttgaattagggcccactctaactaatgaccataattttaattmtttctttgaagatcttatctccaaatacagatgcattgtcaggtatttggagttaggacttcagcatatcaatttgaggggatactactcagttcacaacagttacccattgatatatcatctatagtcattctgtcatcattttacatccagttattctattgcctctgatactactctaatccagatgcttataaacaacagtgttttcttttaaaggcagactcttgttcagaaattcttcttacatgtaatccttccaattagaattatttctcaatagttcttttcttgatttataaaagtttattataaattgacagttataattgtatacatttatgaggcataagatgatgttataatattgcaaatagtatgtggtacaattaaatcaagctagttaacatccccatcacctcaaatcttaacttttttgtggtaagaacatatgaacttaatatcttaggaattttgaaatgtacagtattctgttattaactatattcactgtgctgtgcagtataactcaaaaaaaagaaaaaagcacacacttatggtctgagatttta

SEQ ID NO: 615194 - DNA, 562 bp, Homo sapiens
tggaagcaatcaagatgtctttcagtsggagagtggataaataaagtgtggaacatccagacagtggaatatcactcagcactgaagagaaatgtgctgctaagtcatgaaaagacatcgaggagcccttaaatgtatgttactaagtgaaagaagtcaatctgaaaaggttgcatgctatatgattccaaatatatgacattctggaaaaggcaaaatcatgaagatggtgaaaagatcagtggctgccaggggttggtggagagagtgatgaataactgaagcacaggtgctttttagcatagtgaacctactctccatgaggctacaatagtggatccatgtcattacaaaagtgttcaaacccacataatgcacaacaccaggagtgagccctcatgtacatgatggtctaagtaatgatgacctgtctaggtgggttcatcaattgtaacaaacgcaccctctggtggggataacgactggggaggctgtgcgtgtggggggatggaggccatacaggaactctctgtacctgcttcttgattttactgtgaaccta

SEQ ID NO: 615195 - DNA, 668 bp, Homo sapiens
ttttagtttgctcactgaattttcacatgcagcccttttctactttggaaatctgtaggtgaaacagctctaamttattccttgatttaaagtaagttggttgtcctcaaaacttcagctcttgaataggttcgagaaaattcagaaactcaccactcagccctctttcactgtaggcttccaaagggtgctcctcctagctctctgcatccccaagcagaaaccggaaacatttgtcatctgtttgtacctcaaaaacattcattgcttcactgcaaaaagatcttgaaaggatttatcatgaagaacaaaaaacccagtaaaatagtattaattttaatattgacaacaacattttagttgactacttaatattgatttagcattttctcttactagacactgtgcaagatactttacatatctaatgtttatttttattttttgagatggagtctgtctatcacccaggctggagtgcagtggcacgatctcagctcactgaaacctctgtctcccaggttcaagcaattctactgtctcagcctcccaagtagctgggattacaggcgtgtgccaccatgcccagctaatttttatatttttagtagagaggggatttcactatgttggccaggctgggctcaaactcctgacctcaaatgatc

SEQ ID NO: 615196 - DNA, 668 bp, Homo sapiens
ttttagtttgctcactgaattttcacatgcagcccttttctactttggaaatctgtaggtgaaacagctctaaattattccttgatttaaagyaagttggttgtcctcaaaacttcagctcttgaataggttcgagaaaattcagaaactcaccactcagccctctttcactgtaggcttccaaagggtgctcctcctagctctctgcatccccaagcagaaaccggaaacatttgtcatctgtttgtacctcaaaaacattcattgcttcactgcaaaaagatcttgaaaggatttatcatgaagaacaaaaaacccagtaaaatagtattaattttaatattgacaacaacattttagttgactacttaatattgatttagcattttctcttactagacactgtgcaagatactttacatatctaatgtttatttttattttttgagatggagtctgtctatcacccaggctggagtgcagtggcacgatctcagctcactgaaacctctgtctcccaggttcaagcaattctactgtctcagcctcccaagtagctgggattacaggcgtgtgccaccatgcccagctaatttttatatttttagtagagaggggatttcactatgttggccaggctgggctcaaactcctgacctcaaatgatc

SEQ ID NO: 615197 - DNA, 668 bp, Homo sapiens
ttttagtttgctcactgaattttcacatgcagcccttttctactttggaaatctgtaggtgaaacagctctaaattattccttgatttaaagtaagttggttgtcctcaaaacttcagctcttgaataggttcgagaaaatycagaaactcaccactcagccctctttcactgtaggcttccaaagggtgctcctcctagctctctgcatccccaagcagaaaccggaaacatttgtcatctgtttgtacctcaaaaacattcattgcttcactgcaaaaagatcttgaaaggatttatcatgaagaacaaaaaacccagtaaaatagtattaattttaatattgacaacaacattttagttgactacttaatattgatttagcattttctcttactagacactgtgcaagatactttacatatctaatgtttatttttattttttgagatggagtctgtctatcacccaggctggagtgcagtggcacgatctcagctcactgaaacctctgtctcccaggttcaagcaattctactgtctcagcctcccaagtagctgggattacaggcgtgtgccaccatgcccagctaatttttatatttttagtagagaggggatttcactatgttggccaggctgggctcaaactcctgacctcaaatgatc

SEQ ID NO: 615198 - DNA, 334 bp, Homo sapiens
acaatgcttccctccagtttttatgggaccataattcgttttccaccacaggcctgaaagcgctccaaatgtccacttgcagacactacgaaaagcatgtttcagaactactctatgaaaagcaatgtgaaactctgggagttgaacacaaacatcacagagaagtttctgaggatgcttctgtttagtttttatgtgaagatattcccgtttccaaagacatcttcggagaggtccacatatccacttgcagattccacaaaaagagagtttcaacamtgctctatccataggagggttcaaatctgtgagttgaatgcaatcatcacagaga

SEQ ID NO: 615199 - DNA, 356 bp, Homo sapiens
tgcacattccacaacaagagtgtttccaaactgctctatcaataggaatgttcaactctgtgaggtgaatgcaatcatcacaaagcagtttctgagaatgcttctatctagtatttaggtgaagatatttccttttccaccacaaaccacaaagccctccaaacgtccacttgcagattctagaaaaagagtgtttcatagctgctctttccaaaggaaagttcaactctgggagttgaatacaaacatcaccaaaaagttcctgagaatgcatmtgtatagtttttatgtgaagatgattccgtttccaacgaaatcttcaaagaggtctacatgtccccttgcagatgccacag

SEQ ID NO: 615200 - DNA, 483 bp, Homo sapiens
caggagcctgcaatcccagctatcaggaggctgaggcagaagaatcgcttgaatccaggaggcagaagttgcagtgagctgagatcactccattgcactccagcctgggcaacaagagtgaaactccatcttaaaatttttttttttacaaaatatatgactggcaatggctttgaatgcagaaaatatgcaatgtgaaacatttacaagcactcctgaaaacaaatttgcgtaatttactaaacatgaataaattcatgttctaagactcagagatactattttcaaatctatttcccaacagaaatatgttcacatatgcttgaagatacatgtataagaatgcttaagacagtattttttattcaagccataaactggaaaaattacctcaaaagtgattacagacaaatatattgtggtacgttcatttagtgsagtacagcaatcacaacaaataaaataccactcatgcaacaaaat

SEQ ID NO: 615201 - DNA, 444 bp, Homo sapiens
ttttcctccttcgttgagacctagcaaaattatttttaatcgcatgtgtatacagacccacccttatattcattatcacattatttattaaatgtgcattcttaatgtaaatgccaaatagtattcttggaatcagatctcaaaaaaaaaaaataaaatcccaaagaaattgtgagaatgtaaagtattgttggagaaagtacatatctttgatcttcattgaatttccacactatcctagaatgtgatttatttttatctcacgcctgaagtaaggaaattattttgttgtggattcactgagataagagttggaggtgtgtggccccaacttsaggagaaaaacttgtgattgcagctcagaacagagacctcgcccaaggatctgcttctctttacacaggactgttttccttttgaggctacacctcccttctgtgaatt

SEQ ID NO: 615202 - DNA, 611 bp, Homo sapiens
gtgccactttttagcttgcagagatatcgacccccttagtagatttagagccaggctggtgagctctgatgccatgagagtcttggcatcagagcagctgaaacttggagggaacatgggataaggagtcagtccaaagactcttcccatggtctaggtcctctctttttaaattgaggtaaaatagacatagcatgaaattaactttttaaaagtgtacaattcggtagcatttaggacattcacaatgttgtgcaactatcaccactatctagttccagaactttttcatcatcccaaatggaaacccccagctcctggcaacacatttatctaccctctgtctctatgaatttgcttattctgaatacttcatataaatgggatcatacaatatgtggcgttttgtgcctggcttctttcacccrgcatcatgttttctgggctcatccatgttgtggcatgcctcagtactccgttccttttgtggccaaataatattccattgtgtggacgtgccacacttggtcagtccattcatctgatggacatttgggttgtttctgtcttttggctattgtgaatagtgttgctgtgaacatttgcataca

SEQ ID NO: 615203 - DNA, 611 bp, Homo sapiens
gtgccactttttagcttgcagagatatcgacccccttagtagatttagagccaggctggtgagctctgatgccatgagagtcttggcatcagagcagctgaaacttggagggaacatgggataaggagtcagtccaaagactcttcccatggtctaggtcctctctttttaaattgaggtaaaatagacatagcatgaaattaactttttaaaagtgtacaattcggtagcatttaggacattcacaatgttgtgcaactatcaccactatctagttccagaactttttcatcatcccaaatggaaacccccagctcctggcaacacatttatctaccctctgtctctatgaatttgcttattctgaatacttcatataaatgggatcatacaatatgtggcgttttgtgcctggcttctttcacccggcatcatgttttctgggctcatccatgttgtggcatgcctcagtactccgttccttttgwggccaaataatattccattgtgtggacgtgccacacttggtcagtccattcatctgatggacatttgggttgtttctgtcttttggctattgtgaatagtgttgctgtgaacatttgcataca

SEQ ID NO: 615204 - DNA, 590 bp, Homo sapiens
taatgggtactaggcttaacacctgggtgatgaaattatctgtacaaccccccccccacgacacaagtttacctataaaaaaaaacttgcccatgtacccctgaacttaaaataaaagttaaaaaaawgaaaataaataaaattttttaaaaaagtcatacctggatgtcattgtgccccttccctgcactgcttccccagggggcttctctgcacacctagttctgcagcccctccccagccattgctgggtgatatggtttggctctgtgtcctcatccaagtctcacgttgaattgtaatacccagtgttggaggtggggcctggtggcaggtgattggatcatgggggtggagttctcatgagtgttttgtcacctccccacaccttggtactgtatagtaagtgagttctcacaagacctggttgtttaaaagtgtatggcacctccctacctctctcttgctcctgctcgagtcatgtaagatgtgcctgcttccccttcaccttccgtcatgattgtaagtttcctgaggtctcctcagaagcaggagctgcttctgcttcctgtacggcctgcggaacgatg

SEQ ID NO: 615205 - DNA, 590 bp, Homo sapiens
taatgggtactaggcttaacacctgggtgatgaaattatctgtacaaccccccccccacgacacaagtttacctataaaaaaaaacttgcccatgtacccctgaacttaaaataaaagttaaaaaaaagaaaataaataaaattttttaaaaaagtcatacctggatgtcattgtgccccttccctgcactgcttccccagggggcttctctgcacacctagttctgcagcccctccccagccattgctgggtgatatggtttggctctgtgtcctcatccaartctcacgttgaattgtaatacccagtgttggaggtggggcctggtggcaggtgattggatcatgggggtggagttctcatgagtgttttgtcacctccccacaccttggtactgtatagtaagtgagttctcacaagacctggttgtttaaaagtgtatggcacctccctacctctctcttgctcctgctcgagtcatgtaagatgtgcctgcttccccttcaccttccgtcatgattgtaagtttcctgaggtctcctcagaagcaggagctgcttctgcttcctgtacggcctgcggaacgatg

SEQ ID NO: 615206 - DNA, 478 bp, Homo sapiens
tttagggttggctggtgttcttgctgttcagccagggcacttcaggctcactgttgaaagctcattccatgaaatccaaaacatggagctgcatggcctctgacaaagtgarttctcactgaagtccattgaaaaatgaaagctcagaagaggcttgcagcttgccactctgccaaaacagcagcctctatcggcaccccaaaccccacccctgagaaaagccaggtgagcctgccccctttattaggcatccttatgaaagtcagtgagtgtacatgccagcagctgtccagccacagacttggcatagcaaaagtggcatccgctccagcagtggcggcctgctgggatctactttgttattgagtagtcagttggtttctagaattggaattgatcagggaccatttgcttgggatgcagttgatgagtgctggaaaaggtgtgtgtatacgggctctcatgtaggagaggtgca

SEQ ID NO: 615207 - DNA, 536 bp, Homo sapiens
ggggccttttctcattgtttaatatctccccaacctgaggatgcatcttcagaggaaaatttcttatttagataactttatacttttttaaatttttggattatgagtcgttctcgttaaagacaaacaagcagaaatgaagagaatagaaagggaattgccagtcatcccaaataaatgaccactccaaattgttgggtttaggttcttccaaattatttttgtgtacacatagcaatgtgtgaragtgtgtgtgtgtgtgtgtgtgtgtgtgtaaaaataaatggaacaatgaatacgatgcctacaatgactgttctgaaacttgtgctttcccaaaaacagtattttaaacagctccccaagaaaacacatccagatctacttctttcctgtaagggctctgttgtattcaattttaccactgcagcctgatgcatttaaccaagactagaaggcagcctaaaagttcaattctatactatggtattccttcgttaaaatctatgtgtctgtagacaggaaagaattaaaac

SEQ ID NO: 615208 - DNA, 620 bp, Homo sapiens
taggtggtatgggccaaacgaagctgcctaaagaaaaggggaaaggtgtcaagagaaggaagmcttagtgctggcaaccaacagtatttgttgcaatcaatctcttggccatcctcattcatacacaccttccttcccacgcatacaccttccaaaatgcccacacttagggaaaacctatttacccctttcccaaagggatccaactccaatccggaaaccctaggtgatgtgtcatcctctgaatttggtcagtatatagctcttcatgtttcagggaccactggtcaccatgctcaccttggcatagaaagtaagagtgcaataaaaagaaaaaaaaatttcaattgggaaagaggaagttggaaagcagcacacggtggtcactgatccatcatccatatcacatcctgctggacagcagtagcaaggcttgaccaggggtcagactcagtttcctattctgtataatgagaggattggattaaattagtggttctcacattggaatgtggcctggagagcttgttaaaatgcagattactgggttccatccccagagtttctgactccacagatacaggtggggccctggaatttgcatttgtaatagatttcca

SEQ ID NO: 615209 - DNA, 604 bp, Homo sapiens
ttcagtcattggccgggagtacagcccaggccaagtgcagcaaaaatgatggatctaaggggtaggctgctggaggcaattatgyttcccatggcaggagatgtcagcagccactggtatggtcaccacatccttccattggtagttgtgggtgggaaggcagagtccctggcaggcagtagacagctacaggaacagaaactggtggtagaattagactgactactttggataacaaagccaaggctggcttgactggctgatagctagactatttctttgttactttgtcactcagtgtttagattgttgtttttggggcggtccattgtttgtcaaattccccatctgaacccaggtctggaaaaataaaaccctatgcatttggaagaactttaaaatgaattagcttttaggctttagttgccatcataagcatctagagatattcaggcctcggagttggggcagactggagaaactaaagttatttgagaaataagcacactgtaatatttggcttcctaattattctacaaggagtctaagttttgcctgccttgtgcctatgaatcactatttcttaattttcttagtttcacag

SEQ ID NO: 615210 - DNA, 583 bp, Homo sapiens
agattcagtctcttgactgtgactgactgggagctttatagctgatgcttgtgtcttttctccattttatttaattaggaaaagaaactgcttatcacacactctaagtgtgaggtacaacctccacaggaaaggttgttaggaacatttcaacttctagaagtttctaaacataaggtaaatccatctttgtccttgggatcactgcacatctcagaaaggcaaataaatcagtaattggtgggcataattactagctcatggactgacaaggtctacactatttcgaatctcacagaagtaagccatgggacagatagagtctgatagtggtgccccgtttcctggaggtcacacttactcatccccctggaccctgggcttctcatgattgtcagagagtttgctggaaccaggtcagcccagtttcccttcccctgaaaaatcctccaatggctcgcaccaagactagagatgcaagtgcaagcacatccaccctctcagcagccaggttttgygttccataatgtcacgtacccccagtcataccaatctccttggagctctccagacaggctgccat

SEQ ID NO: 615211 - DNA, 553 bp, Homo sapiens
ttttttcttttccaaaaagcagagatcagccagtacaaaatggtggttttcccatcctgggtatatcaggcccagatcatcaattattattgcagcattctatatttgctctcatagatagtgaaagctttgctatattaatgaggaatttttgatttcaggctgtgccttctttgctcgtctcagctcttggctcttcctaaaaactgtattagccaggaaactgagcccactgattttttaatctatccttaaccctgccctggaacacttagcaatttaggcatgtggcaggaagaactgaaatttytaagccgttcactcctgagactaataccgagtcctcttcatttatccttgacctttttagttttcagccttgctccctaggggtacttccatgaagacagttgcttcctgccccatattaacaaccctcagtgaatgtcacagtagagtaacagcgaattgcaaataaagacggccaacaatcatttggcatttgaggaaagccatagcataaaacagggtcactgaacttaataaaaaggaa

SEQ ID NO: 615212 - DNA, 619 bp, Homo sapiens
tatggttcaaaccctgtgaagcagtagtytgagctgtatctggggacctttgagatgaggctggagccacagcagttgggatgcagggagcagcatcccaaagctgcacagggcagcagggccctaggcctggccctgaaattattctttccttccaggcctctgggcctgttttgggaggggctgccacgaaggtctctgaaattctcttgaggcctttttcctattgtcttttctattagtgttttggccccttttagttatggaaatgcctctagcaagtggttactctgcatcctgctcgaattccttttccgaaaaagctttttttttttctttgtgtgtcacatggcaaacctacaaattttcccagcttttactcactactttccttttacacatatacactgcaactttaggtcatttctttgctcccacatctgggcataggttgttagaagcagccaagacacatcttaaatgctgcttagaaatacattctatcagataccctaggggatcactctcaatctcaagcttcagcagatccctagggcataaaacgaacgaaggcaatttcattgctaaggcataacatgtgtgaactttgcttcggttt

SEQ ID NO: 615213 - DNA, 619 bp, Homo sapiens
tatggttcaaaccctgtgaagcagtagtttgagctgtatctggggacctttgagatgaggctggagccacagcagttgggatgcagggagcagcatcccaaagctgcacagggcagcagggccctaggcctggccctgaaattattctttccttccaggcctctgggcctgttttgggaggggctgccacgaaggtctctgaaattctcttgaggcctttttcctattgtcttttctattagtgttttggccccttttagttatggaaatgyctctagcaagtggttactctgcatcctgctcgaattccttttccgaaaaagctttttttttttctttgtgtgtcacatggcaaacctacaaattttcccagcttttactcactactttccttttacacatatacactgcaactttaggtcatttctttgctcccacatctgggcataggttgttagaagcagccaagacacatcttaaatgctgcttagaaatacattctatcagataccctaggggatcactctcaatctcaagcttcagcagatccctagggcataaaacgaacgaaggcaatttcattgctaaggcataacatgtgtgaactttgcttcggttt

SEQ ID NO: 615214 - DNA, 314 bp, Homo sapiens
cttctggatcttatcccaaggccaccaaggtggtacctctgtaactcttcaagatccacaacattaytaaacttggggtgcccacttgtgcagattcagctgcagtaactaaaaacttagactgcaatacccaagactcttcaaatatttggaaaaacttcacaataataatgggtacaaacaagtggtatctctacaagtttgcaagtgctgcaatgttactgggcttgaggtggcccctaaagcagaaacagcttagatcacaacactcaaatccttttaaatacctggaaagcattcccaagaaggacagc

SEQ ID NO: 615215 - DNA, 351 bp, Homo sapiens
aggatgatgtctgtcttctcacagctccatcaggcagtgtcccagtggggattctgtgtgggggctccaaacccacatttccctttctcactgctctaggagaggttctccatgagggggtccacccctgcagcaaacttctgcctggacattgaggaatttccatacatccactgaaatctaggcagaagttcccaaagctcaagtattgacttctttgcacccacaggctgaacrctatgtgtaagcctccaagtcttagggctttcaatggcctgagctgtatgttggcccctcttagccatgactgggatgaaagacacaaactcccaagactgcacaaaacagcaa

SEQ ID NO: 615216 - DNA, 635 bp, Homo sapiens
cttatcttctagaaatacatgatggaaatacacgacggaatagttaaagatgaaatgatatgacacttccatgatgagataaggtataatgaaaagcagcctatccaaaggcttgggacatagtaggagctaaataaccatagctgctattattagagttaccaaataatgttgccaattttggatggaataagtttcatatttgagtgataataatattttactaagtcatttggttttgagatttatttgatactgctatttattttcttagtgttacaatattataacttttttgggatctgagtattttatcataagtagtcaaatagtgtttgttcagatgtatatagtcatccatcagtatctccaaagggttggtgccagcatccatgcagataccaaaatctgcagatgttcaagtcgcttatataaaagggtgtagtatttgcacatgacctatgtacatccttccgtatactttatttattttattattattattatttttgagacagagtctcgtgctgtcacccaggagtgcagtggtgcgatcttggctcacwgcaacctccacctcctgggttcaaatgattctcctgcctcagcctcctgagtagctaggactacaggcg

SEQ ID NO: 615217 - DNA, 602 bp, Homo sapiens
attgctggattataaggtagctctatttttagtttttgtgaaaacttctatattgttctccatgggggttgtactaattaacattcccacyaacagtgtgtgagggtatcttgttctccacatcctcaccagtatttattatagcctatcttttggataaaagctatttttactagggtgagatgataccttattgttcattttatttttcaattggttactttttcattcattcagtagtccacatatattgactgaacacctatcatagtccaggccatgttctatgtgctcattatggattagaaaataacatccttaattctttgttcttcacttctagtgtgaagagtctgacagtataaacacacacaataattttacctgattataagttcagtacagtgaattgacagaatatgttgtcatacaaatgacttggttatcagttaagactggtgagcaaagaatttcactttgaagaagaaaccttgaagctgagaccttgagtgagatgatccaactgtttcttaattcatatctcctagtttttaccacatatattatagaaatgtcttattttttatatttggaggatgtaa

SEQ ID NO: 615218 - DNA, 602 bp, Homo sapiens
attgctggattataaggtagctctatttttagtttttgtgaaaacttctatattgttctccatgggggttgtactaattaacattcccactaacagtgtgtgagggtatcttgttctccacatcctcaccagtatttattatagcctatcttttggataaaagctatttttactagggtgagatgataccttattgttcattttatttttcaattggttactttttcattcattcagtagtccacatatattgactgaacacctatcatagtccaggccatgttctatgtgctcattatggattagaaaataacatccttaattctttgttcttcacttctagtgtgaagagtctgacagtataaacacacacaataattttacctgattataagttcagtacagtgaattgacagaatatgttgtsatacaaatgacttggttatcagttaagactggtgagcaaagaatttcactttgaagaagaaaccttgaagctgagaccttgagtgagatgatccaactgtttcttaattcatatctcctagtttttaccacatatattatagaaatgtcttattttttatatttggaggatgtaa

SEQ ID NO: 615219 - DNA, 544 bp, Homo sapiens
ctctcttgagcttccttgtgggataagatgtgtatgatgtgggggaaactataactgatcttggaaaaattgaaaatagaaggtccaactggttaccagggaaaaagaaaagaaataagattctaagtttgttggactaaaaaagggacgtctaaaaggcccagttaaggttatcagaaagcaaatatggtatgatctcatctcagcttgggtagtcaaagaaaatatagtttggcaacctaatgccattattggtggacattcgkaaagacttaactcctgctcagcagcttaggaccatctcctgtgccctgtcagaggaggaagaagaaggaaaagaaaccccaggtgaaagaattccagtctctgcattccaggggcagactcctcccagcctagagactaggggtgtggtcaagttttcctccatgtgcaagccgtaggggctgaccagaggccccatgtggagctcacaaaccattggtacccccccaaacaagcagagaaccttagctttagtaccataatttatggaagtacagaa

SEQ ID NO: 615220 - DNA, 431 bp, Homo sapiens
cctccacctggtctctcccttgacatgtggggattatggggattgtaattcaagatgagatttgggtggggacacaaagcctgactatatcaggttcaattcaatttttacaagaaacactgtactaaataagaaaagcatgtgtgccttgtttgcatcccactggctaccagttcaatatccatgaaatacagaaataatacaaaaaattctttattctccytatatccaagcagtcttttatataagacatctataggtttttgtctgattaaatagtaaatcaatatacagcaacatgtcaaactctaactagaaacacaaagaaatatgagactatatcaaaataaaaattttattatataggcaagttcaaaaaagaaaaatatctccagacactataaattagaagagaattaaaactttcacat

SEQ ID NO: 615221 - DNA, 544 bp, Homo sapiens
agcttaataagcaaaggagaaataagatcctgttcaaacaggataaataaaggtgaagggaatttgttactaccatatctaccttatagtaggtccttaacagtgtgctaattatgaacatgaaagactattactggccaccacagaaaacacactaaaatacatagactattgtaactataaatcaactacacaattaactctgcaaaataatcagctaacaacatgatgacaggatcaaatctgcaaatatcattattaaccttgaatataaacaggctaaatgcctcaattaaaaggcacagagtggcaaactrgataaagaagcaagaccaaatggtatgttgtcttcaagagacccatctcccatgcaataacacccataggctcgaactaaagggatcaataaaaatgtactgataaaatggaaaagaggcaaacagttgttactctaattcagacaaacagactttaaaccaacagtgatcaaaacagacaaataagggtattacataatggtaaaggattcaattcaaccagaaga

SEQ ID NO: 615222 - DNA, 568 bp, Homo sapiens
aatgaatgagaacaaagatacaacagaccagaatctctgaaacacaactacagcagtaagaggaaagttcacagtgctaaatgcccacataaaacagttagaaattctcaaatgagcaaccagatatcacacatagaggaactagaaaacaagagaaaactaaacccaaaactagcagaagacaagaaatacacaaaatcagcagagctgaagtaaatgaaattgacatgcacaaaaacacacaaaagatcaatgtcaccagaagttggttcttagaaagaataagattgatagaatgctagctagattaataaagagagagagagagagagagagagagagasagagacagagagacagagaggtttcaaacaaacataatcagaaaagacaataaggactttaccatcgactgcagagaaattaaaaaaaaaaacaaaaaatgaggttgggggaggagtgaagaaagatggtagaatagaaggctccattgatggtgcccccagcaaggatgctaatttaataaccatctagacaaaaggccaccttcatgagaaccaaaaatcag

SEQ ID NO: 615223 - DNA, 601 bp, Homo sapiens
agttcacagtgctaaatgcccacataaaacagttagaaattctcaaatgagcaaccagatatcacacatagaggaactagaaaacaagagaaaactaaacccaaaactagcagaagacaagaaatacacaaaatcagcagagctgaagtaaatgaaattgacatgcacaaaaacacacaaaagatcaatgtcaccagaagttggttcttagaaagaataagattgatagaatgctagctagattaataaagagagagagagagagagagagagagagacagagacagagagacagagaggtttcaaacaaacataatcagaaaagacaataaggactttaccatcgactgcagagaaattaaaaaaaaaaacaaaaaatgaggttgggggaggagtgaagaaagatggtagaatagaaggctccattgatggtgcccccagcaaggatgctaatttaataaccatctagacaaaaggccaccttcatgagaaccaaaaatcagggggagaattcaaagtatctggttttatattyatatagcttaaagaggcagaaaaaaacaatcttaaattataaacatgactctccccccatccctgg

SEQ ID NO: 615224 - DNA, 519 bp, Homo sapiens
agcatcagttaacccagcatgatttgttgaatagaaaatctttttctcattgcttatttttgttgtcttttttgaagatcagatggtcataggtgtgtggcattatttctgggctgtctattttgttccattggtctatctgtctgtatttataccagttttatacatgtttttatatcatgttgttttagttactgtagccttgtagtatagtttgaagtagggtaacatgatgcctttggctttgttttttttttttacttactattgctttggatattcaggctctttttggttccatatgaattttagaatagayttttttctgattctgcaaaaaatgatgttggtagattgttaggaattgctttgaatttgtaaattgctttaggtagcatggccattttaatgatattgattcttccaatgcatgagcatagaatatttttcaatttattcatatcatctctgattcctttaagcagtattttgtagttctccttgtagagatatttcact

SEQ ID NO: 615225 - DNA, 605 bp, Homo sapiens
cactgtacacctggaaaagctgcaggaactcaactgtggaagcagctggggtgaggggggttgtaccctgcaaagctacaggggtggagcttctcaaggccatgaaagcccacctcttgcatcaacatgatctagatgtgagacatagagtcaaaggagatcattttgggacttaaaggtttaatgactgccctattgggttttggacttgcacgrgacctgtatcctctccattttttccttttctcccattgggaatgggcatatttacccaatgcctgtacccccatcttatctaggaagtaactaacttgcttttgattttacaagttcctaggcagaaggtaacttccttgtgtcagataagactttggactgtggacttctgagttaatgctgaaataagtgaagactttggggcagttgggaaggcatgattggttttgaaatttgaggacataagatttgggaggggccagaggtggaatgatatggtttggctgtgtccccactcaaatctcaccatgaattgtaataatccccacatgtcaaggaggagccaggtggagataactgaatcatgggggcagtttcccccatactgt

SEQ ID NO: 615226 - DNA, 545 bp, Homo sapiens
gattgaaacacaacagtttggctagcactatcatatgtcttatacacaaaagtgtgattctacattgttggtaattttcatacacataaacataatcaacattgttagtaataataaaataataattattaaaattacctaaatatcccctagtataaaatggcttgataaatcattaataataacaaaataataataattaaaattacctaagtatcctctagtattaaatggctttataaatcgttaataagcatatgccagttaaaataagggaagtagatctacatgtgtcaacacagatctcaaaacataaaattaagtcataaaacaaaagtacagagggattcatgctgtctttatataatttstaaaacaaaataatatattagtcatgaacatgaaaatatttaatcaaatataaatttatggacagcagtagtatacactcattttaaaatagtggtcacttctggaagtgtttaggcaatgagaatatggaattaggcataaaaagaggattttaactagactttcaacatttc

SEQ ID NO: 615227 - DNA, 576 bp, Homo sapiens
tagtcacagtccacctgggggctgtacccacataccgagcagaccctactgtaaaccaaggttggctttccttagcctcaattatgtggccataggggtgagctgagggaaaaatgccagtgcaagaactgggggtgccatagggtttgaggccacttgcccatgcagattacctgcatcattggccaaataccatttacccgagggcgtaattatctgatctggcaaagctattacatcagcacaaaaggtaagattgaggatattatttggttgcgttttttaatagtccaatttcatctgccagggtacatttatttttgtaggatccaaaaacagatggaaatataatgatggatgactatctctgtttccctgaaatcttttaatagggtactaatttctgccgttttttctgggatccaatattgttktagatttgctatgttggccagcagtgaaaggattgtggtgttgagtgtttcagagactgttgctcagttttatgcagaatgataactctcaccttcaagccaaaaccctaagtggggtctctgcaagctcccaagtatgtac

SEQ ID NO: 615228 - DNA, 365 bp, Homo sapiens
gagctccttatatattctagttattaattccttttcagatagttagtttgtaaatattttttcccactccgtgtgttatctcttcactttgttgattgtatcctttgctgtgcagaagctttttaacttgatgtgatcccatttgtccatttttactttggttgcctgtgtttgtggagtattaccaaagaaatttttgcrcagcccaaagtcctagagaattcctccaatgttttcattttgtagtttcataggttgaggtctaagatttaagtctttaattcatattgattcaatttctgtatatggcagtagataggggtttagttttattcttctacatatgtatatccaggttacccagc

SEQ ID NO: 615229 - DNA, 636 bp, Homo sapiens
cttataaaaccatcagatctcttgagaactcactatcacaagaacagcatggggaaaaccacctccatgattcaattacctccacctgttctctcccttgacacatggggattatggggattacaattccaggtgatgtttgggtggggacacaaagcctaaccatatcattccactcctgacccctcccaaatctcatgtccctttcacatttcaaaaccaaycatgccttcccaacagtcctccaaagtcttaattcattccagcattaacccaaaagttcaagtccaaagtctcatctgagacaaggcaagtcccttctgcctaggagcctgtaaaatcaaaagcaagttagttacttactagatacaatggagatacaggaattgggtaaatgttctcattcaaatgggagaaatcagccaaagcaaaggggctacaggtttcatgcaagtccaaaattaggctgggcagtcattaaatcttaaagttccaaaataatctcttttgactccttgtctcacatctaggtcatgctgatgcaataggtgggatcctgtggccttgggaagctctgaccctgtggcattgggtacagtgccccttctggctgcttatatggctggcattgagtgt

SEQ ID NO: 615230 - DNA, 507 bp, Homo sapiens
aacaaaggcagtagccagagagtggttacagcaggccttgggcaagacagtgctatgctgcctttcggtccgactcagttcactcccaggagtggtgaacacaggtgtacttgtaactccacccccagctttaggtggctcagaacagagasagagagactctgtatgtttgggagaaagtgaggaaagagaacagaatgagagcagtctaatacagtaaatttgtaccagggagtggggcgctgatgtaaagatacctgaaaatgtggaagcaactttggagctgggtaataggcaggcagacattggaacagtttggaggtctcagaagaaggcaggaaaatgtggggatgtttggaacttcctagcgacttggaaggctcagaagacaggaagatgtgggaaagtttgaaacttcctagagacttgttgaatggctttgaccaaaatgctgatagtgatatagacgataaggtccaggctgtgctggtctcagatggaattgag

SEQ ID NO: 615231 - DNA, 499 bp, Homo sapiens
ttttgtattgcagtttccaaaattgtaatgtgacttgttcagttctttccacgtgttcatgtccctaagtagaagagctattatacagcaccttgccaaatggcaagtgtaccagcctttctgaggaatcccaggtgactttaaagagataggccagaaataatggattttcaatcaaactaacttctacaatggaaaatgtttgatgcaatgcacgtaagtcgtgaaagacctatgccaagagttaaaagcacttggtgtaccacttggctattttaagagtgaggtgctatataaagttagtccatgtggagtgggttgggattctcactggctagcatttcctggtgtttawgcaagcatacttgtgtttacttttgaatagcctttcccttctccgtacttttcttcccattgagagagacagaaaggaaaaatcatttaggaaaaattcagacagcagaagtggcctgcctgaaaaatcacagcaatgggcaaa

SEQ ID NO: 615232 - DNA, 575 bp, Homo sapiens
aaactgttctccatattggttgtactaatttccgttcccatcaacagtgtacatgaagctggcttcatgtacacgaacatgaaagagggttcccttttatccacaacctcaccagcatttgctattgcctgttttttggatataagctattttaaatgagatgtgataacatctcattgtagtttttatttgcatttctctgatgatcaatgatgttgagcaccttattatatacttgtgttcagcacgttattatatacttgtgtgccatttgcttttcttcttttgagaaattgtccattccaatatttttctcatattttaatcagattattagattttttcctatagagttgtttgggctccttatatattctggttattaatcccttgtcagatggataatttgcaagtattcttgcccattctgtgggttgtctcctcactttgttgaatgtatcctttgctgtgcagaagctttttaacttgatgtgatcccatttgtccatttttgcattgcttgcctgtgcttgtggggcattactsaataaatcattgcccagaccaatgtcctg

SEQ ID NO: 615233 - DNA, 528 bp, Homo sapiens
tcacctaggagggggcaggttgacttttgttttacctctaccctgaggttatagctttatattggggtcccagtgtattatgagggaaaatctcctaacagacgcttccctccagcctttggcttctgaaccccttgccccatgaggctgtcaaatcctaagttcaagtttgccaggataccctggaaagcaaatgttttattccatgaaactttgtgagctatcatgtttccttagatttcagacttgtartttcattctctgtttcagatattgtgtgcttctaagatttttaaaatatgtattctgtctaacttctctggttgttttcagcagatgaattggcccaattaacctagcctgccatattcctagaattggaagtcctcaatccatttcattttctatgaagagagttctcaccaccagaaaacggacttatattctggagtgcatggtccaactgcactatgtacagacttccaaaccattcctttccctgatttttttcagcctcccatctctctc

SEQ ID NO: 615234 - DNA, 626 bp, Homo sapiens
aatttctcagcgccagggactggaaagagaagaacactgcaagggcagtagcyagggccctgcatgtggcttccctgtgccaattgaaaattctgtgttggggtccgtggcaagggaggagcagttgggtggggactacaagccaggctgggaaaacccagagggcttgagagctgagaagtcccatggagattgggagggaagaggctgtgcttctggcccacagttcttgagagcagagcagagtccctaggtgcagggccccaggggacagctgcatttatgggaggtcacggcagagaagcaaagggactcatgcatctggcaagatgaggggctgggaagtgaggtgaggctgggccagcataagaagccaggaggggaaatggggagaagaggagactgagtcaggggaaaagggatgaatgtagctgtcccagtggagggaggcaggccaagcctgtgcagaccagccttctagggagctcctgggaagagcctattctagagcccttttcagaggatggattccgaaggctggatgcctcgattttacttcctggagctaccatataagagtcatgttagtttggacatgtcccttcacctctctttgctactgtttt

SEQ ID NO: 615235 - DNA, 560 bp, Homo sapiens
cagaagctcagggctacagtgagctatgatcatgccactgcactccagcctggtgacagagacagaccctgtctctgaagaaaaataaaaagaacctgttataatagacttctagtctgatgggaaagatagatatcaattatattatcccatgaataaatggagaattgcaactgagaaaagtgctccgaaggagagataagtacatggtgctattaaggagtaggatgggagaatctgtctgaatcagggaggtcaggaaaggctttccttagaaagttatgattgcactgaacatcaagaatgaggagaagggcggggcaccrtgactcacgcctgttatcccagcactttgggaggccgaggcaggttgattacctgaagtcaggagttcgagactagcctggccaaaatggtgaaacctcgtctctactaataatacaaaaattagctgtatgtggtggcacatgcctgtaatcccagctactcgggaggctgaggcaggagaatcgcttgaacccgggaagtgaaggttgcagtgagccgagattgcaccactg

SEQ ID NO: 615236 - DNA, 574 bp, Homo sapiens
atctcaggtaccccgttctttcaaaacttagttcaaatcttttgataggttcatcttttattctctgactcaagatgtgagtagtttacacactacaattatagtggcataatattctgtatttgtctgtgtacttactgctatcagagagtgttgtaccctcagatgattgcgtattgctcatcaatgtccttttctttcagattgaagaactccctgtagcatttctttttttttttttttttactttaatttttaatttttgtgggcacctgataggtatatccatgtatggggtatgtgagatgttttgatacaggaatayaatatgtaataatcacatcagagtaaatgaggtatccatcacctcaagcatttatccattctttgtgttacaaacaatccagttatactcttttagttatttttaaatgtaccactaaattatttttcactatagccctcctcttgtgctagcaaatactaagtcttattcattctttctattttttttgtgcccattaactctccccactttccctcaccacccaccactacccttcccagcctctgg

SEQ ID NO: 615237 - DNA, 630 bp, Homo sapiens
ctttgtgtgtctgggaaagtatttctccttcatgtttcaaggatatttttactgaatatactattctaggataaaagattttttcctttagcagtttaaatatatcatgcccctctctcctggcctataaggtttccactgagaaatctactgccagacatattgaaactccttttgtgtttgtatgtttgttcatttttacttytctcttgctgcttttaggatgctttctttatccttgacctttggggccaggcacaatggctcatgcctgtaatgccaacattttgggaggccaagtcaggtggattccttgagcccaggagtttgagaccagcctgggcaacacagcgaaaccacatctctacaaaaacaaacaaaaaaagcccacaatatattcttgacctttggcagtttgaatattacatgtcttgacatagtcttctgggggttaaatttgtttggtattctataaccttcttgcatttgaatattgacatttttctctaggtttaaaaagttctcattattatctcttcaaataatctttctattccactctctctctctctaccgcctctttaaggccaatactcttagatttgctcttttgtggctactttctagatc

SEQ ID NO: 615238 - DNA, 630 bp, Homo sapiens
ctttgtgtgtctgggaaagtatttctccttcatgtttcaaggatatttttactgaatatactattctaggataaaagattttttcctttagcagtttaaatatatcatgcccctctctcctggcctataaggtttccactgagaaatctactgccagacatattgaaactccttttgtgtttgtatgtttgttcatttttacttttctcttgctgcttttaggatgctttctttatccttgacctttggggccaggmacaatggctcatgcctgtaatgccaacattttgggaggccaagtcaggtggattccttgagcccaggagtttgagaccagcctgggcaacacagcgaaaccacatctctacaaaaacaaacaaaaaaagcccacaatatattcttgacctttggcagtttgaatattacatgtcttgacatagtcttctgggggttaaatttgtttggtattctataaccttcttgcatttgaatattgacatttttctctaggtttaaaaagttctcattattatctcttcaaataatctttctattccactctctctctctctaccgcctctttaaggccaatactcttagatttgctcttttgtggctactttctagatc

SEQ ID NO: 615239 - DNA, 507 bp, Homo sapiens
gaggcttttattcagctgtttttctccacctcccttgttaattgatgtcttaaaccattcacatttaagtgattattgatataattggattagtatccaccatatttgtaatcgttttctattcattgctttgttctttgtttctcaggggttttttttgccagttttttgtttttttgtttgtattagtccattctcacgctgctataaagatactacctgtggctgggttataaaggaaaaaggtttaattgacttacagttctgcatggctagggaggcctcaggaaacttacaattatggcagaaggtgaaggagaagcaggcaycttcttcatagggcagcaggagagacagagagtgcaggggaaaatgccactttaaaagcatcagctctcacaagaactcccatgatctaatcaccccccatcaggtccctccatcgacacgtgtggtttacaattcgagatgagatttgggtggggatacagaaccaaagcatatcat

SEQ ID NO: 615240 - DNA, 594 bp, Homo sapiens
gagcccagaaagagttccacacaaatatagtcaacttatttttgacaaaggagcaaaggtaattcaacggaaaaaagcattctttttaacaaatggtgccggaacaactgtacaaccacatgtaaaaagattttttaaagcccaaaaacaaataaacaaaragccccacaagaatctagagacagaatttacaccttttccccaaattaaatagatataattaaaatagactataagtgttaaatgtaaaatgcaaggctataaaacttctagaagatagcaaaggagaaaatctgagtgaccttcactttggtaatgactttaacaaaaggtcaatctataaaagaaaaaaatgataaattaaacttcattaaattcaaaactactctgttaagtgaacgaaaagacaaacaacagagtaggagaaaatatttgcaaaacatatatctgattaaggactgtatccaaaatgtacaaagaactcaaaactcaacaacaagaaaacatacaaaccaatttaaaaatgggccatagatttgaacagatgcctcatcaaagaagaggtacagatagcaaaataaacatattaaaaga

SEQ ID NO: 615241 - DNA, 325 bp, Homo sapiens
tgagcaaaagaagctagactacatgacccagcaattccactcctaggtatatattcaaaaaggtgaaaagcagggactcaagcagaaacttgtacatcaatcttcatagcagcaatattcacaacagccaaaaatggaaaccaccaaaatgtccatcaatgcatgaacgggtaaacaaaatttggtatatctctagaatgggatgttattcagtcattaaaaaataatgtatggatamctgctatgatatgggtgaaccttgaacacattatgctaagtgaaagaagcgagacacaaaaggaccaacattgtatgattccactca

SEQ ID NO: 615242 - DNA, 624 bp, Homo sapiens
tcacatggctgagttaatagagtcacatttgggggaaatacatggtataaacattatttttaatgagaatttcagctgaggaacgagcaaaacaattgtcaaggaataactaaatcttgcaatggtcacccagtccagcttccctraagtgagcacaagctgctggtacaaattgtgaaaccaatcagaaaaggcatcgctagcgatccatgccttattgttagcataataatggacttaaaagaaattcactccttgaaaacaacaaaaatgcaagcttttgcctaccacagtaagctgacagttatgtgtgcctgtggcattagcacattctagcacagttattctgtccttggcatctttaactcctgcaggggctgtctcctcctctgtagtcagtgtatttctggggcagtggtttgaagtgctgcaggcagtaactactggagaccaaatcacagtgttttaatttgtgacatgttagagagaataataggactttctgcagtattagtaaactgaagcactaatttctaaatgttctttttttatgtctttaaatgtttcattaaacattggcttctgtttttagcataaatgcatatattatactcgatcatttat

SEQ ID NO: 615243 - DNA, 571 bp, Homo sapiens
gaggcaagaccctccaccagcaaaaagattatgactcactgaaggctcagatgattgttagcatttttatagcattaaagtatttttaattaaggtatgcacatttttagacataatactattggacactttagactatggtatagyataaacgtaaattttatatgcactgggaaaccaaaaattttgtgtgacttgctttattgtgatggtctggaacagaacctgcaatatgtccaaagtatgcctgtatatatttctctggcttgtcagcaggtggagttgatgcagacaatgcagaagttcaggaaccatgggtccaaaagccaagttaaagaagaaattaggatgaaaaaaaaaaagaataaatcaggatgacatccagatactaaatatatcaagagatcaaaaagggtggcatatactctaatcactgaaaggaaacccaagtattgcatagcaccaacaacttcagtgtggcttctgcaaagtaaggataatactagaatttaacccatgctgtggtcagaattaaagaagctaatgtatagtatgtaaaggggctggcagg

SEQ ID NO: 615244 - DNA, 489 bp, Homo sapiens
atgaaaaaaaaaaagaataaatcaggatgacatccagatactaaatatatcaagagatcaaaaagggtggcatatactctaatcactgaaaggaaacccaagtattgcatagcaccaacaacttcagtgtggcttctgcaaagtaaggataatactagaatttaacccatgctgtggtcagaattaaagaagctaatgtatagtatgtaaaggggctggcaggtaatggatgatcaatgactggtatttattatcactattattgcatatttgtgaaattttaaaacagttactatataatagtgtttctttcaccataagacaactacagttgagaaggatgtccatccttgggctcagccagtgaattgattggggttcaaccaggagagagacagaaaacwcatagtaatttaaacaagaaatgtttattataaagaattattaactatgtatagtaaattaactactaagaaggaatttaaaaag

SEQ ID NO: 615245 - DNA, 577 bp, Homo sapiens
cattttcctacgggaattaatacagaaacagaaaaccatatagcatgtgttctcacttataagtgagagctaaaaattgagtacacatggacataaagagggggcaatagacactggggactccaaaaggggagagggagagagcggggcaagggttgtaaaagtacctattgggtgctatgttcactatttgggtgacgggttcaatggaagcccaaagctcagcctcaagcaatatactcacgtaacaaatctgcacatgtaccctctgaatttaaaataataaaaagagaataggtaggctgtaagcctcataactaggagactagagttcccatcctcaaaaccttgtctagatagtctctgggtctgctattaacccatacaattgrtcagaagaaaacagatcaaatgactccaaatcatttactaatgattcacattttaaacttttgtataaaactaaaacagatatagaaaactatagaaattataatgaaatgaacacacttgtataaccaccatccaggtcatgagctagaacatggacaacactccggaattcacctccccaata

SEQ ID NO: 615246 - DNA, 577 bp, Homo sapiens
cattttcctacgggaattaatacagaaacagaaaaccatatagcatgtgttctcacttataagtgagagctaaaaattgagtacacatggacataaagagggggcaatagacactggggactccaaaaggggagagggagagagcggggcaagggttgtaaaagtacctattgggtgctatgttcactatttgggtgacgggttcaatggaagcccaaagctcagcctcaagcaatatactcacgtaacaaatctgcacatgtaccctctgaatttaaaataataaaaagagaataggtaggctgtaagcctcataactaggagactagagttcccatcctcaaaaccttgtctagatagtctctgggtctgctattaacccatacaattgatcagaagmaaacagatcaaatgactccaaatcatttactaatgattcacattttaaacttttgtataaaactaaaacagatatagaaaactatagaaattataatgaaatgaacacacttgtataaccaccatccaggtcatgagctagaacatggacaacactccggaattcacctccccaata

SEQ ID NO: 615247 - DNA, 622 bp, Homo sapiens
acaatacttattttattgttttggaattttctcattataaacccctgttgaactatatgtrttggaaagggaagccataatggtattttgtataaattttaaataatcttttaatctgagttatttaatttttgatattctaatattctgtctattatttataaaatgatatataaattttcagtgtctccagtggtaaccttgctataatgggcacttgacaaatgaagactcaattactcaagagaggaaggtgtcgtggtaggctggaaccagcatcattgcccagttccattatatattctctgtaactttgcacaactttcttgacttgttcaaggtttaagtttattatctgtaaaatcaggataataatacttagctcattgtgagaattaagtaaaataatgattgtagagcatttggctcaattcctagcatatagtaagctcataataaattatttatattaaaactattgctattaatgaatgttttaacctgagcaaagatcaacctctaaaactttattttctaccatcttgccctccatagaagactttagtgattatcaaagaaaatattacaggttagagtactttaaaaattacaacaaatcata

SEQ ID NO: 615248 - DNA, 622 bp, Homo sapiens
acaatacttattttattgttttggaattttctcattataaacccctgttgaactatatgtattggaaagggaagccataatggtattttgtataaattttaaataatcttttaatctgagttatttaatttttgatattctaatattctgtctattatttataaaatgatatataaattttcagtgtctccagtggtaaccttgctataatgggcacttgacaaatgaagactcaattactcaagagaggaaggtgtcgtggtaggctggaaccagcatcattgcccagttccattatatattctctgtaactttgcacaactttcttgacttgttcaaggtttaagtttattatctgtaaaatcaggataataatacttagctcattgtgagaattaagtaaaataatgattgtagagcatttggctcaattcctagcatatagtaagctcataataaattatttatattaaaactattgctattaatgaatgttttaacctgagcaaagatcaacctctaaaactttattttctaccrtcttgccctccatagaagactttagtgattatcaaagaaaatattacaggttagagtactttaaaaattacaacaaatcata

SEQ ID NO: 615249 - DNA, 482 bp, Homo sapiens
aagaggagcagacacaaattcatgagcagcaccaggtcatgggaaaggtgggcaccccttcacagtctaatgcatatggacaggggtgtgatgcaggggcaattgggatctgtcttcagtgttaattaacctttctcacccttacatggcaccagacagtagcagttctcttactcccaagaaagggacataattagaacagatggagaaaatacagatgaaaagaaatggagcaggtgttcaactccaggaatagctcrtgtccattgattgcattcggtagaggtaggttgtgtttttggttttggttttattttccttttaatctagctgtttctctcatgccactgaatgaagccagatgttaaggagaggtagaaaagaaaaatggagaggctatctataatgaaaactgctcttagttatctgtatttccagcctcacagcttttggaatatagagaatattttaaatatgtgtac

SEQ ID NO: 615250 - DNA, 556 bp, Homo sapiens
aaaactgctcttagttatctgtatttccagcctcacagcttttggaatatagagaatattttaaatatgtgtacacataacttttccctgcaagactataaagtccagaaaccaaacagggacatcaagaggccatagattccttcaatgatgaacaagaagaggctttagactcatccaaaatattctataaattgaactcttaattttggagagattaaaaaaatagcctcaaccgcataactggtcaattaaaaagctagagctagaacccaactgtacatttatttattacaccaccatgatttagttactcccatcagaactatacttcaattgtgattaaggaagggtcaatggtgggggcctatagcaagtatcaataatgttggcaatttaactcaaatcacattgactacatattgragaaaaagctgtatcaaattcagtcttcatgttggccagcctagccgaggattttgggtagccaaagcactctgcggaatgactcatccagagagagggttaggcagaagtcctctgggtgcaattaaac

SEQ ID NO: 615251 - DNA, 556 bp, Homo sapiens
aaaactgctcttagttatctgtatttccagcctcacagcttttggaatatagagaatattttaaatatgtgtacacataacttttccctgcaagactataaagtccagaaaccaaacagggacatcaagaggccatagattccttcaatgatgaacaagaagaggctttagactcatccaaaatattctataaattgaactcttaattttggagagattaaaaaaatagcctcaaccgcataactggtcaattaaaaagctagagctagaacccaactgtacatttatttattacaccaccatgatttagttactcccatcagaactatacttcaattgtgattaaggaagggtcaatggtgggggcctatagcaagtatcaataatgttggcaatttaactcaaatcacattgactacatattggagaaaaagctgtatcaaattcagtcttcatgttggccagcctagccgaggattttgggtagccaaagcactctgmggaatgactcatccagagagagggttaggcagaagtcctctgggtgcaattaaac

SEQ ID NO: 615252 - DNA, 556 bp, Homo sapiens
aaaactgctcttagttatctgtatttccagcctcacagcttttggaatatagagaatattttaaatatgtgtacacataacttttccctgcaagactataaagtccagaaaccaaacagggacatcaagaggccatagattccttcaatgatgaacaagaagaggctttagactcatccaaaatattctataaattgaactcttaattttggagagattaaaaaaatagcctcaaccgcataactggtcaattaaaaagctagagctagaacccaactgtacatttatttattacaccaccatgatttagttactcccatcagaactatacttcaattgtgattaaggaagggtcaatggtgggggcctatagcaagtatcaataatgttggcaatttaactcaaatcacattgactacatattggagaaaaagctgtatcaaattcagtcttcatgttggccagcctagccgaggattttgggtagccaaagcactctgcggaatgactcatccagagagakggttaggcagaagtcctctgggtgcaattaaac

SEQ ID NO: 615253 - DNA, 635 bp, Homo sapiens
aagcactctgcggaatgactcatccagagagagggttaggcagaagtcctctgggtgcaattaaacacttaaataatcttttctcagggagagttcctgatgatgcgtatgaccacagtctctgcaactatcttcacagttacgaaagtccaaaggcttctattttttttgaaaatttcttttctaaaaagcaacccccacaaaaaattaaataccttatctgccttgctatgcttacttctagtatacattgggtttctatgtaagagaccctatgagtctatggatattttgatggacatctatagtgttattttctaaggaatctattctagtagaatgtgtctctattctacagaacaagagaagagggtgccatgttctgctttttctactccactggtcaaagttattggtagtcaagagtgggcacttgacccatgtcaggccaaagttcttctcaaggttgtttttaactcagagattgagtctttcttctatgatagaaactgtaagatacastctggatatctgtgtccatattttctgttacgtagagagcattatcctaaaatgcagaaagaatcaggaattagaggtgaagatattcctggtggaatttacatcactggccc

SEQ ID NO: 615254 - DNA, 580 bp, Homo sapiens
gaaattatttagctttatgcctggctagttaagtatctataaagcaaaggcataaataactgtgtggaaattttatccaatgagctatgcaatkcattactcctctccaactgccaaagccagacagccagcattggcttggccaaaccaatgctaaatagctcatttttttcatgacagcttgatcaatttctggaaagtactgatggtctttttacattgagttaaattgtgctagtggtcattgttctttggaaaatagactccagattctaattctacatacaatgtcttcttcacatttcagttcttaatatgtctgaaatatgcattataacctacctaagcctccttttctcaagcttaacattccagtgttcctcagatagtttacatattatattagaacacaattttgaaactgttatccagctctgtggctcatgattagtacaatgaactctttcacaaactgagtttttaagaaatctgtttgattccagccaatttcatgtgccagtagcaacataaacagtttacttgtagacacatttcttcacttcttaaatatgacctactt

SEQ ID NO: 615255 - DNA, 564 bp, Homo sapiens
gcacctttaagtttttgatccttacaaattatccgcaaaaaaagtcactcatcctacctagctgaggaagatccaattcatatctgtcttaattaggtggattctgaataagcttttctaaaaaaaaaaaaaaaaaaaaaaaaaaaaaaaaaaaaaaaaaaaagatattccaggtcccaaagtaatttgagaagatatcaaaccaaataaacttaaagtcttccagctttggcagagttgacggtgattgaggaatgaagtcaraaatccgctcttctccgcatctctgattgaatatctgtgatttaaaaaaccacaaagcatgctttctcaatggtgccttttagcatctaccagttaatataccagccttatgtctttgggcttttctgccatctcctgtgctctgcactgttcagtaagctccagagagccttctcctcgaccattaccaccaatgtgctttgagttgtgcacctgcatctccttttccagacacaagggactcctgcttggccattgtggatggtttcacactagctaaagctaaccaatatccctcta

SEQ ID NO: 615256 - DNA, 564 bp, Homo sapiens
gcacctttaagtttttgatccttacaaattatccgcaaaaaaagtcactcatcctacctagctgaggaagatccaattcatatctgtcttaattaggtggattctgaataagcttttctaaaaaaaaaaaaaaaaaaaaaaaaaaaaaaaaaaaaaaaaaaaagatattccaggtcccaaagtaatttgagaagatatcaaaccaaataaacttaaagtcttccagctttggcagagttgacggtgattgaggaatgaagtcagaaatccgctcttctccgcatctctgattgaatatctgtgatttaaaaaaccacaaagcatgctttctcaatggtgcyttttagcatctaccagttaatataccagccttatgtctttgggcttttctgccatctcctgtgctctgcactgttcagtaagctccagagagccttctcctcgaccattaccaccaatgtgctttgagttgtgcacctgcatctccttttccagacacaagggactcctgcttggccattgtggatggtttcacactagctaaagctaaccaatatccctcta

SEQ ID NO: 615257 - DNA, 578 bp, Homo sapiens
tagggtacatgtgcacaaggtgcaggtttgttacatatgtatacatgtgccatgttggtgtgatgcacccattaactcatcatttacattaggtatatctcctaatgcctattcaaatgcctcttggggcaaggcagcttgtagagaggccaggtgggaactgaggagaactaggagtgtcatgcccctcctcaaagaggtggtttatctgactgttcccaataatgtaggtttatgagagtcaaacattacgagatcttctaatgttttcaagagaagcttgactgcctgatttgcctgcaaaatgcaatggctaagcaaaggctcagtgagratttcaacctaacagaatatgactggagccaccaggttgcagcacgcaacgtcaggaatacatactccttcaacatggctgttccatgttctcagttctgggattctataatatagggaatggtgaattcttaggtaagaaaataaaagacacaaaagtaaatgatagagtgagggaaggagggaagatggctcatgccattttctcttctagctttgattttgctcccatgtttgactggttt

SEQ ID NO: 615258 - DNA, 478 bp, Homo sapiens
tatgcccagcccaggttttctaattctttttgaacaatttttagtctgaactctagataattccttccaagaaagcaaaaagaacacgtggctctgctccattgttcaagagtgtattgttcttaggacsaggaagagaaaacaggcctaaatgcaatgcactattaagtcatgatgtaacagctatccctcacataaatatcttactgggaagaaacgctgtcagaaacagcagagaaattgtaactgcggagagatgtaggagctgaaaagacatcagaaaccaaatctacggcctctctcgaagtcatgttcctgtcgtggcattctgtctttcgcataaagtgaaaccttaaacaacaaaccttgacagttttatttgggatcagacactttaggattggacaagagcagcttgagatgagaaagtatgagtccaaattggagaagaattaaaagtaagttatttgggtatggg

SEQ ID NO: 615259 - DNA, 514 bp, Homo sapiens
gtgagtacctgtgctagaggtgtggcaacaggaaatgagaaggtgaggcattctagccctgagtgaaagatataatttatakaactttgtattattttgaatgtgaagttactatttctgagttccaaatccaccctctattcttgttttttttgtttttgtttttgtttgtttgttttttaatgctgtgattggacttctaaaaatacacatgctttctggtacctgacgttctaaaagtttttgccaccaaggaccactagaagacaagaagggacttgctcattcttactttgatttttattcttgatggaaacgatctagagatgatgctttacctgggcagcccactttggttccagatcccagcttttatttattttattttattttttgagatggtgtctctctctgtcgcctaggctggagtgcagtggcgtgatctcggcccactgcagactccccttcctgggttcaagcaattctcctgcctcagcctcccaagtagttggga

SEQ ID NO: 615260 - DNA, 514 bp, Homo sapiens
gtgagtacctgtgctagaggtgtggcaacaggaaatgagaaggtgaggcattctagccctgagtgaaagatataatttatataactttgtattattttgaatgtgaagttactatttctgagttccaaatccaccctctattcttgttttttttgtttttgtttttgtttgtttgttttttaatgctgtgattggacttctaaaaatacacatgctttctggtacctgacgttctaaaagtttttgccaccaaggaccactagaagacaagaagggacttgctcattcttactttgatttttattcttgatggaaacgatctagagatgatgctttacctgrgcagcccactttggttccagatcccagcttttatttattttattttattttttgagatggtgtctctctctgtcgcctaggctggagtgcagtggcgtgatctcggcccactgcagactccccttcctgggttcaagcaattctcctgcctcagcctcccaagtagttggga

SEQ ID NO: 615261 - DNA, 533 bp, Homo sapiens
agtgtcacttcttctgatatatgaacacaggctgtcctaaagtccagaatatctcatagagatatcagctggagaataaactaatatattatcgtcaagtactttcatttctcaagcctttaaaatacacttttaaaaactctgcatgtggagagtacattattgtgcctcttctcaactttagtatctctgtccatctaatgattagttcctcctccaaaaaaagaaagagacagtgatctgattgatcagagtgcagggcttttactaagctatattttactagcggatgatgtttctctgacccaaagttagcaccattgtatagcacatcatctttggtctcttcccatgaagacttgccttaataaggacattctaacgagattctctttctttctctcttttctgcaagctctgaacttctatttgatcgkatatatttgaccagagctactggcatacctaaaaatgctgacttaaatatttttattgatgatcattccattaatgatcataatggaggttctagc

SEQ ID NO: 615262 - DNA, 619 bp, Homo sapiens
gctcagcaacacctgcgccacaatcaaccggtgttactctccccagcctcatcagcgtggtgagaaaacacgcctcacacttcaattatgaggtcgttgttgcgcatgctcaattgtctctgactcagatgcctaycccagggcattagagacagctattttaagactggtaaaaaggaaaagaaagaatcctgtttagtctatcaactcatgttagtgagggaaatagcaggaaatttttttccaaagggacaagtttgttaaaattatgtatttcttgcattttttaaaacaatgatttctgaatcatgaatttaagacatactaaaattgtttatttacgtatgctgcagaataaaagtcctttttcaaaccataaactctatcctgtgaaaaattatagtgatgccaacgtaacctagctttcctccctctctaattactttcccttgtcctcctactgacgataaatatatctgttctgttttgatctcacctttttccctgaatctaaactatgtcatatctgatctttcctttaaaactctttcttagtcttctttagatccactcatcccccttctaccaccaccaccatcacctccttcccaagatacgt

SEQ ID NO: 615263 - DNA, 609 bp, Homo sapiens
aatatggtgtatttcccatatttgtttgatcatggggtcttttttayagcatatcttgtaagataactgttctataaagcacacattgggaaatgctttcgtaggctgatgtctcactggagcaaatcctacttaattattataaccaatatgtagggtcccagagtggacagaatcaggtaatcagcccccttatagagtactgctttggctaagcttctttctgtatgcatatgctctgagttttggtgaacgtctggaagaaacctgtcttcgtataattccattttgtgtggggaaggttaatggtgcccagagttttttctcctagaaattttgtgattctctttttcacttttttttccctaaaacaccatagagacttctttttcctgccagtggcttttaacagaggcacttaattggtatttttgaggcctttccttgaactcaactttcaaaacaaaactgtgttaaagttaccaaaaattaaagtgaaacaacacttgactttataccttttgacaaaatgagaaagaaacactgccaagtttctcacaagtggccagtcatttctaaagcagtttcccccacctggaccaagcatac

SEQ ID NO: 615264 - DNA, 531 bp, Homo sapiens
acaacttgcttctctacacgttcccctcaacttgstggcaataatcgcagtgtagataactgataattaaataaaatgggataaatattgaacatggaaaaatggagaaatgttctctaacagatgaaggaaggaagagacttgagatattaaaagggaagtgagggtggggtgttctgtctttgtataatatcagaactaggaaacagcctgtgagatgtttctgctctttagtggtcattttaataccatgtttatgaacaataggaaagaaagaagaattctagttgttcttctctttgagtcttcagagttcttacatataataccgtcattcttggaccctggaatcataaaatgtatgagtaaaagtgaccctggaagtcatccaatccaatgacttaaaacaccgtgttccatgcagtcagaggacagatgcaaaggaacctctggggttaagggctccgggtcccatctttcacttcagggagagcagctccatgttcttcctgggggaaaaataaaaaaaaa

SEQ ID NO: 615265 - DNA, 531 bp, Homo sapiens
acaacttgcttctctacacgttcccctcaacttgctggcaataatcgcagtgtagataactgataattaaataaaatgggataaatattgaacatggaaaaatggagaaatgttctctaacagatgaaggaaggaagagacttgagatattaaaagggaagtgagggtggggtgttctgtctttgtataatatcagaactaggaaacagcctgtgagatgtttctgctctttagtggtcattttaataccrtgtttatgaacaataggaaagaaagaagaattctagttgttcttctctttgagtcttcagagttcttacatataataccgtcattcttggaccctggaatcataaaatgtatgagtaaaagtgaccctggaagtcatccaatccaatgacttaaaacaccgtgttccatgcagtcagaggacagatgcaaaggaacctctggggttaagggctccgggtcccatctttcacttcagggagagcagctccatgttcttcctgggggaaaaataaaaaaaaa

SEQ ID NO: 615266 - DNA, 589 bp, Homo sapiens
ttcttcctgggggaaaaataaaaaaaaattgtattaagctgggtcttctagtcaacatggcatttggagttcatgctattgcctctgtgatctgcatctaagacctgaaatgtcaaaaatacggttttaattgagtaagcacagcaacacgttcagaatagagaataggwagaatctaagagaggccaataggaggtggcatttgattaaaggaaggagaagctccagagacttgaaactatggataacagcagtgaagggcctagaggcaacaccatgggcatttcctaccactggatgggaatgacaagcacacaaggggcagaagggtattgatggggctgagaggtggccagggtctgtgagccatccccacttcaagcttttagtaacaaggagttataaatagagggaccatttccaggtaggagacaaggcagaacccgagtgaccagaaatcttgagagatcagtgggaaaaatccttctcttcctgctacattccacccattccttaatcctactgaaaacagtgagggaaagacttcagtagaagcttctaccctttaaaaagttagctcacggtcttg

SEQ ID NO: 615267 - DNA, 559 bp, Homo sapiens
tgccagtcttcagctagtagcatcgtaagcatccaccccagcttttgagtcaagatcatgctactctcagggcagcctctagccagtgactgagcaagacagtgggaagctggggattctctcatgggtgaccttgacagatccctgacaggctatcagggactgccaggtaaaaatagtatgctgacagctccctcacccacccaatcctgccrctcccttttaatttcaaaggtgttattcaccattcaaacttttcaactttgccacagcatcctattcttggaaatccaaagctaccacagcatctgaaaggtataggaagattgaaagcacaaacaagaacccaagaaacatggggcaaacaaggactcacaggtattgggggaataatgtcccaagtccacaacttaatccctggaacgtgtgactatgtcacaaaataaatgtaaaataagaatgctatatgcaactaaattataacttgaatatgagataaataatgatacttatgggcagacaagaacttaaaaaatcagtagcaaaaatatttctaatg

SEQ ID NO: 615268 - DNA, 489 bp, Homo sapiens
aaggccctttgattttaaagtgagtgtcaaaaaggctgggagaagtttaaaccctggggtggagagtggtgamaccagaattccgataatgctggataatagggaataactatgacactggagtatatatttaagtttgaggatcattttaactgcaatgtaccaaaataagactttttttttcttgtcaggcttcttggtaaatttttattcttaattttttttccttcatgagcaccatttttttccatatgagactcaaagttagaaagcagtggggttaacgtgatcattagtgccatatgttctaaggggaaaaataaataaaggatacccaaagtaactgtccatcaatggggagtcactgctatctgggagagacggcaacaccagaaaggagaaaggggcacaagcacacctgcagagttaaaggaagtaagtggagagggtgcagaggcaaaatgctacgtttcctgtggaaaatgtcag

SEQ ID NO: 615269 - DNA, 506 bp, Homo sapiens
ttccccatgttggactggggaatgcttgtcccctgaggcaaatgaaacagagccaggaatgttgggtatggggcatgcgatacacatagagtcagagtcagaacttccaatagcgaggcaagtccatttcaagcatcttgttggaaatcagaagcacaaacatatctgggggctcaaaaagaaagctaaaaaaaaaccaaactgatctctctaacaattggatttcctaattataaagtayaataagcttgttgctcctgggactgtggtcagaagccatacagacattctcaagggatgatgcagacgtaatttgtaccctgggtgaaataatctttccagcctgaaaaaagaattgaagtctaaagcatattgacaaaatgagtttccctgatttctgggttctagaaagaaatggcaaactcagaatttgaggaagtccataccagacgatcatgagaacataacaaataattggaaaaaatgagaccatatgcatagatggc

SEQ ID NO: 615270 - DNA, 559 bp, Homo sapiens
aggtcacccatttattttctaacaaatgtttattgagttgtcatgaggtattcttggttcactaaaaacaatgatggacaagatgaacaagtgttagtaaatttatgggtcagaaattaaacctaggttcacatgaacataaaatccttttgtccccctcactcacccacagagatttctactatctcccttcatctttttaactaaaagtacaaatcatcctgtgaaagaccacaaatagatatttgcatttctgcagccagactagaagaccaaaatccatcaaaatccagaatgatggcaaatagtggtggaatttgaagccgacttgcaggaatcagggaataaaatttgagttgagtaccttgtctgctgtttcaagctgatgaccttctccttttcaagaaaccagacttctgccttctttcttcctctggtattaggtacaaawccataatgactgattctttctcagttcaagtgatcaataaatgcaacaaggatggaggaggaacatggctttctagaaaagaactaggtagaaatcagttgtggttgg

SEQ ID NO: 615271 - DNA, 591 bp, Homo sapiens
ttatttgtgatgcctttccaaatcacatgacattttcctgtcctggcatcaccccaaagactctgtcatgacacgttctccacccagtttcaaatattagctttatcactttgaatctatgtgaaccttataatgctactcaaatatttgaagtcttagctttctcatcttcarcatgggaatgatatgctcatctcaagtgttctcccagaattaaatggtattctttctatgaaactcctggtataatggaagagtttaatccatgttagctattagtgagtgaaggagaatgtgtaactcttgactaacttaaaatcagagaagttcttattacactagaatgctggctccatgaacaataagacattgcttgatgctctaccccagcacctagaattgtgcctggcccacaatagctatccaattatctgtgagtggataaatatcatttaccattacacagttactttacaatttgcagagcacttgcaaacctatgatctcatttggttccctcaacattgttgcacacaaatatgtcagaaacacctgactggaccagcaaaaaaaaaaatatgattcaccatt

SEQ ID NO: 615272 - DNA, 571 bp, Homo sapiens
actcagaatttgaggaagtccataccagacgatcatgagaacataacaaataattggaaaaaatgagaccatatgcatagatggcttattataatttatttttaaaaatttaggccaggcatagtggctcacacctgtaatcctagcactttgggagaccaaggcagttggatcgcctgagctcaggagtttgagaccaacttggccaacatggtgaaaccgcatctctactaaaataataataataaagaaatagccaggtatggtggtacacacctgtagtcccagctacttgggagtctgaggcacaagaatcgcttgaacctgggaggtggaggttgcagtgagccaagatcaggccactgcactccagtcagggtgacagagcaagactccgtatctcccccccaaaaaaaaaaaaaaaaaaaaaaattatgcccagcttttaatttgatgcttataacctcttgaggaaataagagcaatttacatcagctttatatrtgcagataaagaagtacattggaagaaactgaaattggctcaaggtcatacaagcaggatgtcactt

SEQ ID NO: 615273 - DNA, 507 bp, Homo sapiens
aatctgtcatctgcctgcttggaaaattaacccagttggtgatggagaattactggaaagttataagaaacatagacacctacccagaacttcatggtgcaaacaaaattgaatggcatttaacatatctaattgttaatgaaatggggtattgtagagcattaatatctgcccttcagcagtggctgcttgctttcactggcagtatttgtatctgaataataaaacattggmgcttgaagggtttttctagatgagctcagccttcttttacaaataaagaaataggcttggaaatatacatataaatgatagtggtgaatctctatcttgttctctcctgaagggggttaaatgaggggttgggagaaagtggtctttctttggtttcctaaatagtatcatttagtaattctgagaatagatattgaaatcacacagggctgcatcaaattgcacctttcttctttgttaactgcaagattctggatgagctaacttggtatt

SEQ ID NO: 615274 - DNA, 565 bp, Homo sapiens
tggaccttgaacctatatctgtataagtacaaaaaaataggtgtgcaactaggattacagataggaatcaaatggctctaatttgatatctgtgtctattagtggtggggatacgttgaatggccagggtggtcattttaaagcaggataacagacctatctttaaatggaaaatgagaacatgacccttctttagtgatattttctctaacatcgtgatgaccacactctccatcaccactctgagccttgcgatatatttgaatgaaggcccaaagttcwtgcaagtcttttgtcttttcggagtaaatggattacattgacataagtagaatcaaagcagaaaagtggccaaggttgtttagaaatatttgaacaaagattagaccaatacagtttaacttcactttcactggacaagtggtgaaaaaataattgagtagtttcagaaaggcccaagtttgaatcctggttctgtctttaaccaacagttgaatttgagagccagtgtcatgtctctgtacttaatcttctttaacaggtggaacgtacttgccccacttaa

SEQ ID NO: 615275 - DNA, 565 bp, Homo sapiens
tggaccttgaacctatatctgtataagtacaaaaaaataggtgtgcaactaggattacagataggaatcaaatggctctaatttgatatctgtgtctattagtggtggggatacgttgaatggccagggtggtcattttaaagcaggataacagacctatctttaaatggaaaatgagaacatgacccttctttagtgatattttctctaacatcgtgatgaccacactctccatcaccactctgagccttgcgatatatttgaatgaaggcccaaagttcttgcaagtcttttgtcttttcggagtaaatggattacattgacataagtagaatcaaagcagaaaagtggccaaggttgtttagaaatatttgaacaaagattagaccaatacagtttaacttcactttcactggacaagtggtgaaaaaataattgagtagtttcagaaaggcccaagtttgaatcctggttctstctttaaccaacagttgaatttgagagccagtgtcatgtctctgtacttaatcttctttaacaggtggaacgtacttgccccacttaa

SEQ ID NO: 615276 - DNA, 562 bp, Homo sapiens
tgaagtaatattaccatagtacctatagatttcaacaattgggtagagcattattggtgttagatgatttcctgaaacctctgtaattggtttcaaaggaggactcctttcacacagaacacaacacactccctccgtttctctctcccagttgcccctggcctcacccaccttcaaattctttgctccctgcctgccccctcctgtctcctctaatgattccttgccaacaagggagggagaccctggccccttcatttgccagtttagggattttccactaagcatctcaactccctgccaaccacctttagttattaaaatgcagctcacaacgtctcacyctggctgttacattatcattcctcgttagagactcctccagggcctgagacatccctgcactgactttataattacaaagtcaatttctaaacagacatttgcaaataagtcaatttaaataccgagatttgcaaacaataattaagcagtagcttcttttttaatatctctacatataattaatgccggtgggcttttcattttaccttgcaactgg

SEQ ID NO: 615277 - DNA, 562 bp, Homo sapiens
tgaagtaatattaccatagtacctatagatttcaacaattgggtagagcattattggtgttagatgatttcctgaaacctctgtaattggtttcaaaggaggactcctttcacacagaacacaacacactccctccgtttctctctcccagttgcccctggcctcacccaccttcaaattctttgctccctgcctgccccctcctgtctcctctaatgattccttgccaacaagggagggagaccctggccccttcatttgccagtttagggattttccactaagcatctcaactccctgccaaccacctttagttattaaaatgcagctcacaacgtctcactctggctgttacattatcattcctcgttagagactcctccagggcctgagacatccctgcactgactttataattacaaagtcaatttctaaacagacatttgcaaataagtcaatttaaataccgagatttgcaaacaataattaagcagtagcttcttttttaatatctctayatataattaatgccggtgggcttttcattttaccttgcaactgg

SEQ ID NO: 615278 - DNA, 562 bp, Homo sapiens
tgaagtaatattaccatagtacctatagatttcaacaattgggtagagcattattggtgttagatgatttcctgaaacctctgtaattggtttcaaaggaggactcctttcacacagaacacaacacactccctccgtttctctctcccagttgcccctggcctcacccaccttcaaattctttgctccctgcctgccccctcctgtctcctctaatgattccttgccaacaagggagggagaccctggccccttcatttgccagtttagggattttccactaagcatctcaactccctgccaaccacctttagttattaaaatgcagctcacaacgtctcactctggctgttacattatcattcctcgttagagactcctccagggcctgagacatccctgcactgactttataattacaaagtcaatttctaaacagacatttgcaaataagtcaatttaaataccgagatttgcaaacaataattaagcagtagcttcttttttaatatctctacatataattaatgcckgtgggcttttcattttaccttgcaactgg

SEQ ID NO: 615279 - DNA, 569 bp, Homo sapiens
agggcacactggtaactaagacacaatctattttgaagtctagtggggatagaaaaagtaaattcaaagataaagtgttataaaaggggaaggagaaggaaagctagcttgatctgaagacttaggaatgtccttttaagaaagtgattatctaaactgaaatatcaaggatgagtagttatcaacaagatgaagattgaggaggatggttattttatgtaaaagccttttagaagctgtagagattaacaaacacaaaaactgtttgaaaaaccaaaaagaatgggcctaaatggtagctaacataaatgagggaaaagatgggtctaggcaaagaaacacagactaaaatcctgaaggccttgtattacaagttaagaagtttgagctttrtactaaggatagcagggagtcatgaaagggttttagggagtgaggtgaccagtgtggcttatgatgccccagctgtgttcccaagccacgctagacaatctctccaagttagttggattatctgacaaatcttgatttagcttcctaatctcacctctaatgagcatgtttctacc

SEQ ID NO: 615280 - DNA, 569 bp, Homo sapiens
agggcacactggtaactaagacacaatctattttgaagtctagtggggatagaaaaagtaaattcaaagataaagtgttataaaaggggaaggagaaggaaagctagcttgatctgaagacttaggaatgtccttttaagaaagtgattatctaaactgaaatatcaaggatgagtagttatcaacaagatgaagattgaggaggatggttattttatgtaaaagccttttagaagctgtagagattaacaaacacaaaaactgtttgaaaaaccaaaaagaatgggcctaaatggtagctaacataaatgagggaaaagatgggtctaggcaaagaaacacagactaaaatcctgaaggccttgtattacaagttaagaagtttgagctttgtactaaggatagcagggagtcatgaaagggttttagggagtgaggtgaccagtgtggcttatgatgccccagctgtgttcccaagccacgctagacaatctctccaagttagttggattatctgacaaatcttgatttagyttcctaatctcacctctaatgagcatgtttctacc

SEQ ID NO: 615281 - DNA, 575 bp, Homo sapiens
tgagttttcaggacactcctctaatcctaatcctcataccyatttgtttcagtgcctggctcatgttctagatacagctgcatgggataatctgatattggttctgactgagattaccctgaatttaatttttttccccttaagccaaagacattcaaacttaggtgcacattaggggaaataaaaaacaaacaaacaaacaaacaaaatagcactgagtatttaaaaaataatcttctgcagtgatttaatgttcagaatgagaactagtggtttaagtcaccattcatttaaattggctttgttctgattaaagggcctagccacctgaagttgtccaaaccgggggcccattgcagacagaagcagacagataaatggacaaagttttaactgtggtgacatcttttccttgtcagtcatctaaatacttgaagaagaacttaacataataaggagagagcaggaaccttattccagtttcttgttgttttgggtggctttgaattcgccctcctatatctgggtgagcacagacttctgtgaactcctactggcatatttttctggtcctt

SEQ ID NO: 615282 - DNA, 575 bp, Homo sapiens
tgagttttcaggacactcctctaatcctaatcctcatacccrtttgtttcagtgcctggctcatgttctagatacagctgcatgggataatctgatattggttctgactgagattaccctgaatttaatttttttccccttaagccaaagacattcaaacttaggtgcacattaggggaaataaaaaacaaacaaacaaacaaacaaaatagcactgagtatttaaaaaataatcttctgcagtgatttaatgttcagaatgagaactagtggtttaagtcaccattcatttaaattggctttgttctgattaaagggcctagccacctgaagttgtccaaaccgggggcccattgcagacagaagcagacagataaatggacaaagttttaactgtggtgacatcttttccttgtcagtcatctaaatacttgaagaagaacttaacataataaggagagagcaggaaccttattccagtttcttgttgttttgggtggctttgaattcgccctcctatatctgggtgagcacagacttctgtgaactcctactggcatatttttctggtcctt

SEQ ID NO: 615283 - DNA, 623 bp, Homo sapiens
ttccaagtagtagatgaaatagagaagataaatagggcagcataaaatggtataagtgaatccactacccaaaaagattttgcatgatgctgataaacataataagcagaaacttaaagtaggatgtaagagttaattaggtagttgttatagctggtgacccatgcattctgctaaacagcagtatctgttctgcttttggacatctgtggcaccatgaagcactagattcttatctgccctgtttttcacatcctgtgaacttgggaactatcacaatttgccgtagacatattttttgaccgtaggtttgggtacacatgggttctatcagcaaatggcaactgaacagaatttcggctcagaattaagarcaagtctcttcctccagctgctgccttttttcttccaggcaggaacaatgaagctgtatatattgcaaagattgcaaaagagaaattaaaattgactgcttcacagttgacaattggaaaggaaatttccttgttcaagaaccaagaattataagctgtaccttttaacagcttagggtctgtgactttgaacaaatgcacgcttgtattgtaaagccctggacaattgcctccagtgatggcccagct

SEQ ID NO: 615284 - DNA, 623 bp, Homo sapiens
ttccaagtagtagatgaaatagagaagataaatagggcagcataaaatggtataagtgaatccactacccaaaaagattttgcatgatgctgataaacataataagcagaaacttaaagtaggatgtaagagttaattaggtagttgttatagctggtgacccatgcattctgctaaacagcagtatctgttctgcttttggacatctgtggcaccatgaagcactagattcttatctgccctgtttttcacatcctgtgaacttgggaactatcacaatttgccgtagacatattttttgaccgtaggtttgggtacacatgggttctatcagcaaatggcaactgaacagaatttcggctcagaattaagagcaagtctcttcctccagctgctgccttttttcttccaggcaggaacaatgaagctgtatatattgcaaagattgcaaaagagaamttaaaattgactgcttcacagttgacaattggaaaggaaatttccttgttcaagaaccaagaattataagctgtaccttttaacagcttagggtctgtgactttgaacaaatgcacgcttgtattgtaaagccctggacaattgcctccagtgatggcccagct

SEQ ID NO: 615285 - DNA, 560 bp, Homo sapiens
gaagaaaatgcgcccatagtatttaaccagtagaaaacctgaaaatatattaaatgtctttctrgatcaaaacattactgaagaaatgaaatgaacttacaactagtttaataagaggtgaggcctagggatacatgtggataatgaatttatttacaatgttatataagcttatgggcatttattgataattgacagaaataattagttaatagtattagaagcaaaacttgaatctacattatcattcattcagctacacaatgatccttttaaatgatgcctgagcaagcacatcattttaaaggaggctatacatgtgatatatttatttaaggcttccttagtcttactgtacagttttgagaatgagcaagggtaatttggtacatggatctcactttcctatattcacgatatcccatagtcagctatctagcactgagcaagagcttggagaggaagaagctatcttctattgccagtgaaaaaagtgttgtcaggactttcgtgcaccaaaatatcacaaatatggcttcatacagaatagcactgcccaa

SEQ ID NO: 615286 - DNA, 560 bp, Homo sapiens
gaagaaaatgcgcccatagtatttaaccagtagaaaacctgaaaatatattaaatgtctttctagatcaaaacattactgaagaaatgaaatgaacttacaactagtttaataagaggtgaggcctagggatacatgtggataatgaatttatttacaatgttatataagcttatgggcatttattgataattgacagaaataattagttaatagtattagaagcaaaacttgaatctacattatcattcattcagctacacaatgatccttttaaatgatgcctgagcaagcacatcattttaaaggaggctatacatgtgatatatttatttaaggcttccttagtcttactgtacagttttgagaatgagcaagggtaatttggtacatggatctcactttcctatattcacgatatcccatagtcagctatctagcrctgagcaagagcttggagaggaagaagctatcttctattgccagtgaaaaaagtgttgtcaggactttcgtgcaccaaaatatcacaaatatggcttcatacagaatagcactgcccaa

SEQ ID NO: 615287 - DNA, 529 bp, Homo sapiens
ctctaagcacaagacttgcataaaatgtctttctgtatggttttaatttgtatttccctgatgattagtgatattggtctttttcttttttaaaaattaaattaaaatttatttttgggctgggtgtgatggctcatacctgtaatcctagcactttgggaggctgaggctggagaattgcttgaggccacgagctcaacattgatctggccaacatagtgagactccatctctaaaaaaagaaaaaaaatcagttttgatatattataattacacataattatgggatacaaaataaagttatgatgtatgtatacaatgtggaatgattcactcaaggtaattaacatattcatcaycttaaatacatattgtttatttctcctaactgcaactttctacactttgaccaacatcttctcattcctcctacccctctgccagcttctggtaccaccattccattttttgcttccatgagctctattgttttagattctatgtgtaagtgagaacatgtgggatttgt

SEQ ID NO: 615288 - DNA, 459 bp, Homo sapiens
tacaatgacacagaactgccaaggtcttattaaaatcctaacctatagcaaacaacaaatgaaacacacataaaatgtatttgccatgagtgcaatgtaaaacctaaaactttctgttttccccaagtctcacctttgaaaggcatctatgccactcactgctgagaggtaaggcatctyctcacagcttccccactggccctccacatggtgcttcttgacaaggcattattgccctcttatctcagaattctcacctgagcatcacctccattttttattatgtttattatttcaaaaattttgttaagccctacactttctccttagtgatgggaatataatgatgggggatatagaacataatcccaaagctcctgaaacttaagtccagggagaaagaaagaaaattaaatgagcttggagaacattaacacatcctcatctatgttcttggtc

SEQ ID NO: 615289 - DNA, 503 bp, Homo sapiens
tggccagactggtcttgaactcctgacctcaaataatccacccaccttggcctcccaaagtgctgggattacaggtgtgagctaccgtgtctggcctattttttttttattaatcatggcctagaaataaaatatcacaattattatcacatattataggacttgtatgcatctgtgcatcttgatttttctataattattttgtttttggagttctaaaacaagcattactaatctttcraaatttcaaaattatatcaaagttgattaaatcaaagtcttacactttaacttcctccagtagagacagaaagactcagacgaagagagagcaaaatggatagaaaggaaaccagtatgagagcaacagtgagagagacagagaaaataatgacacaagaacaagagagagaacaagggaaggtgtagggaggagagaaggcatagggaagagacaaagtgagggagagaagaagaaaaggagatgcaaggaaatgttacat

SEQ ID NO: 615290 - DNA, 679 bp, Homo sapiens
tcctgctagaaagtaaattctctaagggcaagtgccttttatttcacttccatacatctgtctatagtattattcttggcataaaagatccatgcagtaaatattagttgaataaaagaataattgagaggaatatggttaaatggataataacctcagtttagtatctgtggccaccatgagaatatcttcaaatatttgagaggccctagcaaccgtgctctgaagctcatccctgcattcttgcctgggccagccttccatgggctgctcccagccagtgaccatgcatggcagggctgctaaggctggatcattcatgagagccgagaggctcctcgtctgaacctccrttaagcttagtggcagtctgggatgtttccttttccatctccttcacatggggttagatttgcagcatgtctcatggctctccaagcacatgctacctttcacacatttaattctgtcttgttgtctgcttcttggaggaatttggctaatagtaattatattaaaattatttattgaaaaaaaaatatttgctgaggatctactatgtcagatattttgctagtagcctgaaattcatcttgaataaaatgcaatcactagacaaaagaagctagttggaaataaagactggtcaccagatataatacaaaggtacaattgctag

SEQ ID NO: 615291 - DNA, 679 bp, Homo sapiens
tcctgctagaaagtaaattctctaagggcaagtgccttttatttcacttccatacatctgtctatagtattattcttggcataaaagatccatgcagtaaatattagttgaataaaagaataattgagaggaatatggttaaatggataataacctcagtttagtatctgtggccaccatgagaatatcttcaaatatttgagaggccctagcaaccgtgctctgaagctcatccctgcattcttgcctgggccagccttccatgggctgctcccagccagtgaccatgcatggcagggctgctaaggctggatcattcatgagagccgagaggctcctcgtctgaacctccgttaagcttagtggcagtctgggatgtttccttttccatctccttcacatggggttagatttgcagcatgtctcatggctctccaagcacatgctacctttcacacatttaattctgtcttgktgtctgcttcttggaggaatttggctaatagtaattatattaaaattatttattgaaaaaaaaatatttgctgaggatctactatgtcagatattttgctagtagcctgaaattcatcttgaataaaatgcaatcactagacaaaagaagctagttggaaataaagactggtcaccagatataatacaaaggtacaattgctag

SEQ ID NO: 615292 - DNA, 527 bp, Homo sapiens
agcaacagtgagagagacagagaaaataatgacacaagaacaagagagagaacaagggaaggtgtagggaggagagaaggcatagggaagagacaaagtgagggagagaagaagaaaaggagatgcaaggaaatgttacatttctggagccagttaaaataatgcatagttatcatagggtctctattaaaagttattataagctcagctctggaagccattaggtgggtgtcttaacagttgaaagagtccaggacttcaacttattgtgctgatacyaccacagtccccactttcctgcttcagtttcctcctttataatattgggaaaagtataaaaccttccaaaaaaataagataatagcttattcctactatattaggaattgctatgagaattcctattgctgtgagaatccaaagagataatgaatataatttaacgtagtactttccaaccatatatcttcatacaaaagatatcgccatccttctaaagatacattttaggggcaacaaaattgtat

SEQ ID NO: 615293 - DNA, 579 bp, Homo sapiens
ccaactctaatttgctattattccaaaatagtacagggggaggggtgcaggaggaggaagagagggggagagaaagasagagaatctataataagctgctttccatcttccaacatattgtaacctttttagtcatctcatcatctgaaatatctctccaggcacctaactgatcacttccttaccctgtcttcccccaactaccttgcctcagatgcgttcgtattccctgctaggcctgtgtgagacacctgggctttggaagtggcatcccaacacagcatctccagagccgtatgtctggaggagacaaagggggagggtgctgggatttgatccgcagcctcactttcccgtccttcttcaatccttccctcctaggatggtttcggtcagcaaaatcacactggggacagaaaaggctctcgtaacccgtggcaaccagctgcctttggatagaaaatggctttttcataatttcataatgtgctttagcagagcgggtggggaaaggaaatgggaaaataaataaataagtctgcttctgaaggctgctgtactcaagcaagggaatgatga

SEQ ID NO: 615294 - DNA, 579 bp, Homo sapiens
ccaactctaatttgctattattccaaaatagtacagggggaggggtgcaggaggaggaagagagggggagagaaagacagagaatctataataagctgctttccatcttccaacatattgtaacctttttagtcatctcatcatctgaaatatctctccaggcacctaactgatcacttccttaccctgtcttcccccaactaccttgcctcagatgcgttcgtattccctgctaggcctgtgtgagacacctgggctttggaagtggcatcccaacacagcatctccagagccgtatgtctggaggagacaaagggggagggtgctgggatttgatccgcagcctcactttcccgtccttcttcaatccttccctcctaggatggtttcggtcagcaaaatcacactggggacagaaaaggctctcgtaacccgtggcaaccagctgcctttggatagaaaatggctttttcataatttcataatgtgctttagcagagcggrtggggaaaggaaatgggaaaataaataaataagtctgcttctgaaggctgctgtactcaagcaagggaatgatga

SEQ ID NO: 615295 - DNA, 454 bp, Homo sapiens
tgctatcttcatgggggacaattcttaatgtggcataattcaaaacttttattacagcccaacccctatcattatgactcagataatgttcccaggagtttgcctaatactcagaaaacaacatcytgcaggctaatgatgtattgattctttggctatgaggtctgcatgaaaggaaaacggtgatgagtgggctgggatggtatacatgggtgtgtagttgcattaaacaatactaatcaacaagtttggctgctccttcagtctttcctccccctgcccccccaatattctgttaggcttcaaactggcattttatccccttgttttttaacaaatgacttttgcaagaggcagcatagtgttgtgtgaaatggactctggactgtgaatcaaaaaccttcattctcatcctaactctgcaataaacaccactcatgaatttgagcaagcc

SEQ ID NO: 615296 - DNA, 579 bp, Homo sapiens
ttgggaagaaaatggtaaaaagcccaggactctcacccttccaaacctatgtgtggaamctgttagcctgtatgacccaattcgcctgtgagatgactccattaacatggaaatgccagctttggaaattgtgttttcagagttcacaatatagctcagaaagtggccaaaatggatgttgtagtgtccattttgactgggtagagctctcatgggtttctttgcatttttttaatgtgcactaaagagccaaagttgctgagcagataatgcaaagatacaaacatgttcttgtgcagaggataaagaaaagatctggaagtcaaaatgtatcatatatagtgagataacattattaatgaattatttgtccattccttaattagataaatatttgtggagtttcaaacattgtaaactgtacagtgggtataatgatagaatcaacagattttagatgtgagtttcaatattcaatgatgagtcttgtaattggagttaagaagtgtcatgggagtggatatcagatgttcctaaccatgaattaagttctgtattgagctcaggcaggaaataaat

SEQ ID NO: 615297 - DNA, 587 bp, Homo sapiens
gtatggaaacaagtaactttgaaattattaaatccatgataagcacctttgacaaaggaagtgtcacaggacttaggcagaaagagaagttgattccaattaggtgatctatcaagaaaagcttaaatatccaggtaaacatctataaaaacaaaatacatttggaaacatagtaataaagaaattagacttatcgggacttgctctaagaaggttagccagttggtatccaagttgaaggaagatatattacaaargaggtaatatctgagctgaagcttgaaggatgagtaggatttattaggataaacaagcagagggaaggccatgccaggcaggggaaacatcgtatgcaatggcaagaagatctgtaaaataatggtttgcttgtttttttgtttaaaagcagttcagtgtgaaaaggcactgctgagatattgctattactgacactgagactgaggcacttctattcattcagactcaaagcatgtgacctcaactctgttcctacaaccacgatcttacgtcaggcccttctcatcccctcttggacagcaaactactttccttgccatctcctctct

SEQ ID NO: 615298 - DNA, 533 bp, Homo sapiens
tggggttgcttgatttttgcttttaagttccttatagattctatatattagaattttgtcagatgcatatttttaaatattttctccaattctgtaggttgtttactcagttgatattttcatttgckgtgaagtagccctttaatttaactaggtctcaactgtcaacttttgcttttggtgtcttcctcatgaacaccaccctgctctctctaggttcaacggtcaccttaaggctaaagtctcctagaggaacatggagagcgttggaggatgagcaactctgaccatgctgcactgcaactgtttccatgccagactctctaggctgtgcacaagctggaatcttgctcctgccacctatctaagcagctctccctgccagcttaagtgtctgtggcagttgtggggttttctgctgctagattctggaggcaactcctcacctgttcaattcacctcttcccaggagtcactggaggccaggaacaagtctccgtgctcagccacccaatgcagagttctctgcttcc

SEQ ID NO: 615299 - DNA, 617 bp, Homo sapiens
cacaagtttggagtctagaagtccagaatcaaggtttcagcaggggcatactttctcttaagactcaaggaaagaatccttccttgccccctctggctttttgtggttaatggygatccttggtgttctctggcttctagatgatgcatcactttaatctctgctccatctctgtccacgtggcttactaccctgtgtgcatgcatttcaatatccaaatttccctgttcttataagaacaccagtcatattagatttaggactcatcctaatacaggatgacctcatgttaacatgtctacttgggcatactctatttccaaagacggcaaagatggtcacattctgaggttccaagtagcatgaattttgggggaacactgtctgatccagtacaatgtgggagaaaatagaaaagaaaaagattacataaagaagtctttgtaggtcaagtagatgtcaatgaagactatgtcaatgaagttaaattaaaatttaaaatctaacattcagaaatgtaacttttctgaataatattataaaaattttctatgttctgtaatatacaaatataaatgtaaataaagaatgcaaactgaaatgggaaggagaccaag

SEQ ID NO: 615300 - DNA, 596 bp, Homo sapiens
gtctctcttcaataaataaatatgtatattctcttttgtcattcttagaccaggaactgacaccatagcttttgaataaagaaaaataaaaaataaagtgtgcttgtgtcaaaggtataacacatttattctataaatactgagttagcattcactatgtgtcatgccctggtctagacactcaggatataataatgaatagattgtccaggtgtacttgaaggctcgctgtcttcctccctaagttgcacaccttatctccacagattggcctccaactatagctaaaattttcctctccacaagtgaagcaaattagctttcccgaggtacatatttaaaccagaatactgcactagaatgcaaaatgagatgagcttgcttctttttctactccaattttttgatacttaattagcttttccrtatagttataatagtaaattgggtaaaattgagtgctttgagctctaggccagcattaaaatgaagactgaatgattattctgataaaatccatacacaaccatcaacatttgggagtgatcctaaatctatttatgatttgggcaggtgggttttcatgactattgtct

SEQ ID NO: 615301 - DNA, 559 bp, Homo sapiens
  misc_feature 293: n = A,T,C or G
attggtcaatagcaaaattgttcagctaatcatttatgagataaagaaatggaatttttagagtctgtggctaacattgtgattcatagacaagggggtcatccattaatctaagtcataaggaatggttgatttttgcagtaggctgtttcctagaacacaaaaggcaagagggagagcagggtaagaagggagcaaggtgragtgttccgtacctgttttatttttcaggaaatcatgactcagttaaagttcacccctgttggagaaaagccaataagaataaaagcacncaaaaaataagttaatgtgtacccttaactgagctcctagtcattgggtggctaaaccaagtcatttatttcagaaggtaaaccacattccacatgatcaatgcaaaagtaattgctaaatatttatcataaaattaaaatgaataaaatttttagtttagtttttcttccacagacaatttgcaaaagcataaaaacacgtcttgtctgcaatattggcatataaatcaaatgattaaggataattccttccttagaaaacacag

SEQ ID NO: 615302 - DNA, 565 bp, Homo sapiens
attgactcacagttccacatgactggggaggcctcaggaaacttacagtcatggcagaaggtgaaggggaagcaagaaccttcttcacatggaagcaggagacagaaatgtatgagagcccaggaaaaactatcatttataaaaccatcagatcttatgagaattcactcactatcaagagaacagcatggggaaaaagttcccataaaccaatcacttcccaccaggttcttcccttaacacctcaggattacaattsaagatgagatttgagtggggacaaagctagagcatatcaggtagaaatggtcatgacaattacagtcctgtttttatagctggtcacatgccatcgctggtgtttataactactgtcttccactacccattctataatccctgtgccttcagcaagcacctcagctgcttgtgtttctttaccttgtggggtaacctagtctggagcatgagtaggactctacctgaattgggttgttatagtgttccattcactataattacaggacatggtcatactgagggacttcctaaggaatctcttgta

SEQ ID NO: 615303 - DNA, 591 bp, Homo sapiens
acacaaaccaaaagaaatatatcagtatccaaatccacgaaggttatagaacaccaagcacatttaaaccaaagaagactacctcaaggcatttaataatcaaactcccaaagatcaaggataaagaaaagatcctaaaaacagcaagagaaaagaaacaaataacatacaatggtgctccaatatgtctggaagcagagttttcagttggaaccttacatgccaggagagagtggtgatatgatttggctgtgtccccacccaaatctcaccttgaattgtaataatccccacatgtcaaagacagggccaggtggagataattgaatcatgggggtagttccaccatactgttctcatagcagcaaataattctcatgagatctgatggttttagaaatggcagttcccttgcataaactctctcttgctgctgccatgtaagatgtatcttgctccccctttgcttctgccatgattgtgaggcctccccagccatgtggaactgtgagtcaattaaacctctttcctttataaattacccagtctcaggtatgtcttyattagcagcatgagaacagactaatacaa

SEQ ID NO: 615304 - DNA, 617 bp, Homo sapiens
ttatggcacagttttgctgcattgccctgatgtatgatttctaattctttggatatgaccaaatcaaagctcaaactaaaagaaatttgtatataagtatacatcactgtatacatacatgtaaaatggcattgtaagatcccgtttttccccgtagatggacattacagtttagtccaagccagaagktaattgggtcaaccacacctggactctgaggattttaaattctagtgtcaaaaaactgcttctgacacattgagctgagctgaacctcatgctaggttcactgcgagctgaattctggctgagcagtataaatgatgtggctgtcttgaaacaaagccttctgaattctcaaactgacaggatctataaaaacttggagagaattcagaggaagccatttccataatcacagaactgggaagccagaaccactggaaaatgaagaaacttattttattcattaagggatagtagatggcatcattaaagaaaagttatattgatgtaaaaaaatgttatttagactatggcaatgaaatcttttccatttccactatatatgtgaacagtaaaatattctctttggggaattggaaatatataaaaac

SEQ ID NO: 615305 - DNA, 552 bp, Homo sapiens
ttacctcttagaactcttttttctacatcccataattttggtgtgtcatattttcatttccattcatctaaakatattttaaaatgcctctttaaaatgtattattttatccattcaggcacatattgtttaatttccatgtatttatggattttctcaaattcatcatgctattgatttctagtttcatggcattgtggtcagaaaacatacctgatatgatttcaatcttaaactttctaaggctttatttgtgccttatcatgtgatctaccttggggaaggttttaggtttgccttagaagagtgtattttctgttgctgttggatgaactgttttatgcaggtctgctaggttcatttggcctgaagtgttgttcagttccagtgtttccttattaattttctgttgagatgaatggtcctttattgaaaagttatattaaagtttcctattatcattgcaatatagtgtatctctcccttcaggtagtttaatatttgttatatttatctaggtgctcccatgttgggtgcatatatatttacaat

SEQ ID NO: 615306 - DNA, 552 bp, Homo sapiens
ttacctcttagaactcttttttctacatcccataattttggtgtgtcatattttcatttccattcatctaaagatattttaaaatgcctctttaaaatgtattattttatccattcaggcacatattgtttaatttccatgtatttatggattttctcaaattcatcatgctattgatttctagtttcatggcattgtggtcagaaaacatacctgatatgatttcaatcttaaactttctaaggctttatttgtgccttatcatgtgatctaccttggggaaggttttaggtttgccttagaagagtgtattttctgttgctgttggatgaactgttttatgcaggtctgctaggttcatttggcctgaagtgttgttcagttccagtgtttccttattaattttctgttgagatgaayggtcctttattgaaaagttatattaaagtttcctattatcattgcaatatagtgtatctctcccttcaggtagtttaatatttgttatatttatctaggtgctcccatgttgggtgcatatatatttacaat

SEQ ID NO: 615307 - DNA, 645 bp, Homo sapiens
ccagcatggcacatgtatacatatgtaactaatctgcacattgtgcacatgtaccctaaaacttaaagtataataaaaaaaatgaatattcaagcaatattcaaaaatgtcttctccagaatgtgaagtttttataggcttttctgtgaatgaagattatatattgctttaaaaaaaaaaaaaaggactgtgaagtaaggcctccttgccaaactgttcrgccatctaagattatgaactgaatgagatgtaatttctattgtgttaagtcactgaagtttccagtatttttactagaataaatagcattaccttaactagcacaattatactgaatgcataacatattgtgtcactgtgggctgaggataccattcactatgttaaacagtagagaatgttgaactacgtaactagatttcagaaatacaaggaagatcaccaggtctactacagatcaggaatcataccattttctaggtgggaatatggcactcttctatggaaataagacaagagctaggtaaaccatctatgacatttcattgccttttgcaggctagaactcaaggagtatagattctggggcagggtcagagtaagacagccaaggtagaagtggaacacctatacttttcaagccaa

SEQ ID NO: 615308 - DNA, 549 bp, Homo sapiens
atagtccctgctactcaggaggctgaggcaggaaaatggcatgaacccaggaggcacagcttgcagtgagccgagatcgtgccactgcactccagcctgggcaacagagcaagactctgtctcaaaaaaaaacaaaacaaaacaaaaactaataataatagttataattcgtttgtcacttatgtccttttatttttcaattatcatgcaccattgtgtgcttcayaaatgttaactcattcagtctttccaaacagccttatgaagtagctgttattaccagactttacaagagagtaaagtaaagatcagagaagccatatggctgtctgagaaaccttaagctagtgaatagcagggttcagatttgaacctaggtctcttaaatccaaagcccatacttaagagtcagaaatggcaaatctacagaagcaaccttagacattattttgaggatattgaaaggcttaataggaaagagtgctatgattgattattaatgcctgttttgtttgtggaataaggaagtaacagcagaaataccacaag

SEQ ID NO: 615309 - DNA, 460 bp, Homo sapiens
gtcatccctggtatctatgagagattggttccaaaatgaatccaaactccacagatgctcaactgccttatacaaagtggtgcggtatttacatataacctgtgcacatcctccagcatactttaaattatctctggattacttataataccgaatgtacccacaaaaattaaaaataaaaacataaaaagatatacatgctatgttaatatagttgcccctccgtatacacagggaattgcttccaggacacccatgtataccaaaattcatgcatactcaaatcttgcwgtggctctgtggaacccacatatatgaaaacccggcccttcacgtatgcaggttttgcatcccatgaatactgcatttttgaaccacatttggttgataaacatctatgtataattggtcttgtgctgttcaaacccatgttgttcaagggtcaactgtaggtgttatt

SEQ ID NO: 615310 - DNA, 578 bp, Homo sapiens
cataatttaataatcaaaacaactttaaaaaatattaatggctgggcacggtggctcacgtctgtaatcccagtactttgggaggctgaggcaggcagatcacctgaggtcacaagttcaagaccagcctggccaacatgctgaaaccacgtctctactaaaaatacagaagttagctggtcgtggtggcagatgtctgtaatcccagctacttgggagggtgagacaggarcatagcttgaacccacaaggcggaggctgcagtgagctgagatcacaccactgcacaccagtctgggcgaccgaacaagattccatctcaaaaaaaaaaattatattattcacatttatagaaacagacttaaagaacttaaacggttgcctaagttcacctagtgagttgtaaaaccaaattttcaacatagatagaagaacttcagaatttgcacatttaacctctacagcagaaccgttctcacttggttctatcagtctttttcatgtgttagtaggttttatcattctaacattggtaatcaactaaatggtaagtaatattaaatattaatgatataatt

SEQ ID NO: 615311 - DNA, 578 bp, Homo sapiens
cataatttaataatcaaaacaactttaaaaaatattaatggctgggcacggtggctcacgtctgtaatcccagtactttgggaggctgaggcaggcagatcacctgaggtcacaagttcaagaccagcctggccaacatgctgaaaccacgtctctactaaaaatacagaagttagctggtcgtggtggcagatgtctgtaatcccagctacttgggagggtgagacaggaacatagcttgaacccamaaggcggaggctgcagtgagctgagatcacaccactgcacaccagtctgggcgaccgaacaagattccatctcaaaaaaaaaaattatattattcacatttatagaaacagacttaaagaacttaaacggttgcctaagttcacctagtgagttgtaaaaccaaattttcaacatagatagaagaacttcagaatttgcacatttaacctctacagcagaaccgttctcacttggttctatcagtctttttcatgtgttagtaggttttatcattctaacattggtaatcaactaaatggtaagtaatattaaatattaatgatataatt

SEQ ID NO: 615312 - DNA, 613 bp, Homo sapiens
caatctctaaacatttctgatgccttcactttctatttatcttgtggcataattataagattttagaaaagaaggttagagattcaaaacatgtacattttatttttacttccaaatatgttgttattaaaattaatcaggattaatttgaatagcttgcttgytgttttttgcatgttgtttatcatactatgtaattaaggaagactctgagttgccttatatatagtaaataattgaaaaatacaaataaatgtataaaaacagatccagagaaaatccatataaacaatgaagattgaaataagaaggaaactcaagcacatatatgtaaggccttcaaaccatacaagttaccaaagtcatcacagactttgattctcagctttttgaaatcaaagcaaaaagagaaaaacaattttcaatgcttttcagaaaaatatactatttatcagaaagtgcaaagaagtgttgtgacatttcatactgacagtagtaatagcaatattaaaaataataatgggagggcagtcaagatggtggactagaagcagctaatgtgcaccactgtcatgaagagggaacaaggtggctagtaaacactgaccctgca

SEQ ID NO: 615313 - DNA, 631 bp, Homo sapiens
agaaaaatatactatttatcagaaagtgcaaagaagtgttgtgacatttcatactgacagtagtaatagcaatattaaaaataataatgggagggcagtcaagatggtggactagaagcagctaatgtgcaccactgtcatgaagagggaacaaggtggctagtaaacactgaccctgcaagccaatcatttaagaaaccacgttggcatgcatcaaggtagcaaggtgagacagagaacagagaagaacaaaactgggcaatagcctatctgggatcagtgaggaagtcaggagaagctccccaacaagaggaaagggtaagtgagaacccacaggagatccacatttctcacagggacctgtgcaatcctgcaaaygggagaatcacctggcatccctaagtctctagactgacacggagaattgcaagtctacagagacttccatgggtcttggaccccagaacagctcagcgtcagccccagtagaggccacagtcatggtgcccaagagcagtaagattgctctactctctctcacaagacaaggcttacaacttaggtgcctgcccatcaatggtggactggataaatatatataaatctgcatatatatatatagagagagaga

SEQ ID NO: 615314 - DNA, 631 bp, Homo sapiens
agaaaaatatactatttatcagaaagtgcaaagaagtgttgtgacatttcatactgacagtagtaatagcaatattaaaaataataatgggagggcagtcaagatggtggactagaagcagctaatgtgcaccactgtcatgaagagggaacaaggtggctagtaaacactgaccctgcaagccaatcatttaagaaaccacgttggcatgcatcaaggtagcaaggtgagacagagaacagagaagaacaaaactgggcaatagcctatctgggatcagtgaggaagtcaggagaagctccccaacaagaggaaagggtaagtgagaacccacaggagatccacatttctcacagggacctgtgcaatcctgcaaatgggagaatcacctggcatccctaagtctctagactgacacrgagaattgcaagtctacagagacttccatgggtcttggaccccagaacagctcagcgtcagccccagtagaggccacagtcatggtgcccaagagcagtaagattgctctactctctctcacaagacaaggcttacaacttaggtgcctgcccatcaatggtggactggataaatatatataaatctgcatatatatatatagagagagaga

SEQ ID NO: 615315 - DNA, 456 bp, Homo sapiens
caagacaaggcttacaacttaggtgcctgcccatcaatggtggactggataaatatatataaatctgcatatatatatatagagagagakagatctatatataaatatatataaatctttatataaatatacattttatatatatatatatatatatagtatgaaatcatgttctttgtggcaatatggatgcagttggagttcataatcctaagcaaactgatgcaagaagagaaaacggaataacgaatactgcatgtttctcatttataagagtgatctaaacattgaatacacatagacataaagattaaaataacagagcaacagagactcaagatgactagctgggggagggagaaaggggagcatgggctgtaaaaacacctatttggtattatgctcacttcctgggtgatgggatcatttgtaccccaaacctctgcatcacacaat

SEQ ID NO: 615316 - DNA, 596 bp, Homo sapiens
aacatctttttcatgtacattctaacaatttcaaattattttattatcttaaaaagtataaacagaaagtagagcaggattaagtaaactattgcaatactgaagcaaggggaaaactaaaatattaagacgccttaaccgagcaaatgctcaaaagtcagtacagtataaatggtgtctactgactttataaattgttgaggaattctcttgtcattgctcattaggctttaactgggtgcacattagtcaggtaccaatcagtgactactcaaataatcattagttactgctaattgagtgtattatagactgtcttttcaggttgatctaaataagcaggccaacagctgtacaaccagckgcaaattcatactgcttcattaagtgaggttctgagagtttgaaagatcttaaaatgggcttgtgcaagaaatctggcaccaatttatgaacaacaattgaaacaccccaaatccactgatactgagaatacatttcctagagatgctgaaatctgagtgtagatttaaatgaatttcagtttgttttagatctctaataaggagaaatatagtctttgtatatatgcataa

SEQ ID NO: 615317 - DNA, 547 bp, Homo sapiens
tgtttgtgtctatgcacttgaaacatcataaggtagaaggagtgtcacttttcacagcactagttacttcttttatcattttacaaaaatcattagctagtgtatacatttttttcttccaggctgtcagcatkgctgcaacagttgactttcttctactgagtactggtgacaatagcaactatataaatagttgctattatacatacatatatgtctttaagcctcaatttagagaggaagagttggaatcagtggttcaaagaaatatacagcaaggaagttaatggttccagccaattagtataattaatttgtagtatctaaaatatagctccttttaatatttgtgcctcaaaaagacaagtgttgggcactaaatgtgttttttaaaatatacatttttaggctacttttatgttcccggcaaaattgagtgtaagatacagatatttttctatatactccctgctccaagcaatatatagtctcccctattatcaacattccttaggacttataaacctacattaacacatcatcaccc

SEQ ID NO: 615318 - DNA, 597 bp, Homo sapiens
attttcttatagtcctggaggctgtaagtccaacatcaagggaacagcaggattggtttctggtgaggcctctactggctttcagatgactgctttctcgatgtatcctcacatggctttttctctgtgtgcatacacttctggggtctcttcttgtaggacaccagcagtattggattaacagtattggcyctattgatctcatttaatcttaattaccttcttaaagacactgtctctaaataaagtcacattggggcactagaccttcaacatatggatttggggaccataatctaccctctggtcccccaaaattcatgttctctggcatgcaaaatgcattcaccccatctcaatagtcttaaaagccttaacccatcccagtatcgactccaagatgaaagtgtatctaaatatcacatatcgcgtatggtaagacttgagaggcagcatttgaaatttgtttgtgaataattcttctcctgctatgaacctgcgaaacctaacaaggtatgtgcttccagaataaaatggtaggacggacataggaaagacattattgttccaaaagacagaaattggaataaagaaagg

SEQ ID NO: 615319 - DNA, 597 bp, Homo sapiens
attttcttatagtcctggaggctgtaagtccaacatcaagggaacagcaggattggtttctggtgaggcctctactggctttcagatgactgctttctcgatgtatcctcacatggctttttctctgtgtgcatacacttctggggtctcttcttgtaggacaccagcagtattggattaacagtattggctctattgatctcatttaatcttaattaccttcttaaagacactgtctctaaataaagtcacattggggcactagaccttcaacatatggatttggggaccataatctaccctctggtcccccaaaattcatgttctctggcatgcaaaatgcattcaccccatctcaatagtcttaaaagccttaacccatcccagtatcgactccaagatgaaagtgtatctaaatatcacatatcgcgtatggtaagacttgagaggcagcattygaaatttgtttgtgaataattcttctcctgctatgaacctgcgaaacctaacaaggtatgtgcttccagaataaaatggtaggacggacataggaaagacattattgttccaaaagacagaaattggaataaagaaagg

SEQ ID NO: 615320 - DNA, 583 bp, Homo sapiens
atatacatttcctttatatatatgtaatatgtatatatagtatgaaattggaccaacatattaagaatcactttcctcttaccacaacatgaagcaatttcaacatggatgctccaacttcatttgggatacttcacatataaggatcctatatcttgaaaccatctccagtggatttcctagatgaaatgaaacagaaactcttgggaacatggaaaataaaaacctagcttctttcagtagtgctcagctaaaattccacatcattctccatcttgctggttttgccctaattatttaaaaaaatgtttacttccaatccaatttgatgtacccatccttgatgacactattgcttgcattttcaggtaatgcattttattatatgtgttttcataaatcaatgagtattcttaaatgtatattaaaaatcaactaaatatcagmaatagcatatagatgagaaaaaggaggacagcaatcaagttacagtgtgttagagaaagaaaaataatttgaatatatagcttttctctttttcagatgcttgtggatgtctttctaaaagttgaatgaataaaaa

SEQ ID NO: 615321 - DNA, 583 bp, Homo sapiens
atatacatttcctttatatatatgtaatatgtatatatagtatgaaattggaccaacatattaagaatcactttcctcttaccacaacatgaagcaatttcaacatggatgctccaacttcatttgggatacttcacatataaggatcctatatcttgaaaccatctccagtggatttcctagatgaaatgaaacagaaactcttgggaacatggaaaataaaaacctagcttctttcagtagtgctcagctaaaattccacatcattctccatcttgctggttttgccctaattatttaaaaaaatgtttacttccaatccaatttgatgtacccatccttgatgacactattgcttgcattttcaggtaatgcattttattatatgtgttttcataaatcaatgagtattcttaaatgtatattaaaaatcaactaaatatcagcaatagcatatagatgagaaaaaggaggacagcaatcaagttayagtgtgttagagaaagaaaaataatttgaatatatagcttttctctttttcagatgcttgtggatgtctttctaaaagttgaatgaataaaaa

SEQ ID NO: 615322 - DNA, 583 bp, Homo sapiens
atatacatttcctttatatatatgtaatatgtatatatagtatgaaattggaccaacatattaagaatcactttcctcttaccacaacatgaagcaatttcaacatggatgctccaacttcatttgggatacttcacatataaggatcctatatcttgaaaccatctccagtggatttcctagatgaaatgaaacagaaactcttgggaacatggaaaataaaaacctagcttctttcagtagtgctcagctaaaattccacatcattctccatcttgctggttttgccctaattatttaaaaaaatgtttacttccaatccaatttgatgtacccatccttgatgacactattgcttgcattttcaggtaatgcattttattatatgtgttttcataaatcaatgagtattcttaaatgtatattaaaaatcaactaaatatcagcaatagcatatagatgagaaaaaggaggacagcaatcaagttacagtgtgttasagaaagaaaaataatttgaatatatagcttttctctttttcagatgcttgtggatgtctttctaaaagttgaatgaataaaaa

SEQ ID NO: 615323 - DNA, 569 bp, Homo sapiens
acgacgagaatgccagatcaccttttgtgcagaatgtgatgttctgctttgtggtgttgtgtgctttgaaatttaccacatgaaaaaaaagttattaaatagtgatcatcatatacatttctgttacatgaggattagtgamcagttctgtttagaaataattctaagaacagtttttatattttattttcacattgaaaatcagtcagacttccttcactctcaaagagcatatttacataaaaagaaatgagcactggcagcaagctgcccttttttttttttttctgaatgggaaggatacacattttcatctaagcctaatttagcagcatcctgcaaattttgtatattatgttttattataattcaatacaaaatattttctaatttcatttgtgacttattctttgacacaatggccatttagaaatattttgcatcatttctagttttaggggttttctatttagtctttttgttattgatttctaggtataaaacagtgacatcagaggagatattctgtatgactctaattgtttggaagttgttgagatgtgtttatg

SEQ ID NO: 615324 - DNA, 611 bp, Homo sapiens
aaagtaaacgtgttttttcttcttgctgatttcaaaatgtttttggtttcagattttagtagttttgctatgatatgcctaggtgtggttttctttgtataaatactggtttaatctgaggcttaatgtcttttataaatttttggcaattttcagctgtaactttcaaatattgcctttgactctctctctctgctccctttatatgactctaattatatatacatatatagagagaactatatataatttatattrcaatatgaattagaccttttaattatctctcatatatctctcatattttctgaattttccagctactttgctcttctttctttggcttgaattagtttctgttgacctaattcctggttaactgttgagtccatattgaattcttaatttatattattatatttcttagccatagaatttaattttttttataggtccctgttctctgattgcattctctatcttgtcatctatttgtctgaaacatattactcacagttattttcaagtttatgtctgataactccccaaactaggtcatctctggttcttttctattatttttatttttctctgagtcttgcctgttgatt

SEQ ID NO: 615325 - DNA, 580 bp, Homo sapiens
  misc_feature 235: n = A,T,C or G
tctcatataattaacatgagcttgttgagtggatctgcacattaactctttcaagaggagattatattattcataatacctgtgatgaattaaaaaccttcagagaagtgatattcccaaggtcatctaaataatggtcagaatttaagtctagggcccaccatgctgctcacctattcctgcagcctcggtacagatcgtaacttctgttttcatgtgctttattgctacactntgaatgtttgtcctttccaaaactcatgttgaaatttaattgccatcgtaacagtattaagaggtgggacctttaagaggtgattaggccataagagctccattctcataggcagtgttgataacattataaaagggcaaatttggtgtcatcttaccctgtctttgctcttctgccttctatcatgtgatgccacagcaagaaggccctccccttatgctactgtcttaatcttggacttcccagcctctggaactgtgagctgataaatgtctgctaattataaattacccagtctcaggtattctgctagagcmtcacaaaatggactaacatatccattca

SEQ ID NO: 615326 - DNA, 535 bp, Homo sapiens
tccattctcataggcagtgttgataacattataaaagggcaaatttggtgtcatcttaccctgtctttgctcttctgccttctatcatgtgatgccacagcaagaaggccctccccttatgctactgtcttaatcttggacttcccagcctctggaactgtgagctgataaatgtctgctaattataaattacccagtctcaggtattctgctagagcckcacaaaatggactaacatatccattcacagcctgaagtagactgtgctcttgtaggggccccctacattttagcctccctgattgctgattcatagcttagacttatctctgaccagtgtgctctttgcttctctgatgctgatatccaatgagggtcaagatgtctaatggcccatggtggtattttaagtgtggcttaaatattgggagcaacaaaggaggctcttccacacaggtagtttgttgatctcccagcatcttgaggtaggtagcattgatattaccacaccaattccatagatgaagtaattgag

SEQ ID NO: 615327 - DNA, 644 bp, Homo sapiens
atataaaatcaagaaaaacataatagagtttttgatttctccccttgaatttgtgtgagcttttgacttctctgattaataaaatatgggagaattattacatgactctcaaggttagatcacaaatgccatgctgcagtactatctttgggaactaagcagtatactacccagttcattggaacactatcttctggaactaactaggaaccactgttcttaagaggccatgtggtgatactctggtctaaagttccagctgagtctagccttccagacatcccagccaaggcactagacatatgagtgaggccatccttggtsctctaaaccagaccatctgccaggtgaataccactgagagagcacaatgctacttggagaaaagtcacacagctgagccctgctcaaatacttaactgcaaaatcatgagatataataagatagtttttgtttgaagctactaagttttgagatagtttttttcagcaataaattagacaaaatccttaaaactctgtgcaccagtatgagaatgtataaaatagaatgaagaatagtagctgtcttgcccccttcatatagttaaaagtgggaggagtaaataaaagaatgaatttaacaacatattgtatactacgaa

SEQ ID NO: 615328 - DNA, 542 bp, Homo sapiens
atcctcctgccttagcctcccaagtagctgggactatagtcacgtgccaccacacccagctaacttttttaattttttgtagaaacagggtctttccatgtttcccaggctggtctggaactcctgggctcaagccatcctcctgccccagcctcccaawgtgctggggttacagacgtgagtcaccatgctggacccagcaaatttccttagagcacttttggttgtgacaggtggctgtaaatggtggtaagttttggttcaggccttcctctgcttctttctacctctggtggcagttgcacataagctgttattttgcctggggtgctcccttaattcggttactgagttatctcctactcctaatttctgctcacacatcacctccacaccattacctgagcccacaaattagttgaagtttctctgtcatagcttgtgtgggtccctgtgtatttacataactatatttatcacagtggtattcatatttagtaaggaggtgtatcctcacactacattcagatatacaagaaaat

SEQ ID NO: 615329 - DNA, 542 bp, Homo sapiens
atcctcctgccttagcctcccaagtagctgggactatagtcacgtgccaccacacccagctaacttttttaattttttgtagaaacagggtctttccatgtttcccaggctggtctggaactcctgggctcaagccatcctcctgccccagcctcccaaagtgctggggttacagacrtgagtcaccatgctggacccagcaaatttccttagagcacttttggttgtgacaggtggctgtaaatggtggtaagttttggttcaggccttcctctgcttctttctacctctggtggcagttgcacataagctgttattttgcctggggtgctcccttaattcggttactgagttatctcctactcctaatttctgctcacacatcacctccacaccattacctgagcccacaaattagttgaagtttctctgtcatagcttgtgtgggtccctgtgtatttacataactatatttatcacagtggtattcatatttagtaaggaggtgtatcctcacactacattcagatatacaagaaaat

SEQ ID NO: 615330 - DNA, 516 bp, Homo sapiens
gcttcctgagtagctagaactatagccatgtgccaacacacccagccaattttttattttttgggagttgagttgctatgttgcccaagatagtcttgtactcctgaactcaagtgatccgcctgtcttggccctcaaagtgttgggattacaggtgtaagccaccacacctggcctcaacaaatatttcttaaatgcctaatatatgccaggccttgtcttaagtgctgaggattcagcaacaaagaacacagaacagagagtactgttcttatggagttaatagtctagagacaacgtgtgttggcagagtcctggcatgaaagtcatgccacactaaaactggagacagggatagttgtgtaasataactacccgatggaggattagacctttggttgatagcaactaaccaaccctcaatcctaccagtagacagaagagcaataaacactcagcctcaccttgctcttgctctcgctctctaacttcctgctggtggtcctttttggccaa

SEQ ID NO: 615331 - DNA, 545 bp, Homo sapiens
cctttggttgatagcaactaaccaaccctcaatcctaccagtagacagaagagcaataaacactcagcctcaccttgctcttgctctcgctctctaacttcctgctggtggtcctttttggccaaattgaactggaagttagaggacaggctagcccactaacagtttgtgcaggtcaggcttctggactacatagttcaaaagggtggagagtgactatggaggagaaacaaatggcatccaacacatatgtgtgaagttcaaccttcagaactcagtaagaatgtggtctggggaaaacagttgcrtaaagcagaatgccaattctggcattgatacttctcctgaaaataataataataacagcaagagaaaacatttattgaaaacatactctattgttgacatgagctgagagtctgtagcatatgatatcccataagctctctccttcaagcattattctaaagggctctagaagctggccatttgccaaattttaaacattttaaaccaatatatgaagagttaaactgcctgaggga

SEQ ID NO: 615332 - DNA, 474 bp, Homo sapiens
gccaaattttaaacattttaaaccaatatatgaagagttaaactgcctgagggaccctttcacatctttctatgttttatatattagagtctrtgaataaaaagaagaagaaaagccactgggtaactatacatgaaacattcacattcaaccagccatagtgagcacaataaaagattgagaagcactaattactaaatcaaaatgtattcttgttggcaaaatgccttagtaactccctgattttctctcagattaggcacttgctaaaggtccatgggacctgggaggcagagggtgaaagacacagggcatggaatagctcccatttccttcttaaaatattcttaagtagaaaggctattcccaaagaggtgccacagggactaacccatttatgagaatgaagtgatttgtccacctgagagacaagtttccagtcactcaggccaatatcagattcgatacgcaaat

SEQ ID NO: 615333 - DNA, 530 bp, Homo sapiens
actcttgtattaaaggacctttaagccgtaagttgagcttacaaattcttcattaaacctctttctttgacaaattagaaaactgtgacctacaaaaggaaagtggttggttcmaggtcacaccatgagctattagcagagctgagattagtactctttgtgtccttgtctcctgccctgtggtccttgtagttacatcatactagctctcagagacatagactaagagaccagcagcctgagggcccctgaaagctactcattccatgggagaaagaatattgatcacttctgtaataatagggaaaaatccagtgtcaaataattcaattggaggaaatgtgtgggagaaaggaatgctactaaaatattcctgtctgtctacactaaaaacaggagtttagtctgggcaatcttctttgatatccccaggtccttaccttcatggaatgtgtgaaggagcagtatttgcttccaagactggctatcatagggcaaatgctcttactttacagctatgttaagaagtt

SEQ ID NO: 615334 - DNA, 587 bp, Homo sapiens
ctaattttttttttgtggatttctctgaggtgaagattttctttattaatctttgaaagaagtcccaaaggccaaggaaactcatctgactataagctgctgtgtgtttccctaccatgttgagaaagggtggctggttgatctaatrcattacattgcttcagcatattttttttatttatttcatcctttattccccattatcatatctgtaggcttgcttttttaaaataaagtatcatctcttcaaagaaaaaagaaaaatgcttgaggcatcacattacctgacttcaaattttactacaaggctatagtaaccaaaacaccatggtactgctataaaaattgtcacatatataaatggaacagaatagagaacccagaaataaggggacataccaacaaccaatttttgaaaaaatcaacaaaaatatacattgggaaaaggacactcaattcaataagtggtgatggaaaaattgaactgcctcatgcagaagaataaaactggatccataccccttaccatatacaaaaactaaccaagatagattaaagacctaaatgtaagacctggaagctacaaa

SEQ ID NO: 615335 - DNA, 395 bp, Homo sapiens
attccccattatcatatctgtaggcttgcttttttaaaataaagtatcatctcttcaaagaaaaaagaaaaatgcttgaggcatcacattacctgacttcaaattttactacaaggctatagtaaccaaaacaccatggtactgctataaaaattgtcacatatataaatggaacagaatagagaacccagaaataaggggacataccaacaaccaatttttgaaaaaatcaacaaaaatatacattgggaaaaggacactcaattcaataagtggtgatggaaaaattgaactgccycatgcagaagaataaaactggatccataccccttaccatatacaaaaactaaccaagatagattaaagacctaaatgtaagacctggaagctacaaa

SEQ ID NO: 615336 - DNA, 560 bp, Homo sapiens
agtatttaaacttctttggrggccggggtaacagtggtgggggtttcggaggaagtgacacaaattcgcaacctgaaggattggttttagttgtgtttgtagcacttatcactactgaagaggagttatccaggcaaagatgatgatggtgatgcacacagagcagagagttccagaaaagcagagacaacaacctgtagcaaggccctaagaaaggcttttgtaacttagggagttgaagggacgtcttcctgtggtcctgcctcttaagaacctctgcccctccttttacacacacatgcacccaaaggaccaggcacaacctttctcatcttccttccttgcttctttcaatggtcggtggtactggacgggaagaggttgaacagcctcatccctaatccagtggattctgttttccaggtactacttgcagcaggctgctgccttcatgaacagaagagatttccacaggatgcaggaaaaacacaaacaaatattaagacctgtggaaatcctctgagccttattgtaggtatccttcattgatcactcagtac

SEQ ID NO: 615337 - DNA, 532 bp, Homo sapiens
tcatggcaagtcactcagaaaagatagaaatagtccataatagatattatgacttgcaggaattagaaccatagacgtctttggaaggggagcaggatggaactcaggagagaagcatctgggtacaagttaaggaagtacaccatgcttctgatggtttggaaccagaatagatcccaagaggtccaggatcactggtaagacttagtggcgaaagccatgagtcatagagtcccacacattctgctctagatgtaattgagaaatctacagactggcagggttgccaacctgcctttagtgttgattaaaggctgagagattttgcctgctatgctttccgaagtggagttttggtaggcttgattccaaaggcatgaaggggatgcttagtgaatgagagataattcacattttcatatagaacagagacaattaaggctaatacstataataacatttctcatgtattttgtttcctctaacagtttgttggaggaggaattgcagtatacttaaaagagaaaggatt

SEQ ID NO: 615338 - DNA, 469 bp, Homo sapiens
tctatgaagagggcatctggcttaaaaggctctgcgtgctctggctctggctacaccaatcagaaccatgctcattacaataccagggacagcctttagcaatccaccgaagtcagtatttaagctataccatacttgattctccaagtttaaatagagcccagcaagcaatctggtctgataacatctcaaaagcccattttgttcgatattacaattagtaggtatttattaaatagttactatttgacaggcagtgtcattagtgctgagaacaactcagtgaattaaataggtgaggtcttctgttcataaagagctgacattccagtagtagggacatatatttaaacaaaattatgraaactagttatgttatgtatattttatcacaatacaaatatattaaatacctgacctcaaaggcagacctgtctgtaacaacttgaattcttctgtttacctgagt

SEQ ID NO: 615339 - DNA, 534 bp, Homo sapiens
cttcgccctcatgttctgattcctgcttagaatcacctgtgtcttagactgtgggccatccgtgagaatggaaaccacatgattgtgacagtaaatggaaaagcagaaggaagctgggtccgtgatgacaatgtgaggtcacataccaatcctgaatgcctattttaagatttttttaatgtaaaaaataaatttctctcttctttaggccactgctatttctattctctgctactagccgcagaatgcaattcctaactgatatacaccacatttaccctatgctccagaaatctacatgcagatgactsggggcaactacaaatacttatggctagaaattactatttggaaaatgcatagaaataactgagagaattttcctgcatggacctcatttccaaggtgcatctcaaagacagtcttataccagccatgcagcgtggaggaattctagaagcctttcaggaagagaaagtggctgctattgctgctgatactgctgcagtttagtggaaactaaaaggctggaat

SEQ ID NO: 615340 - DNA, 534 bp, Homo sapiens
cttcgccctcatgttctgattcctgcttagaatcacctgtgtcttagactgtgggccatccgtgagaatggaaaccacatgattgtgacagtaaatggaaaagcagaaggaagctgggtccgtgatgacaatgtgaggtcacataccaatcctgaatgcctattttaagatttttttaatgtaaaaaataaatttctctcttctttaggccactgctatttctattctctgctactagccgcagaatgcaattcctaactgatatacaccacatttaccctatgctccagaaatctacatgcagatgactcggggcaactacaaatacttatggctagaaattactatttggaaaatgcatagaaataactgagagrattttcctgcatggacctcatttccaaggtgcatctcaaagacagtcttataccagccatgcagcgtggaggaattctagaagcctttcaggaagagaaagtggctgctattgctgctgatactgctgcagtttagtggaaactaaaaggctggaat

SEQ ID NO: 615341 - DNA, 602 bp, Homo sapiens
ctattgctgctgatactgctgcagtttagtggaaactaaaaggctggaatgatgacctttcaagaagaacaaatgttattaaakaatggatttttgtcccacctcctgcaacagtcaagagcaaaaggatgaaaagggaatcctattcttctattaataactcctcagtcagtctcatgctgacaaagcagaaagcagctttaaaattagcaattttgcctgcaaattagccccttgcaaagccataaaaagagaaaaggaaataagaagaattcttttaatggagtcaaggatggaaaaaccaagagtgatagagcataaatgcccagaaaacatacttattttaaggacgataatacccaggttttaaagagctgcttatagctgtgtatgaggaaagtgttaatttatagcccttggaccagtggcttttcttaatggctccttggagcgaatctatcagataacttggaagagcacaaggtttaggttgacgttaataaatattactccattcacccctatctgagaaattcctattccatttcagaaaggcaatgcagtaaatgaaaagagattaaactttacaggcagacagacag

SEQ ID NO: 615342 - DNA, 572 bp, Homo sapiens
agcacatttccataatctacaattggtctcaggtattaggctcctgtttayagttttgtataaatgataagtcaatattcaatagtgggaataatctgaaaaaataaactgatactcccttaacaataaaaaggaggagctctctatttccagcaaggaacatacacaagagcaggaattttaaatttatacagtttgcttcatttgcagctttggtggtttccacattcatagtcatttaatactccttacgttccaagaggaagtgaggaacttggggatctgttgaaggcttggcgagtctcagtcattcctttcttagttcaagagggtattttatacctgaaacatacattttcctttccaggtctaaaaaattgcaagatataaagaaagcagttaaagccataatgcacatggagtacaaacactgtttgaagatgagtaaatcattcagaaatacctgaacagcatttaaaaaatactttttcttattgatggctgtagatcacaagattggatacctttatagaaatctaactgtgctagaaacactaggcagagttacctct

SEQ ID NO: 615343 - DNA, 505 bp, Homo sapiens
gtctaaaaaattgcaagatataaagaaagcagttaaagccataatgcacatggagtacaaacactgtttgaagatgagtaaatcattcagaaatacctgaacagcatttaaaaaatactttttcttattgatggctgtagatcacaagattggatacctttatagaaatctaactgtgctagaaacactaggcagagttacctctccaaatgtagtaatayagccccagaataattctccttcaagttttcagatctcaagttcataggatctggtttaggtgggtccttagaaatgatttaaatcccctaataacataaccatataatagtttttccacttgtgtttgcacatctccagcaatagagaagagcattcttcccagggcagttgagttgaaattaagtcaatacatatgcatcgagctcctctaatatgatagtcaattgtttgtacagaggtatgtattagcttcctgtggctgccataacagagtaccacaaac

SEQ ID NO: 615344 - DNA, 511 bp, Homo sapiens
aagttcataggatctggtttaggtgggtccttagaaatgatttaaatcccctaataacataaccatataatagtytttccacttgtgtttgcacatctccagcaatagagaagagcattcttcccagggcagttgagttgaaattaagtcaatacatatgcatcgagctcctctaatatgatagtcaattgtttgtacagaggtatgtattagcttcctgtggctgccataacagagtaccacaaaccaggtggcttaaaacaacagaaatttattgtctcactgttctagaggctagaagtttgaaataatggtgtctgtagggctatgatccctctgaaatctataggggagaaccctgccttacatcttccagcttgtgttgtttgctgaccacccttggcattccttggcttgtagatacattattccaatctctgcctccttcatcacatggtcatcttcctgcgtgtctctctttttctcttaagaacaccagtcatagtggatt

SEQ ID NO: 615345 - DNA, 592 bp, Homo sapiens
tgactttgttatgatatttttaaaaggataatattatttaaattagtatgtacagtagaccagagaggaatttgttactgtgtttcctgagctgtctctatcagtatttcctgttgcactcatcagtgtctaagactcaattgtttaagtgtgtgtctttatgaccagatcatgtgaatgatggtaggtcataattatctctgtatcttcaatgtcttgcacgtggaaggtaatcaacaaatgttagttgagtttgtttatttatgtacgagaataaaaaaataactgcaagaagcctaactatataaaagatcagacaaatgcagccaaatgttaacaatggtatttttaagttcaatttctctgcattttctattctactatttctatataaagagtatgttttaattttaccacaggaataaaaaaataactagagagatttttgaacaaagactctcatgtaagtacrtggaaactagaagtgtttccctcctgtttttttttttttttttttttttttctcactccagcctgacctcttacccagggagaattaggtactatttttttgctgctgtcaacattaggt

SEQ ID NO: 615346 - DNA, 218 bp, Homo sapiens
acctttgaaatgtctcttcttctcattcctcgaaatagtcctactaagtaggtattactttcttcattattgccaaagaagaaactaagaccaaaasagtttaagtaaattgttcagtagatcttggacattaaaccaattttgtctgactcaaaattccacattaactatgattttccagactcaattcactggtgttccctttcatatttcaccat

SEQ ID NO: 615347 - DNA, 612 bp, Homo sapiens
ggtgttccctttcatatttcaccatgtctgcacagcgcttctacttttatttaaccatttttctgcaagtcaacacccctccttcttaaattttacttttgtaaatgcattttaaaaggaagatgtataatgctaccataaatggaaaagcaatttcacttgccataagtagatggtaataacaaaaataaataaatgaaaacaaaatagtgtgattaaattcttgctatagagtctagtgcctggaaggctttgtgcctgaggtgtactttcttttttaaaactgaagattagcaagtgttatagagatgctaaagatacagaggaccaaaatgatttttttctstctggaagaaaacaaatcaaaagaattgaaggataattggaattcatattatgcgtttcaaagctgtttcatgccctttctccatcctcccccaaaccatctccaggagatccagtctccatgcccacacatggagggctcttttcatgatagtagtgaaaatgggaacttctgttctgacatcaagcaagtactcactttgcatgccatctcctcaagtgagacaacacagttcactaggtagaaagtgaagggaaaataaatgg

SEQ ID NO: 615348 - DNA, 626 bp, Homo sapiens
aagctttttgatacttctatcatttaaggtccaatgcaggaaacagaaactactttgtatatctttattaaaaagggctttgatatagggaattattgcaaagccattagaacagaaagttctaagtctagggtcaggcctcagcagatgtggtccagagatcagggaacagcaagaaaatctggctgatgtctcagttkcccctagctatgaagttgtcatcaggcagtacaaattgctttctggccactggaaaatgaaacaaaaacaaaacaaaacaaaaaaacacttgccagtttctgcagttgctactgctgttgatataaataaataaataaataaataaataaataaataaataaaaactgtctccgtgccactggcctctcaccactgcttctgcctttcaaatctcatgaaattgcatctcaccaacagaatttaaagcagttctagaactttgtgtcaagagggtttcagaaaggttctttctagccttcacaagtatggaaagcattacaacagagaaaaaacatagaaggggataaatatgagttctgagtgcaagaacacaatagtcagtgaattcccaagtggaaattacattgagtaatatgtctgcaaga

SEQ ID NO: 615349 - DNA, 626 bp, Homo sapiens
aagctttttgatacttctatcatttaaggtccaatgcaggaaacagaaactactttgtatatctttattaaaaagggctttgatatagggaattattgcaaagccattagaacagaaagttctaagtctagggtcaggcctcagcagatgtggtccagagatcagggaacagcaagaaaatctggctgatgtctcagtttcccctagctatgaagttgtcatcaggcagtacaaattgctttctggccactggaaaatgaaacaaaaacaaaacaaaacaaaaaaacacttgccagtttctgcagttgctactgctgttgatataaataaataaataaataaataaataaataaataaatawaaactgtctccgtgccactggcctctcaccactgcttctgcctttcaaatctcatgaaattgcatctcaccaacagaatttaaagcagttctagaactttgtgtcaagagggtttcagaaaggttctttctagccttcacaagtatggaaagcattacaacagagaaaaaacatagaaggggataaatatgagttctgagtgcaagaacacaatagtcagtgaattcccaagtggaaattacattgagtaatatgtctgcaaga

SEQ ID NO: 615350 - DNA, 493 bp, Homo sapiens
cattaatatttacacattacacaacatttattttttcagagatgttaggaattatcaggtagtgttctcttagatatcaggtatgatatgagataacgcctctggataaaatgacaccagaaaattttctgcccattcttgattatatgctgacagcaggggaagcagattgagggaaatttttttaactatattgcctgatttgaatggtataggacttacatgaccaatacaatttttaagatccttctaacaaaatatttcttttctcccacrttctttacattacccccaagaccttcaaagtgctattcacaacttaaatttgggagtgggttctagttgccatagcaggcactataattctaataacaaaagtaggtaccaaacctccaatgtcaagccaggcagatcaggactggaggacaagttctgtgagcctgattctagattcaggcagacctgatttcgaatcccactttaactgagtttt

SEQ ID NO: 615351 - DNA, 596 bp, Homo sapiens
ggctgggcattgtgtagaatgtctctctgttgtgaattgtttagtgtttttcacattattacactggggttacatgttgcaggggagaagacattgtattttttatctctagaagttctatttggatcttttttaatcttccttatctttcattatgttcatgccttcttgaacaggagaagtgtatttataagtgttcttttaatatgcttgtttactaattgtattatctgtgttgtttaggaatctgcttttattaacttgtttttctgtgaataataagtcctacttttcctgcttctttttgtgcttagcaatttttgtatacattttaaaattgtgatttttgcattgttgattgagattttctgttcctttgaaattgggggactttgttcttagataaaattaagttgstcaaaaacattttgatcattttcaagccttgttagagttttaagatttgttgagtttgtctggggtaatttggcaccattattacaatgatgtacttttttaaggtttctactcaatgccgtatgtgttacgaggtctgcctcactagctggtggaaacatgaagtattcccaatccta

SEQ ID NO: 615352 - DNA, 569 bp, Homo sapiens
acacatacttgattatataggtaaattgctaaatgtttttgtatcatccattttgattagccaaacaagcttgttgtattagcagggttaatattactatctacattttatatatgaggaaacaaagacctggagggattatttccttaatgtcacatagctaataagttatggaacttagtctagaaaccagatgctcagataaatagttrttgaatgaatgaatgaggtgtcattgaagtttcccaagttcataatatgttctaaatcttgttctgaactagtacaaaccagttcagttctcaggttggtgggtaagtgacacttagattcaaatatttcaaacttttagggtgtagtaacttttgttgtatatttagaataatggctaaacatataaatgatagaaccaaacagaccttatctgagcacagatctgctgcctgtgatctctctgatcttgggaagttacttaaccttttttaggtcctacaacttcatttactaaacaagactagtactttctatttcccaggattctgtcaggattgcatgataaaattagcatt

SEQ ID NO: 615353 - DNA, 566 bp, Homo sapiens
aattaacaaatagcctggctttattacaggccatcagtcctgtatttctacaaacatactgtctggtttttagaaagcagcaccttctctgatgagctcaaaatgatttcttcatgtgccttttctatagaacagatattcatgtatccctgaaagtaaattgatgtgagcactttagaaaattggaggtgccaattacattcaacaaatattattgagcatcttctgtatgccaggaactatgttagaactatgctagacacagagttggccaggacagccacaattcctaacctcaaatgtcaaataaataacagaaaatgccataaccgctatgaaggggaaggactatggaactaacaacacagagatctaaccttatctaggtatcagcaaaggctttctgtctaggactcataagaccttacaygccagggattggccttgttttctaccgcatggtctatgacctctcagggtcaaaattttacagtatgtattatatgaaggatagttgctgttggttaaaaatttctagggctttatggctctcagtaagacagttg

SEQ ID NO: 615354 - DNA, 565 bp, Homo sapiens
atcctgagactaaacttgcaaggttggttttggcctggttttctggatgagatcattgaggcatgggaggacttaagtagagtatgctccatgtcacagaactaagatggtgggattaagattaaagtccaggccttcttttttaaggtttgtgctgtctattgctttgctattgatacatgctcactaatgatattcttattgctattatttcttcctatttcagggtattttcctctggctccctgaatttagtgacacttggactactctttatattcagacataggtatgagcttggaaaatacaatgcccaaagaactctggccytgtcattgggaaatttgtgtcttagcatggtgtctgccattaattctctgagtctcctaaacaagttattggacatcctctgggcctcatttccttaatcagtaaatttcaaagatacttcccacttctaactctctaggaagttgtgatgacacaaagcagatcttagctcagtctcaattcttaccttgggtcctgcagactaagctagctcatgaatggacttgcgtgggcc

SEQ ID NO: 615355 - DNA, 611 bp, Homo sapiens
tgcctgccaccacagccggctcatttttgtatttttagtagaaacggggtttcaccatgttggccaggctggtctcgaactcctgacctcaggtgatccacctgccttggcctcccaaagtgctgggattacaggcgtgagccactgcaccccaccataagaacattttcaacatcaacttcattgtacagtatataaagaactttcaatcttttatctcatttgatccgttctcaaatctgggaagtatgttttattattatcagttttactttgtagatgaggaaacaggtgaagagaatgtaagtgactggcttttacggatcaacaatgggtggagtctggatttgaatctaaatcttctgattaaaaaaaaaaawcaagcaaaatcgtgtgctctttctagtatgtcatgggactgggtgtagtggggattcatggagagctgggcttgaattatggctcaccatcctactggctattattttatcactttgagcttggctttcttctctgtaaataaggatactaatcccttcagcatgttgttgatgtgagaatttagtgatgtagtatatgtaaagtccgggctcatgcagaggaatttcttt

SEQ ID NO: 615356 - DNA, 470 bp, Homo sapiens
attttttttggtttcatggtgcacataaaagttatatttacactatactgtagtctctaatgtgtgcaatacaatagtctaaaaaacaatgcacataccttaattaaaaatactttgttgttaaaatatgctaataatcatctgtgagcctttagcaagtcctcatctttttgatagtggaggggcttgcctcgatgatacctgctgactaatgaggttggtagttgctgtaggttgcagtggttgtgcaatttcttaagacagcaataaagtttgctgcatctattgactcatcattttacaaaagatttctctgtaacatatgatgctgtttgatagyattttacccacagggaaacttctttcacaattggaatcaatcctctcaattactgccacagctttatcaactaagtttatatgatattctaaatcctttgttgtcaattcaacaatgttcacagcatctt

SEQ ID NO: 615357 - DNA, 603 bp, Homo sapiens
cagctcaagttctctctttcttggagtcctctcttggtcccggacctcgcattagatggtcagcctcatttcataccttcactttccttttgactcttgaactcttatttgtgccttcatttgtctcaaactcttgggctcaagtgatcttcccacctcagcctcccaaagtgctgggattacaggcatgagccaccatgcccagccatgtaacttcatttgtaatacttaatgctgtgttttaattttgtttgtttactggcactgaactattgttagtctctgtgtcttacctaaaggtaagctccttgaggccagagactatgtctcatcctttctggttttcctcttggttcagcctctaacacagttctaggctcataacgkatttttaataaataactttataattcaaccagatgaatctttcaattaaaattttcaggtttttttttctctttggtataattattaagagtccctggattttgtatggcaattatacttcctcgtggtctagaattaagttgctttggaaattcaaagcaaaacaaaaacacacaaagagaatgaaaagacagacattgctattgtcatatgatt

SEQ ID NO: 615358 - DNA, 604 bp, Homo sapiens
ggcattttgagttttcctataaattctgtgataaagcttgaaggagcaaatcggtttcgatcaaattagttattctactaaagactatcctttgaccttatcttgactccgtaggttttacaaatgccaacttgaaatatagtggcattggtgagaggctttctattgggcagctcttctaccagtttgatggtattcaggtgaaatctgatctatttttcagacccgagggaacttctgctaagtgacctygaagaagtaatttaactcttttatctgtaaggtggagaaaataataattaccctctaaggttgttatcaggattagagataatgtacctggaggcccctgacatgcaacaggcttataataaattatattcttgtttataacaatagcagctaatatttagtgaatatttagtatgtgccagacactgagttaagagcttttcattcaacattccatttcatcttcataacaaccttatgaaaaaagactattaatattctcatatcagagattaggaacctgaggcttagagaagataaagaacttgcagaagggaatgtagctaggaaaagtctgaagcacaataaaata

SEQ ID NO: 615359 - DNA, 591 bp, Homo sapiens
aaaccccatctctactataaatacaaaattacctgggcatggtggtgcatgcctgtaatcccagctactcaggaggctgaggcagatgaatcacttgaacctgggaggcagaggttgcggtgagctgagatcacgccatcgcactccagcttgggcaacaagagtgaaactccatccccccaaaaaaaagaaaaaaaagaaatcagctatcaagctgttagaagacatggaggaaccctaaatgcatattgctgagtgcaaaaagcccatctgaaaaggctgcrtgctgtataattctcatgtgacattctggaaaaggcaaaactatattggcaggaaaaagatcagtggttgccatggggtggaggtgagggaggggatgaataggtgaagcacaaaggaattttggggggcagtgaaactgttctgtatgacagtgtaaccatggacacatgtaactttgcatttgaaaaaaaacccacaggacgttacagcacgaagagtgaaattaacatatgtaaatttaaaaaattagctaggaggttcgaggtatcctaggaagcaatgcagactgtgagaacataatctata

SEQ ID NO: 615360 - DNA, 542 bp, Homo sapiens
tttggggttatttacagtttgggggctattgcaggcaaagttctggtgactaaatgtaacccgtcttttttttttttacacagatatatgacttccggtgtgagacacatttctaaaatgaagttattaggccaaagaatgcagacatttaaaatttttgatgtaaattttaaattgctaaatttacttttaataatggtaccattttatcttcttgtctacagtgcataaactaaagtattaccagctttttcatgtttggcaaagctgctagttaaggcatctcaattcaatttgcatgtctgtaattgtttaagtatcttttttttttttttgtagagacagagttttgctcttgttgcccaggctggagtgcaatggtgtgatcttagttcactgcaacctctgcctcctgggtcaagtgattctcctgcctcagcctcccgtgtagctgggattacaggtgcctgccagcacayctggctaatttttgtatttttagtagagacagggtttcatcatgttggccaggctggtcttga

SEQ ID NO: 615361 - DNA, 505 bp, Homo sapiens
tattttcacaagaaaaaaaaatgcagccagttagaagctgggagtggaactgatttttatcaacctaaaataccactccaattcactgcactaatctgcttactktgcataatagttcatactgtgaaaacttttcaacaatacagtgaggaaactttagaagtaatgagtgtgctgtgtgtccatgcgtgagcgtgtgtacgtgtggacaagtaggagctggagaagaaagaacacttgacaaatattttccactacctgaaattttgcacatctttaagaaaaggggccaggttgaaatgtttaaacagttattcagaatagacttcctcctttttctttaagtgaaatgtcacaccttaaattgtgtcttagcccaagtgctgaaaacagtttaattaagtgtatctatttcaataaattccttgggagaacagactaccaaagggcacagaaagaatgagagcattaattgcgtttgagattagtcctattgaattgaatt

SEQ ID NO: 615362 - DNA, 351 bp, Homo sapiens
cagtttctctgtctttgtactcatccagccagaccctgactgttggagattaagtgataaatactgattatctcttaatgttagtctccaggcattcagtcgaaggaaaaaacctttttattaagtratactttttcaataacattagctcagcttcctgaaaactctggagaagtttagctcaatgtgaatgcaacttttcaggtgtaatagaggaagaaatcacttgtggccttcacccaaactatgacagctactgaagaataaaaagtttaaaagttacatagtagtttgttctggaagattacacttctctttggtgttttaaagaaaatagaccatcagtcagta

SEQ ID NO: 615363 - DNA, 642 bp, Homo sapiens
agctgggtgtggtggtgcacacctgtagtcccagctattgcggaggctgaggccagagaattccttaaacctgggaggtgggggttgctgtcgagccactgcactccagcctgggcaacagagcgagactgtcaaaaaaaataaaataataaataaaaataaatttgaaaaaacccctaatatgaagtctaggggcagaacaagtatctccaaattatccatttataacttccaagagtggttatgaatgaaaatggataaaatatttgataatatttaatgatcaagattgaatatacatcatgaaagttataaaaccttaagtatgtataaacagtgctgcatgaatggagagaagtcccacatttctgaatcagcacttggaagatgtcagttctttctaagtttatattaaatgtagttttattcagtatctcagcaggatttcaggaagagctatgaatgtaaatatttaaatattaaaaatatttagatatttaattttaaatattaaaaatatttagatatttaactttaaatattaaaaatatttagatatttaaytttaaatattaaaaatatttagatatttaattttaaatattaaaaatatttagatatttaattttaaatattaaaaat

SEQ ID NO: 615364 - DNA, 478 bp, Homo sapiens
gttcagtctttgggacatgaatattagggttcctattgaggtttcattatgttggcacatgaataagcagaatgtgccctctgacccaaactcccatggaggagtaggcaccaacacaggtggctctcagagcagtgtttttagggtaacagaagatatcgcagcaggcataccaacctgaagagactgaagtgctgcccttgacaccctgaatttggccagccagctcttttctgtctaaatagaaccttctataagaagaggctatttccatttgacccagccatcccattactgggtatatacccaaakgattataaatcacgctgctataaagacacatgaacacgtatgtttattgtggcactattcacaatagcaaagacttggaaccaacccaaatgtccatcaatgatagattggattaagacaatgtggcacatatacaccatgaaatactatgcagccataaaaagga

SEQ ID NO: 615365 - DNA, 327 bp, Homo sapiens
gttaacactagtctttgttcaacctccactagtgcacagatgtgagcatgctgactgattggtgaacacccctgcctctcccatgagcgtgcaaggtcctccagggratcttattcatctcgtaaccccagcatccagcatgggccaggcacaacagtaaaagctcagctaacatcatcacaagacaccagccccaggaggcccgtgatcagaggataccgaatgccccttctctacccagtcttgccttcctagcccagaggggcttgcactaatactggacttggctttcattcctggagttcagctgcagcgcgccctcccacc

SEQ ID NO: 615366 - DNA, 327 bp, Homo sapiens
gttaacactagtctttgttcaacctccactagtgcacagatgtgagcatgctgactgattggtgaacacccctgcctctcccatgagcgtgcaaggtcctccaggggatcttattcatctcgtaaccccagcatccagcatgggccaggcacaasagtaaaagctcagctaacatcatcacaagacaccagccccaggaggcccgtgatcagaggataccgaatgccccttctctacccagtcttgccttcctagcccagaggggcttgcactaatactggacttggctttcattcctggagttcagctgcagcgcgccctcccacc

SEQ ID NO: 615367 - DNA, 327 bp, Homo sapiens
gttaacactagtctttgttcaacctccactagtgcacagatgtgagcatgctgactgattggtgaacacccctgcctctcccatgagcgtgcaaggtcctccaggggatcttattcatctcgtaaccccagcatccagcatgggccaggcacaacagtaaaagctcagctaacatcatcacaagacaccagccccaggaggcccgtgatcagaggataccgartgccccttctctacccagtcttgccttcctagcccagaggggcttgcactaatactggacttggctttcattcctggagttcagctgcagcgcgccctcccacc

SEQ ID NO: 615368 - DNA, 327 bp, Homo sapiens
gttaacactagtctttgttcaacctccactagtgcacagatgtgagcatgctgactgattggtgaacacccctgcctctcccatgagcgtgcaaggtcctccaggggatcttattcatctcgtaaccccagcatccagcatgggccaggcacaacagtaaaagctcagctaacatcatcacaagacaccagccccaggaggcccgtgatcagaggataccgaatgccccttctctacccagycttgccttcctagcccagaggggcttgcactaatactggacttggctttcattcctggagttcagctgcagcgcgccctcccacc

SEQ ID NO: 615369 - DNA, 574 bp, Homo sapiens
gaggctgaggcaggagaattgcttgaaccctggaggcggaggctgcggtgagctgagatgagaacatccattgcactccagcctgggcaatgagagcgaaactcctcaaaaaaaaaaagctgaacaagattctcccctakaagcctctagaaggaaccagcctggctgacatcttgactttagcaaactgaaactaatttggacttctaccctatccacttcatgatattaaatcggtgttattttaagccactgagtttgtggtaatttgttacagcaataacagaaaactgacatagctctctgaaagtattctctcaatacagtgggaaggtctagggccagttctttaaaaagagtgaattataccagaattgtttcccacacttatttattgatgtgatgtcaaccactgactttacatgcatgcaaacacacacacgcaggcacacacacagagaatcaaggtggctgttgctttcctgtgctttagggattggcaacctatgaaggccaaatctgggtaaacacctgtttttggctaccaggagctgagtgtttcttagaaatgaac

SEQ ID NO: 615370 - DNA, 586 bp, Homo sapiens
agatctagaggttatctttgtacatttttcaacatttgggtaaaaagcagggggcaacgaagaagagggagtcagacttagcaagagacattttgctgaatgcatttatgatgttctttgttgttttaaatctaaaatctatacccatggcctttatggttttgctcatttatttgcttatactggatctggatttggagtagtgagacttgttctcaggtcctcctggtcctttacaagtggaagggtcaagggtcatgaggttcagcagccacaggtgttatgttaatgccrtccctagagaagctttctggcccatttcttcattgtgaaaatattactgctgcactgggtgaaatctaaggtaagttctatttcatacttcaaaattcttgaatttgtttttaaggtaaacagtatgtccgggtggctggtcaccgacttgatcagtcccaggaagatcccgtctcagcaagatgcactaggcgggcgccatcaggtcagcatcaacaacaccgcggtcatgcagagactggctcccaagtactactgggcagcccccgaggcctaccttggaaataaggtg

SEQ ID NO: 615371 - DNA, 603 bp, Homo sapiens
gctgtcttggaatcccacagacccacattcaaatcctggctttgcccctaagagctgcctgagctcaggtgagccatgcaccctatcacatctctcctctgtaaaatgggcacagcccacctcacagaggagctggaaggatgtaatgaggtgccttcagtttccctcaaggtctaggagggtgttaagtccaccggaagtagaacgaaactcctaagtcgattcccggctcttctgctcctcagctgtgtggcctttcatagcctccttcatctttctggggctcagtttcaaaatccgcaaactaaggggcatgatatccatctgacagggttactgtgagaaattcaatgcatttctatgtgtaaagtgcctggacttcagtaaacactattaaaagaagcagtaacagagtggttaaaggctctgayatttacctgctgtgtgatgttgagcaagttaccttccctctctgtgcctcagtttcctcacatgtatcatggagatactcatgcccttatcttaaaggcttgtcctgagggttagatgagacattataaaggcctttggagcttagcaggtggcgggtacatgatagacatg

SEQ ID NO: 615372 - DNA, 600 bp, Homo sapiens
aagaacaggtatccagtaaaaagggagaagagtgtaaaaggtgaagatgctacatttattttttcctggcaattcatttgattttttaaaaagaggccacatgttggtggctcattcctacaatcccagcactttgtgaggccgaggcgggcggatctcttgagcccagtagtttgagaccagcctgggcaacatggcaaaaccccgtctctacaaaaaatacaaaaattagccaggcgcggtggtgcctgcrtgtagtcctagctactcaggaggctggagcaggaggatcacgtgagcctgggaggtagaggttgcagtgagcctagatcaagccactccactccagcctgagtgacagtctgggtgacagagtgagaccttgtctggaaaaaaaaaaaaggttgcagttcgcaataggaaggtcctttctttatttgggtagccttagcctcgctggacctcagtttcctcatctgtaaaatggggataattataatacctgcatagcagaggtattgtggattaaatgagagcttttgtataaagtacttaggacagtgcctggcagttcgtaagtgctgttttaagagttcgcca

SEQ ID NO: 615373 - DNA, 395 bp, Homo sapiens
gaattcttgaaggctgttgtttatttcatgcttagggaacattgcaactctttgatttggaagagttatgtcgctgaatgccatgaaatagcatgaacattaagtggaaacagtagggaaaggtggctatatgcctctttgtctttcctaatacagaaaatgaaaggagcaaatcctggctcttccctcattgggccatggagaaatggtggggctgattggaaggttacagctgtgaagtctccagtttttcactttgaaagaacatagccctgtctgccagcaaatgtttaccaagcacttagatatctgatgcagagaaaacagtaatgcttgaaaagtcaaagatctggtccatrccttcaaggagattacaatctaattgaagagataag

SEQ ID NO: 615374 - DNA, 641 bp, Homo sapiens
tttgggggcctctgctgtaactactcaactctgctcttatcacataaaagccgccatagacagtatataactgaataaaactttatatacaaaaccagacagcagccagaatttggcccatgggccatagtttactgactgccccctccccrcccacccaacgtagatgatggggctttgttctacgaactcccttttagttcttccatagatctaaagagtcagttcttcttactgcagttttggcctgtttctacttctttgtttgatcccctagagcgtgagttggcaaactgaggccaacagctcaaacctggccagttgcctgttttgtaaataaagttttattggaaagcagccacacccattcattctgtgttatctatggctgctttcccactacaacagcagagctgagaagtggcgtcagagacctcttggcccccaaagcctaaaatatttcccatctagctcttcacagaaaagcttgctgacctctactctaaagagttgaggaatggctggctgagaagcagacttttttttgcatgtacatgaagagcattactaaccctcccaaactcatcttagaacttttctcccaggttctcttgtctagtctttcaaatattttagatgtt

SEQ ID NO: 615375 - DNA, 618 bp, Homo sapiens
tcattttgcatctatgatgcacaaggatagcatgacacaaagaggctgaggtgcttgcacaaggtgatttatggagctgggtgtgcaccttggcattctggttccatagcctgtgtttttctccactgtgcatgcaaagtgctcaacacagtgcctggcacagagtaagctcccagtaatcaaaagagccatcaatccaggctcgtttaaaggtggtggtggacagggcaagggtttctcccaggataacaygtagtgaagcatggagttgagtgatataaaaaataatcactttcctagagtctgggagaactgaattattatttcccagctgccactaatctgcagggggaccttgcagcaatgtttccctctcagacagagactcaattttcacaaccataaaataatctaaggagtctcaagtacccttctagccctgatattctaagagtctgtgacttgatgatgcctgtgagtttggaggtctcatggctgggcactgagtttccaagattgcacatggtttggggtgctggagctgtggggaaatcatgaggagtcactctgcagcatctgttccctgctcctccttctgggtgctcctccaccaagggg

SEQ ID NO: 615376 - DNA, 629 bp, Homo sapiens
taaagtggaggcggaagttaattgagttcasagttcgctgtgtgatgtcagggaagcggggctctggcaagcaggtcgtgtgtaacatgtgttctgagggtagtgttttcacacaacctccctgggggagaaaagcgttctttcaccaggagtgcgatcttcagaaaacaggcttctggggttccaaaggggctttcacctacattacaggataaaggtctcattttccttacagagacgttcgtgcaatgagcatgcctgtgatattcaagaaagggtaataaaaacccctgcctttcaacaagagtcataaaggtcggtggttcagaatagagaccctggagccagactgccagatcagtcagtcacaagtagggagacagggcaaggatcacttcactctctgggcctcgattttctaatctgtgaaatggagcattcaattagagcctctacctcataaattcactgtgaggattaaatacgttaatatatatcaagtgctataaacagtgcctggctttcagaaattaccacctatggtagggcgtggcacttagttctttacaggcattatttcattgcataatttaaaaaataaagaaaaatgttgtgagttggcgaagatt

SEQ ID NO: 615377 - DNA, 629 bp, Homo sapiens
taaagtggaggcggaagttaattgagttcacagttcgcygtgtgatgtcagggaagcggggctctggcaagcaggtcgtgtgtaacatgtgttctgagggtagtgttttcacacaacctccctgggggagaaaagcgttctttcaccaggagtgcgatcttcagaaaacaggcttctggggttccaaaggggctttcacctacattacaggataaaggtctcattttccttacagagacgttcgtgcaatgagcatgcctgtgatattcaagaaagggtaataaaaacccctgcctttcaacaagagtcataaaggtcggtggttcagaatagagaccctggagccagactgccagatcagtcagtcacaagtagggagacagggcaaggatcacttcactctctgggcctcgattttctaatctgtgaaatggagcattcaattagagcctctacctcataaattcactgtgaggattaaatacgttaatatatatcaagtgctataaacagtgcctggctttcagaaattaccacctatggtagggcgtggcacttagttctttacaggcattatttcattgcataatttaaaaaataaagaaaaatgttgtgagttggcgaagatt

SEQ ID NO: 615378 - DNA, 395 bp, Homo sapiens
tatatgtgtctgtacatctgcatgcacctagctctgtccacggagagatcctgagagtggccgcacagtaggaaaaatgaacacacttagcacctggaccttgtcttctaaaaattattttatttatttatttatttagacaaggtttcactctgtcattcaggctggagtgcagtggcacaaacacagctcactgcagcctcaatctcctggactcaagcaatcctacctcagcttcccatgtagctgggactacaggtatgcaccatcacacccagctaattagcttattttttgtaaagatggagtcttgttttgttgcctaggctggtctcaaactcctgggctcaagcgatcctctcaccttggsctcccaaagtgctgggattacaggc

SEQ ID NO: 615379 - DNA, 629 bp, Homo sapiens
ctccacccaccattctttctttcttcctacacaccagtagttcccaaagtgtggccctaaaccaacagcatcacatcatatgagatcttgttaaaaatgcaaattctccagccccatccttggccccatggaatctgaaagaccagggtggggccagcgatctgtactttaactaaccctccaggtgatgccaatatacgtcaaattcaagaaccactgtgcctgacaatctatcttctaagaagggaaaggacaaaataccaatgtgcttccttcagctccagagttctcctgaaacacacccactatgaagctcccccatcagggtgtacttaytctttcctccagtaaactttaaacagcacctactgcatagaaaccagaggcagaagtgttcttccccagttcattctttaattcatccactgatatgtctgtagcccatgcaaggtatgtttcacgcttgacctcagacacacctgatttgaatcccagccccaccgttctttgccaagaatgaaaacgtggtgggaccaggactcccatggagaagtgaggagagcagaggggatcagtacccagttctgcctgcaggaggtgggcaggtctggcgggcccctctctaggtg

SEQ ID NO: 615380 - DNA, 566 bp, Homo sapiens
cataaatatctcacctaaatatttctcttacaaagaatttttcctgttaaaggtgtttgagagacatttaattagtgatattgtaattggcctgtgctcaggggaaacattgatcaataagtcactttgaaaatgttgccatggttttaatggcaaagcacccctgaaaacaagtagctatgtgcctctataacagaatacatggtcctgaygccttattgctttttggagataaacaaaatcattttgttcaaacataagaccaacagtgaataaatataataaacaggttagaatattagctttggggggacgggggatagtggggaaatgaagaactgaaacatgcatatgcacacacatgcatgcatgcacacacaccttttttacaccttcaatgtacaacagagtagcttgggtttttacatccctggctaaactacagctgatggttgtgtctttttgcaaattcctttacatctctttccttttcactttcataagacaccatctcttgggactgccttctaaaatcacaagggtggaaaggaaattgtacaaaggct

SEQ ID NO: 615381 - DNA, 591 bp, Homo sapiens
attcggcttctcggaaacagggattctgcaacatttatctctgctttcccacacctggccacacatgggttcctaaatatgtatatccaactaaatgcactttgtaaatgatgcaaccctctgatgattatctacagtctaggaggggaaatggaacatatccatagatattaacrtatctgtcaatattagcatatcaatgagcatatctatcaaaatattccattttccctcctagactgtagatactttgagagcaggggtcagacctactttatccatgtatctaccacagcgccaaactagacacacaggtaatgttcagtcagtatatgtggaaagcaaggagaaagatgggtatgtgaaaagcaaggagaaagatctgaaggggagagaaagaaatagaaactccccctccccaacagcagcagctaacccagccagttcacctacccactcagccactgggcagacccatactctcactcctcttcctgagaccagaattgagattgtttttagtcttcctggcccaaaagtacaaaatccacaagggccagctataatttttctttccaccaagattttcct

SEQ ID NO: 615382 - DNA, 500 bp, Homo sapiens
gtcagggttacagatcccctgtagaatttctctactaagatgggtgagaagaaatcatcttccatttgtttgccctagacacaatgctgttttcaacccgtttctttgcccatgttgtctccttttgtctaagatgcctttttgcaacctccaaaccatatcgtcacactctacaattcctcccaccatcatgctgacggcagccaatttgcccagcagactcatacttacccttcaagatgcaactgaaatggaacctyactagcataggaggtggtctgcacagggggcatacagaacagttgctaggagccctgacattagagttaaatctcaacactagcccatacaagttctaagaccttgggaaagtcactgcccatttctgagtctcagtttgcccatctgtaaaatggacaggatagcaagcaccttcttcatagggttgttattaggagtaaattggagaaatgaatgtaaagggcttggcagagtacttg

SEQ ID NO: 615383 - DNA, 580 bp, Homo sapiens
cctttttgcaacctccaaaccatatcgtcacactctacaattcctcccaccatcatgctgacggcagccaatttgcccagcagactcatacttacccttcaagatgcaactgaaatggaaccttactagcataggaggtggtctgcacagggggcatacagaacagttgctaggagccctgacattagagttaaatctcaacactagcccatacaagttctaagaccttgggaaagtcactgcccatttctgagtctcagtttgcccatctgtaaaatggacaggatagcaagcaccttcttcatagggttgttattaggagtaaattggagaaatgaatgtaaagggcttggcagagtacttggcacatagaaagctgtgaataaatggcagctgtaggtgggtatgaaatattccttgtctcccagattggattaggcacccctgctccctacccccatggcaccctgtgcttactcctgtagtggccatttatsgaactgttttcatatctgcttatacttgtgaccctaagctatggggaactcacaggcaggaactctctctgtctcattatccc

SEQ ID NO: 615384 - DNA, 565 bp, Homo sapiens
ggagtgtgctcccagggtgagggttgtcctatccacagcaccctggaacggctccagtcttgctcaatgcaagtgacagtccttgtctgagctgacacggccctgtccaggttactccaaccaccttagtgaggaaaccagtcaagccagttgattggcatcatgtaaacagcttgatagtagattttcaggactgggaaggaagagaactaatctttgttaaatacctgccttctgatatttcatcctcacarcttttcaaagtggatattggcatcctctttttagagttgaggctcagagaaattaggcaacttgctgaagatcacatagagtgtcagtggcaaaactggttttcaaacccaggtctgagttgctttcttgagatctgtgctcttcctcttacttggagctgtctttagggcagaaattcccaagaggatcccagcaaatgggttaggggtgtgctgaaatggatcccttagcccttgggcagctgggcagggtggggcatggcagctgaatcactgagcagcagtctcctcagcttgcctaggagtgccct

SEQ ID NO: 615385 - DNA, 515 bp, Homo sapiens
tcagcttgcctaggagtgccctatagtgtattttctaatagtatcactatgtggaaaaggctggaaactgaagataagtgtcttattcttagccatccggcctaaccacccatctgagacttgaagctggttaggatccctgtaaacaattcctgatggaattgtctactctttattagggtatgggatgttgtgctgttttgggrgattgcattaaaaaacaggatttgggatgtgggagagattaggttaaaatttagaaagtggggagaaaacgatccacaagtcctagagtgtatttggtagggggccaggtcttccagattttggtttgtttcctatgcatttattcagtacacatttgttgaactcccactatgtgccaggaattcttccttgtatcagggacacagagataaataacatgaacccttttctgaggatcttagctagtgcaggagatttatgggaaaggaataattatgatgttagacagagggggccctcaaccttcc

SEQ ID NO: 615386 - DNA, 492 bp, Homo sapiens
ttgcaaaaattttgtaatgcaccttttattacgaatacatttaaactccaggctattgcgttcagagtttgatgaaattagttacctagcrcatgtgtgatacacagtgaaagttcagttaacttgagccagtgccattcccttgattgttctgaacagtgcctttttcatcagaggccatgagatttgctgagcttcagttaatttactaatacttatagatgcttccttctctgaagagtgactcacttactttatagaaagcacccaaaatcagagtcagatcatttgaaacctgttcagctccataacttacttgcagagtgactggtaagtcactttaatctctttgaaccttagggtggcttaatgtattagtttttatgactgtttatcctattagcctttgggccacttgaaggttggaacgtagcctctttcatttcagtggcccagtcaatgcctagactgtggtaggcagccaggtttgtc

SEQ ID NO: 615387 - DNA, 343 bp, Homo sapiens
gtttttatacctctttgctcatggcagtctgtgagccttgacttgcttctttaaatggggttcacggactaacaacatttgtatccctggggagcttggtagaaatatagacctaggagaacccctgccccaccccaacctacagaatcagaatcttcctttgggtaggatccccaggtgatctacatgcacaataaggtttgagaaatacccccactctttgctcattaaacctgcagactctgttcaggtgtgcttcccccaagccacactcctccggggcttggctsggagcatgctgggtgcagacatcggtaacctcttagcttaatgtaccaaaatt

SEQ ID NO: 615388 - DNA, 513 bp, Homo sapiens
ctcatttgtcaaatgtggtaaataatagcaacctcacatagctgttgaagaggatttaagataagacatgagtttctggtccattaaatagctcataaatgttatctgactctccaccccatccccaacacacactggccctcacaggaaagtattctcggcctcctaagcattatgacttcaaatggagcatatcatcacctccgtattgatacgtttttcaaatagtcatgaatccctaagagctgtacctaactaaggaagaattgctgctgttctcacttcttccaggacatgagagtgagtgygggtggtggagaaagggaacagatgaaaatttagtgcactctccatgcctgtgttgttaaatcacaaatagatgccccctcccactgttcccccagggataagaaggtctcagaagaactctgtagccatctgatcaggggacaacacagttgaaggattaatgtggcctctctctgttggtggtcttggtaattgcacagatgt

SEQ ID NO: 615389 - DNA, 513 bp, Homo sapiens
ctcatttgtcaaatgtggtaaataatagcaacctcacatagctgttgaagaggatttaagataagacatgagtttctggtccattaaatagctcataaatgttatctgactctccaccccatccccaacacacactggccctcacaggaaagtattctcggcctcctaagcattatgacttcaaatggagcatatcatcacctccgtattgatacgtttttcaaatagtcatgaatccctaagagctgtacctaactaaggaagaattgctgctgttctcacttcttccaggacatgagagtgagtgtgggtggtggagaaagggaacagatgaaaatttagtgcamtctccatgcctgtgttgttaaatcacaaatagatgccccctcccactgttcccccagggataagaaggtctcagaagaactctgtagccatctgatcaggggacaacacagttgaaggattaatgtggcctctctctgttggtggtcttggtaattgcacagatgt

SEQ ID NO: 615390 - DNA, 555 bp, Homo sapiens
ggaggaacccagtggaaggtaattgaatcacgcaggcagctaccctcatgctgttctcataatagtgagttctctcaagatctgatggttttataaggggctttctccaccttcactctcgttcttctcattttttttttttttttgagacagagccttggtctgttgcccaggctggagcacagtggtacaatctcggctcactgcaagcttcgcctcccgggttcaygccattctcctacctcagcctcctgagtagctgggattacaggcgctggccaccatgcctggctaattttttgtatttttagtagagacgggatttcacagtgttagccaggatggtctcaatctcctgaccttgtgatccgcccaccttggcctcccaaagtgctgggattacaggtgtgagccaccatgcctggcctcattcttctcatttttgccaccaagtgaagaatgtgcttgcttccccttatgccttgacgataattttcttgaggcctcccacccctgcagaactatgagtcaattaaacctttttcctttataaat

SEQ ID NO: 615391 - DNA, 613 bp, Homo sapiens
cagttaaaaacaaagttgcactaaagccaagcctgtcatttcaggaaggtgagactaagttatagactcttacctgctatgatctgaattcaaaacaaagccagagaaagcatcctaacctcagatccctaaaaaaattcctcccttaggagtagaaaagccatgaaaaatgatttagaaagatacaagttcagacacccactccttcccattcacacttgaaaaagtcagcatgaggcagttataccctgattaattaccacagatacgggaaagcaagatagagggaagttatttttcttccctaagttttctttcatttattcaacaaatatactgcatatctacaataagcaaagcccttttctaggggctttggaggctacataaatgaaaataataacaattctaattccatttacaaawcttactctaataaaatgtaatatgtgcaagtgtcagagattggttggtataaattcttatgtacatttgtatctaattacgaggtagtttttcttgttgtcacccttcaacatatatttactttgctcagcactcaatgtgtactttcattgtgaatactaatgtccttcttcaattctgaaaatta

SEQ ID NO: 615392 - DNA, 444 bp, Homo sapiens
aaaattttcctttctgcatggttttagttatattctacaataagttgtgctgtatcgtattttcattatcattcagctgaaaatattttctagttttcattgtactgtcctctttgacctttgtgtaattagtagtgtatttccaaacctttgggcattttattgttatygctctgttgttatttagcttaactgcactgaggcctaagaacatatctgtacaatttttatcttgtaaaatgtgtcaagaaatgctatatggttctgcatatgtgcaatattgatgatgttccatgctctgcagttgctggttacagtattctatctgtggataacattgattttgttagtttcattaatcatattaataaatcttctatatacttagagttttgtgaggttcatcttttagttctgtcaattactgatggacttgttttggag

SEQ ID NO: 615393 - DNA, 577 bp, Homo sapiens
ttttcatttgttttttttaattgccttcttatttttttaattgactcattagctgtccagtaggatgttttatttctatgtgtttgtgtattttccaaggttcctcttgttttcaatttgtggtttttattccattgtggtcagaaaagttacttgataagatttttattttttaatttattcagacttttttgttgcttaagatatgacctattctgaagaatgttccatgcactgaagraaagaatgtatattctgcagcagttgggtgaaatgttttgttaatgtcatctagggcccattagatctagtgcgtagtttaactgtgctctttctttcttgattttctgtctggatgatatgttcattactgatacgagggtgttaaattcccctgctgttattttattatagtcttatatatatttttagctctactaatgtgtgctttatatacttataggaaactctgttgttgggcataaaactattgataattgttatattatcttgctgtattgacccctttatcattttatattgacctcctatgtctttttaaatcttagatttttaa

SEQ ID NO: 615394 - DNA, 585 bp, Homo sapiens
cagctttgaaaacctacattgaaccaactcttccacaatatttctttctaagactagacaaatgttgtaatggcttgagatgtaaatatttacgtaaactgcataccttttttctcttaatatatttgttgacaattaaattattgaattaaaaaagcaaacaaaaccatatagaagcataaaaaatcctatattgactgttttatggctttttgaagatgtatgctatatttttgcaggagaaattttaaaaaaacatttcatccaaatcttgggaaaggagacatgacaaaactattcagctgcatgtatagaatcatgttcaagtctgtagactgaactaatcactatgtaggatcaatgactacattctgtaccagagataagcaacatattatawtaatgtcatgtaaatatagagtccaaccatctaataaattgcttcactaggcatcgtattcagttttattagaaaccctggttcagcatagtgcatctgttttacactaaacatataaactatataatatagttatgtatataattatattataatcagatgttggtgtcaaaatatatggtact

SEQ ID NO: 615395 - DNA, 575 bp, Homo sapiens
tctcttcctttttctttctttcttttccttccttccttccatctttccttccttccatctttccttccttccttccttccttccatctttccttccttccatctttccttccttccttccttccttccatatttccttccttcctctctttctctctctctttctctcactttytttttttctttcttcttttttttttggcctagcctgggccaatcaaatatgaaggattaatttgtggaagaaaacaacaacttcagtacaaacaataaagaataggtagccaaaagataatgccaagaaggatgatttgctttctgcaaaaaggggcaattttggagagagaaacaagagagatttattgatatttttcaagtaaggaataggaaaccttagccccatagtagttggccaacattataaaataattttgctgaaaggaattataaaacatgcatataaaagtttaacttcccttaaaatttgagaatggagtcaaaatgtacggggatatatatttatgaccagatttatgaaaagacagtttcaatacagatatcataacattttaatat

SEQ ID NO: 615396 - DNA, 637 bp, Homo sapiens
attgtacttagctctgatgaaatgtcattctctgtctacctagaaataagatggttcttgacattgagttttgtcattgattaaattgtcatagtctatttgaaacctaaatgctgccgttggtcattgttctttttcttctttagaaagtgacctttgtgaataattgtatgccccagatgwgtcagaatgaaaagaaagcagcattcctaactatgaacatcttataaactatttgtctccactgtcttaaacagctttacagaaatgaaatatttcaaaattctactgcagagtcaaagagtttttaacaatcttagttatgaaatgaatttagtgcagaattatatcatgtattaaactttttaattttaccaacataaccttgttaaaaatattatactacaccccgaagaaaaattataaaacattggtgctttaaatatatgtaaaataagatattctaaaaagtatggcattttaaaatgtgtttattatatcttgttttgaactcatcaggaaattttaaacatttactgatgtcaaaggaggaataaatattgtcttcaggtgctttggaaaagatctatatcacttttgagttagagtaatgcttatattaatgcaggtaaagatc

SEQ ID NO: 615397 - DNA, 656 bp, Homo sapiens
catatccccaatgcccttcctcttggcctcctttacagccacgaaaatgcctattcatctttcaagtggggtctaatattgcttcctctgtgaagccttattgattcaaactttatattttcccaactacacaaaatattggatgcttattctgtggccctggaacacaggacatttgtttatgacagtatttctcaattcactgtacttatttgttaatacatcagttttctgtgaccgctgcagataagagaggctgtgatctctgcaaggacaaggttgtcggyttattcatgtctctttttctttagtgactaccaaagtgaatagtatatagtcggccaggtgcattggctcaggcctgtaatctcagcactttgtgaggctgaagcaggtggatagcatgagctcaggagtttgagaccagcccaagaaacactgcaaaaccccatctctacaaaaaaatacaaaaaaaatagccaggtgtgatggtgtgcatctgtgatcccagctactcaggaggctgaggcaggaggattgcttgagcatgagatgcagaggttgcaatgagccaagatcacgccactgcactccaatctgaatcaaagagtaagatcctgtgtgatggttaatactgagtgtcaacttgattggat

SEQ ID NO: 615398 - DNA, 587 bp, Homo sapiens
gatcttttactttttttcctctaatatttgcaaaaagaatggagagtaccaacttattaagaatatctaattacttttatttttcaggcactgaaaatgcttggatatcatacagatagtttcattatcttctttttagaggcactctgaatgtgaattgcatctgagtcagtctatccttccaggaattgaattagttttcctcacactctcagaggaggcaatgcataacacaagttacatgtcaggagcattccccagagatgatgattttgattcaacatcctactgtttcaaaaatatagcaatataattttaatatgctattgggcatatattctggtggcagtttaccacttcgaaagggatcagattaaaatgtctttattagaggtcaaaatcagctacagaaatttattctaaccaaataaataatcttatttagacttttatgtatgaaatttattacattggatcattcttgataaaactgcctcacagtaagtacacaagataaaaataaatacataaatacacaaatgaatgaatcttctctgygcccttcctattcaaagatgacattactg

SEQ ID NO: 615399 - DNA, 558 bp, Homo sapiens
  misc_feature 546: n = A,T,C or G
ctagttcctgccccaggtttgtgagattctcccttactgtcagttgatgtgcctgtgtgggcctggtgttgcacacaaattctacttaatggcggcattgttcattacctcccccacaggaatgcatgcacgtttcgggtggcctctggggtgtaaaattttcctgacttcccatttctcaagggctccccctcctgcgcctgtctagctatctgcctactgtaacagacatgctagatgcaggattgccacagatcattaatttataagaactccatgtctgtgaagtgcaatgaagtgaagcccaataaaatgaggcatgcctgtatattaaagccatgtgatcatcacaatttgattacatgactaaacaaactcttttattatatttatttttgtataarattgcattgaattcaagaaaatatttgtgatgccaacataactaagcaatattaaagtatggcaaatgccaaaaattgattatgcttaaaaaccattcatttcattaaaatagacatgagaaataaatttatttattctagnattatttttggt

SEQ ID NO: 615400 - DNA, 568 bp, Homo sapiens
ataaccttcttaaaatgtaatcaccaggagcagatgactttaccgatgagtcttaccaaacatttaaggaaaaaaaataaaaattctctatgctctcatttagaaaacagaatcatcatgcccgtaatcccagtgctttggaaagccaaggtgggaggactgcttgaggccaggagtttgagacagcctgggtaagaragggagaccccatctgtaccaaaaaaaaaaaaaaaaaaaatttcaatttaaaaaaatagagtagaaatcagagaaaacacttcttgattcattctataagtccagaattaccctgacatcaaaaccatagaaagatattacaaaaagtaaagatgcacaccaatctatctgatgaatatagattagaatcttcaataaaagtgtctttgttcacaaatgacataattattgatgtataaaaactccaaaaactgtgcacaaacattagaaaattgaatccaacaatgtatttttaaaattatgccccaggtccaagtggaatttattccagatattcaaggctggttcaacactcaaatatcaattaatg

SEQ ID NO: 615401 - DNA, 635 bp, Homo sapiens
ttcagtgaacatatctgagcatctactgtgtaccaggcactggggttctagcagggtccatttatgttctttcactctcagtaccaagcccagtgcttggcatatggtaggtgcataatttacatttgttggatggatggatggattgatgacagacagatgaatgtatgaatgtgcagatggatggatggatgggtaggtggggaggtgggtggatggatgtgtggaataagctctacacagaagggtgtaggcttataaagaagatatagttgccatctcaaaggtgtccatcctctaggaagactttgcttatgccaccctatactgtagttacacaagtggaaggagcaagggatgggagtaggaagagagagttagggaggcaggtgttacatctggmtggggcatttcaggcagaacattaggggaaacccttcccaaccacctcaagtccagcaggagaagcagtgcccatcccgacacttcatgaaaataatcagcccaagcgtccttgttaggggtgaccacagggcctcaggggcccctggggtgggccctgtcatcatctggttaggccaaggtgccttcagaacagcaatgcttcaaggtgtccaccgaggcagtgggtccac

SEQ ID NO: 615402 - DNA, 572 bp, Homo sapiens
ggaggaggctcttcggtgaccatgcactcagagagactctgtacctctgttcgtttctggcacttctggaatgagctcttaggattcatgatgaatccgacctcagttggtcatgggacaaagccttataaaatgtcctcagcggctccttccaaccttccaattcaatctcacaacacgtgagactgccatcaattgcagatgtgtcacctgtggggagccgtcctgagaggccacgtggcacggtgattgggaacacacacaccagagccagactgccaggtttgaatcctggttcaaatcccagttctggcacttctctttccaggtctctgttcagctctgattcccatctataawaaggggatactgataacccctctatcatagggcatctctaagggctaatgagttaatacacgcaaagtgtgtaaaacgtgagaaggtgccgatatcatgactttcacgtgtgccttttttacggcattcagctcatccattcctcacaaccaaagagtagaagtaaaggagtacatttctttggcgagagcaaagccagaaattcaaagctt

SEQ ID NO: 615403 - DNA, 196 bp, Homo sapiens
acttctgtattcctgatgcctactacctagtatatgattaatgttctacaaatatttctggkttttttccccagctttattgaagtataactggcaaattaaaattatttctgtctatatatatgtaaggtatatatgatgttttgatagacatatgtaatttgtgatatgcattaccacaatcaagctaaagaac

SEQ ID NO: 615404 - DNA, 596 bp, Homo sapiens
tatttttttcttgcctatgtataggcaaggaaaaaatgatatccatatgcagaagaataaaactagactcctatttccctctctctctcttgctatatacaaacatcaaatcaaaatagattaaagacttaaatctaagacctcaaacttgaaactactaaaagaagacattggggaaactctccaggacattggtctgtggaatgatttctcgattaatatcccacaaacacaggcaaccaaaggaaaaatggacaaacgggatcacatcaacctaaaaagcttccgtacagcaaaggaaacaatcaacaaagtgaagagacagccgaaagaataagaaaaaatattgsccaggtgcagtggctcacacctgtaatcccagcacttgggaggctgaagtgggcagatcacgaggtcaggagatcgagaccatcctggctaacatggtgaaaccccatctctactaaaacaaatacaaaaaattagccagggttggtggcaggcacctgtagtcccagctactggggatggtgaggcaggagaatggtgtgaacccgggaggcggagcttgtagtgagctgagatcatgccactgc

SEQ ID NO: 615405 - DNA, 574 bp, Homo sapiens
aaatagtggttagttacatatagcagtattgattggaatgaggcatgagagagcattatggggcagtggaaatgttctattatactaatctgaatagtagttacatagatgtttatccatataaaatatcttaataattttcacttatttatatttttatattyaacttgtacctcagtaaaaagatatattaaagaaaattaatggatgatattagaaatgctagattaaagtcaagagaaagtgttgtaaacatattttaaaagcaattgcatttttgcatactttgtaaaaaattcacaaaagccacaaagattagagaagcctaataagcaactacccataatcccagctctcagagaaccccttctaacatttttacagtacaatgtaatgttaatagctgagactaccctccatagccttagtttttaatacctgacttttcatcaacagcataatcccacaccataaaacctccttgtaagcattattttaagacaaatgttccatacctgtaaatactatgttatataaaaattcccctaaatgggagcatttcagttattttcaa

SEQ ID NO: 615406 - DNA, 574 bp, Homo sapiens
aaatagtggttagttacatatagcagtattgattggaatgaggcatgagagagcattatggggcagtggaaatgttctattatactaatctgaatagtagttacatagatgtttatccatataaaatatcttaataattttcacttatttatatttttatattcaacttgtacctcagtaaaawgatatattaaagaaaattaatggatgatattagaaatgctagattaaagtcaagagaaagtgttgtaaacatattttaaaagcaattgcatttttgcatactttgtaaaaaattcacaaaagccacaaagattagagaagcctaataagcaactacccataatcccagctctcagagaaccccttctaacatttttacagtacaatgtaatgttaatagctgagactaccctccatagccttagtttttaatacctgacttttcatcaacagcataatcccacaccataaaacctccttgtaagcattattttaagacaaatgttccatacctgtaaatactatgttatataaaaattcccctaaatgggagcatttcagttattttcaa

SEQ ID NO: 615407 - DNA, 494 bp, Homo sapiens
ctggatcctggcgcctcagcagaacctagcactgctgagtacctgcctgaacctggaaggaaagcctgggagcagccccatggcacaaaatctcccaatcctggagagcacattttcaagtcccaaaggggccctaggattgtgctacttaaccatgttctgccaagagaaggtgtgtccaacrcgggtagggctgatgatgggagcagaacactcccactagcttctaagctggctgggtctgccttcaggatgctgggggacagagatgatagagcgaagtgctcacctctgaggctacaggccagctccacccattactggccatgggagcctgagtgtgtcacttctttctttcttttttttttaaacaattcttgctccagagactttaagtcttaagcctccgtgtcctcacctaaatagagttattgggaaggttagagttaatgtatgcaaagcccctggtgcccagtaggtgtgcagtaagtgat

SEQ ID NO: 615408 - DNA, 494 bp, Homo sapiens
ctggatcctggcgcctcagcagaacctagcactgctgagtacctgcctgaacctggaaggaaagcctgggagcagccccatggcacaaaatctcccaatcctggagagcacattttcaagtcccaaaggggccctaggattgtgctacttaaccatgttctgccaagagaaggtgtgtccaacgcgggtagggctgatgatgggagcagaacactcccactagcttctaagctggctgggtctgccttcaggatgctgggggacagagatgatagagcgaagtgctcacctctgaggctacaggccagctccacccattactggccatgggagcctgagtgtgtcacttctttctttcttttttttttaaacaattcttgctccmgagactttaagtcttaagcctccgtgtcctcacctaaatagagttattgggaaggttagagttaatgtatgcaaagcccctggtgcccagtaggtgtgcagtaagtgat

SEQ ID NO: 615409 - DNA, 556 bp, Homo sapiens
ctgacttaatatcctcattttacagatacagaaacagggcctgggaattgctgctagccaagcagagaattatgcagaaccacccctggacatcaggctcctgatccctgggccacagtttgctgcaagaagagggctttggctgaaaggagccaggcacttcccagtggaggtagagagggcggctgagcaacgagactcctctgcaggtctcagggccccgtgtgtaaacaagaggatttgattttgagcagtgactcctgcctgtttggattcgtggaccaatacgagtgtgttttttttwaaattgagagattaacaaagagattgtcatctttttaattttacttagcaaaggctttgccaaaaactatcatctacgattacatcctttcatttatataaagacatgcataggacagacgcaatctcagagtaaaagtttggttttataaatggaaagaatttagtttacataaactgatttatagaattgccttatttttatcattttgtcatgagctggggagatggatcagttctggatagcatgtgg

SEQ ID NO: 615410 - DNA, 617 bp, Homo sapiens
gttgggaggtgcctgccaggggtggagtgggcagctgtctacttggcttcaacctggaaaaatcaagacaacggacaaatgcctttctgtgatgtgccaacgtaccttctcctgagttcgaagacggcttcctgggcttatagactggaggtcttcccctctgcatttggggcagatctgatcctcgccattcctggggaaacatggacaaagccttggagagaggcactacagctccctgcaccatccactctcctgacagctccagaagcctcaactatcagcagggtggtgatcatgtacgtccacaatcccagagccacagttcctaaatcgcaaaastgccgagtatcccacattttttggtagtttgcagtgagcttcctgggctgccaaacctgccgtgactgcactgaccggaagctattatagcccttacttgccccacttagtgtgaatatatacatgtttcattgcagaaacattaatgtgcttgattacagggcactgccgcattccctgccacaattacatgatgccctgatttgcttttctaaaaaaaattctgaattacaaaacacatctgatctcaggggtttaggcaaaagattgctgac

SEQ ID NO: 615411 - DNA, 604 bp, Homo sapiens
ttgtcccctccaaaagggttcccagcaaacggtctgaggtgatgagcaatgctgtggaaggagagatattcgtctaacagtttgtcattcaccaagaggtttatatttgttattataagracttttgtgattattattcattgggcttcattaacaattctatgacacagaaaacagctttacagacaagcgagctgcggcttagggacattagcagagcaccagaccacacagtgagacagtggcctcacagcctcgaggctctcctcggtgtggatggctttcccctgtgggagctgatgcctttctgtggcttcctctccttccaccacagccagaggggcagtgtcagggagtgtgagaaaagggtgtggaaactgaggcccagagaagaaaagtcaccgcctgaagtcacaggctcctctgcccctcacctcccatcaggggtccctccctggcacccactttctgcccaccctccgctcctccatcacctcacctcgggttctcagagagacagcctgcacagcagagagccctgggctcctttgggtcctggcagacggtgggagggcacccaaagggaaactcattctcatcaggg

SEQ ID NO: 615412 - DNA, 604 bp, Homo sapiens
ttgtcccctccaaaagggttcccagcaaacggtctgaggtgatgagcaatgctgtggaaggagagatattcgtctaacagtttgtcattcaccaagaggtttatatttgttattataaggacttttgtgattattattcattgggcttcattaacaattctatgacacagaaaacagctttacagacaagygagctgcggcttagggacattagcagagcaccagaccacacagtgagacagtggcctcacagcctcgaggctctcctcggtgtggatggctttcccctgtgggagctgatgcctttctgtggcttcctctccttccaccacagccagaggggcagtgtcagggagtgtgagaaaagggtgtggaaactgaggcccagagaagaaaagtcaccgcctgaagtcacaggctcctctgcccctcacctcccatcaggggtccctccctggcacccactttctgcccaccctccgctcctccatcacctcacctcgggttctcagagagacagcctgcacagcagagagccctgggctcctttgggtcctggcagacggtgggagggcacccaaagggaaactcattctcatcaggg

SEQ ID NO: 615413 - DNA, 537 bp, Homo sapiens
tgctcaccttcctggtggaaatccccagggtgttggagacaggtccaaaatttcaagttctaggcgcttttgctctgctctgtttggagtgtctgggtgacctcaaggagaagtcacttcctcacagtgggttctgatgactccatctgtaaaaaagaagttgcaacaggtggcctctgggctgtaagattctgggaccctrtcttgcctgggactgaggcaaccagaaggagcaggaaagccctgatgaaatccaaggcctaggaccacagactcctcagggccctccccacaccaccccactcaggaagtcataggtggctacatgctccggtcaggtgccaccactttactgcctcaaggagaacaaagcgctaaacaaatgcaagatcacagcagctggtctcagcatccaagtgggatgtagatccacatttgcaggaaaagtgcactggggaaacgatggctcccagaatgtgtactgtgtgctgggcaacagtttccctccaaatccttacagcaacctgcaaggaattc

SEQ ID NO: 615414 - DNA, 599 bp, Homo sapiens
ataatacctatttcacccatttgttgtgatgactaaatgagatagtgggtcaaagtgtggtgtgtaacccaagtgaagtacttgaatgacatttggctcagatggtgactacaggccttccagctcctcagagaaaaggattaaagtggtgcattatgcttatactgtgctttcacgtctatctactggagcctcaacaggtgggcagggcaggtcatctggcmtgagatacattaaactgcccacctgccctggtgtaacaccagggctgccacaggctggtggcaaagacagcacggcatcttaccgccacaatgtacatcaggacctccacccccataacaaacgacctccaggcctgcatcaagactatcagaagacactcccttttaactgtgtaccccatacctgcaagctttcctgcagccagccctacctgttccctccttcccctggtttgggataaaacaggcacccaagacttctctccccatctgtgggtcccttctctcccctccggcctcaataccaccctctctacctgctcattcccacggacatcaaaacgtgcgcaacctgctctaataagaaaagggaaa

SEQ ID NO: 615415 - DNA, 510 bp, Homo sapiens
gcgccggtgcccgcggaaagaggaatgagcccctgcggggccggggcgcccgcggctgggctgggggcagttgagkccggggcggtctctgcagccgaggtgccaggtccccggctgcacccgaggagtccccgcctcagcaagcgggagctggagcggggagttcggggcgaggaagggggccggggagccgccctgcggtcccggggcaggggtgtagggcagccaacctcggcgccgcctccgccaccgcctaccggcggccaggcccggagcttccggtggagtgtgaaggacgcagccgcaccggcggaaaccggcaaggcagggccggggcccggggctgctgctccccagaccgccgcggggcggggcgagcgatccctgtgaggggaaactgagtctgagggccgggtctgcggcgccacgggcactgtgcgcccagttaactgacacgcgtgtacgcagctcctccgcttgcggggctcctggcatctggtgcagcacctg

SEQ ID NO: 615416 - DNA, 510 bp, Homo sapiens
gcgccggtgcccgcggaaagaggaatgagcccctgcggggccggggcgcccgcggctgggctgggggcagttgagtccggggcggtctctgcagccgaggtgccaggtccccggctgcacccgaggagtccccgcctcagcaagcgggagctggagcggggagttcggggcgaggaagggggccggggagccgccctgcggtcccggggcaggggtgtagggcagccaacctcggcgccgcctccgccaccgcctaccggcggccaggcccggagcttccggtggagtgtgaaggacgcagccgcacsggcggaaaccggcaaggcagggccggggcccggggctgctgctccccagaccgccgcggggcggggcgagcgatccctgtgaggggaaactgagtctgagggccgggtctgcggcgccacgggcactgtgcgcccagttaactgacacgcgtgtacgcagctcctccgcttgcggggctcctggcatctggtgcagcacctg

SEQ ID NO: 615417 - DNA, 502 bp, Homo sapiens
ccttggtgtggggccggatgcagtggctcatgcctgtaatcccagcacttcaagaggccaaggcaggcagatcacttgagatcgggagttcaagacaggacctggtcaacatggtgaaaccctgtctctaytaaaaataccgaaattagctgggtgtggtggcaggcacctgtaattccagctacttaggaggctgaggcacgagaattgctggaacccaggaggtggaggttgcagtgagctgagatcgtgccgctgcacttcagcctgggtgacagagcgagactctgtctcaaaaacaaacaaacaaacaaacaaaaactcctcagtgtgatatatgtctggcaaatatttcctctcaatatgtgccttgtgtttttattttcactggtatattttgtagaaaaaaagtttttaatattgatgaagtataatttaccttttaaaaaagtgtcatgatttttgtattctagctcacagtcctttattagaaattgcaaag

SEQ ID NO: 615418 - DNA, 574 bp, Homo sapiens
agggcacgcggctcagtcttgcttggacttccgacctacagcaatggtgaggtcagaaatgcatgttccaagctgctgagtgtgtggtagaacagcaacagaaaacagatacaaagygtaagcattcttgctcttccaaccgctgcctctctggggagtgcacactgcacccaagcagaaggaggcggttcctgctgctgcctgggaccgcctcacccctgtcatccagcaggtatccatgcattaattattgcaattaagttatgcatgccggcaacccgctgttcatgttcaaacccctgcccgtggaccagagacgcatgttctgctgtgtccactccacactcccaccgtggccgtgtctctcagcggtgcctcctgcagagctggagtgcacttcagcatcctcttcaacaccaggctctgggcagcggcactggctcttcagagctgctggaagatggccctggtctgtacccctgaccaagaccaagcaaagcactgcatccggcactgtgaagcagccagaaatgaggggacaaggtcctggggccagcgggcggccccaggaagg

SEQ ID NO: 615419 - DNA, 560 bp, Homo sapiens
ttgcaattaagttatgcatgccggcaacccgctgttcatgttcaaacccctgcccgtggaccagagacgcatgttctgctgtgtccactccacactcccaccgtggccgtgtctctcagcggtgcctcctgcagagctggagtgcacttcagcatcctcttcaacaccaggctctgggcagcggcactggctcttcagagctgctggaagatggccctggtctgtacccctgaccaagaccaagcaaagcactgcatccggcactgtgaagcagccagaaatgaggggacaaggtccyggggccagcgggcggccccaggaagggcaggtgctatgctctggccctaaaggagggatgggggttttgagaagtgcagaacataaggggggaaggggacttccgggagaggagcacctgcacccgaagccaaggggtggagctacgaaaggggcccttcccaggtgggctgtgaggtgagtggcaggcacgttctcatttgctcccggtcctcacaggtgcagaatcctgaagccgtttacagacgaagagctgaacccag

SEQ ID NO: 615420 - DNA, 523 bp, Homo sapiens
agctcttttcttccagcaccgtaaacacgttgctcccttgtcttctggagcccatcatttctgctgaaaaataatcttattgtccccttgaaggtaatttgtctatttgtctttacctccagctacttttaagatttctgtatttggattacagtagttttaccataatatgcctaggtggcttctccctggacctagcctgcttagcctgtggagagcttctatctggggtttgttttctttcatcgattttggaaaatcctcagccattctatcttcaaacattgctttttccctatcctctctctttctctttctctctctctccctcctaaaattcctgttacctgcatgatggagctgctccccagaccccatgtgtatggcatgctctgtctgtttcttatccttttctactcactctgtttcwtcctagtttttttcctgacttatcatttcactttattaaaactctatttcctagcctactgttaagcctgtctattaagtttctaattttaat

SEQ ID NO: 615421 - DNA, 201 bp, Homo sapiens
tgcagcatcatggatgcagctggaagtcattatcctgagcaaattaatgcaggaacaaaaaaccaaataccatatgttctcactcataagtgaaagctaaacaatgggtgctcatggacatcaaggtggcaataatggaccctggggagttctagarggggcacagcagaaaagggcacaggatgaaaaactaactattgg

SEQ ID NO: 615422 - DNA, 554 bp, Homo sapiens
tttggcaggatatgaatctgttgattataatttattttctttaacaattctgaaaatagatccctcaatctctcctggcttstaaggtttctgctgagaagtctgctgttatcctgatggggctacctttgtatgtgatctggcctttttctccagtgcctttagggctttttctttgacagtgaccttggacagtctggtgagtatatgccttggtaatgttcattttttatagtatctcacaggtgctgtctggctttattgtacttagatgtctatctagcaagattcaataaattttcttgaattattccatcaaatatgttttccaggctgttttctttttctgtttctctctagggcatgccagtaattcgtaggtttgatcactttattattctcatatttctgactttcttcacttttaaaaaatcttttttctttatctttgtctgactggattagttcaaaagaccagtcttcaagctctgaaattatgttttctactttgtccagtctattgataaagctttcagttgtattttgaagttcct

SEQ ID NO: 615423 - DNA, 554 bp, Homo sapiens
tttggcaggatatgaatctgttgattataatttattttctttaacaattctgaaaatagatccctcaatctctcctggcttctaaggtttctgctgagaagtctgctgttatcctgatggggctacctttgtatgtgatctggcctttttctccagtgcctttagggctttttctttgacagtgaccttggacagtctggtgagtatatgccttggtaatgttcattttttatagtatctcacaggtgctgtctggctttaytgtacttagatgtctatctagcaagattcaataaattttcttgaattattccatcaaatatgttttccaggctgttttctttttctgtttctctctagggcatgccagtaattcgtaggtttgatcactttattattctcatatttctgactttcttcacttttaaaaaatcttttttctttatctttgtctgactggattagttcaaaagaccagtcttcaagctctgaaattatgttttctactttgtccagtctattgataaagctttcagttgtattttgaagttcct

SEQ ID NO: 615424 - DNA, 552 bp, Homo sapiens
gtttggcaggatatgaatctgttgattataatttattttctttaacaattctgaaaatagatccctcaatctctcctggcttctaaggtttctgctgagaagtctgctgttatcctgatggggctacctttgtatgtgatctggcctttttctccagtgcctttagggctttttctttgacagtgaccttggacagtctggtgagtatatgccttggtaatgttcattttttatagtatctcacaggtgctgtctggctttattgtacttagatgtctatctagcaagattcaakaaattttcttgaattattccatcaaatatgttttccaggctgttttctttttctgtttctctctagggcatgccagtaattcgtaggtttgatcactttattattctcatatttctgactttcttcacttttaaaaaatcttttttctttatctttgtctgactggattagttcaaaagaccagtcttcaagctctgaaattatgttttctactttgtccagtctattgataaagctttcagttgtattttgaagtt

SEQ ID NO: 615425 - DNA, 552 bp, Homo sapiens
gtttggcaggatatgaatctgttgattataatttattttctttaacaattctgaaaatagatccctcaatctctcctggcttctaaggtttctgctgagaagtctgctgttatcctgatggggctacctttgtatgtgatctggcctttttctccagtgcctttagggctttttctttgacagtgaccttggacagtctggtgagtatatgccttggtaatgttcattttttatagtatctcacaggtgctgtctggctttattgtacttagatgtctatctagcaagattcaataaattttcttgaattattccatcaaatatgttttccaggctgttttctttttctstttctctctagggcatgccagtaattcgtaggtttgatcactttattattctcatatttctgactttcttcacttttaaaaaatcttttttctttatctttgtctgactggattagttcaaaagaccagtcttcaagctctgaaattatgttttctactttgtccagtctattgataaagctttcagttgtattttgaagtt

SEQ ID NO: 615426 - DNA, 409 bp, Homo sapiens
ggctccaggaccataaagtgtatctaaaatcaccagcctttgatttcaatgtaaaaaagatccaagtctttcacaaacccttactagggcaattcaacccgtgcagaacataacaaagactgtttttggatgactcctggtgtgtgtgtgtgtgtgtgtgtgtgtgtgtgtgtgtgtgtcttttctgtgtgttgtgggggaggtgtattttaaaagagaaaataaaagggagaaataaacttttcaaaaccccttctgtatcccagacagtattgcacttttacatatmtcatttaatacccataacacctatatgaaatatacactgttactctgttttttcttttagaaacattttgttatagagaattttaatcatatacaaaagtccagagaatcatacaatata

SEQ ID NO: 615427 - DNA, 409 bp, Homo sapiens
ggctccaggaccataaagtgtatctaaaatcaccagcctttgatttcaatgtaaaaaagatccaagtctttcacaaacccttactagggcaattcaacccgtgcagaacataacaaagactgtttttggatgactcctggtgtgtgtgtgtgtgtgtgtgtgtgtgtgtgtgtgtgtgtcttttctgtgtgttgtgggggaggtgtattttaaaagagaaaataaaagggagaaataaacttttcaaaaccccttctgtatcccagacagtattgcacttttacatatatcatttaatacccataacacctatatgaaatatacactgttactctgtttttycttttagaaacattttgttatagagaattttaatcatatacaaaagtccagagaatcatacaatata

SEQ ID NO: 615428 - DNA, 409 bp, Homo sapiens
ggctccaggaccataaagtgtatctaaaatcaccagcctttgatttcaatgtaaaaaagatccaagtctttcacaaacccttactagggcaattcaacccgtgcagaacataacaaagactgtttttggatgactcctggtgtgtgtgtgtgtgtgtgtgtgtgtgtgtgtgtgtgtgtcttttctgtgtgttgtgggggaggtgtattttaaaagagaaaataaaagggagaaataaacttttcaaaaccccttctgtatcccagacagtattgcacttttacatatatcatttaatacccataacacctatatgaaatatacactgttactctgttttttcttttagaaacattttgttatrgagaattttaatcatatacaaaagtccagagaatcatacaatata

SEQ ID NO: 615429 - DNA, 409 bp, Homo sapiens
ggctccaggaccataaagtgtatctaaaatcaccagcctttgatttcaatgtaaaaaagatccaagtctttcacaaacccttactagggcaattcaacccgtgcagaacataacaaagactgtttttggatgactcctggtgtgtgtgtgtgtgtgtgtgtgtgtgtgtgtgtgtgtgtcttttctgtgtgttgtgggggaggtgtattttaaaagagaaaataaaagggagaaataaacttttcaaaaccccttctgtatcccagacagtattgcacttttacatatatcatttaatacccataacacctatatgaaatatacactgttactctgttttttcttttagaaacattttgttatagaraattttaatcatatacaaaagtccagagaatcatacaatata

SEQ ID NO: 615430 - DNA, 670 bp, Homo sapiens
ccttgctcctcctcctccccactgagtagcaaattcttggggaatccagaagacatttttacctgcgagtgccaagtgcctgggagcatttgagatctgctcttcctctcgtcccagctgtcactgcccttctgtcctccagtgccgaggtcatgggctggcagagcatgtggtctggaccctctgcacatggacaggccctcctcagctgacttagcctgaattgggaggcagcaggctgggacacccctctgagtctcggccatggattatgggacagctcacaggctctcagctcagctgtccgacagtgtgcctctccaggggttgccgaaacactcgggggcatccaggtcacatgaaggctgagcatctcctggggacactaaacttgaaggccccccctcagcctaaacacaccgtgagcccccagtttactagctatggtcactgtcacaggtaggcacagggggagtcatctgggaggggggcatggtccctctgtcttgggcactgtattagattcctagagctgagcaacaagaacaaaactcaatctaaaaaaataawaataataaagtaaaaaccaacatctccacagtccccccagtccccggtaaccaccattctactctctgcttctatgaatttgacttttttagattccaca

SEQ ID NO: 615431 - DNA, 670 bp, Homo sapiens
ccttgctcctcctcctccccactgagtagcaaattcttggggaatccagaagacatttttacctgcgagtgccaagtgcctgggagcatttgagatctgctcttcctctcgtcccagctgtcactgcccttctgtcctccagtgccgaggtcatgggctggcagagcatgtggtctggaccctctgcacatggacaggccctcctcagctgacttagcctgaattgggaggcagcaggctgggacacccctctgagtctcggccatggattatgggacagctcacaggctctcagctcagctgtccgacagtgtgcctctccaggggttgccgaaacactcgggggcatccaggtcacatgaaggctgagcatctcctggggacactaaacttgaaggccccccctcagcctaaacacaccgtgagcccccagtttactagctatggtcactgtcacaggtaggcacagggggagtcatctgggaggggggcatggtccctctgtcttgggcactgtattagattcctagagctgagcaacaagaacaaaactcaatctaaaaaaataaaaataataaagtaaaaaccaacatctccacagtccccccagyccccggtaaccaccattctactctctgcttctatgaatttgacttttttagattccaca

SEQ ID NO: 615432 - DNA, 436 bp, Homo sapiens
acgtgttaggtcacaaattaattcttaataaatttaaaaatattgatatcatacaaagtatcttttctgaacacaagaggatgaagttggaagtcaatatgaaaagcaaaatggaaaaatcacaaatttgtgaaaattaaacaacgtacttttaaccaacggatcaaagaagaaagacaagaaaaattagaaaataaatattaatgaaaataaaaatacaacataccaaaatttatgagacacaaggatagcagagctaagggggaaatttatgcctataaatacttayattaaagaacagaaagatctcaagttgaaagtttatttttacaacttaataaattggaaaagacaagcacaaagctaacagaagaaaggaaataagatgaaagcagagataaacaaaatagagaatagaaaacagagacaatcaatg

SEQ ID NO: 615433 - DNA, 596 bp, Homo sapiens
gtgtaataatatggaattctgtatttttaacttatcaaagcagaaatacttctagcatgatttaaattttacaaaccatcattgtaaaatccagaatgaacatactattaacctcaagtaattaattggatttgtttctattgtgccatgtttcctttgcaagtcatgtcaagagactgataagaaaactcttgaattcatatgaattccaaaagttgttaattaatgcccaatcatagtcattttttagttgtaaatctagaagcccttgctcagaaattgatatagccctgaatataagggctggaaggtttagaacraaaggcctgaatctgatataccagggtgaaccttcagagtctaacttcattcaggctatataataacatcagtgctctaggttctcattttcattccagattcatagtggacccacagttctgaatttttattcatgagtttggagccacaggatcctgcctacatctttgtaattgcttttatttagagttgtacttaccttttgttaccttaatcttttaatgaggttctgttcaaattatgaattggatcagcatataacccctgtcttgaac

SEQ ID NO: 615434 - DNA, 580 bp, Homo sapiens
tggatggggctgagtgcagtgggtaagaattgggagtgactgctaatgactatggggtttcttcttgtggtgacaaaaatgctctgaaattagaggtctgtgcaacatgatgactatattaaaaactattaaattgtgtattttaaaagggtgagtcttatggtatgtgaattatattttgatcatttaaaaatgatatgttaattttttwaaaagttgagataagcatgcttcagcacataaatgtggtaaaatttccctccagctggctgcaccattaaaaatattaaaggaagttttttacacagaaaaagaaaacacacagaaatatgtatctataggaaaaaataaataaaacattaaaatggttaagtacatgaatgaatataaacatgttgttattatttattatttaatattatttaaattctttttaaagagaattgcttgctggacatgatggctgacgcctgtaatcccagcattttgggaggctgaggcaggcggataacctaaggtcaggagttcaatcaagaccagcctgaccaacatggtgaaaccccgtctctactaaaaatac

SEQ ID NO: 615435 - DNA, 311 bp, Homo sapiens
tttgatgtctaacgaaattacctatagctccattgtatctgataaatatacaaagagtagttttaattcagtgtaaatatatattccaatgtctataaagtaagaaatatacagctgaccttgaaactctgggaatgtctgtgtgggtatatgtgtatgtgtgtgagcgtgcatgagttcttgagtgatagggacaagccatacagtggtggttctcaaaattgagcaagcagcaggatcacctggaggctgttaaaacacatgagccccaccccagtrtctgattcagtaggtacaaggtgaggccctaa

SEQ ID NO: 615436 - DNA, 653 bp, Homo sapiens
tcattttctagtagttgtctagtatatagtttttgactctatagtttacataaaaattgatatttcaaatattccaaatatatttcaagatcataaataattttaaaaaccagataactttgtttataacactgttttattaaatatgattgttagcctaaattaatgttctggaaaaattgaagaaatatcacagtggtgaattgtggcattagatccctgtcttccaactatacagttttcctctacctcttatatcatattttaaaattttcttatttttgtcacaaggattgataataaatggccctatatataagcctcaagctagagagcaatatcaattaccttattcaatgagtggaccctacacataggcagtctagctatatacataatgcgattktcgaaggtctgaaaaaggtcatatatataaaaccatctcccatatcagtcttctgttacaattaaatcttcctaagagctttctgaagacttgcatattttagctggaataaaacattgcattgcttagacaaaagaggaattaagcaactagtacatagttgtcatctagtgaagatagggctttttatgcaatgggatgaaaaaaaattggaggttggaaaaaagaagggtcataaagctttaat

SEQ ID NO: 615437 - DNA, 554 bp, Homo sapiens
aaatgtactctattacagatgctcctcagcttatgatgggcttatgtcctgacaaactcatttaagttgaaaatattgtaaatctaaaaggcaaactcatgtaaagttgaaaaatcataacttgaaccattgtaagttgtaggccatctgtactttgaaatgtagcatacattattattaagtataatcactcttatgtgcaatagatcccaaaaccctatctcctatctatctgaaactttgtactgtatggtcaccacctccccatttccttaagcttccctgcttatcctctggtaaccatcattctactctatttytgtgagttcaactttatgagtccactgtatatattagtggacttcataaggaacactttatccatctataaataagatcgtacagcacttggctttctttgcttggcgtaggtcacatagcataatgatctccatgctgtggcaaatcaccactccccctcccccaatattaattttattttcattaatcattgaggcagaattgtacatattcatggggtgcattgtgatgtt

SEQ ID NO: 615438 - DNA, 610 bp, Homo sapiens
gtcaattgattttcaacaaagtttccaggaacacacaacagggaaaggacagcctcttcaataaatggagttgggacaactagatataatatgcaaaaaaatgattaaattaaacccttatctcatgccatatacaaaaatcaactcaaactacaatgaaaacttaaaygtacaacttggaatcaaaaaactaccagaagaaaccataagtgaaaacttcatgacgttggcatgggcaatgaatttttggatatgactcccaaaagcacagggaacaaaagcaaaaagagacaaataagataacatcaaactaaagaacttgtgcacagtcaaggaaacaattaacaaactgaagaatggcctatgaaattgaagaaaatatttgcaaaccattcatctgataagggataaatatccaacatgtccaaggaactagcaactaatagttatttaacttactaatagtaagaatacaaataacattattaaataaggggaaaatgttctgaataaatatttgtcaaaaaagacataaaagtggccaacaggtatatataaaaaataatcaacctcactaatcaccgccagattaacatcactaatcaccacc

SEQ ID NO: 615439 - DNA, 609 bp, Homo sapiens
cactgcactccagcctggacaacagagcgagactccgtctcaagaaaaaaaaagaatgaaatcatgttatttgcagcaactggagctgggggtcataatcytaagagagttactgcaggaagaggaacccaaatacaacatgttcttacttgtaagtgggagctaaaccttgagtacacacagacataaacatgagaacagtagacactgtggactgctagtgggggatggagggggtggggcatggatttaaaaactacctatagtgtactatgttcaccaactggggcaatatagccatgtaccctttgtagctgaaataaaagttacaatttaaaaaaataaatcaataaaaatacaaaataatgtagttataaaagaaaaaattgagaaatacgtattattgttagtttgcaaaacttgatattgttaatacatcagtctttctcaaacttatctatatattcatgcatccctatcaaaatcccagtagaattttttgaagaacttcaaaaactgattcaaaaattcgtatccacttgcaaagattctataacagccaaaccgtatttggaaataagaaccaagttgcatgactaataccacaac

SEQ ID NO: 615440 - DNA, 619 bp, Homo sapiens
  misc_feature 9: n = A,T,C or G
agtttgctntattaatacatacaaaaaatattaaacgaattctcatttgtgcccaagaatcatgtaaattactaaagtaataggcataattaagcccttgatccatccttgcccttgataaagcaacagtctgaaaagttatttttagtgagaatgagtctaaaataatggatttacaaaggtataaatcagaggctaaaatgatgaataacagagattacctacatttatatattaactaaatgaaaacaagaaaaaaaatctgagctcattacaagtactatacaaayaaaaattgtatagattccatggttgccacctggggccttacatattaactagaagtaataaataagaagataaatttataaacatctcactcaaaaatatctcattgagaactgaaaaaggaaaatagattaaaccaggatcacacgtaagagctagattttttaacgaacatgtacattgggtttaaaataaaacattaatgtatatggtaacaggaataactaaattaaaaaaaaatacaaaactatcttactccctgtccattaagcaaggaccatgaaagaatagtcaacccaaatagcccttaggaagcagtaagaacacaatg

SEQ ID NO: 615441 - DNA, 619 bp, Homo sapiens
  misc_feature 9: n = A,T,C or G
agtttgctntattaatacatacaaaaaatattaaacgaattctcatttgtgcccaagaatcatgtaaattactaaagtaataggcataattaagcccttgatccatccttgcccttgataaagcaacagtctgaaaagttatttttagtgagaatgagtctaaaataatggatttacaaaggtataaatcagaggctaaaatgatgaataacagagattacctacatttatatattaactaaatgaaaacaagaaaaaaaatctgagctcattacaagtactatacaaataaaaattgtatagattccatggttgccacctggggccttacatattwactagaagtaataaataagaagataaatttataaacatctcactcaaaaatatctcattgagaactgaaaaaggaaaatagattaaaccaggatcacacgtaagagctagattttttaacgaacatgtacattgggtttaaaataaaacattaatgtatatggtaacaggaataactaaattaaaaaaaaatacaaaactatcttactccctgtccattaagcaaggaccatgaaagaatagtcaacccaaatagcccttaggaagcagtaagaacacaatg

SEQ ID NO: 615442 - DNA, 620 bp, Homo sapiens
agcgccactgcacgcaagactctgtctcaaaaaaaaaaaaaaagaaggcaatcctagttactatagctacaaaaaaaggaataaatttaactaaggaggtgaaagacaaggaaagctacaaaacactaatgaaagaaattgaagtggacatataaaaaatgatgaccatcctatgttaatggattgtaagaattaacattgccaaaataaccatactgcccaaagcaatttacagattcagtgcaatccttatcaaaacaccagtgtcatttatcacagaaatagaaaaaacaatccgaaaattcatatggaaccaaaaacaattcaagcagccaaagcaaccttaagtaaaaagaacaaagctagagacatcagaccacccaacttcaaaatatcttataaagctatagtaaccaaaacagcatggtattgatataaaaayacacatctaaaccagaggaatacaatagagaacccagaaataaattcacatatttatagccaactgatttttgagtaaggtaccaagatcatacattggaaaaagaacaccctctctaataaatggtactggaaaaactggatatccatacacagaagaatgaaactagatccctatt

SEQ ID NO: 615443 - DNA, 571 bp, Homo sapiens
cctgttgaatgggagaaaatatttgcaaacaattaaacccacaaggcagtaacattcaggatataaaagcaactcaaactcaatagaaaagcaatgaaatattctcattaaagagttaagaaaagtatctaaataaaaaatttcacwaaaacagacatataaatgaccaacaggtgtattttttaaaaagctcaacattatcttttgcatcagattaatgcaaatcatcataccccagataaaatggctattatcaagaagacaaaaaataacagatgctggtgatgatgtggagaaaaggaaattctcatacactgttaatgagaatgtagattagtatagccattatataaatcaaaatggaaatttctcaaaaaactaaaatagaactaccatatgatccagctattccactactcagtcattatccaaaagaacagaaatcagtatatcaaagggataactgcacctctatgtttatcacagcactattcatgacagcagagatatgaaatcaatctaaagtgtctatcaacagatgaatgaataaagaaaatgtgacatatgaacg

SEQ ID NO: 615444 - DNA, 645 bp, Homo sapiens
gacattgttgtgtaatcaacatccagaaattttatcttttctgtagttatttttaattttwaaaaattttttattgatgcataattttactgatacgtaatagttgtacgtatttatggggtgcatgtgacattttgatacatgcatatgatgtgtaatgatcaaatctgagtaattgggatagccatctccttaaacatttatcatgtctttttgttgaaaacatttcaaatcttctcttctagctatttgtgcaaaataaaaattctacacctgttaaacaactccccattcctccccttcctcctgcccttggcaaccaccagtttactttctgtctgtataaatctgattacttatactttatgttagtggaatcttacagtatttgtctctttgtcactagcttaatttacttagcatgatgtccttaatgttcattcatgttgtagcatgtttcagaatttctttccttttcaagactgaacaacattttattgtatatatgtaccacattttgtttatccattcatccactgttggacctttgggtagcttttactttgtggatactgtgaatttgctaaaataaacttaagtgtacaaatgtcacttttttgtttttgtttttgctttttgagacag

SEQ ID NO: 615445 - DNA, 645 bp, Homo sapiens
gacattgttgtgtaatcaacatccagaaattttatcttttctgtagttatttttaattttaaaaaattttttattgatgcataattttactgatacgtaatagttgtacgtatttatggrgtgcatgtgacattttgatacatgcatatgatgtgtaatgatcaaatctgagtaattgggatagccatctccttaaacatttatcatgtctttttgttgaaaacatttcaaatcttctcttctagctatttgtgcaaaataaaaattctacacctgttaaacaactccccattcctccccttcctcctgcccttggcaaccaccagtttactttctgtctgtataaatctgattacttatactttatgttagtggaatcttacagtatttgtctctttgtcactagcttaatttacttagcatgatgtccttaatgttcattcatgttgtagcatgtttcagaatttctttccttttcaagactgaacaacattttattgtatatatgtaccacattttgtttatccattcatccactgttggacctttgggtagcttttactttgtggatactgtgaatttgctaaaataaacttaagtgtacaaatgtcacttttttgtttttgtttttgctttttgagacag

SEQ ID NO: 615446 - DNA, 645 bp, Homo sapiens
gacattgttgtgtaatcaacatccagaaattttatcttttctgtagttatttttaattttaaaaaattttttattgatgcataattttactgatacgtaatagttgtacgtatttatggggtgcatgtgacattttgatacatgcatatgatgtgtaatgatcaaatcwgagtaattgggatagccatctccttaaacatttatcatgtctttttgttgaaaacatttcaaatcttctcttctagctatttgtgcaaaataaaaattctacacctgttaaacaactccccattcctccccttcctcctgcccttggcaaccaccagtttactttctgtctgtataaatctgattacttatactttatgttagtggaatcttacagtatttgtctctttgtcactagcttaatttacttagcatgatgtccttaatgttcattcatgttgtagcatgtttcagaatttctttccttttcaagactgaacaacattttattgtatatatgtaccacattttgtttatccattcatccactgttggacctttgggtagcttttactttgtggatactgtgaatttgctaaaataaacttaagtgtacaaatgtcacttttttgtttttgtttttgctttttgagacag

SEQ ID NO: 615447 - DNA, 618 bp, Homo sapiens
cagaagagagatacaaagaggtaataaaattcagagtaatcagttttggttgcatttactatgtcttataaaaggctgaatgaaatggattttgacattactgactaaaaaattgagagaagaatatttgtatttcctttgggtccatgttctcctgcttttgccaattcttcayaggatgaagaggatgtggcttgcacatatgcacactcaataaataatatttgaatgaatgatgtataatggtgggacttcatacacttctcacatctcacctgactctcttttctctctttccatccttctctttctgtctctcacatgcacatacacacgcacatgcacatgaacacatacacaatgactttcaaattttagtgcacattagaattacgtagaagagttattcaaaagcacattcattactgggcccaagacctgattttctaattcagtttgtctgagattggcccaaggatttgcatttctaacatgtgcctaggtgatgctcatgctacttgtccagggaccacacttagaaaatcactgctctaatacatgtgtcttctccttcctatggcctttccctctacacacaaatactctctgcagcaaaca

SEQ ID NO: 615448 - DNA, 563 bp, Homo sapiens
tgaattccacttggaagctgatttaaagacagaaattccttagacacagggtaagttttgcatcaaggctagtgttggaataaccaggagtgcctggtaaggacagtccttgtctgcctcagggtccttcttaaggacatatatttattttccagtaaatggatttcatgtagtttacacctacaactcccacttgactctcagttctatgacagctattttttcctgctataaaagcacttagtctcttaactccacttggtaggcatttcttcaaatattcataaagttttctgyaaatgtccaagttttctttctgcatccataaatatatcagtaaaagaagaatcacatatcaaaccaagacaggtttcaaacttcagcctgagattcgctttgaacttaaaaatctctaaaatgtacatcacagtttgttttttctagtgctttttttaatgctttttctaaacaaagaaaggctgggtctgaagtgaggaaaactgtgagcaaaaagaagagttatcagaggttggtagacccaaaacactgcacccaccaacttg

SEQ ID NO: 615449 - DNA, 563 bp, Homo sapiens
tgaattccacttggaagctgatttaaagacagaaattccttagacacagggtaagttttgcatcaaggctagtgttggaataaccaggagtgcctggtaaggacagtccttgtctgcctcagggtccttcttaaggacatatatttattttccagtaaatggatttcatgtagtttacacctacaactcccacttgactctcagttctatgacagctattttttcctgctataaaagcacttagtctcttaactccacttggtaggcatttcttcaaatattcataaagttttctgcaaatgyccaagttttctttctgcatccataaatatatcagtaaaagaagaatcacatatcaaaccaagacaggtttcaaacttcagcctgagattcgctttgaacttaaaaatctctaaaatgtacatcacagtttgttttttctagtgctttttttaatgctttttctaaacaaagaaaggctgggtctgaagtgaggaaaactgtgagcaaaaagaagagttatcagaggttggtagacccaaaacactgcacccaccaacttg

SEQ ID NO: 615450 - DNA, 563 bp, Homo sapiens
tgaattccacttggaagctgatttaaagacagaaattccttagacacagggtaagttttgcatcaaggctagtgttggaataaccaggagtgcctggtaaggacagtccttgtctgcctcagggtccttcttaaggacatatatttattttccagtaaatggatttcatgtagtttacacctacaactcccacttgactctcagttctatgacagctattttttcctgctataaaagcacttagtctcttaactccacttggtaggcatttcttcaaatattcataaagttttctgcaaatgtccaagttttctttctgcatccataaatatatcagtaaaagaagaatcacatatcaaaccaagacaggtttcaaacttcagcctgagattcgctttgaacttaaaaatctctaaaatgtacatcacagtttgttttttctagtgctttttttaatgctttttctaaacaaagaaaggctggrtctgaagtgaggaaaactgtgagcaaaaagaagagttatcagaggttggtagacccaaaacactgcacccaccaacttg

SEQ ID NO: 615451 - DNA, 586 bp, Homo sapiens
ataaaaatgaaaaaaaaggtcaaaacaaagttcaaacgttgtggccaattggatgtatttatcttggaaaaaattctacaactttaatatgtacgtacaaatgtgtaacaatatgatgatgctattcgcagacagtagaagatttagttttagctgaaaaaaattgttacgtactacaagttttgtaatggtctgatcatgaatttgggtccagtactggaataaargtctttttagtctgtgccagggtatcctcctgaccatatgcctatcttcatttggagaaaacatctagatctaaacttaagatctattgtgaatgtgaagccctactaaattgacctccctttcccctacctgctcctcattgcaatatcccttgagtaaggatcagtccaaatagctagatcaattcttatttgagtaagaacattccttccgtatacattgattactataatatatggatagctatagatacaaagacagagcattaaggggaaactatacagcctggctaaatgaatggagagacacatttacacagatgagttgctttcaggagtttccctgagcaatgaatcag

SEQ ID NO: 615452 - DNA, 562 bp, Homo sapiens
cctggaacagaagaaattaagttcaggaaatatttctgttgcaggctatctagaaacttaaaaaaaaaaaaaaaaaaaaaaagcctcccttagtaacttttactgatagccattgatgtaggaaagaaaatctatatttagagaacatayttttaaaatcagctttcttttcaataaaatgccttcaattcctatgtttttcaattagttcagagtctaagaacaaacatttactgaatgcttatgggatagaaagcatagtactaaatgcggtgggtgatttaaaataattgatgtgtagtagaacttgttactgaaagtgtcatacacagaccgacaacattagcatcacttgggagcttcttagaactacagatctcaggccttaatttaggtctactaagccattttgataacatctctaggggatctgtatgaatattaaagattgagaaatattgcaatagaagatgtggtcttgccttctcaaagcagctggaaaagcaccatgtacatatatgaaaacgtaaatcatattaaaaattagggatagaccaaaaca

SEQ ID NO: 615453 - DNA, 574 bp, Homo sapiens
attagatcagataatctaagaactgttttgcagtcatcacagggcactgtaataaagccattagaaaaataattaattgagcttgatgatgtagcaggtagtcatgactgtagctggcaggtcccagaagatagtcacattaactatgttgtcatgagaacaagcctaggttgtaaggctaaatcttctaygatgttgtagagaggcaacctcccccacagcaggaaaagccacccccttaatattcattatgaagcaaagagactaagtgaataatttacatgctacctgtgttctcctccatgctagccctgatatattttcaatattccattcctcttgctccctcagctctgtttcaggcagcaatttcatgccacgcagaatatgaatctaacaggtgaatttccatccagggtccaattctcttactactgatgtggagaaaaccgtaaacaaagccacagtaaagcctcctttttgaggctgagtaaagccagatgaaaggcaagagagactcagcaaaacatatttaggagatgggaaaataaataaattcctttaaaagttgcat

SEQ ID NO: 615454 - DNA, 455 bp, Homo sapiens
tgaaggctcttcccagcttccagaggctgacacattccttggcttctagcctcttttccatctttacagccagcagtggggaggtggggtccttcttgtgtcacaactctctgacccatctatgtcccttcctcttccactaataaagactcctgtgcttaaattgggcccagccacataatccaggataaccttcccatctcaagccccaagatgatttatattcctttgtttactcaaaggaatataaatcattcyttaatcacatcttcaaagtcctttttgccacataaggtaacattttcacagattcagggacattgttggggtccattatgccacctaccacaccatcattactgtggaaaactctgtagtcattgaaaacaaaaatataaacctaaattactgatgctgaaagatctctaacacatgtaaagtgaaaacaagaattc

SEQ ID NO: 615455 - DNA, 467 bp, Homo sapiens
tacatgcatatatatatatacccccacaaacatatatataattctattactataattatatatattcacatgtgtatatatatacatttcattttatacacacacacacacacacacggacacacatacatacacacgtatgattttctccttggccatgaaaatgtctgttccctctaattgtctgctgttttttattttggcctctgtctttcatgtagagttttctgcagcatgtggttggtagttgctgcttgaagactactctgagtgtgatttgatgtctttgtatcttttatgctataaataaaaatgtgatttttatttagcctaatcctatgggaggcgggtcagttaggagaaacatactggaggtttcctcattcagtaagtatatattttcttctccattaaccctgcctggtrtatgcagtccagaatcctccattttgtcctttttagaaaat

SEQ ID NO: 615456 - DNA, 473 bp, Homo sapiens
ctctggtacaaaggcttcacaaacctagtggttagaatatttttctttattcttcaaaaatatttccttttgtttcattttgtgtgaaaattgtgaaaggaaaataaatcttacggcccccaaatcactaagctaaagggaaaagccaagctaggaaccacttagggcaaacctgcctcttgttctatacaaagttacccctctgctcactgagataaatgcagatttgattgcctcctttggagaggcttattaaagaatgcaaccctttgtctcttatctacctatgacccggatgccctctccctgcttcgagtcttctgayctttgcttcgagttgtcccacctttccagaccaaaccagtgttcatctgacatacgttgattgatgtctcaggtctccctaaaatgtgtaaaaccaaaccatgctctgactgccctgggcacatgtcgtcaggacctcctgaggcagt

SEQ ID NO: 615457 - DNA, 452 bp, Homo sapiens
agcaatcccactgctaagtatatacatgaaagaaaggaaataaagcatattgtcaaagagactgcactctcctgtttactgtaacactattcacaaatggaatggtattcacctgcacaaagccagtacacaaagactggaaaagatggctgttttcaaattcccaaatcccagtaaaaagaaattacaaggcatgcaaaaaaaaaaaaaaaaaaaaagaaaaagaaaacatagtcaatcaaaggaacaaaataaaactctaggaactgaccctaaaggaatgtggatctaagagctgcctaagaatttaaaataactattataaaaacactcaatgacctaaaggaacacaggtaaacaactggataaaatcagattaatgatgcaggaacaaaatgrgaatatcaacaaagagacagaaacaataaaatagaaccaaatataaattctag

SEQ ID NO: 615458 - DNA, 624 bp, Homo sapiens
attgtccttctcctgcccttggactaaaatttacgccatcagctccygtggctttcagccttcagactttgcctggaattacaccaactcccctgggtctccagtttgcagatggcaagatggtggggcttctcatcttccacaatcaaacttaaacacttttatttatcaaagaatacaaccaggagttaaaacataacctatagattgggagaaaatactttcaaattatgtatctgatgagttactatctagaatacacaaagaattcatacaactcaacaataaaaacaaatcatataacctgagtaaaaaatggcaatggacttgaatagacatgtttcccaagaagatatacacatggccaccaagtgtaaaaaaatgctcaacatcactgatcatcagaatattataaatcatacccacaatatcacctcacacccattagaatgactactaaaaaaaatgataatttttggtgagattatgaataaattggagcccttgtgcactgttggtgtgatggtaaaatagtgcaactgctttggaaaatagtatggagtttcatttaaaaattaagaataaaatgaccatataatccaaaaatctcacttatgggtttat

SEQ ID NO: 615459 - DNA, 518 bp, Homo sapiens
tagccttttggcagtctttcatagtgttctaagaatagaatcatattgtcagcgaagaaagatagtgttacctcctattttgctattgagtgtcttttatttctttctcttgcttgattgttctagccaggacttccagtactatgatgaataggagtagtaagaaggggcatctttgtctttttccagtttgataaacgattctagcgaggtttcagggcacaaaattaatgtacaataatcaatagtatttctagaatgcacatttatgyacataatgtccaggctgagagtcaaatcaaaaacacgattccgtttacaatagccacaaagaaaatgaaataccttcgaatgcatctaaccaaaacactgctaaaacagataaatgctaaacactgctaaaactgctaaacaaataaatggaaatatattccatgttcataactggaagaatcagtatcgttaaaactgtcatactgcccaaagcaatttaaagattcgacactagtcttatcaat

SEQ ID NO: 615460 - DNA, 518 bp, Homo sapiens
tagccttttggcagtctttcatagtgttctaagaatagaatcatattgtcagcgaagaaagatagtgttacctcctattttgctattgagtgtcttttatttctttctcttgcttgattgttctagccaggacttccagtactatgatgaataggagtagtaagaaggggcatctttgtctttttccagtttgataaacgattctagcgaggtttcagggcacaaaattaatgtacaataatcaatagtatttctagaatgcacatttatgcacataatgtccaggctgagagtcaaatcaaaaacaygattccgtttacaatagccacaaagaaaatgaaataccttcgaatgcatctaaccaaaacactgctaaaacagataaatgctaaacactgctaaaactgctaaacaaataaatggaaatatattccatgttcataactggaagaatcagtatcgttaaaactgtcatactgcccaaagcaatttaaagattcgacactagtcttatcaat

SEQ ID NO: 615461 - DNA, 510 bp, Homo sapiens
gcaccactgcactccagcatgggtgacagagcaagactccatctcaaaaaaaaaataaaataaaatgagaataggaagaaatatgaagacatttaatggggtgataatatgtatattttgataggggtttgagttaaacagacatatacatttgtcaaaattcacaaaccagtggctaggcatggtggctcacacttgtcatcctaacactttgggaagctgaggaggagggatcatgtaagcccaggagtttgagacctgcctgggcaacataatgagagagaccttgtctctacaaaaaataaacaaaattagctgggtgtggtggtgtgtgcctgcggtcccagcaacctgaggggctgaggtgtgaggatcacttcagcccmggaagtggaggctagagtgagccatgatcatgccactgcactctagtctgggcactctgtctcaagagaaaaaacaaaaatcaccaaccagtacacttaaaatgtgtaccctttactatatgca

SEQ ID NO: 615462 - DNA, 604 bp, Homo sapiens
cacattgactatttttcaataagagtatccttgtcttataaaccagaataataaaaactcaatttgaaactctgtataacaaatgatcctaatattgagtgtctataagaccataagctgttttctctgagcataactgctgaagatctccagtccattatatttctcctgctgagtagcacatgcaaataaaaagttcctgcagattaaagaaattcttttttaagaaacaaaataaacttgaaataaaatcatctgctatcagtgttagaagctggcatttagggaaaatatgtatgtatctgtgatgggtaatactgagtgtcaasttgactggattgaaggatacaaagtattgatcctgggtgtgtctgtgagggtattgccaaaggggattaacatttgagtcagtgggctgggaaaggtagactcactgttaatctgggtgggcacaatctaatcagctgccagcacggctagaatataaggaggcagaaaattttgaaaagagagactggcctaacttcccaggctacatctttctcccaggctggatgcttcctgccctcaaacatagaactcccaagttcttcagttttggaac

SEQ ID NO: 615463 - DNA, 589 bp, Homo sapiens
agagcgtgtcccaggaggagcagagcagaatgcatgtttcytgtaaatggcttgctttcaagagaagggtaaaactgggctatgtatgctcaatgtagttatccataattaaccaatagaacaaatcaccacaccactgccaccttggggtgaaatgagtaaatggcagacagagaccaggagtgagcatattttgtcccacaatctaggacagagtcagagtcatttaactgtgttcccagcataggaaggaaacatcaaaagtagattaggaaacatccctcgtaacaattctctttttgatctcttgaccccttgggcttaactctcaatcccccatgggaaagggaccaacaatccttcaggatatttttgttcccatcttgaggccatttcctcaataaaaccattgttccttcaactgactagagttcatatttatttacagtgtgtttagataaaatttatatacactacaaaccacttttgtgtttgtattctaaatttttttctgcaactaaaactgttgctttttaaagaatatcaacaaataacatttctcttttctgccccaattctgagtaaattg

SEQ ID NO: 615464 - DNA, 589 bp, Homo sapiens
agagcgtgtcccaggaggagcagagcagaatgcatgtttcctgtaaatggcttgctttcaagagaagggtaaaactgggctatgtatgctcaatgtagttatccataattaaccaatagaacaaatcaccacaccactgccaccttggggtgaaatgagtaaatggcagacagagaccaggagtgagcatattttgtcccacaatctaggacagagtcagagtcatttaactgtgttcccagcataggaaggaaacatcaaaagtagattaggaaacatccctcgtaacaattctctttttgatctcttgaccccttgggcttaactctcaatcccccatgggaaagggaccaacaatccttcaggatatttttgttcccatcttgaggccatttcctcaataaaaccattgttcctycaactgactagagttcatatttatttacagtgtgtttagataaaatttatatacactacaaaccacttttgtgtttgtattctaaatttttttctgcaactaaaactgttgctttttaaagaatatcaacaaataacatttctcttttctgccccaattctgagtaaattg

SEQ ID NO: 615465 - DNA, 579 bp, Homo sapiens
agattagggtgtgtcctaatccaatgaacgatgtccttaaaagaagagggaaatttagatgcaaatataaatagggagagagcacaatgtgaccacaaaggcagagactggagtgcttcatctacaagccaaggaacaccaaggagcgccagcaactgccagagcttgaagagaggcatggaacagactctccctcagtgcctccaggaggaagcaatcaagtcgrtatcttgacttcagacctctagcctctagaactatgagacaataaatttgtgttgtttcaagccacctagtttgtggtactttgctatgacacctctaggaaactaatatacctcatgtctattgtccttaattctagctgttctacctttgaactattcagcttaattcagacagaaaaatctttcctaaaagttattcacatgatgtcccttctttgttcaaaatgacaaatgatacaccatttcctccaattattactaaatgcttgtttgccttattttcaagatctcgaacagttatatatttttccatgctttcctcttttgaaccaagctaactttttactgtccc

SEQ ID NO: 615466 - DNA, 579 bp, Homo sapiens
agattagggtgtgtcctaatccaatgaacgatgtccttaaaagaagagggaaatttagatgcaaatataaatagggagagagcacaatgtgaccacaaaggcagagactggagtgcttcatctacaagccaaggaacaccaaggagcgccagcaactgccagagcttgaagagaggcatggaacagactctccctcagtgcctccaggaggaagcaatcaagtcggtatcttgacttcagacctctagcctctagaactatgagacaataaatttgtgttgtttcaagccacctagtttgtggtactttgctatgacacctctaggaaactaatatacctcatgtctattgtccttaattctagctgttctacctttgaactattcagcttaattcagacagaaaaatctttcctaaaagttattcacatgatgtcccttctttgttcaaaatgacaaatgatacaccatttcctccaattatyactaaatgcttgtttgccttattttcaagatctcgaacagttatatatttttccatgctttcctcttttgaaccaagctaactttttactgtccc

SEQ ID NO: 615467 - DNA, 584 bp, Homo sapiens
aagtaataaagctccaaaatagtcacagagcctgtgatgccaactacctaactccccattgtttctgtaacacttctcattgcttacaagtcaggaatttggtcttttttttttttttttaagtagtaaaaacgttactgataagatttgcttctatttgggggtcatagccactgctttccaagactgtagaaattggctggccttttaattattttatttatttatttaaaaatttatacaaaaattagccgggtgtggtggcatgtgcctttggtcccagattcttgggagcctgagatgggagaattgcttgagcccgggagttcaaagctgcagtgaactgtgatcatgccactgcactccagctctaggtgacagagaaaaatcctttcttagaaaaaaaaattttttttttctgctgttgcccatccagggtgtagccatccagcagcaacatgcaatttgtaaakttaatcctggcttcagcaatggaatcaccatttgagcagttggaatttgagaggtagcataaactgccatgttgacaattgctttagagagaaagtgaacttgtgaacaat

SEQ ID NO: 615468 - DNA, 579 bp, Homo sapiens
agttgggattacaggcgcctgccatcacgcccggctaatttttgattttcagtagagatggggtttcgccatgttggccagcctggcctcgwactcctgacttcagttgatcctcctgcctcgcctcccaaagtgttgggattacaggcgtgagccaccacacctggcctattcacatttcttatatgcccttccaggagcattttaaaacataaaatgaggtggcaaatgcaatctttttaaacttgccctttccccgatagtaggacctgacagtaataagcatgtgttattctcagtagaataatattgtacaactgagtcaggacctgaaccttgacttataccagttagtgttcaagttgataaagcttcggcttctgtggtatttaaaatgaaagagatttaaaactggaaaataggcatttataaaagtattgggtgagtgcaaaagtgagtgctagaatgggcctcccggaataactttcagaaaatcaccactgaactggctcaccagtggagttgctacctctacctcaatcaggaaggtgggaaatttagaaaacactggaacttcag

SEQ ID NO: 615469 - DNA, 579 bp, Homo sapiens
agttgggattacaggcgcctgccatcacgcccggctaatttttgattttcagtagagatggggtttcgccatgttggccagcctggcctcgtactcctgacttcagttgatcctcctgcctcgcctcccaaagtgttgggattacaggcgtgagccaccacacctggcctattcacatttcttatatgcccttccaggagcattttaaaacataaaatgaggtggcaaatgcaatctttttaaacttgccctttccccgatagtaggacctgacagtaataagcatgtgttattctcagtagaataatattgtacaactgagtcaggacctgaaccttgacttataccagttagtgttcaagttgataaagcttcggcttctgtggtatttaaaatgaaagagatttaaaactggaaaataggcatttataaaagtattgggtgagtgcaaaagtgagtkctagaatgggcctcccggaataactttcagaaaatcaccactgaactggctcaccagtggagttgctacctctacctcaatcaggaaggtgggaaatttagaaaacactggaacttcag

SEQ ID NO: 615470 - DNA, 564 bp, Homo sapiens
acttttctcatcaattgtcagcataatgacttgatctggcaacttcaaagagtcactatttttaagtgttattattaacttatggattttaacatgtttgactgtgtttcaatccactttgattattattcttttggctactcaaagtgcttcagctttggccagcaggagccctttccatttggatccaatacctttttatacgtcctcagaaatctttgrttattaatttaattctttctgctgtaattagatattccaggttaatcttatacactttctttctcattctcaatagcaaataaaagagctcaaatacctgacataaacttaataaaatgtgcaaaatttggtgattaaaacttaacaccctccaggcggatgtctaaatggaaagatgtatctaaatagtaagatataccatattcttggataagtagatccaatatcagaattcaactctaagttgccctaaattaatttataatcactaattcatactatcttaatgaaaatataagactttttctgagtcaggaaaactgatcccaagtttactggaaa

SEQ ID NO: 615471 - DNA, 564 bp, Homo sapiens
acttttctcatcaattgtcagcataatgacttgatctggcaacttcaaagagtcactatttttaagtgttattattaacttatggattttaacatgtttgactgtgtttcaatccactttgattattattcttttggctactcaaagtgcttcagctttggccagcaggagccctttccatttggatccaatacctttttatacgtcctcagaaatctttgattattaatttaattctttctgctgtaattagatattccaggttaatcttatmcactttctttctcattctcaatagcaaataaaagagctcaaatacctgacataaacttaataaaatgtgcaaaatttggtgattaaaacttaacaccctccaggcggatgtctaaatggaaagatgtatctaaatagtaagatataccatattcttggataagtagatccaatatcagaattcaactctaagttgccctaaattaatttataatcactaattcatactatcttaatgaaaatataagactttttctgagtcaggaaaactgatcccaagtttactggaaa

SEQ ID NO: 615472 - DNA, 576 bp, Homo sapiens
gtaaaatgtagctactttggaaaatagcctgggagtccaacaaaataattgtagggtttccatatgacccaacaatttatatcctagatatacgtctactcaattaaaattatttttacacaaaaatgtgtacatgactattaatagaagcattgtttataatagtcaaagatagaagccacctgtattagtcagttctcatagtgctataagaaatacacaacacagggttatttataaaataaagaggctgaattgactcacatttccacatggctgtggaggcctcaggaagcttacaataaaggcccgaaggtgaaggagaagcaagcaccttctttacaagacagctggagagagaagtatgaaggaggaacttccaaacacttataaaaccatcatatctgatgagaactcactcgctatcaygagacagcttaaaggaaaccaaccccatgatccaattacctccctcccaggacacatggagattataggtccctccctcaacatgtagggattacatttgacaagtgatgttggggggggacacacagccaaactgtatgattctga

SEQ ID NO: 615473 - DNA, 682 bp, Homo sapiens
gttaaaatgtttttgaatgctcaattgtaatcagaattatacattttgaaaatgatattctatatcatgatttttggtaaataaatgaagtttaatagtgctgtttgtattataaagagttgtrtcacaggtttgaaaagggtaaaattaactatagttcacttctgtgataaaggtatggcttttaaaataacttgggcttagagtaataataaacatttccaacgatatggagacacacttgattagctaaggtcttcagccattgttttacacatcttgtgttttactatatgcattggcttaattcagacatgttaacatcattgatttttaaggaagcccaaacctaagtttagataaataaaaatatgtagttaaacttagatctcacctttcttgaatccttcatttcaattttgactgcagtgtgtacttgcttgtattttttttctagtgaaattgtttgtgataatggttaattatagattcacagttgtgttttattacatttaaatgtgaaattataactaaaaatttttaaagatacatctttgttcagggtatatcattaagttcaacaacaaagtcaaaattatttctaaggtaatgcattcataatggtgatcaatttataattttttaaaaatataatattcaaaacattttagaaaattatatt

SEQ ID NO: 615474 - DNA, 595 bp, Homo sapiens
cttagcctagaagctagcattaaggcactgtttccccagacacatagatatgcacacacacacacacacacacacacacacacacacctctatttattgatatatacgggaaattatattttaaaagagaggaaggagaaagrgaggaaaagtggagaaggggaatgaattgatggtacagtggctattaccagtttgatgccttcaaatggctttgaaccattattagagtcaaagatgatagaaatttttttttttgtgagactctgcacacaagcagggctgctagggggtcctggtgacatatgtagaacagtttatctatgcatgaaaactaagtcgtttttcctattggaagacataaaactattttttttttttttcagagacagggttttactctgtagcccaggctggagtgcagtggcaagatcatagcttactccagcctccaactcctgagctcaagtgatcctcccacctcagcctcccaagtagttgggaatacagggcaggcactaccactctcagctaattttaaaattttttttgtagaaatggggtctcgctatgttacccaggctggtcttgaact

SEQ ID NO: 615475 - DNA, 595 bp, Homo sapiens
cttagcctagaagctagcattaaggcactgtttccccagacacatagatatgcacacacacacacacacacacacacacacacacacctctatttattgatatatacgggaaattatattttaaaagagaggaaggagaaagggaggaaaagtggagaaggggaatgaattgatggtacagtggctattaccagtttgatgccttcaaatggctttgaaccattattagagtcaaagatgatagaaatttttttttttgtgagactctgcacacaagcagggctgctagggggtcctggtgacatatgtagaacagtttatctatgcatgaaaactaagtcgtttttcctattggaagacrtaaaactattttttttttttttcagagacagggttttactctgtagcccaggctggagtgcagtggcaagatcatagcttactccagcctccaactcctgagctcaagtgatcctcccacctcagcctcccaagtagttgggaatacagggcaggcactaccactctcagctaattttaaaattttttttgtagaaatggggtctcgctatgttacccaggctggtcttgaact

SEQ ID NO: 615476 - DNA, 595 bp, Homo sapiens
cttagcctagaagctagcattaaggcactgtttccccagacacatagatatgcacacacacacacacacacacacacacacacacacctctatttattgatatatacgggaaattatattttaaaagagaggaaggagaaagggaggaaaagtggagaaggggaatgaattgatggtacagtggctattaccagtttgatgccttcaaatggctttgaaccattattagagtcaaagatgatagaaatttttttttttgtgagactctgcacacaagcagggctgctagggggtcctggtgacatatgtagaacagtttatctatgcatgaaaactaagtcgtttttcctattggaagacataaaactattttttttttttttcagagacagggtyttactctgtagcccaggctggagtgcagtggcaagatcatagcttactccagcctccaactcctgagctcaagtgatcctcccacctcagcctcccaagtagttgggaatacagggcaggcactaccactctcagctaattttaaaattttttttgtagaaatggggtctcgctatgttacccaggctggtcttgaact

SEQ ID NO: 615477 - DNA, 585 bp, Homo sapiens
taaggacttggtgtcctgtgtcccagcactccagctatgcctgaaaggggccaatgtagagtttgagccatggcttcagaggctacaagtctcaagccttggcagtttccacatggtgttgagactgcgagtacacagaagtcaagaattggggtttgggaatctccacctagatttcagaagatgtatggaaacacctgaatgcccaggcagaagtttgctgcagggatggggccytcatggagaacctctactaggccagtgcagaagagaaatgtggggttggagccccccacaacacagagtccgtactggggcattgcctagtggagctgtgagaagagggccaccatcctacagaccccaggatggtagatccactgacagcttgccctgtgtgcctagaaaagtcacagatgctcaacactagcccgtgaaagcagccaggaggggggctataccctgcagaaccacaagggcagagctgctcaagaccatgggaacctacctcttgtatcactgtgacctggatgtgagacatggagtcaaaggagatcattttggagatttaagatttgacggccc

SEQ ID NO: 615478 - DNA, 585 bp, Homo sapiens
taaggacttggtgtcctgtgtcccagcactccagctatgcctgaaaggggccaatgtagagtttgagccatggcttcagaggctacaagtctcaagccttggcagtttccacatggtgttgagactgcgagtacacagaagtcaagaattggggtttgggaatctccacctagatttcagaagatgtatggaaacacctgaatgcccaggcagaagtttgctgcagggatggggccttcatggagaacctctactaggccagtgcagaagagaaatgtggggttggagccccccacaacacagagtccstactggggcattgcctagtggagctgtgagaagagggccaccatcctacagaccccaggatggtagatccactgacagcttgccctgtgtgcctagaaaagtcacagatgctcaacactagcccgtgaaagcagccaggaggggggctataccctgcagaaccacaagggcagagctgctcaagaccatgggaacctacctcttgtatcactgtgacctggatgtgagacatggagtcaaaggagatcattttggagatttaagatttgacggccc

SEQ ID NO: 615479 - DNA, 450 bp, Homo sapiens
ttttaaaaatgggagtttccctgcacaagctctctctctttgcctgcctccatctacataagatgtgattttctccttcttgccttcttccatgattgcgagaccttacccagccatgtggaactgtaagtccattaaacctctttcttktgtaaattgcccagtctcaggtatgtctttatcagcagcatgaaaacgggctaatacacctcctacctaagcaatgcttagccagtagcagacaggtgaggagcaaaaactgaatcatcctatccctcagctttgaagtatgaacaaaatgggttattttatgtgtcaacttgggccctgggatacccagacatttagttacacgttattctggtgtgtctttgagagtatttctgggtgtgactagaatctgaatgggtacactgaataaagcaggttgctcttcccaatgcagatgga

SEQ ID NO: 615480 - DNA, 487 bp, Homo sapiens
tccatctacataagatgtgattttctccttcttgccttcttccatgattgcgagaccttacccagccatgtggaactgtaagtccattaaacctctttcttttgtaaattgcccagtctcaggtatgtctttatcagcagcatgaaaacgggctaatacacctcctacctaagcaatgcttagccagtagcagacaggtgaggagcaaaaactgaatcatcctatccctcagctttgaagtatgaacaaaatgggttattttatgtgtcaacttgggccctgggatacccagacatttagttacacgttattctggtgtgtctttgagagtatttctgggtgtgactagaatctgaatgggtacactgaataaagcaggttgctcttcccaatgcagrtggagctcatacagtccattgaaggcctgaacagagcaataagcctgagtaagagagaattcctctctctgcccgtcttcaaccgggga

SEQ ID NO: 615481 - DNA, 525 bp, Homo sapiens
aataggacagagtagagagcccagaaataaatccacaagtttgcagtcaactgattttcaacaaaggtgccaagaacacacaatggggaaaggacagtctctttaataagtggttttggtaacactggatatctacaggcagaacaaggcaatttagacacttctctctcatcrtatacaaaaatcaagtcaaaatgggattgagacttaaatgtgtaagacctaaaactataaactactagaagaaaacatggggaaagttccatgacattggtctgagtaatgattttttggatataaccacagaagcacaggcaacaaaagcaaaaataaacaaattgtattatattgaattaaaaagcttctgcacagcaaaagaaaccatgaacaaagtgaagagagaacctacagaatgagagaaagtatcttcaagctatacatctcataatggctaatatccaaaatatataagaaatgtaaacaactcaatatcaagagaacaaataacccagtttaaaaatgtgc

SEQ ID NO: 615482 - DNA, 628 bp, Homo sapiens
caacatggatgaatctgaagattatgttaagtaacataaaccaggcagagaaagataaataccacatgatctcactcacrtgtggaatctataaaagattgtctcatagaaatagagagtagattggtggttactggaagctaagatggttgggagagtattgaggactgttggtcaaaggatacaagatggattgtatagcatagtgactatattagtgatgctgaaaaaatgctaaaagtggatgttatgtgttttcatcacaaaaaatggtaactatgtgaattaatgaatatgctaattagctagatttagctattccacaatgtgtatatccttcaaaacagcatgttgtacacaataaatacatacaattgtattacatctgtcaattaaataaatttgaaaaaataatattttcaatatgcatgaaagtgttactaatagtaacacgtacatgtgatccttaccatttcccagcaaacttattacatttcttagaaatgaattgtaatagcacacattaattcatttgtgaaattgaagctcacctgttgaaccataacactcttctgaaaatctaagataagttttttattctaatttaaacttcattttcttgatcata

SEQ ID NO: 615483 - DNA, 628 bp, Homo sapiens
caacatggatgaatctgaagattatgttaagtaacataaaccaggcagagaaagataaataccacatgatctcactcacgtgtggaatctataaaagattgtctcatagaaatagagagtagattggtggttactggaagctaagatggttgggagagtattgaggactgttggtcaaaggatacaagatggattgtatagcatagtgactatattagtgatgctgaaaaaatgctaaaagtggatgttatgtgttttcatcacaaaaaatggtaactatgtgaattaatgaatatgctaattagctagatttagctattccacaatgtgtatatccttcaaaacagcatgttgtacacaataaatacatacaattgtattacatctgtcaattaaataaatttgaaaaaataataktttcaatatgcatgaaagtgttactaatagtaacacgtacatgtgatccttaccatttcccagcaaacttattacatttcttagaaatgaattgtaatagcacacattaattcatttgtgaaattgaagctcacctgttgaaccataacactcttctgaaaatctaagataagttttttattctaatttaaacttcattttcttgatcata

SEQ ID NO: 615484 - DNA, 628 bp, Homo sapiens
caacatggatgaatctgaagattatgttaagtaacataaaccaggcagagaaagataaataccacatgatctcactcacgtgtggaatctataaaagattgtctcatagaaatagagagtagattggtggttactggaagctaagatggttgggagagtattgaggactgttggtcaaaggatacaagatggattgtatagcatagtgactatattagtgatgctgaaaaaatgctaaaagtggatgttatgtgttttcatcacaaaaaatggtaactatgtgaattaatgaatatgctaattagctagatttagctattccacaatgtgtatatccttcaaaacagcatgttgtacacaataaatacatacaattgtattacatctgtcaattaaataaatttgaaaaaataatattttcaatatgcatgaaagtgttactaatagtaacacgtacatgtgatccttaccatttcccagcaaacttattacatttcttagaaatgaattgtaatagcacrcattaattcatttgtgaaattgaagctcacctgttgaaccataacactcttctgaaaatctaagataagttttttattctaatttaaacttcattttcttgatcata

SEQ ID NO: 615485 - DNA, 537 bp, Homo sapiens
ggtttcaccatcttggccaggatgatcttgaactcctgacctcatgatccacccgcttcagcctccaaagtgctgggattacaggcatgagccactgcgcccagccgtgtgcttatacttttataaatataagctgttatttccttcaaaatcattgtccacataccacttttgtagyatatatgtatatttttaaaatctcacaaatttactattactttttgtcttctagcatgtttttgttgtcctgacaactgctatccacttagtcagtgtatgggttgtcagctgagataacaaacaaatcaattctcatcttttaaatttctaagtattctcttaaacttaatgcagagatggcagtcttagcagccacggcttttgatttgtaagagctagaagcattcagaaagaggaaagtttcttttgagctccaagaggtctaagatctgaaggaagcaagatctgttgtataggccataagcaatagattagagagaatgcaaaatacatgcagcaagagccatttccttgtcc

SEQ ID NO: 615486 - DNA, 537 bp, Homo sapiens
ggtttcaccatcttggccaggatgatcttgaactcctgacctcatgatccacccgcttcagcctccaaagtgctgggattacaggcatgagccactgcgcccagccgtgtgcttatacttttataaatataagctgttatttccttcaaaatcattgtccacataccacttttgtagtatatatgtatatttttaaaatctcacaaatttactattaytttttgtcttctagcatgtttttgttgtcctgacaactgctatccacttagtcagtgtatgggttgtcagctgagataacaaacaaatcaattctcatcttttaaatttctaagtattctcttaaacttaatgcagagatggcagtcttagcagccacggcttttgatttgtaagagctagaagcattcagaaagaggaaagtttcttttgagctccaagaggtctaagatctgaaggaagcaagatctgttgtataggccataagcaatagattagagagaatgcaaaatacatgcagcaagagccatttccttgtcc

SEQ ID NO: 615487 - DNA, 394 bp, Homo sapiens
gttttgttttttgagacagagttttgtgcttgttgcccagactggagtgcaatggtatgatcttggcttaccrcaacctctgtctcctgggttcatgtgattctcctgcctcagcctcctgagtagctgggattacaggcatgcaccaccacgcccagctaattttgtatttttagtagagatggggtttctccgtgttggtcaggctggtctcgaactcccaatctcaggtgatccacccacctcagcctcccaaagtgctgggattacaggtgtgagccatggcacccagccactatagggtaattttttttaatcagactaggctcttgaagttgtttgtgaacagaaatttaactcccagtggcttaatcaaagaggaaatatattcacc

SEQ ID NO: 615488 - DNA, 489 bp, Homo sapiens
agggccgtggtccttgaacggaaagagttgggaaatccgagtttcgtgatgagaagcccacattgaacggtgagggagggcagaattcacatcccatccctgccatcttctgtctgggtggccttaggacagtaatgaaacctcagttttctctggggctaataatagtacttgcaggagggagccttggtggaggttgaaggagatttcagagtgcctgacgcaggacagctgcagyggtaggatcactctaataatggtttacattgtggaatatgtatcccagttagtactatggccaggctctagtcccagcacactgtatcaacacatttaatcctgcacacccatttcacagatgaggaaactgaggcacaaaggtgttaagttactagctcagggtctttcagcaagtaactccaaagtccacatccttaaccatcacaccacgtggcataaagcaggtgcccagcaggcagttgccgcagt

SEQ ID NO: 615489 - DNA, 632 bp, Homo sapiens
tcacacccagaccagggtttgccagaccctgatggccctgagagtcctgaccagacccccgaaggccaacccaacatgctgggaatgaccatcggtgccaagcgggccttggacagctggggaagggctgtcacctcaaatgtcccactacctggctcctcctctttcctcagggacccgaatctgcccgctgggcacaggtcctcacacaaaggctggtccaggaaaaacaggaccacattgccaggcggcctgtccttcccctccccacaatctgtgctctaattacagaaatgacgggctcatggccagagacgccaagtaacagagaaagagaataaagtagaaaataagaatcattccccaacctacccccacacggagctgcgttttaaataactaagctccttgattgtgtctgtgtggaggcctgagttcctataaccgaggctgttttctcttttttttttttttttttttttgagacagagtctcactttctcacccaggctggagtgcagmtgcccgatattgtgacctctacctcctgggttcaagtgattcttgtgcctcagctgggcaccaccatgcctgctcatttttgtatttttagtagagacgggggtttcacc

SEQ ID NO: 615490 - DNA, 632 bp, Homo sapiens
tcacacccagaccagggtttgccagaccctgatggccctgagagtcctgaccagacccccgaaggccaacccaacatgctgggaatgaccatcggtgccaagcgggccttggacagctggggaagggctgtcacctcaaatgtcccactacctggctcctcctctttcctcagggacccgaatctgcccgctgggcacaggtcctcacacaaaggctggtccaggaaaaacaggaccacattgccaggcggcctgtccttcccctccccacaatctgtgctctaattacagaaatgacgggctcatggccagagacgccaagtaacagagaaagagaataaagtagaaaataagaatcattccccaacctacccccacacggagctgcgttttaaataactaagctccttgattgtgtctgtgtggaggcctgagttcctataaccgaggctgttttctcttttttttttttttttttttttgagacagagtctcactttctcacccaggctggagtgcagctgcccgatattgygacctctacctcctgggttcaagtgattcttgtgcctcagctgggcaccaccatgcctgctcatttttgtatttttagtagagacgggggtttcacc

SEQ ID NO: 615491 - DNA, 632 bp, Homo sapiens
tcacacccagaccagggtttgccagaccctgatggccctgagagtcctgaccagacccccgaaggccaacccaacatgctgggaatgaccatcggtgccaagcgggccttggacagctggggaagggctgtcacctcaaatgtcccactacctggctcctcctctttcctcagggacccgaatctgcccgctgggcacaggtcctcacacaaaggctggtccaggaaaaacaggaccacattgccaggcggcctgtccttcccctccccacaatctgtgctctaattacagaaatgacgggctcatggccagagacgccaagtaacagagaaagagaataaagtagaaaataagaatcattccccaacctacccccacacggagctgcgttttaaataactaagctccttgattgtgtctgtgtggaggcctgagttcctataaccgaggctgttttctcttttttttttttttttttttttgagacagagtctcactttctcacccaggctggagtgcagctgcccgatattgtgacctctacctcctgggttcaagtgattcttgtgcctcagctgggcaccaccatgcctrctcatttttgtatttttagtagagacgggggtttcacc

SEQ ID NO: 615492 - DNA, 529 bp, Homo sapiens
  misc_feature 71: n = A,T,C or G
gggctcttgccacctgagagagtcttcagttttttcaagtctatggttttcttttattccacacacaacantgagctaataaacagatattgttgtattaagttttaaaataatgtaaatgaaagaaaaattacctcttggtgtcacaacttatgccataagttgtctgatgtgtgttcactaaacgaattcataatgacattaattcatgatgttttaatttacagtgcacttttgtggcaaaagatttaggyagtcctatggcaaattttacctacttaacagttaccctaggaatgactgtctattcccatatatatattttcatgaacagcagccacagtttgtcttcaattaaatttatgcaaaaaccaatctgagaaaggtgaacaaagtcaaaatacctttatagaaaagggttgaagattttttcattttttaactgacaaagctataatatttggtagtcaaataatactgtttcattattatagtcttaaaaaattcattcctctagtttgacttttaa

SEQ ID NO: 615493 - DNA, 475 bp, Homo sapiens
gtatgttaagtcctcatttaatgttcaaaatagattcttgaaaactgcatctttaaatgaaacaatgttgttacatgccattcaaacataacttgtttttatttattaaactctggtaaaattagttttcttaaacaatatgttgctttacttacagtttccaagaacctatcaatgatgttaagcgagaatttcctatacacatatatgactcatataggtatgtgtatgtgtgtgtgacacacagttctacatatagatrgattatagctcaatgacagaatcccaggaggcttcctactaaataagacaaaattataagataatagtttatcaagaaataaggtaacaattgagagcttaatatacacttaggaatgttctaagccggttaatgacatagtgcatttaagaaatctagaaggcgggccaggcacggtggctcaggcctgtaattctagcactttggaaggca

SEQ ID NO: 615494 - DNA, 570 bp, Homo sapiens
gcacggtggctcaggcctgtaattctagcactttggaaggcagaggtgggcggatcacttgaggtcaggagttcaaaacctgcctggccaacatggtgaaaccccrtggcgggcacctgtaatcccagctactcaggaggctgaggcagaagaaccatttgaacccgggaggtggaggctgcagggcagcagaggttgcagtgagccgaggtcacgccactgcactccagccttggtgacagagcaagactccgtctcaaaaaaaaaaaaaaagaaaaaagaaagaaatctagaaggtgagtagatactttaaaccagtggtatccaatcctttgagtgtgaggacgtttttgcttatctgtggtgatgggtatcaaaaaaattattcacaaacctatttcttgtttcttagctcatcggctatcattactgtttgtgtattttataattttaagtgtgtcccaagacaaatcttcttccaatgtggcccagggaagccaagagtttgaaaacctgtgctgtaaactatattgtaatttgaaaatttgaatatatatagagttcaaatta

SEQ ID NO: 615495 - DNA, 589 bp, Homo sapiens
ttacataaaataatttaagtacattaaattcaaagtacattgcctttctccatttatcagcttttgtgtttcaggaaattgggagcaccagctctggagaggcagtaggaatagctactccaaactctgatcttctctaagcagttctgtgaggtatttcagtgtggggtcagacctggacaaggttcagtagaggggggatctgggcaaagttgggacagaaaatgggccctaggcttctgctctctaggccactaagtagtttcagttttgtcttttctaagcctgcccaaaagaaatttgattcccagagtttgtgaaatttttatctattttgccacttccccatctataacatacaataacaaggaatttaaccaaaacccttytgtttttccagaccaattatatttgaagttaaatatttattcttagcaaggcaaaaacaatacaaataatgacttctcttctgtccataaacagccatgcaggtggtggtatcaaaactcacaaaacaataaaagggaagtaacccaaacgaagcttaagtctcctgtacagttttcatctttgtactgaatacatgacg

SEQ ID NO: 615496 - DNA, 573 bp, Homo sapiens
tcaaatttttcacattcctgttgtgcttttttcatagataactcctgttgaaaaacttgattctctttagccaaattgacacattttgaagatacagcttccttctccgccataagattatcaaactgcatgaataaaatagtatagcttgataatgaagtaggctgagaataatctaatacaaaaccaatagcaaattttgaaatgcatttacttgcaataaaatgttatctgtaatgcagcagattcttcaaatgtgaaccctgaaattactcagaattttaagaacaaagttaaagctaccatgagtcataaaaatatattctttactatcatcatctttgccacagaatttttgtacttcattttacttttatttttccataattcatttttgttcctccttaaatggcacaaagttatctcctagtaaaaagtgtctaacccccttccttcattatcattccccacagtatgtcaaaaaaagtttcagagatatcatattgagttatttaggccaaagtcaataaatgggyctaggaataagactttgaaaataatattacacactat

SEQ ID NO: 615497 - DNA, 586 bp, Homo sapiens
aattatatattacacataatgaacaatagcttaataaatacataaaatatatgtaataagaaggtgaattggawgtattaagaaagaattataaaaagtgtggggtaacagatgttagaccctttagcctagttttagttgacaatcatctgcagatatagtttgtgtgagagacatcttactctgtaaatcatttggagagacacctgcaatatttcataaagatgaaaatttatttctagtgaacttatacgcttgtcaataaatagtaactttaaaaatttagttgattgtaaatgaccttttctaatcggggagtaattatgactgtgtgatttgaaaaggtaattttgaaattctaactatactgaattatctccagtatccttttttataatatatgctagagtgactagtaacaaaaacttcagcagaatattctttccttactacttttcaagtatatgcattcttttgaagatgttgaagtgagagattaaatatctgagaactaaaaaggaaaaataattcagaacacagaaattttattaggatgataaagagcatctgcagaggtagatcacag

SEQ ID NO: 615498 - DNA, 564 bp, Homo sapiens
gtaaacacagtgaaagtgtgaaaacagaaagaaacctaaaacttgctttagagagaactcaagatgtttccgtacaagtaaaaatgagttctgatatttccgaagtagaagataagaatgagtttcttactgaacaactttctaaaccacaaattaaattcaataccttaaaagataagttccgtaagacaagagatactctcagaaaaaagtyattggctttagaaactgtacataacaacctaagccaaacacagcagcaaataaaggaaatgaaagagatgtatgaaaatgcagaagctaaagagaataattccactggaaagtggagctgtgtagaagagagaatatgtcaactccaacatgaaaatccgtgcattgaacagcaactagatgatgttcatcagaaagagtatcataaagagataataactaatatccaaagaagctttattgagagtggaaagacctcatgctataagagaaaaataagaaggtaatgaatgaatgtgatcatttaaaagaaagtctctttcaatatgagagagagaaagcagaaagagt

SEQ ID NO: 615499 - DNA, 583 bp, Homo sapiens
atgttgaacttagttgaatataaaaatcaatagataaaaagtgtgtttaccatactgtataattccatgtacrtgaagcatccagaaaagataaacgtatagggacaaaaagtagattaatatttgcaaagggctgggaatagaagctggtagtgactgctaatgggcatgagggatcttgcagtgatggaaatgctgtaaagttggattgtagagatggctgcacaactcagtaaatggactaaaaatcttttaactttaagttaaaacagatacattctatagtatgtaaattatatttcaacaaagctgttttaataaaaaaaggaaaaatgtgtttactatatcagcttagaaacatgcctcatttctaggaaataaaaggtagagatgagagatgatttactttgagaaaagacattgtgtcacctatgaaattttattaggcacagagtcatattttaagatagatagttctgtactgctgaaataattttaatgactttatgttgccacatgttaagaccataatgtaggtataaatggaaatgtttacacctgaaatgagtattttcaaattaaa

SEQ ID NO: 615500 - DNA, 583 bp, Homo sapiens
atgttgaacttagttgaatataaaaatcaatagataaaaagtgtgtttaccatactgtataattccatgtacgtgaagcatccagaaaagataaacgtatagggacaaaaagtagattaatrtttgcaaagggctgggaatagaagctggtagtgactgctaatgggcatgagggatcttgcagtgatggaaatgctgtaaagttggattgtagagatggctgcacaactcagtaaatggactaaaaatcttttaactttaagttaaaacagatacattctatagtatgtaaattatatttcaacaaagctgttttaataaaaaaaggaaaaatgtgtttactatatcagcttagaaacatgcctcatttctaggaaataaaaggtagagatgagagatgatttactttgagaaaagacattgtgtcacctatgaaattttattaggcacagagtcatattttaagatagatagttctgtactgctgaaataattttaatgactttatgttgccacatgttaagaccataatgtaggtataaatggaaatgtttacacctgaaatgagtattttcaaattaaa

SEQ ID NO: 615501 - DNA, 583 bp, Homo sapiens
atgttgaacttagttgaatataaaaatcaatagataaaaagtgtgtttaccatactgtataattccatgtacgtgaagcatccagaaaagataaacgtatagggacaaaaagtagattaatatttgcaaagggctgggaatagaagctggtagtgactgctaatgggcatgagggatcttgcagtgatggaaatgctgtaaagytggattgtagagatggctgcacaactcagtaaatggactaaaaatcttttaactttaagttaaaacagatacattctatagtatgtaaattatatttcaacaaagctgttttaataaaaaaaggaaaaatgtgtttactatatcagcttagaaacatgcctcatttctaggaaataaaaggtagagatgagagatgatttactttgagaaaagacattgtgtcacctatgaaattttattaggcacagagtcatattttaagatagatagttctgtactgctgaaataattttaatgactttatgttgccacatgttaagaccataatgtaggtataaatggaaatgtttacacctgaaatgagtattttcaaattaaa

SEQ ID NO: 615502 - DNA, 583 bp, Homo sapiens
atgttgaacttagttgaatataaaaatcaatagataaaaagtgtgtttaccatactgtataattccatgtacgtgaagcatccagaaaagataaacgtatagggacaaaaagtagattaatatttgcaaagggctgggaatagaagctggtagtgactgctaatgggcatgagggatcttgcagtgatggaaatgctgtaaagttggattgtagagatggctgcacaactcagtaaatggactaaaaatcttttaactttaagttaaaacagatacattctatagtatgtaaaytatatttcaacaaagctgttttaataaaaaaaggaaaaatgtgtttactatatcagcttagaaacatgcctcatttctaggaaataaaaggtagagatgagagatgatttactttgagaaaagacattgtgtcacctatgaaattttattaggcacagagtcatattttaagatagatagttctgtactgctgaaataattttaatgactttatgttgccacatgttaagaccataatgtaggtataaatggaaatgtttacacctgaaatgagtattttcaaattaaa

SEQ ID NO: 615503 - DNA, 645 bp, Homo sapiens
atgtgaagttcacttttttcttttagtgattttaatgtaatgaaattgaaaactctgtgcttctaaaagactttttaaggagcacggtatttttccattttgaaaaaaaattggcaaaatatcttctaatatagatagaaggtaattggctgagggtaataaacagaagattaaaaaacaacctttatcccctgatattctgtcaagggctacagtgaattacacaccctggcatgggtttgtacaccatgtgctggaagccagcagtcatgcaggccatgctctcccacacttagaaaagmagcccataatttgagatgacatgattatatatttagaaaacctcatcatctctgcccaaaatctccttacgctgataagcaacttcagcaaagtctcaggacacaaaatcaatgtgcaaaaatcacaagcattcttatacaccaataacagacaaacagagagccaaatcatgagtgaactcccattcacaattgcttcaaagagaataaaatacctaggaatcaaacttacaagggatgtgaaagacttcttcaaggagaactacaaaccactgctcaatgaaataaaagaggacacaaacaaatggaacaacattccatgctcatggataggaagaatcaa

SEQ ID NO: 615504 - DNA, 645 bp, Homo sapiens
atgtgaagttcacttttttcttttagtgattttaatgtaatgaaattgaaaactctgtgcttctaaaagactttttaaggagcacggtatttttccattttgaaaaaaaattggcaaaatatcttctaatatagatagaaggtaattggctgagggtaataaacagaagattaaaaaacaacctttatcccctgatattctgtcaagggctacagtgaattacacaccctggcatgggtttgtacaccatgtgctggaagccagcagtcatgcaggccatgctctcccacacttagaaaagaagcccataatttgagatgacatgattatatatttagaaaacctcatcatctctgcccaaaatctccttacgctgataagcaacttcagcaaagtctcaggacacaaaatcaatgtgcaaaaatcacaagcattcttatacaccaataacagacaaacagagagccaaatcatgagtgaactcccattcacaattgcttcaaagagaataaaatacctaggaatcaaacttacaagggatgtgaargacttcttcaaggagaactacaaaccactgctcaatgaaataaaagaggacacaaacaaatggaacaacattccatgctcatggataggaagaatcaa

SEQ ID NO: 615505 - DNA, 645 bp, Homo sapiens
atgtgaagttcacttttttcttttagtgattttaatgtaatgaaattgaaaactctgtgcttctaaaagactttttaaggagcacggtatttttccattttgaaaaaaaattggcaaaatatcttctaatatagatagaaggtaattggctgagggtaataaacagaagattaaaaaacaacctttatcccctgatattctgtcaagggctacagtgaattacacaccctggcatgggtttgtacaccatgtgctggaagccagcagtcatgcaggccatgctctcccacacttagaaaagaagcccataatttgagatgacatgattatatatttagaaaacctcatcatctctgcccaaaatctccttacgctgataagcaacttcagcaaagtctcaggacacaaaatcaatgtgcaaaaatcacaagcattcttatacaccaataacagacaaacagagagccaaatcatgagtgaactcccattcacaattgcttcaaagagaataaaatacctaggaatcaaacttacaagggatgtgaaagacttcttcaaggagaactacaaaccactgctcratgaaataaaagaggacacaaacaaatggaacaacattccatgctcatggataggaagaatcaa

SEQ ID NO: 615506 - DNA, 390 bp, Homo sapiens
cgcggagcggatcagcggccggagcgtttggcggactctgcgtggacttggagctcacagcgtcttgcgacttggaagcggattcagaggacaggacagaacacttgggcaagtgaatctctgtctgtctgtctgtctgtctgtctgtctcattggttggttgatttccattttcttaaggggcacatacctcacaccgcacacacacaaacacacacacgcgcacacacacrcacacgcacacacacgcacacacactccttccttctgcgagttagtacattagtaggggcccctgggagctgcaggtttcctaatcatgtctgcacctaagaacagtagggtcttgtgtggctcttcttatgaacggtcccccagcccgaactcgcc

SEQ ID NO: 615507 - DNA, 390 bp, Homo sapiens
cgcggagcggatcagcggccggagcgtttggcggactctgcgtggacttggagctcacagcgtcttgcgacttggaagcggattcagaggacaggacagaacacttgggcaagtgaatctctgtctgtctgtctgtctgtctgtctgtctcattggttggttgatttccattttcttaaggggcacatacctcacaccgcacacacacaaacacacacacgcgcacacacacacacacgcacacacacgcacacacactccttccttctgcgagttagwacattagtaggggcccctgggagctgcaggtttcctaatcatgtctgcacctaagaacagtagggtcttgtgtggctcttcttatgaacggtcccccagcccgaactcgcc

SEQ ID NO: 615508 - DNA, 390 bp, Homo sapiens
cgcggagcggatcagcggccggagcgtttggcggactctgcgtggacttggagctcacagcgtcttgcgacttggaagcggattcagaggacaggacagaacacttgggcaagtgaatctctgtctgtctgtctgtctgtctgtctgtctcattggttggttgatttccattttcttaaggggcacatacctcacaccgcacacacacaaacacacacacgcgcacacacacacacacgcacacacacgcacacacactccttccttctgcgagttagtacattagtaggggcccctgggagctgcaggtttcctaatcatgtctgcacctaagaacrgtagggtcttgtgtggctcttcttatgaacggtcccccagcccgaactcgcc

SEQ ID NO: 615509 - DNA, 390 bp, Homo sapiens
cgcggagcggatcagcggccggagcgtttggcggactctgcgtggacttggagctcacagcgtcttgcgacttggaagcggattcagaggacaggacagaacacttgggcaagtgaatctctgtctgtctgtctgtctgtctgtctgtctcattggttggttgatttccattttcttaaggggcacatacctcacaccgcacacacacaaacacacacacgcgcacacacacacacacgcacacacacgcacacacactccttccttctgcgagttagtacattagtaggggcccctgggagctgcaggtttcctaatcatgtctgcacctaagaacagtagggtcttgtstggctcttcttatgaacggtcccccagcccgaactcgcc

SEQ ID NO: 615510 - DNA, 540 bp, Homo sapiens
gttctcaccactcagtaaatgtggtaattacctcttatctggttacaatgcgtcttcccaggcctgccagcagggattcttaatcctgatgcaaatgatgtggcagcacttgtggttatagacatgagtgtttgaatcacagatctatgtccaaacccaaatcccctcagtaattaactgtaagctgtcattcaattacttaatctctccagcatgccacttcctcagrccaattcatatgggaatatgaattcataggagtgttataaagggtagtttatacaatgaactcatgactatgaaatgcttagcatggcatccaaaaagccctgaataagtggtgcaacaatacctttttattacggaaaacacacccaacctagaaaagagtgttcataggggattaagagaagtaagtacagttagtgagcagagcaagccagcgtggtgagggcctttcctaggtgaggcatccaccacatttgaaagtgggatgcagggcaagagctcaacatcaaccaggatgggcaggaatgaagt

SEQ ID NO: 615511 - DNA, 540 bp, Homo sapiens
gttctcaccactcagtaaatgtggtaattacctcttatctggttacaatgcgtcttcccaggcctgccagcagggattcttaatcctgatgcaaatgatgtggcagcacttgtggttatagacatgagtgtttgaatcacagatctatgtccaaacccaaatcccctcagtaattaactgtaagctgtcattcaattacttaatctctccagcatgccacttcctcagaccaattcatatgggaatatgaattcataggagtgttataaagggtagtttatacaatgarctcatgactatgaaatgcttagcatggcatccaaaaagccctgaataagtggtgcaacaatacctttttattacggaaaacacacccaacctagaaaagagtgttcataggggattaagagaagtaagtacagttagtgagcagagcaagccagcgtggtgagggcctttcctaggtgaggcatccaccacatttgaaagtgggatgcagggcaagagctcaacatcaaccaggatgggcaggaatgaagt

SEQ ID NO: 615512 - DNA, 489 bp, Homo sapiens
ttaatttaattaacttctaaattaatgagagtttaaataccttgaactctcatttaagtttattgttagaatgtggttagtcctaataaatttgacgatttcagtggtaaccagtatcttatttttaccttcaaaggctctagggcagatctgacttagctttggccataggactgtaagttttaccaaagcaagtttaggcaagtcttagagacaaattatttgacttcccagtttggttttccatttaggcaagtatttctgcttacttccataatacattttttastcttgttgctttttccatgacttttatataaccttgtcttcattttttaaaactttcttctctgtttttcttggtgtttcttttgttctattatttttttcaaactctgctgcctatgtattccaagtttttctatagacagaatcaagaggacatagaattacagaattttaaggaatcttagaatgaattaaaatacc

SEQ ID NO: 615513 - DNA, 489 bp, Homo sapiens
ttaatttaattaacttctaaattaatgagagtttaaataccttgaactctcatttaagtttattgttagaatgtggttagtcctaataaatttgacgatttcagtggtaaccagtatcttatttttaccttcaaaggctctagggcagatctgacttagctttggccataggactgtaagttttaccaaagcaagtttaggcaagtcttagagacaaattatttgacttcccagtttggttttccatttaggcaagtatttctgcttacttccataatacattttttactcttgttgctttttccatgacttttatataaycttgtcttcattttttaaaactttcttctctgtttttcttggtgtttcttttgttctattatttttttcaaactctgctgcctatgtattccaagtttttctatagacagaatcaagaggacatagaattacagaattttaaggaatcttagaatgaattaaaatacc

SEQ ID NO: 615514 - DNA, 571 bp, Homo sapiens
  misc_feature 20, 30: n = A,T,C or G
acataaaagacagcccttgnataatttatngagtgctgaatcagatcaatcggattcattaatttaattaacttctaaattaatgagagtttaaataccttgaactctcatttaagtttattgttagaatgtggttagtcctaataaatttgacgatttcagtggtaaccagtatcttatttttaccttcaaaggctctagggcagatctgacttagctttggccataggactgtaagttttaccaaagcaagtttaggcaagtcttagagacaaattatttgacttcccagtttggttttccatttaggcaagtatttctgcttacttccataatacattttttactcttgttgctttttccatgacttttatataaccttgtcttcattttttaaaactttcttctctgtttttcttggtgtttcttttgttctattatttttttcaaactctgctgcctatgtattccaagtttttctatagacagaatcaagaggacatagaattacagaattttaaggaatcttrgaatgaattaaaataccttctagtatttttatctgcgttga

SEQ ID NO: 615515 - DNA, 482 bp, Homo sapiens
ggaatcttagaatgaattaaaataccttctagtatttttatctgcrttgaacattctggtcaagtgattctctagatagagaatgtgaggctcaaagagattaggaagcttttttttttagacataggaattggcagaaatgagatttgaactcatggtaaagcccagtactcttgcttctttttatgtcctattggcgtgtgttttaataatacaaacgggagtgagcctgtggatagaatgagaatggaattagctggtgaacccaatagaagtagataagaatggaatgagcaggggaagtccaagtttgaaagataacaacactggattggataggagtacggactcttctacaagagatcaaagtattggggtttatgacaagtttgataaagataaattataaaaatgaaggacacaagatgttgggaattatctacaaaggcacattaaaatagaaggttcaagggagctctaaa

SEQ ID NO: 615516 - DNA, 579 bp, Homo sapiens
aaactactctaagtaaatatagggaaaatgcttgaggacattagtctgcacaaagatttttatgggtaagacatcagaagcataggcaaacaacaaatcatagacaaatgacactacattaagctaaagagcttctgtccagcaaacaactgagtgaagaaaaaacctgtagaataggagaaaatattgtcaagctattcacctaataagggactaatatacaaaatatacaaaaaaactcaaacaacttcacagtataaaaatctgagttcaaatttgggcaaaatatataactatacttttttttagaaaaagaaatccaaataaccaataaataaattttaaatgctcagtatcactaatcctcagggaaatacaaatcaaatctacaatgtgatataatcttgcttcaatttgaataaattgctgtcattgaaaagacaaaaaaaataacaaatgctsgtgaggctccagagaacagtaaactcttacatgctgttggtgggaaggtaaattagtgcagccactatagagaacaacaggaggttttctcaaaaaaactaataatgggactgccga

SEQ ID NO: 615517 - DNA, 579 bp, Homo sapiens
gtacatttagctttcatacatttcaaatattgtgggggctttcctgtaccaatttagggtaaaggaaagcaataggaccttcctaagttggatccatgctgaggaatcaagactaccattttgaagtgatgtagattagtcttttatccagagacaratcacggaaaagagacagtggatctttctaccttgttttaggtcatcagttttattccagtttagggaacaaaatttatgtcatccattaattgaattttaagttcagcttcaggacagataatttgtgagggcacattattgtcaggctctgccaatatattgactgtcactatttgttataaacctcaaggttagttttcattgaatattttatagatttagacaggtggaggcagaaataggtaactaaaatctatttttagaacagaggacatattttaattatatcaagaatcataatttaatatatagatcactgacctttccccagattatgttttcctttttttgagggggaagctggatataaactggcagttaaaaaaattgtaaagaaatcaacttgctcattttcattgt

SEQ ID NO: 615518 - DNA, 579 bp, Homo sapiens
gtacatttagctttcatacatttcaaatattgtgggggctttcctgtaccaatttagggtaaaggaaagcaataggaccttcctaagttggatccatgctgaggaatcaagactaccattttgaagtgatgtagattagtcttttatccagagacaaatcacrgaaaagagacagtggatctttctaccttgttttaggtcatcagttttattccagtttagggaacaaaatttatgtcatccattaattgaattttaagttcagcttcaggacagataatttgtgagggcacattattgtcaggctctgccaatatattgactgtcactatttgttataaacctcaaggttagttttcattgaatattttatagatttagacaggtggaggcagaaataggtaactaaaatctatttttagaacagaggacatattttaattatatcaagaatcataatttaatatatagatcactgacctttccccagattatgttttcctttttttgagggggaagctggatataaactggcagttaaaaaaattgtaaagaaatcaacttgctcattttcattgt

SEQ ID NO: 615519 - DNA, 579 bp, Homo sapiens
gtacatttagctttcatacatttcaaatattgtgggggctttcctgtaccaatttagggtaaaggaaagcaataggaccttcctaagttggatccatgctgaggaatcaagactaccattttgaagtgatgtagattagtcttttatccagagacaaatcacggaaaagagacagtggatctttctaccttgttttaggtcatcagttttattccagtttagggaacaaaatttatgtcatccattaattgaattttaagttcagcttcaggacagataatttgtgagggcacattattgtcaggctctgccaatatattgactgtcactatttgttataaacctcaaggtwagttttcattgaatattttatagatttagacaggtggaggcagaaataggtaactaaaatctatttttagaacagaggacatattttaattatatcaagaatcataatttaatatatagatcactgacctttccccagattatgttttcctttttttgagggggaagctggatataaactggcagttaaaaaaattgtaaagaaatcaacttgctcattttcattgt

SEQ ID NO: 615520 - DNA, 556 bp, Homo sapiens
aatactattcaccgtataaaggaattaaatcctgttattcgtggccacgtggatcagtctgacagatgttatgttaagtgcagacacwgaaagataaatactgcacattcttactcatgtgtgggagctaaaggaaaattgaaggctgggcaatatggctgatgcctgtaatttcctagctctttgtaagaccaaggcaagagaatcatttgaggccaaaagttccagagctccctgggaaacatagggagatatctctacaaagtcaaaaatcagacatgtgcaatggtgcatgcccataatgccagctgctcaggaggctgaggtgtgaggatcagatgggcccaagagtttgaggctgcagtgaactatgatcaaaccactgtctccagtctgggtgactacagttgcccagagccaagactacactagcaagaccctgtctcttaacaaaaaaaagctcacagaagtaggggaggtgaggctggttaatggatacagaattacagttagataagaggagtgggttctggtgttctgtggcattgtagggtga

SEQ ID NO: 615521 - DNA, 214 bp, Homo sapiens
cttgttttttgtttgtatctctctttgttctcacattttaaattgaaatttttggggaggcagggtctwgctctgttgtccatgctgcagtgtagtggcatgatcttggctcactgctgtatccacctctcaggctcaagtgatcctcccacatcagcttcccaagcagctgggactacaggcacacaccatcatgcctgactccttttggtat

SEQ ID NO: 615522 - DNA, 473 bp, Homo sapiens
agctccctgggaaacatagggagatatctctacaaagtcaaaaatcagacawgtgcaatggtgcatgcccataatgccagctgctcaggaggctgaggtgtgaggatcagatgggcccaagagtttgaggctgcagtgaactatgatcaaaccactgtctccagtctgggtgactacagttgcccagagccaagactacactagcaagaccctgtctcttaacaaaaaaaagctcacagaagtaggggaggtgaggctggttaatggatacagaattacagttagataagaggagtgggttctggtgttctgtggcattgtagggtgaatatggttaactacgacttattgtatatttttaaaaagccagaagattttgaatgttcacaattcaaagaaatgaacaatggttgaagtagtaaatgtgctagttagcttgatcattacacactatatacatgtataaaaatatc

SEQ ID NO: 615523 - DNA, 556 bp, Homo sapiens
aatactattcaccgtataaaggaattaaatcctgttattcgtggccacgtggatcagtctgacagatgttatgttaagtgcagacacagaaagataaatactgcacattcttactcatgtgtgggagctaaaggaaaattgaaggctgggcaatatggctgatgcctgtaatttcctagctctttgtaagaccaaggcaagagaatcatttgaggccaaaagttccagagctccctgggaaacatagggagatatctctacaaagtcaaaaatcagacatgtgcaatggtgcatgcccataatgccagctgctcaggaggctgaggtgtgaggatcagatgggcccaagagtttgaggctgcagtgaactatgatcaaaccactgtctccagtctgggtgactacagttgcccagagccmagactacactagcaagaccctgtctcttaacaaaaaaaagctcacagaagtaggggaggtgaggctggttaatggatacagaattacagttagataagaggagtgggttctggtgttctgtggcattgtagggtga

SEQ ID NO: 615524 - DNA, 556 bp, Homo sapiens
aatactattcaccgtataaaggaattaaatcctgttattcgtggccacgtggatcagtctgacagatgttatgttaagtgcagacacagaaagataaatactgcacattcttactcatgtgtgggagctaaaggaaaattgaaggctgggcaatatggctgatgcctgtaatttcctagctctttgtaagaccaaggcaagagaatcatttgaggccaaaagttccagagctccctgggaaacatagggagatatctctacaaagtcaaaaatcagacatgtgcaatggtgcatgcccataatgccagctgctcaggaggctgaggtgtgaggatcagatgggcccaagagtttgaggctgcagtgaactatgatcaaaccactgtctccagtctgggtgactacagttgcccagagccaagactacactagcaagaccctgtctcttaacaaaaaaaagctcacagaagtaggggaggkgaggctggttaatggatacagaattacagttagataagaggagtgggttctggtgttctgtggcattgtagggtga

SEQ ID NO: 615525 - DNA, 473 bp, Homo sapiens
agctccctgggaaacatagggagatatctctacaaagtcaaaaatcagacatgtgcaatggtgcatgcccataatgccagctgctcaggaggctgaggtgtgaggatcagatgggcccaagagtttgaggctgcagtgaactatgatcaaaccactgtctccagtctgggtgactacagttgcccagagccaagactacactagcaagaccctgtctcttaacaaaaaaaagctcacagaagtaggggaggtgaggctggttaatggatacagaattacagttagataagaggagtgggttctggtgttctgtggcattgtagggtgaatatggttaactaygacttattgtatatttttaaaaagccagaagattttgaatgttcacaattcaaagaaatgaacaatggttgaagtagtaaatgtgctagttagcttgatcattacacactatatacatgtataaaaatatc

SEQ ID NO: 615526 - DNA, 644 bp, Homo sapiens
aacatagacttatatgggaacaattaggttttttgtttgtttgtttktgtttttgagacagagtcttgctctgtcaccaaggctggagtgcagtggctcagtcttggctcattaccacctctgcctctcaggttcaagcaattctcctgcctcagcccctcgagtagctgatactacatgcacgtgctaccataccctgctaatttttctatttctagtagagatggggtttcaccaggttggccaggctgctcttgaactcctgacctcaggtgatctgcccacctcggcttgccaatgtgctgggattacaggtgggagccactgtgccagctacaaataagatttttaaggctgttatattttatacaattctttggtctatgtgaattctgaaggtattcatgcattgagggaagattatctcagtttaatgaaagcagtttttaatttaaagtatattcattaaattttttttgaagtttttttctctagtacacagaaacacacaatagtatcatgggtatttgaccttaatgtgtttatgcacaaacttagttattcaaatattttcctatccctgaagaatcttaattactaataaacaaatttctcatggaaaacaacatatataacagagatgg

SEQ ID NO: 615527 - DNA, 644 bp, Homo sapiens
aacatagacttatatgggaacaattaggttttttgtttgtttgtttttgtttttgagacagagtcttgctctgtcaccaaggctggagtgcartggctcagtcttggctcattaccacctctgcctctcaggttcaagcaattctcctgcctcagcccctcgagtagctgatactacatgcacgtgctaccataccctgctaatttttctatttctagtagagatggggtttcaccaggttggccaggctgctcttgaactcctgacctcaggtgatctgcccacctcggcttgccaatgtgctgggattacaggtgggagccactgtgccagctacaaataagatttttaaggctgttatattttatacaattctttggtctatgtgaattctgaaggtattcatgcattgagggaagattatctcagtttaatgaaagcagtttttaatttaaagtatattcattaaattttttttgaagtttttttctctagtacacagaaacacacaatagtatcatgggtatttgaccttaatgtgtttatgcacaaacttagttattcaaatattttcctatccctgaagaatcttaattactaataaacaaatttctcatggaaaacaacatatataacagagatgg

SEQ ID NO: 615528 - DNA, 644 bp, Homo sapiens
aacatagacttatatgggaacaattaggttttttgtttgtttgtttttgtttttgagacagagtcttgctctgtcaccaaggctggagtgcagtggctcagtcttggctcattaccacctctgcctctcaggttcaagcaattctcctgcctcagcccctcgagtagctgatactacatgcacgtgctaccataccctgctaatttttctatttctagtagagatggggtttcaccaggttggccaggctgctcttgaactcctgacctcaggtgatctgcccacctcggcttgccaatgtgctgggattacaggtgggagccactgtgccagctacaaataagatttttaaggctrttatattttatacaattctttggtctatgtgaattctgaaggtattcatgcattgagggaagattatctcagtttaatgaaagcagtttttaatttaaagtatattcattaaattttttttgaagtttttttctctagtacacagaaacacacaatagtatcatgggtatttgaccttaatgtgtttatgcacaaacttagttattcaaatattttcctatccctgaagaatcttaattactaataaacaaatttctcatggaaaacaacatatataacagagatgg

SEQ ID NO: 615529 - DNA, 644 bp, Homo sapiens
aacatagacttatatgggaacaattaggttttttgtttgtttgtttttgtttttgagacagagtcttgctctgtcaccaaggctggagtgcagtggctcagtcttggctcattaccacctctgcctctcaggttcaagcaattctcctgcctcagcccctcgagtagctgatactacatgcacgtgctaccataccctgctaatttttctatttctagtagagatggggtttcaccaggttggccaggctgctcttgaactcctgacctcaggtgatctgcccacctcggcttgccaatgtgctgggattacaggtgggagccactgtgccagctacaaataagatttttaaggctgttatattttatacaattctttggtctatgtgaattctgaaggtattcatgcattgagggaagattatctcagtttaatgaaagcagtttttaatttaaagtatattcattaaattttttttgaagtttttttctctagtacacagaaacacacaatagtatcatgggtatttgaccttaatgwgtttatgcacaaacttagttattcaaatattttcctatccctgaagaatcttaattactaataaacaaatttctcatggaaaacaacatatataacagagatgg

SEQ ID NO: 615530 - DNA, 574 bp, Homo sapiens
  misc_feature 439: n = A,T,C or G
gattaatcttggagctgtgtttctatcaaggaattacactcttcattacctgtgtgaatcgcagttattagagtagaaagagagcaaagaagggaaagaagcatagaaaattttattctagattacctcgtttggcttcatgctaccrtagttctgacttttaaagagtcattttgtggtcaaatatactttgtgttcactccccttatgcagcctacaaccaaacagaatggttcttagcaaggcatttgtattcttcccttaaggaaagcaacatataaataagaaagggaatgagaagaaagagtgatttcattgaggttggtatttaacataaatttgagtacaggtaccatgattatatttagaattttgtggctggatgggaaaaccagctagatgtctatagatttcctactcaaacacaatgtgcctttgntttacttttacgtctctaatttagcaattattaggtacaactgtatgcagtgtcactaaaaatacctcccaaaaccaaatattaaataatgtctatggctttctgttttatagtgttgattttcccaatattaat

SEQ ID NO: 615531 - DNA, 574 bp, Homo sapiens
  misc_feature 439: n = A,T,C or G
gattaatcttggagctgtgtttctatcaaggaattacactcttcattacctgtgtgaatcgcagttattagagtagaaagagagcaaagaagggaaagaagcatagaaaattttattctagattacctcgtttggcttcatgctaccatagttctgacttttaaagagtcattttgtggtcaaatrtactttgtgttcactccccttatgcagcctacaaccaaacagaatggttcttagcaaggcatttgtattcttcccttaaggaaagcaacatataaataagaaagggaatgagaagaaagagtgatttcattgaggttggtatttaacataaatttgagtacaggtaccatgattatatttagaattttgtggctggatgggaaaaccagctagatgtctatagatttcctactcaaacacaatgtgcctttgntttacttttacgtctctaatttagcaattattaggtacaactgtatgcagtgtcactaaaaatacctcccaaaaccaaatattaaataatgtctatggctttctgttttatagtgttgattttcccaatattaat

SEQ ID NO: 615532 - DNA, 574 bp, Homo sapiens
  misc_feature 439: n = A,T,C or G
gattaatcttggagctgtgtttctatcaaggaattacactcttcattacctgtgtgaatcgcagttattagagtagaaagagagcaaagaagggaaagaagcatagaaaattttattctagattacctcgtttggcttcatgctaccatagttctgacttttaaagagtcattttgtggtcaaatatactttgtgttcactccccttatgcagcctacaaccaaacagaatggttcttagcaaggcatttgtattcttcccttaaggaaagcaacatataaataagaaagrgaatgagaagaaagagtgatttcattgaggttggtatttaacataaatttgagtacaggtaccatgattatatttagaattttgtggctggatgggaaaaccagctagatgtctatagatttcctactcaaacacaatgtgcctttgntttacttttacgtctctaatttagcaattattaggtacaactgtatgcagtgtcactaaaaatacctcccaaaaccaaatattaaataatgtctatggctttctgttttatagtgttgattttcccaatattaat

SEQ ID NO: 615533 - DNA, 574 bp, Homo sapiens
  misc_feature 439: n = A,T,C or G
gattaatcttggagctgtgtttctatcaaggaattacactcttcattacctgtgtgaatcgcagttattagagtagaaagagagcaaagaagggaaagaagcatagaaaattttattctagattacctcgtttggcttcatgctaccatagttctgacttttaaagagtcattttgtggtcaaatatactttgtgttcactccccttatgcagcctacaaccaaacagaatggttcttagcaaggcatttgtattcttcccttaaggaaagcaacatataaataagaaagggaatgagaagaaagagtgatttcattgaggttggtatttaacataaatttgagtacaggtaccatgattatatttaraattttgtggctggatgggaaaaccagctagatgtctatagatttcctactcaaacacaatgtgcctttgntttacttttacgtctctaatttagcaattattaggtacaactgtatgcagtgtcactaaaaatacctcccaaaaccaaatattaaataatgtctatggctttctgttttatagtgttgattttcccaatattaat

SEQ ID NO: 615534 - DNA, 552 bp, Homo sapiens
  misc_feature 9: n = A,T,C or G
tgcctttgntttacttttacgtctctaatttagcaattattaggtacaactgtatgcagtgtcactaaaaatacctcccaaaaccaaatattaaataatgtctatggctttctgttttatagkgttgattttcccaatattaatgggaaccactgagcatttgccttgtggtgtctcctcagctgtattcacatattccatcaccttttcttaatggataatcacgcactatgagtaagggttttcagaaaagctgtgtcatttaaagataacacaggagcatcaaatttaattctgctaggacgcctggtctactgattaactgcagctaatatgaggtctacttcacatccaagttaaattcagtgcccttaatcagtcatatgatgaggtcaacagtaataaattatgcaatattttttcacccacccctatagttttaatttctttttccccttatgtctgtgtttaacattttgctttgcaaaacatgatgataatcttctagagtagtgaggacaagctataaatccaaagtttcttacctatgca

SEQ ID NO: 615535 - DNA, 552 bp, Homo sapiens
  misc_feature 9: n = A,T,C or G
tgcctttgntttacttttacgtctctaatttagcaattattaggtacaactgtatgcagtgtcactaaaaatacctcccaaaaccaaatattaaataatgtctatggctttctgttttatagtgttgattttcccaatattaatgggaaccactgagcatytgccttgtggtgtctcctcagctgtattcacatattccatcaccttttcttaatggataatcacgcactatgagtaagggttttcagaaaagctgtgtcatttaaagataacacaggagcatcaaatttaattctgctaggacgcctggtctactgattaactgcagctaatatgaggtctacttcacatccaagttaaattcagtgcccttaatcagtcatatgatgaggtcaacagtaataaattatgcaatattttttcacccacccctatagttttaatttctttttccccttatgtctgtgtttaacattttgctttgcaaaacatgatgataatcttctagagtagtgaggacaagctataaatccaaagtttcttacctatgca

SEQ ID NO: 615536 - DNA, 552 bp, Homo sapiens
  misc_feature 9: n = A,T,C or G
tgcctttgntttacttttacgtctctaatttagcaattattaggtacaactgtatgcagtgtcactaaaaatacctcccaaaaccaaatattaaataatgtctatggctttctgttttatagtgttgattttcccaatattaatgggaaccactgagcatttgccttgtggtgtctcctcagctgtattcacatattccatcaccttttcttaatggataatcaygcactatgagtaagggttttcagaaaagctgtgtcatttaaagataacacaggagcatcaaatttaattctgctaggacgcctggtctactgattaactgcagctaatatgaggtctacttcacatccaagttaaattcagtgcccttaatcagtcatatgatgaggtcaacagtaataaattatgcaatattttttcacccacccctatagttttaatttctttttccccttatgtctgtgtttaacattttgctttgcaaaacatgatgataatcttctagagtagtgaggacaagctataaatccaaagtttcttacctatgca

SEQ ID NO: 615537 - DNA, 434 bp, Homo sapiens
aaatgtgctagttagcttgatcattacacactatatacatgtataaaaatatcactctatagcccataattatgtatatatgtgtcaattaaaacaaaagagaagctacattcatcccatttaaaaagcagaatrtgggccagccttactgacttccttctaatgagtagaatgtagtgaaagggataccatgtggcttccctatctcagactgttttcccttggaacccagccccaattgtgagggcctgaaagtgcctgtgtcagtgttcatgctgcctgtcccaaccaagtttacagccgatggccagcatcaaccatcaaacaagtgggtgaccaaagcttcagaggattccatttccccaactgatcagctcttcctagggaagctgaagggagcagagacaagctgttctggacaagtttttcccaaa

SEQ ID NO: 615538 - DNA, 616 bp, Homo sapiens
cccataatgccagctgctcaggaggctgaggtgtgaggatcagatgggcccaagagtttgaggctgcagtgaactatgatcaaaccactgtctccagtctgggtgactacagttgcccagagccaagactacactagcaagaccctgtctcttaacaaaaaaaagctcacagaagtaggggaggtgaggctggttaatggatacagaattacagttagataagaggagtgggttctggtgttctgtggcattgtagggtgaatatggttaactacgacttattgtatatttttaaaaagccagaagattttgaatgttcacaattcaaagaaatgaacaatggttgaagtagtaaatgtgctagttagcttgatcattacacactatatacatgtataaaaatatcactctatagcccataattatgtatatatgtgtcaattaaaacaaaagagaagctacattcatcccatttaaaaagcagaatgtgggccagccttactgacttcyttctaatgagtagaatgtagtgaaagggataccatgtggcttccctatctcagactgttttcccttggaacccagccccaattgtgagggcctgaaagtgcctgtg

SEQ ID NO: 615539 - DNA, 453 bp, Homo sapiens
aaatgtgctagttagcttgatcattacacactatatacatgtataaaaatatcactctatagcccataattatgtatatatgtgtcaattaaaacaaaagagaagctacattcatcccatttaaaaagcagaatgtgggccagccttactgacttccttctaatgagtagaatgtagtgaaagggataccatgtggcttccctatctcagactgttttcccttggaacccagccccaattgtgagrgcctgaaagtgcctgtgtcagtgttcatgctgcctgtcccaaccaagtttacagccgatggccagcatcaaccatcaaacaagtgggtgaccaaagcttcagaggattccatttccccaactgatcagctcttcctagggaagctgaagggagcagagacaagctgttctggacaagtttttcccaaaccacaggttcatgaacaaa

SEQ ID NO: 615540 - DNA, 603 bp, Homo sapiens
ctaagcttcttgagtagcggggacaacaggaacattcctcgtcctgtctaattttttgtagaggcaaggttacctatggttcccaggctggtcttaaacycttggccttgagcgattctcccattttggccttccaaagtgctgggattacagatgtgagctattatgcccagcctactttctgagtcttaaaagatgaaaataaatttttcagaatagcaggggaaaacatttgtgatgtaaaaaatggggtgcacactaattgaggtataaacaacaataattttgcaaattattagtaactgccaactcaattagtgtcttgttaaaaagatactgttatgaagtataataaagcattacgttgtatattttgactgtgtttcaaatttctgttttgtttccaacagttttgttgacttatgttgggtggaacaatttgtgagtgaccctgagattttacatggcttgaatctggtgatatctggtgtctccccaagtggtttgttgaagttttggataattagaagtatttcttacagaagtaaatatttcagtaaacattgtttcattcaaactctcaaaatataaaatacaaagaaa

SEQ ID NO: 615541 - DNA, 603 bp, Homo sapiens
ctaagcttcttgagtagcggggacaacaggaacattcctcgtcctgtctaattttttgtagaggcaaggttacctatggttcccaggctggtcttaaacccttsgccttgagcgattctcccattttggccttccaaagtgctgggattacagatgtgagctattatgcccagcctactttctgagtcttaaaagatgaaaataaatttttcagaatagcaggggaaaacatttgtgatgtaaaaaatggggtgcacactaattgaggtataaacaacaataattttgcaaattattagtaactgccaactcaattagtgtcttgttaaaaagatactgttatgaagtataataaagcattacgttgtatattttgactgtgtttcaaatttctgttttgtttccaacagttttgttgacttatgttgggtggaacaatttgtgagtgaccctgagattttacatggcttgaatctggtgatatctggtgtctccccaagtggtttgttgaagttttggataattagaagtatttcttacagaagtaaatatttcagtaaacattgtttcattcaaactctcaaaatataaaatacaaagaaa

SEQ ID NO: 615542 - DNA, 603 bp, Homo sapiens
ctaagcttcttgagtagcggggacaacaggaacattcctcgtcctgtctaattttttgtagaggcaaggttacctatggttcccaggctggtcttaaacccttggccttgagcgattctcccattttggccttccaaagtgctgggattacagatgtgagctattatgcccagcctactttctgagtcttaaaagatgaaaataaatttttcagaatagcaggggaaaacatttgtgatgtaaaaaatggggtgcacactaattgaggtataaacaacaataattttgcaarttattagtaactgccaactcaattagtgtcttgttaaaaagatactgttatgaagtataataaagcattacgttgtatattttgactgtgtttcaaatttctgttttgtttccaacagttttgttgacttatgttgggtggaacaatttgtgagtgaccctgagattttacatggcttgaatctggtgatatctggtgtctccccaagtggtttgttgaagttttggataattagaagtatttcttacagaagtaaatatttcagtaaacattgtttcattcaaactctcaaaatataaaatacaaagaaa

SEQ ID NO: 615543 - DNA, 453 bp, Homo sapiens
aaatgtgctagttagcttgatcattacacactatatacatgtataaaaatatcactctatagcccataattatgtatatatgtgtcaattaaaacaaaagagaagctacattcatcccatttaaaaagcagaatgtgggccagccttactgacttccttctaatgagtagaatgtagtgaaagggataccatgtggcttccctatctcagactgttttcccttggaacccagccccaattgtgagggcctgaaagtgcctgtgtcagtgttcatgctgcctgtcccaaccaagtttacagccgatggccagcatcaaccatcaaacaagtgggtgaccaaagcttcagaggattccatttccccaactgatcagctcttcctagggaagctgaagggagcagagacaagctgttctggmcaagtttttcccaaaccacaggttcatgaacaaa

SEQ ID NO: 615544 - DNA, 387 bp, Homo sapiens
acatgaagtattgggtcatattactgaggaatakaaattatgaacagtttaacaacaatggccactgagttaaactagtgttaaaggagtcatcattgccagtgcttcaaatgttgcagttttatattgctggtcaccagtgccgaggttaaagatttattctgttttgtggtcaccagttgacttctgtgtctgtgttcagggagtgaatggggtcataaaagtcaatgcagttgcctattaagagaatcctaccttgcagaatgggacctttggtgtcagggtgtgaacaataactttatttcaacataaatacatagtaaacattactgaaattttaaaaatccaaaccctatcactactggaacttaaaatatattagaagtg

SEQ ID NO: 615545 - DNA, 568 bp, Homo sapiens
ggtcataaaagtcaatgcagttgcctattaagagaatcctaccttgcagaatgggacctttggtgtcagggtgtgaacaataactttatttcaacataaatacatagtaaacattactgaaatttwaaaaatccaaaccctatcactactggaacttaaaatatattagaagtggatataagcagaaattctatctagatacataacactatcatagtatatcatttgaattagaatttaaaattttacttctctttcttattggtgttcagtttagctcttaataatttagtgtttgcctagtgctctagttaatcttcagaaataaacatgcactgtaggggctcactctttctggtatgctgaggtaaagtctttgtaagagaggaagcttttataatactacctatcatctttgaattcatttctggtagattttacacaaatgcattaagtttagtccaaacagacagtgagagttcagcttgctggttcatgtttctgtcctatgttaagccaaagcaaattatttttcactttttagttacaatcccataatttaagagta

SEQ ID NO: 615546 - DNA, 647 bp, Homo sapiens
gggctcactctttctggtatgctgaggtaaagtctttgtaagagaggaagcttttataatactacctatcatctttgaattcatttctggtagattttacacaaatgcattaagtttagtccaaacagacastgagagttcagcttgctggttcatgtttctgtcctatgttaagccaaagcaaattatttttcactttttagttacaatcccataatttaagagtagcaacacatagattaagtttcacagttaaattttaattattttctaatatttctttgtttatacttgattaaagctaattttaaaacatgcactctgacagaaaagacatctgagaaacaaaacaagcaaatttgttttccattttgcacctgccccccaccaaaaaaagtctcaagaaccagaactgggtaagaacagtgataaagggaatcaatctatatattcatgactttctttaaaattcattacaaacaagttcaagctgaatattggtaaaagttctgaaaactccaaaattactacttgccctgaggaagagctcctacatggtaactctaaagagggatgaacaaaaaaggagtgccctctagtctgatgaatcatgtccctgattgtgaggagaaaaatgtatctggagg

SEQ ID NO: 615547 - DNA, 647 bp, Homo sapiens
gggctcactctttctggtatgctgaggtaaagtctttgtaagagaggaagcttttataatactacctatcatctttgaattcatttctggtagattttacacaaatgcattaagtttagtccaaacagacagtgagagttcagcttgctggttcatgtttctgtcctatgttaagccaargcaaattatttttcactttttagttacaatcccataatttaagagtagcaacacatagattaagtttcacagttaaattttaattattttctaatatttctttgtttatacttgattaaagctaattttaaaacatgcactctgacagaaaagacatctgagaaacaaaacaagcaaatttgttttccattttgcacctgccccccaccaaaaaaagtctcaagaaccagaactgggtaagaacagtgataaagggaatcaatctatatattcatgactttctttaaaattcattacaaacaagttcaagctgaatattggtaaaagttctgaaaactccaaaattactacttgccctgaggaagagctcctacatggtaactctaaagagggatgaacaaaaaaggagtgccctctagtctgatgaatcatgtccctgattgtgaggagaaaaatgtatctggagg

SEQ ID NO: 615548 - DNA, 558 bp, Homo sapiens
tagctcttaataatttagtgtttgcctagtgctctagttaatcttcagaaataaacatgcactgtaggggctcactctttctggtatgctgaggtaaagtctttgtaagagaggaagcttttataatactacctatcatctttgaattcatttctggtagattttacacaaatgcattaagtttagtccaaacagacagtgagagttcagcttgctggttcatgtttctgtcctatgttaagccaaagyaaattatttttcactttttagttacaatcccataatttaagagtagcaacacatagattaagtttcacagttaaattttaattattttctaatatttctttgtttatacttgattaaagctaattttaaaacatgcactctgacagaaaagacatctgagaaacaaaacaagcaaatttgttttccattttgcacctgccccccaccaaaaaaagtctcaagaaccagaactgggtaagaacagtgataaagggaatcaatctatatattcatgactttctttaaaattcattacaaacaagttcaagc

SEQ ID NO: 615549 - DNA, 558 bp, Homo sapiens
tagctcttaataatttagtgtttgcctagtgctctagttaatcttcagaaataaacatgcactgtaggggctcactctttctggtatgctgaggtaaagtctttgtaagagaggaagcttttataatactacctatcatctttgaattcatttctggtagattttacacaaatgcattaagtttagtccaaacagacagtgagagttcagcttgctggttcatgtttctgtcctatgttaagccaaagcaaattatttttcactttttagttacaatcccataatttaagagtagcaacacatagattaagtttcacagttaaattttaattattttctaatatttctttgtttatacwtgattaaagctaattttaaaacatgcactctgacagaaaagacatctgagaaacaaaacaagcaaatttgttttccattttgcacctgccccccaccaaaaaaagtctcaagaaccagaactgggtaagaacagtgataaagggaatcaatctatatattcatgactttctttaaaattcattacaaacaagttcaagc

SEQ ID NO: 615550 - DNA, 647 bp, Homo sapiens
gggctcactctttctggtatgctgaggtaaagtctttgtaagagaggaagcttttataatactacctatcatctttgaattcatttctggtagattttacacaaatgcattaagtttagtccaaacagacagtgagagttcagcttgctggttcatgtttctgtcctatgttaagccaaagcaaattatttttcactttttagttacaatcccataatttaagagtagcaacacatagattaagtttcacagttaaattttaattattttctaatatttctttgtttatacttgattaaagctaattttaaaacatgcactctgacagaaaagacatctgagaaacaaaacaagcaaatttgttttccattttgcacctgccccccaccaaaaaaagtctcaagaaccagaactgggtaagaacagtgataaagggaatcaatctatatattcatgactttctttaaaattcattacaaacaagttcaagctgaatattggtaaaagttctgaaaactccaaaattactrcttgccctgaggaagagctcctacatggtaactctaaagagggatgaacaaaaaaggagtgccctctagtctgatgaatcatgtccctgattgtgaggagaaaaatgtatctggagg

SEQ ID NO: 615551 - DNA, 582 bp, Homo sapiens
tataaacccaaataccactaattggaaattaggcattggtctcagtctagagatccagaaagcctttttgatttgtggtttacccaccccaaagaaatgaagcatatgattcagatagaaagtcacagtatttctgctgctacagatacttataaaaacagaaaaccaacacagtgcttattccagaagccgctgtatgacaatcccagtgttaataactacaaaaccatgaatcttgaactataaaatgcgggttattctttgccacatagtgagagaacatcaaaaatatagctagaagacttacagcaagatatttcaaggtcaccaagatatcacatatatacatatgtaacaaacctgcacattgtgcacatgtaccagaacttaaagtataataatagtaaaaagaatgaggtaggcatgttacaagtagagctcctggctttggagaaacagaaagtccaacttcaaaaagacagaggttcacttgctgcttcttttttctctttatcaattatwtgatttagtcaaattttctattcaagaaaatctcatgtgtacagttacagcggggttttc

SEQ ID NO: 615552 - DNA, 356 bp, Homo sapiens
ataaatgaatgaaatgtaagaatcacacttaagtctttcattttaatgaatggtatctttcatttatatacaaaggaattcayttgccagcagcatttaaatatagaaatagtctcatcttttctctagtgccttttataaagcagtgccatttctaactaggtgtatttgtttcccagctattcagtaactacactataggtatctaatagattcaagaaaagattggaaaattgagaagatttagcattttaaacatttgaaaaatgttgctacaaagcatagattatgaatgcattagtaaaataaattgacaccttatgtgagaatcattaagttggtttaattatatcgca

SEQ ID NO: 615553 - DNA, 356 bp, Homo sapiens
ataaatgaatgaaatgtaagaatcacacttaagtctttcattttaatgaatggtatctttcatttatatacaaaggaattcatttgccagcagcatttaaatatagaaatagtctcrtcttttctctagtgccttttataaagcagtgccatttctaactaggtgtatttgtttcccagctattcagtaactacactataggtatctaatagattcaagaaaagattggaaaattgagaagatttagcattttaaacatttgaaaaatgttgctacaaagcatagattatgaatgcattagtaaaataaattgacaccttatgtgagaatcattaagttggtttaattatatcgca

SEQ ID NO: 615554 - DNA, 563 bp, Homo sapiens
tctccatcagttgtgaacatctattggtttatcccaagtcactaagcatattttcattaggtaaacctgtttttccttatacagctrtttctggagtatagggtcgcatactcataaacccagtgtaactcagaaacgcatctaatattccagtaaacccatcataacgttgaaaaatcgtaaatcaaaccatcataagtcacggtttgtccgtggatatgggcgtcatcaattccattgtattcagtaatgctgtacaccattaacaatggcagactgattgggagtggatattgatagcattataaaagtcagttattagagggatacttctttaacctgactgaagaactgatctaatggctttagtacagtgcatgattatgtgcgatgttttgagacagagtagtacatttgtgaatgaaattttatggcttttttttcacttagtaggaaccattgtgtgtggaaaagtgagaaaatggctttctgctgtagggtctggcattcattgtagatgtaagcttatttttctgtgagcaaatcttattcaataaaatact

SEQ ID NO: 615555 - DNA, 271 bp, Homo sapiens
ccggcgtttgactgtggcaaggatgctgctggtgtcaaaaccacaacgtgggaaccacagaaccactagtkggttttcagtgtttcagtgcatacaattcctaatatttctggccaagaaaacttgtaagttcttagattgtcccaaaggtggcgcatgaaatcaaagcaggagaacagtttcctacgaggtgtagcctgggaaagttgggggtgactgatggaaaggaggagtgaagctccgccctttccgctgctaggctgcgcccgag

SEQ ID NO: 615556 - DNA, 272 bp, Homo sapiens
tccggcgtttgactgtggcaaggatgctgctggtgtcaaaaccacaacgtgggaaccacagaaccactagtgggttttcagtgtttcagtgcatacaattcctaatatwtctggccaagaaaacttgtaagttcttagattgtcccaaaggtggcgcatgaaatcaaagcaggagaacagtttcctacgaggtgtagcctgggaaagttgggggtgactgatggaaaggaggagtgaagctccgccctttccgctgctaggctgcgcccgag

SEQ ID NO: 615557 - DNA, 399 bp, Homo sapiens
tcacagcgtcttgcgacttggaagcggattcagaggacaggacagaacacttgggcaagtgaatctctgtctgtctgtctgtctgtctgtctgtctgtctgtcycattggttggttgatttccattttcttaaggggcacatacctcacaccgcacacacacaaacacacacacgcacacacacacacacacgcacacacacgcacacacactccttccttctgcgatttagaacattagtaggggcccctgggagctgcaggtttcctaatcatgtctgcacctaagaacagtagggtcttgtgtggctcttcttatgaacggtcccccagcccgaactcgccaaggtccatgctagcctcacccagcttctccctctcccctctcagaaactcaggc

SEQ ID NO: 615558 - DNA, 474 bp, Homo sapiens
gtttggcggactctgcgtggacttggagctcacagcgtcttgcgacttggaagcggattcagaggacaggacagaacacttgggcaagtgaatctctgtctgtctgtctgtctgtctgtctgtctgtctgtctcattggttggttgatttccattttcttaaggggcacatacctcacaccgcacacacacaaacacacacacgcacacacacacacacacgcacacacacgcacacacactccttccttctgcgakttagaacattagtaggggcccctgggagctgcaggtttcctaatcatgtctgcacctaagaacagtagggtcttgtgtggctcttcttatgaacggtcccccagcccgaactcgccaaggtccatgctagcctcacccagcttctccctctcccctctcagaaactcaggcttaaggggaagctcctcaccagggatccggagctaccattcaccat

SEQ ID NO: 615559 - DNA, 474 bp, Homo sapiens
gtttggcggactctgcgtggacttggagctcacagcgtcttgcgacttggaagcggattcagaggacaggacagaacacttgggcaagtgaatctctgtctgtctgtctgtctgtctgtctgtctgtctgtctcattggttggttgatttccattttcttaaggggcacatacctcacaccgcacacacacaaacacacacacgcacacacacacacacacgcacacacacgcacacacactccttccttctgcgatttagaacattagtaggggcccctgggagctgcaggtttcctaatcatgtctgcacctaagaacagtagggtcttgtstggctcttcttatgaacggtcccccagcccgaactcgccaaggtccatgctagcctcacccagcttctccctctcccctctcagaaactcaggcttaaggggaagctcctcaccagggatccggagctaccattcaccat

SEQ ID NO: 615560 - DNA, 278 bp, Homo sapiens
cggggtttgattgtggcaaggatgctgctggtgtcaaaaccacaacgtgggaaccacagaaccactagttggttttcagtgtttcagtgcatacaaytcctaatatatctggccaagaaaacttgtaagttcttagattgtcccaaaggtggcgcatgaaatcaaatcaggagaacagtttcctacgaggtgtagcctgggaacgttgggggtgactgatggaaaggaggagtgaagctccgccctttccgctgcgaggctgcgcccgaggctattta

SEQ ID NO: 615561 - DNA, 588 bp, Homo sapiens
ataccatttttttctagaactctacaaagcagattgctacaagagaggcagaggaacactaataaaatatatatttggagtgaaataaatgaaagcacattacaagtaaacttacctgattaaacaactcacctgtaaatgtatttcgtctaatttttctactgcctgcattgccctttcatctagctctgatttatattcttgtagtttactaagttctaccatactgttttccatatgtgtcttaagatttaatatttcttcttccaacatcttttatcctcctcaaatttttcacattcctgttgtgcttttttcatagataactcctgttgaaaaacttgattctctttagccaaattgacacattttgaagatacagcttccttctcygccataagattatcaaactgcatgaataaaatagtatagcttgataatgaagtaggctgagaataatctaatacaaaaccaatagcaaattttgaaatgcatttacttgcaataaaatgttatctgtaatgcagcagattcttcaaatgtgaaccctgaaattactcagaattttaagaacaaagttaaagctac

SEQ ID NO: 615562 - DNA, 588 bp, Homo sapiens
ataccatttttttctagaactctacaaagcagattgctacaagagaggcagaggaacactaataaaatatatatttggagtgaaataaatgaaagcacattacaagtaaacttacctgattaaacaactcacctgtaaatgtatttcgtctaatttttctactgcctgcattgccctttcatctagctctgatttatattcttgtagtttactaagttctaccatactgttttccatatgtgtcttaagatttaatatttcttcttccaacatcttttatcctcctcaaatttttcacattcctgttgtgcttttttcatagataactcctgttgaaaaacttgattctctttagccaaattgacacattttgaagatacagcttccttctccgccataagatyatcaaactgcatgaataaaatagtatagcttgataatgaagtaggctgagaataatctaatacaaaaccaatagcaaattttgaaatgcatttacttgcaataaaatgttatctgtaatgcagcagattcttcaaatgtgaaccctgaaattactcagaattttaagaacaaagttaaagctac

SEQ ID NO: 615563 - DNA, 410 bp, Homo sapiens
cctgcctcttccatggcttttcccacttggtctacttactggtttctgttgttctcagagacacactgagacctttcacatctcactgtcacttcttggaagggctctctacctcgtctgcctgctgagcaacctcttggagtgacgcgggcactcttgagtcactgaacttgagctatttggtgttrgtatgttaatttatcttcttagaccacttaccacttccttaacttcaaaagaaaagaataagtattattttccatggttgatatgaagagtagaaataacttatacaaaatacattgcagttaagtgataataaatgtctgtgaatgcccttattaatgttattctatcagtctcagctcagataccatctgctctgtgagctctgctctgaatcatatctg

SEQ ID NO: 615564 - DNA, 410 bp, Homo sapiens
cctgcctcttccatggcttttcccacttggtctacttactggtttctgttgttctcagagacacactgagacctttcacatctcactgtcacttcttggaagggctctctacctcgtctgcctgctgagcaacctcttggagtgacgcgggcactcttgagtcactgaacttgagctatttggtgttagtatgttaatttatcttcttagaccacttaccacttccttaacttcaaaagaaaagaataagtattattttccatggttgatatgaagagtagaaataacttatacaaaatrcattgcagttaagtgataataaatgtctgtgaatgcccttattaatgttattctatcagtctcagctcagataccatctgctctgtgagctctgctctgaatcatatctg

SEQ ID NO: 615565 - DNA, 530 bp, Homo sapiens
gcaagtttgagacagaaatatttgagaacatttttatcagttgtgacattttgatagtgaacattttatatcttctgtcaacttaaaatgtttgcatcttctgtcagcttaaaatgtttaatttgttatagccaaataatttggctataattgataatttaatttatcaaattaaattgcttttttccctttagactttcttcagtcacatctgaataaatcccttagaagtaagctagatgtaatataatgaaatgcttaaaagggctgtgtatcttcatattacacttacartgattttctcttgtgcccattatattctacctgcagctagttgaggtaaagagagggcatttaactgtcaagggaacctgtgaggagactgtagaaatctggaaagtctcttgggtctttgagggattttgggatgcagagagtggggctgggatctctggctaggttggagccagcgtgcatttgtatctttatcttggaagcaaacttagaatgcagagatagatgtggcctgg

SEQ ID NO: 615566 - DNA, 430 bp, Homo sapiens
taatttggctataattgataatttaatttatcaaattaaattgcttttttccctttagactttcttcagtcacatctgaataaatcccttagaagtaagctagatgtaatataatgaaatgcttaaaagggctgtgtatcttcatattacacttacaatgattttctcttgtrcccattatattctacctgcagctagttgaggtaaagagagggcatttaactgtcaagggaacctgtgaggagactgtagaaatctggaaagtctcttgggtctttgagggattttgggatgcagagagtggggctgggatctctggctaggttggagccagcgtgcatttgtatctttatcttggaagcaaacttagaatgcagagatagatgtggcctggatgctgctaactctagccaaccactaaatcttaagg

SEQ ID NO: 615567 - DNA, 530 bp, Homo sapiens
gcaagtttgagacagaaatatttgagaacatttttatcagttgtgacattttgatagtgaacattttatatcttctgtcaacttaaaatgtttgcatcttctgtcagcttaaaatgtttaatttgttatagccaaataatttggctataattgataatttaatttatcaaattaaattgcttttttccctttagactttcttcagtcacatctgaataaatcccttagaagtaagctagatgtaatataatgaaatgcttaaaagggctgtgtatcttcatattacacttacaatgattttctcttgtgcccattatattctacctgcagctagttgaggtaaagagagggcatttaactgtcaagggaacctgtgaggagactgtagaaatctggaaagtctcttgrgtctttgagggattttgggatgcagagagtggggctgggatctctggctaggttggagccagcgtgcatttgtatctttatcttggaagcaaacttagaatgcagagatagatgtggcctgg

SEQ ID NO: 615568 - DNA, 296 bp, Homo sapiens
tatcttggaagcaaacttagaatgcagagatagatgtggcctggatgctgctaactctagccaaccactaaatcttaaggtgggagagatgsagcctttggctgggtgctaagctgctgtagctggttgaatgtagaggtcactatcttttctgaatatttgtaagtaaattaaatcattctttactcctgtatgcctgccaaccaaatgggaaatcgctatagaaaagatggtttaaattttagtctttgaagtggtttatgcacgtttctggaatcaagatttaacgcggactt

SEQ ID NO: 615569 - DNA, 572 bp, Homo sapiens
tttcccacatttctttattcctttattaaggrcctaatatgaaccagacatcatttttctaggtgattgtagatgaaatggtgaaaaggaaaggcaagaatggaatttcctgctagtgggaagtagaagagagtattaaaacttttttctttctaagtcaaatcagtgtcatatgcatgagaaagctaggtagtatgatggcattatcagcttggctttctccttaaatgaaataggaagtgctctgttttactcagatagtgtttttttttctaaaaagctaaaataagttaaatattttgaaattaattaatttctgttctaaattagtcaaaagttatatttgtaaaactagagaagtttgttccattgcttctaccaagcatctcagcttatgtagttggggcagctagaaatctaatgaacagaatgcatattttaggcttatataaagtattcttgaacataaggtcaaaataccccctaccccctttttgataaaaataaagcttactactaataataaaatacagccagaggtgtgctgggagtggaggggggctgagtgaaag

SEQ ID NO: 615570 - DNA, 199 bp, Homo sapiens
taagaaagtgtccctggacagagatacataargagtcagacctttgtttaaagcagtgacagaagatggatttttggctgtgtgttcagaagctaaaggtaatagtaaatttatgtatagattttcattattgtcttggtcatgtgttttcttttaaattatatctgaaaatctcttagcaatctagaattttacaagt

SEQ ID NO: 615571 - DNA, 573 bp, Homo sapiens
tcaaatttttcacattcctgttgtgcttttttcatagataactcctgttgaaaaacttgattctctttagccaaattgacacattttgaagatacagcttccttctccgccataagattatcaaactgcatgaataaaatagtatagcttgataatgaagtaggctgagaataatctaatacaaaaccaatagcaaattttgaaatgcatttacttgcaataaaatgttatctgtaatgcagcagattcttcaaatgtgaaccctkaaattactcagaattttaagaacaaagttaaagctaccatgagtcataaaaatatattctttactatcatcatctttgccacagaatttttgtacttcattttacttttatttttccataattcatttttgttcctccttaaatggcacaaagttatctcctagtaaaaagtgtctaacccccttccttcattatcattccccacagtatgtcaaaaaaagtttcagagatatcatattgagttatttaggccaaagtcaataaatgggcctaggaataagactttgaaaataatattacacactat

SEQ ID NO: 615572 - DNA, 568 bp, Homo sapiens
cataagtgtgtcttttccttttgtatatatttgctttagtgtagaaaataggttttcttgattagaaatctaaaaagaataaattgaaaactggagatttttctattgctttggattaccaaaattaatgtaatttggcagtatatccctgtgccattattgtctctctggtaagtagatggtagggttttgggtgattaaatttttttttcctattttgcttatttaatgggcatgtgtttgtattaaaaaggggaaaatacataggaatgtagaagatgttaactaatcgtgaaagttattgggaagggttacctaatttaaaagttggccagccatggcaacactgcctgtagtcccagctgtgggggaggctgaggcaagaggatggcttgagtttagaggatggaggttacagtgagctatgattgtgccactgtacttcagcctgagggacagagccagaccctgtctcagaaaaacctagaacaacaacaaacagagagaggagcctggacgractgagcaatattagtgtccaggagctgctgtagtgatggcttacaac

SEQ ID NO: 615573 - DNA, 568 bp, Homo sapiens
cataagtgtgtcttttccttttgtatatatttgctttagtgtagaaaataggttttcttgattagaaatctaaaaagaataaattgaaaactggagatttttctattgctttggattaccaaaattaatgtaatttggcagtatatccctgtgccattattgtctctctggtaagtagatggtagggttttgggtgattaaatttttttttcctattttgcttatttaatgggcatgtgtttgtattaaaaaggggaaaatacataggaatgtagaagatgttaactaatcgtgaaagttattgggaagggttacctaatttaaaagttggccagccatggcaacactgcctgtagtcccagctgtgggggaggctgaggcaagaggatggcttgagtttagaggatggaggttacagtgagctatgattgtgccactgtacttcagcctgagggacagagccagaccctgtctcagaaaaacctagaacaacaacaaacagagagaggagcctggacggaytgagcaatattagtgtccaggagctgctgtagtgatggcttacaac

SEQ ID NO: 615574 - DNA, 499 bp, Homo sapiens
atggcccagaaagaatccatgactatccaaatctctggtaatacaaccatcaaaggcagaccccatatcactcaaacacagatgtatggtaagttctcacttaatgttcaaaataggttcttgaaaactgcatctttaaatgaaacaatgcygctatatgccatttaaacaacagacctagcagcacccttgtgacacaatggccaggctagtctggaactcctggcctcaagtgatctccccaccttggcatcccaatgtgctggcattacaggtgtgagccactatgcttggtcactttacatttattttgattaagttccttatttttatactattgcaattggaaactttctctcttttttggaaagtttgttgttactatatggaaatgcaacaaatatttgtatgtagggtcaggtgcagtgcctcatttctgtagtccctgcacactttcagaggctagaggccaaggaaggtggatcacttgagcacagga

SEQ ID NO: 615575 - DNA, 499 bp, Homo sapiens
atggcccagaaagaatccatgactatccaaatctctggtaatacaaccatcaaaggcagaccccatatcactcaaacacagatgtatggtaagttctcacttaatgttcaaaataggttcttgaaaactgcatctttaaatgaaacaatgccgctatatgccatttaaacaacagacctagcagcacccttgtgacacaatggccaggctagtctggaactcctggcctcaagtgatctccccaccttggcatcccaatgtgctggcattacaggtgtgagccactatgctyggtcactttacatttattttgattaagttccttatttttatactattgcaattggaaactttctctcttttttggaaagtttgttgttactatatggaaatgcaacaaatatttgtatgtagggtcaggtgcagtgcctcatttctgtagtccctgcacactttcagaggctagaggccaaggaaggtggatcacttgagcacagga

SEQ ID NO: 615576 - DNA, 618 bp, Homo sapiens
gtgaccgtggggtctgcaagtacttcytagctatgacaacaatgctacaagcaacaagggaataaataagactaacttcattaaaattaaaatcctttgtgagttaaaggaacccatcaaaaagtaaaaagtcagctcatagatggggaggaaatatctacaaatcctttatgtgataaaggactcatatccaaaatatatacagagctctcacagacatataaccccactaaaaaaattgacaaagggtttgaatagacctttctccaaagaagatacataaatggccagtaaactcatgaaaaggtgttcaacatcattagttattggaaaaatgcaaatcaaaaccacagtgacataccacttcacacccactgcgatggctaaaataaacaagatagacaataacaaatttggtgaggatgtgaaataattacaacccttatacactgtggggttgcaaaatgatgcagtcactttggaaaagtttttaacctttccctaaaatgttaaaaatcgagttccacataacccagctattccactcctgggtatatacccaaaataaataaaaacatatgttcacacgtccacaccaaaacctctgcaagaatgttc

SEQ ID NO: 615577 - DNA, 493 bp, Homo sapiens
  misc_feature 480: n = A,T,C or G
atattgcttgaaactttatagctaatatatggtaatatttcttaggtgatcttttttggagatgtcaattataattactatcttgggtagttgatggatgacagtcagtggcctctctctatccaaaattaataytaaaacacagaaggagtgtttatttcatttgaagaaataaatggcagacttggcctgagaactcaagttgcccaatgtatagagccaggcatccttatttgtattaagaatcaatgtatttctgtaccataagtagatagaaaggtgcaacttataaatgcattttcgtttagtggaaaaattaatacttaaagttaatatttcttagaataattctcaaattgtctgggtgcagtggctcatgcctgtaatctcagcactttggaaggtcacaaggtgtggtgatatgagcttgtaggtcaaggacgttcgtagttccagacctgtgctacacatggctgaganacgccctatcatg

SEQ ID NO: 615578 - DNA, 493 bp, Homo sapiens
  misc_feature 480: n = A,T,C or G
atattgcttgaaactttatagctaatatatggtaatatttcttaggtgatcttttttggagatgtcaattataattactatcttgggtagttgatggatgacagtcagtggcctctctctatccaaaattaatattaaaacacagaaggagtgtttatttcatttgragaaataaatggcagacttggcctgagaactcaagttgcccaatgtatagagccaggcatccttatttgtattaagaatcaatgtatttctgtaccataagtagatagaaaggtgcaacttataaatgcattttcgtttagtggaaaaattaatacttaaagttaatatttcttagaataattctcaaattgtctgggtgcagtggctcatgcctgtaatctcagcactttggaaggtcacaaggtgtggtgatatgagcttgtaggtcaaggacgttcgtagttccagacctgtgctacacatggctgaganacgccctatcatg

SEQ ID NO: 615579 - DNA, 606 bp, Homo sapiens
agagagaaaaatgagtgcccagcaaagggggaagccccttataaaaccatcagctcctgtgaaaactgaatccctatcacaaaacaggaagggggaaactgcccgcatgattcagttatctccacctcatctctcccacaacatgtggagattatgggaactacaattcaagatgagatttgggtgggggacaactatatcagacagtttaattctagcttatgaaaggatttgctaggaacagaaaagagagagagaggaaacgtaatgcagggccaccaatcatctgtgaactgcttgatttctgcactgaaatttcccttcaaagcacttttcctgactacaactaaaaacaaatgtcatgtctggaaaccagctctgaactcaagccaagggtaggcaaaagtagaattattgttttttgttgaaattagcaagcatggtcccattatggctaaatagaaccaggtatagtcttaactaagaaccatttcagcaaattcagaaaagaccatggtgcgttttaagctatgatatcagataaaagtatccttttaagtattaagatgacaaatatggaagttgytggtagtttttaaaattttt

SEQ ID NO: 615580 - DNA, 497 bp, Homo sapiens
caacaaggcaaagggtaagtccaggctccccatgcagtgacggctttcagaaggttctctcacttggcctcaggctcccggaaggccagttctcttccacacaaagaatggaggagtctgaatcattgagtgggcagccagtaaactgatgctcagagtcacstgtctttttaggctgtgacagtctctccattgtgaagacaactgcactatttgggatgagccaagttacagtacaattcagcagttcctgagtttaaacacattcctgtgaaaagaaataaaacagctgatagatctttactcgtgtgtacctttttaaaaagcaagaatataggtattgtgagaggaaaaaaatagctttctttttacaccttatagagctgaaatatatctcagcttcaatttccctgagggtgtttcacaaacaatgggtttcacaggcccaggaagtatactacagagctgaagctctgtggtcaaaatgccaacaagga

SEQ ID NO: 615581 - DNA, 512 bp, Homo sapiens
taattgtgttttgaaatgtgagaaggacgtgagatttgggaggggccaggcgtgaaatgatatggtttggctctctgtccccacccaaagctcatgtcgaattgtaaacctcartgtgggaggagcagtctgttggcaggtgattggattatagggacagacttcccccttactgttcttgtgatagtgagtcagttttaaagagatctgcttgtttaaaagtgtgtagcacttccctcttcatgatttatctttcctgtcacctatgtgaacatgaactttcttcccctttgccttctgccatgattgtaagtttcatgcgtcctccacagaaacagcagcctgtatagttcagggaactgtgagcttattaaacatcttttcttcataaattacccagtctcaggtagttctttatagcagtgcaagaacaaatgaatacaggtattttcaacataaatgttaaaatatatcagtattgtatagtttaataagtgaatatattatttttc

SEQ ID NO: 615582 - DNA, 398 bp, Homo sapiens
gaatgcgtattcactttcctttacattacacacatgcataataccatgctgagtgatgctggaaaagtgagtcttcagtaatgccctcatgaaatacagtctcactacactgaagtattttctttttaaccctttctttcttttctgctgtgaatatgtgccttctaagaggtgaacaacggaaaaaactgaaaaagatacttcatctaattcagtaactagyttttgtatcttctaaaaatttttatctccagaaagctctaattttcattcctttacaagctttatttctctctcctttccaacaccagactttgctctgtttgttttctatatcttttttagagatgcctacaatagaaaaaatctatgacatattcaatacatctgaaaagttt

SEQ ID NO: 615583 - DNA, 398 bp, Homo sapiens
gaatgcgtattcactttcctttacattacacacatgcataataccatgctgagtgatgctggaaaagtgagtcttcagtaatgccctcatgaaatacagtctcactacactgaagtattttctttttaaccctttctttcttttctgctgtgaatatgtgccttctaagaggtgaacaacggaaaaaactgaaaaagatacttcatctaattcagtaactagtttttgtatcttctaaaaatttttatctccagaaagctctaaytttcattcctttacaagctttatttctctctcctttccaacaccagactttgctctgtttgttttctatatcttttttagagatgcctacaatagaaaaaatctatgacatattcaatacatctgaaaagttt

SEQ ID NO: 615584 - DNA, 444 bp, Homo sapiens
tctaatttttaactttcaaaagattagatacatttaccctcctctgaattttaattcctgatggaaagattgtgaaatctcaagaggataatgaatcagcttctgattatattctggaattgctatttgatcacacatccaagaatgcgtattcactttcctttacattacacacatgcataataccatgctgagtgatgctggaaaagtgagtcttcagtaatgccctcatgaaatacagtctcactacactgaagtattttctttttaaccctttctttcttttctgctgtgaatatgtgccttctaagaggtgaacaacggaaaaaactgaaaaagatacttcatctaattcagtaactagtttttgtatcttctaaaaatttttatctccagaaagctctaatyttcattcctttacaagctttatttctctctcctttc

SEQ ID NO: 615585 - DNA, 556 bp, Homo sapiens
ttgtgaaatctcaagaggataatgaatcagcttctgattatattctggaattgctatttgatcacacatccaagaatgcgtattcactttcctttacattacacacatgcataataccatgctgagtgatgctggaaaagtgagtcttcagtaatgccctcatgaaatacagtctcactacactgaagtattttctttttaaccctttctttcttttctgctgtgaatatgtgccttctaagaggtgaacaacggaaaaaactgaaaaagatacttcatctaattcagtaactagtttttgtatcttctaaaaatttttatctccagaaagctctaattttcattcctttacaagctttatttctctctcctttccaacaccagactttgctctgtttgttttctatatcttttttagagatgcctacaatagaaaaaatctatgacatattcaatacatctgaaaagtttacattrccatagataagaatgaattatctgtttataaagaaaaaacaataaaaatatgaaccaagaaagcacagaaggtagtaac

SEQ ID NO: 615586 - DNA, 303 bp, Homo sapiens
taaacttaattctatgtatctgaatttatttttctatttataaatttatctggrtgctttctcaaaggtttctcagtttaaaaacctatggctttgtaaaattaaaacagaagtaataggaattgtgttaaaaaacagaatcaggccaagcctggtggcttatgcctctaatgccaacacttagggaggccaaggcgggaggataatttgaggtcaggagttcaagaccagcttggacaacatggcaaaaccccacatgtattaaaaaaatacacaaattagctgggcgtggtggtgaatgcc

SEQ ID NO: 615587 - DNA, 303 bp, Homo sapiens
taaacttaattctatgtatctgaatttatttttctatttataaatttatctggatgctttctcaaaggtttcycagtttaaaaacctatggctttgtaaaattaaaacagaagtaataggaattgtgttaaaaaacagaatcaggccaagcctggtggcttatgcctctaatgccaacacttagggaggccaaggcgggaggataatttgaggtcaggagttcaagaccagcttggacaacatggcaaaaccccacatgtattaaaaaaatacacaaattagctgggcgtggtggtgaatgcc

SEQ ID NO: 615588 - DNA, 402 bp, Homo sapiens
ctcatgctagtggtctggatcccacacctgccaagggcgagctgggtacagagcagtgargggtgtgtgagcaagcgagcatgggatctggccactgcacacagccaagcatgccagctgcagtggggtgggcagctccaggcacaggtgccagctccctgtgaggctgcagctggaccaggccgactgcaaacaacttccactgtgggtatcagggaatgcagtggcacccagaagcttggagatgcaggacctgcagagccccaaagaaggtgtcacagccctggttggaggagctcctaggtctgtgttccctgaagggacacagctcttctctccttctctcttctcttcttcttgcctgcaatttggcaagaaaggatagcgtttcagccctgttta

SEQ ID NO: 615589 - DNA, 481 bp, Homo sapiens
gtctggatcccacacctgccaagggcgagctgggtacagagcagtgaggggtgtgtgagcaagcgagcatgggatctggccactgcacacagccaagcatgccagctgcagtggggtgggcagctccaggcacaggtgccagctccctgtgaggctgcagctggaccaggccgactgcaaacarcttccactgtgggtatcagggaatgcagtggcacccagaagcttggagatgcaggacctgcagagccccaaagaaggtgtcacagccctggttggaggagctcctaggtctgtgttccctgaagggacacagctcttctctccttctctcttctcttcttcttgcctgcaatttggcaagaaaggatagcgtttcagccctgtttatgttacacctctttcagccctgctagttggcaggtcctgagttcttgtcctgagtccaggaaaaatgaggtatgtggacaagtagaaggtg

SEQ ID NO: 615590 - DNA, 214 bp, Homo sapiens
ttctggaatcctatgtgagggagaagcattcagagcacagcaggagtgcyctgaaatcctatgttagggataaacattcagaacctcataacattgttcaggaaacctatgtgagggacagacatttagaccctcgcagcagtgttctggaatcccatgtgagggtcaaacattcagatcctcacagcagtgttctggaattctatgtgagtga

SEQ ID NO: 615591 - DNA, 214 bp, Homo sapiens
ttctggaatcctatgtgagggagaagcattcagagcacagcaggagtgccctgaaatcctatgttagggayaaacattcagaacctcataacattgttcaggaaacctatgtgagggacagacatttagaccctcgcagcagtgttctggaatcccatgtgagggtcaaacattcagatcctcacagcagtgttctggaattctatgtgagtga

SEQ ID NO: 615592 - DNA, 418 bp, Homo sapiens
acaaattgatatccagaaaagcctcaaatgtctgaaaaccaagtaataaactttgaaataccctgtaagtcaaaaaagtattcacaaggggaactggaatgtatttggaacaaacttgttataaaaatcatatttctggtagactaaaggtgacaacwtctttcctgctcctctctctgtgagaaccaattccccttaaaccttgcccagactactgacttgcttggccaacagaaggtgacaaaggtggtatttggggacttcagaagccaggctgagaaaacagaacacttatccaggagaaagccagtcaccaggcaggaaatcccactcccctgagaccccatgatggaaaccacacggccagtccatgactagctacatgcattgacatcccccattgaccctctagcaacac

SEQ ID NO: 615593 - DNA, 560 bp, Homo sapiens
aatttgcatgtgggagaaacgttagtagtttgtggccagaggacaaactgtggtttattaaagactgctgcaggttcctactatgcttctcatcaagaggtggaatctaatcaccttcccyccttgaatcatggctggtctcagtgatgagtacgactggacagtgtggcaggagagatgttctgggacttctgagggatgatcatgagagaccttacagcttctgcctgggcctcttggacacatacactgggagaagccagacaaacctgactacctgacactgccagactgggaggaagtccgtgctggccacaaagagagggcttggtgcctgctccatgtccccagccactagagtccttctggtgcctgcttcacgtccccagccactagagtccttccagatgagaccagggacatcatgaagcagccaacccacattgccctgtccagtgtcttgacccagaaaattgtgacatgtaaaaagaataaattcctggtttaagccagtaaggttactggtacattgttacattgcagataattaaaaccttgaa

SEQ ID NO: 615594 - DNA, 560 bp, Homo sapiens
aatttgcatgtgggagaaacgttagtagtttgtggccagaggacaaactgtggtttattaaagactgctgcaggttcctactatgcttctcatcaagaggtggaatctaatcaccttccccccttgaatcatggctggtctcagtgatgagtacgactggacagtgtggcaggagagatgytctgggacttctgagggatgatcatgagagaccttacagcttctgcctgggcctcttggacacatacactgggagaagccagacaaacctgactacctgacactgccagactgggaggaagtccgtgctggccacaaagagagggcttggtgcctgctccatgtccccagccactagagtccttctggtgcctgcttcacgtccccagccactagagtccttccagatgagaccagggacatcatgaagcagccaacccacattgccctgtccagtgtcttgacccagaaaattgtgacatgtaaaaagaataaattcctggtttaagccagtaaggttactggtacattgttacattgcagataattaaaaccttgaa

SEQ ID NO: 615595 - DNA, 619 bp, Homo sapiens
ttcttgtagatcctgctagagttaaacttcatttaagtaatcattaaaagctgcatttattccctcacttgaacttttgatttcacactattaggactaatcctctaagtctttgctaagttatgttcctccttttcttgtggcttgactctgatgctctctatatgcaacatcaattgatgtaaagtacattcagggcaatagagtttctttaaatattactttgttattcaaaataatcacaaaagcactcatcgtaggaaaacttgtgaggactcaaatatagggaaatactttttctttctaaggcacaattctctaaagaagttcaccttaayttgaatatacatggggaaaatatccttgttcactaatagtctatattcactctgttttcttccctcatagaccagccggttcactattattttccaaatgatgtgtgcctctctagagtccaggctatctgcatatctaatttttcccacaaattactgttttgaattgcactgaattcaattcaaggggatgtcatttataaacagtgcaaatatatactgcacgagggatcttagaactcatacacatggtttgatccataagctcatatgagcgtgca

SEQ ID NO: 615596 - DNA, 619 bp, Homo sapiens
ttcttgtagatcctgctagagttaaacttcatttaagtaatcattaaaagctgcatttattccctcacttgaacttttgatttcacactattaggactaatcctctaagtctttgctaagttatgttcctccttttcttgtggcttgactctgatgctctctatatgcaacatcaattgatgtaaagtacattcagggcaatagagtttctttaaatattactttgttattcaaaataatcacaaaagcactcatcgtaggaaaacttgtgaggactcaaatatagggaaatactttttctttctaaggcacaattctctaaagaagttcaccttaatttgaatatacatggggaaaatatccttgttcactaatagtctatattcactctgttttcttccctcatagaccagccggttcactattattytccaaatgatgtgtgcctctctagagtccaggctatctgcatatctaatttttcccacaaattactgttttgaattgcactgaattcaattcaaggggatgtcatttataaacagtgcaaatatatactgcacgagggatcttagaactcatacacatggtttgatccataagctcatatgagcgtgca

SEQ ID NO: 615597 - DNA, 496 bp, Homo sapiens
ggtgagtttacctaatgacctggaattggagcaagaaaacaaggccattatatttctgtaccaagcagttctcggatgtgggatgccttgagaagggayatgaacttggatgaaggaactttactgtgctgtgagtattgttgccaggagtcagctgtcaacactcccaggagacgggaaattatgctttagtcactgaggcggcatctagtgtcagaccgcagccttgttaaacagagccagactttggaggatggttggtgggtttaaaatttggggcttgacatcttgtccccacaagctgctgctggcctcttccttgtccatttctgtgtggcctgtttaggccccccagcttcctgcttcttctttaccataattggaatgcaaaaatctacacgtaatttggcccatggtcccttctgcttagacatatccttgtagctactttttttttaaaagatgactatgctttctagaatatttctaagaaatt

SEQ ID NO: 615598 - DNA, 496 bp, Homo sapiens
ggtgagtttacctaatgacctggaattggagcaagaaaacaaggccattatatttctgtaccaagcagttctcggatgtgggatgccttgagaagggatatgaacttggatgaaggaactttactgtgctgtgagtattgttgccaggagtcagctgtcaacactcccaggagacgggaaattatgctttagtcactgaggcggcatstagtgtcagaccgcagccttgttaaacagagccagactttggaggatggttggtgggtttaaaatttggggcttgacatcttgtccccacaagctgctgctggcctcttccttgtccatttctgtgtggcctgtttaggccccccagcttcctgcttcttctttaccataattggaatgcaaaaatctacacgtaatttggcccatggtcccttctgcttagacatatccttgtagctactttttttttaaaagatgactatgctttctagaatatttctaagaaatt

SEQ ID NO: 615599 - DNA, 496 bp, Homo sapiens
ggtgagtttacctaatgacctggaattggagcaagaaaacaaggccattatatttctgtaccaagcagttctcggatgtgggatgccttgagaagggatatgaacttggatgaaggaactttactgtgctgtgagtattgttgccaggagtcagctgtcaacactcccaggagacgggaaattatgctttagtcactgaggcggcatctagtgtcagaccrcagccttgttaaacagagccagactttggaggatggttggtgggtttaaaatttggggcttgacatcttgtccccacaagctgctgctggcctcttccttgtccatttctgtgtggcctgtttaggccccccagcttcctgcttcttctttaccataattggaatgcaaaaatctacacgtaatttggcccatggtcccttctgcttagacatatccttgtagctactttttttttaaaagatgactatgctttctagaatatttctaagaaatt

SEQ ID NO: 615600 - DNA, 496 bp, Homo sapiens
ggtgagtttacctaatgacctggaattggagcaagaaaacaaggccattatatttctgtaccaagcagttctcggatgtgggatgccttgagaagggatatgaacttggatgaaggaactttactgtgctgtgagtattgttgccaggagtcagctgtcaacactcccaggagacgggaaattatgctttagtcactgaggcggcatctagtgtcagaccgcagccttgttaaacagagccagactttggaggatggttggtgggtttaaaatttggggcttgacatcttgtccccacaagctgctgctggcctcttccttgtccatttctgtgtggcctgtttaggccccccagcttcctgcttcttctttaccataattggaatgcaaaaatctacacgtaatttggcccatggwcccttctgcttagacatatccttgtagctactttttttttaaaagatgactatgctttctagaatatttctaagaaatt

SEQ ID NO: 615601 - DNA, 516 bp, Homo sapiens
tcacttgtgactggaaggtcacagctgcactggccatgttcatgtcactgcactccagcctgggcaacagagcaagattttgtctcaaaaaaaaaaaaaaagttggtgacgattggaataattggaattcacatacattactggtgggaacataaaatggtgtaatcaatttgggtgttttcttggcatttgatttttttaaaaaatcaagacattgtttccctatgtttcccaggcttgtcctgaactcccaagctaagaaaatcctccaractcagcgtctcaaatacctgagattaaaggtgtgagccactgtgcctgaccagtgtaaccactttgaaaaacaacgtggcagtttctcaaagactaaatgtataataatcacataatgcaacaatttcactcctgagtgtaaatccaagagaaataaaaatatatgttcccactaaaacttacatacgagtgttcatagcagcctgactcatgatggtgaatacgcaaaaacaacacaaatgt

SEQ ID NO: 615602 - DNA, 525 bp, Homo sapiens
  misc_feature 1, 2, 3, 4, 5, 6, 7, 8, 9, 10, 11, 12, 13, 14, 15, 16, 17,18, 19: n = A,T,C or G
nnnnnnnnnnnnnnnnnnnatacccgcctcctgtcagagctattaatttagaatattttactctacatacattatyaatagtactcttaattttttatttaaaccatcagttgtttgttataaaactaaaagaaaaaagccttagtttttcctgtttatgcacatgccattcctagagcttctccttacttcctgtaggtcaaaattttcatctgttgttatctttctttagtctaaaaaatttccgtttgcatttcttgtatctaggtctgctaatgacaattgttcgaagctttcttttatctgaataaatctttattttcgcaagaattactttttctagttatagaatttggagttgacagtttttttttattttaaagatgtagtttcattgctttttaaagtgtcatttctgatgacaggtagatgacctatttgtttccacgtatgtaaattattttctccctccctttagctactttcaagatttactctttttttttgcccagtggtttgactatg

SEQ ID NO: 615603 - DNA, 603 bp, Homo sapiens
ttcattgctttttaaagtgtcatttctgatgacaggtagatgacctatttgtttccacgtatgtaaattattttctccctccctttagctactttcaagatttactctttttttttgcccagtggtttgactatggtatgtctacatttggttctgtatatttttattctgttctttgagtttcttaaacctgtaagttgatatatgctgacaattaggaaaacttttggtctttactttttcaaatagctttttctgtctcattttcttctctactctttctaggagtccaattatattagtgctagactggtcatatttttattatttttctcctttgtattagctgtattgggaaattgttcttgatctgtttttaagtgcactgatagttttttctgccatctttaatttactggtatgtgcataaaatgacacttttatataagayactctgtctctcagttctaaaatttgtcctattatctctttatcatttttacttctctgttgagattctccatatattccctcttatgaccatctattccttaaatccttgaatatgcttataatagcttattttaaatttcttatcttcta

SEQ ID NO: 615604 - DNA, 560 bp, Homo sapiens
cagctaatgaagcatacccacatatttgaaagtaagaaaagtgttaagaggaactgtagatatcattttagttgatgtaaggatggaaaataaataaccaactttcactggtgractttgtcttcaatcattgttttcccgtgggtaagtggctaattttctggcctagaggtgaaattggtgtgttggtaagaattgatttaatgataacctgcttttgtctttttaaaaattgttaatccaccattgtttctggtcctgttttatacttatgcagtgtataatctctcatgcaaaatttagttctttgtttctcagcttaaactggattttgatgagcagttttcaccttcaaatgaaaaaaatggccttggttgatgttagacaaaagtaacaagaaggaattaaagaaatttgtttgtcatcttgtaacattaaataaatgaaactgaaaattcaacaattctgcttcataaaaaagtagaaagtttctactgtttttcataatttcaaagctatatcattaaatgaaatttctgcctcatggaaggtttttagaa

SEQ ID NO: 615605 - DNA, 443 bp, Homo sapiens
accaactttcactggtggactttgtcttcaatcattgttttcccgtgggtaagtggctaattttctggcctagaggtgaaattggtgtgttggtaagaattgatttaatgataacctgcttttgtctttttaaaaattgtkaatccaccattgtttctggtcctgttttatacttatgcagtgtataatctctcatgcaaaatttagttctttgtttctcagcttaaactggattttgatgagcagttttcaccttcaaatgaaaaaaatggccttggttgatgttagacaaaagtaacaagaaggaattaaagaaatttgtttgtcatcttgtaacattaaataaatgaaactgaaaattcaacaattctgcttcataaaaaagtagaaagtttctactgtttttcataatttcaaagctatatcattaaatgaaatttctg

SEQ ID NO: 615606 - DNA, 339 bp, Homo sapiens
aaagaagataaattgcatgtctatgtagatcttttcaatgaaataaacaayaaagttacttattggaatattgaaagtggttgatagtaaataaattatttatatttatggtaaaagcaataaacttgatttttagggggttcaatgacttcctgaaaatatcctctcacagattttctcagagtgtctagttggcaaaagcacagctccaaatagctatttctgtcaacgtctacagaacatttacagtttgatttccatttctactgaccttacaaatttgtaaagtgaatgcccaccaggacaaaatattaagtgataaaattaattggatcctac

SEQ ID NO: 615607 - DNA, 339 bp, Homo sapiens
aaagaagataaattgcatgtctatgtagatcttttcaatgaaataaacaacaaagttacttattggaatattgaaagtggttgatartaaataaattatttatatttatggtaaaagcaataaacttgatttttagggggttcaatgacttcctgaaaatatcctctcacagattttctcagagtgtctagttggcaaaagcacagctccaaatagctatttctgtcaacgtctacagaacatttacagtttgatttccatttctactgaccttacaaatttgtaaagtgaatgcccaccaggacaaaatattaagtgataaaattaattggatcctac

SEQ ID NO: 615608 - DNA, 464 bp, Homo sapiens
tgtaagctttccatatccaaaagggagacattttccagaaaccttcttatttttatctgaggccccctcagcctggccttcactgtccatgtttttgtcagcattcttgtcacwgccatttaaccagtctctaagatggtccaaaaatgttctcatctgtctgtcttctttggagccctccaaactcttccaacctctacccattacccagttccgaagttgcttccacattttcaggtatctttatagcaatgctccagtcctcatttgccatttttggtaagatttattttgaaaaagaggtttaattggctcatggttctgcagagtggacaggaagcttagtgcttctgcttctggggggcctcagaaatctttcaatcattgtgcaaggtaatgaaagagtgaattgtctcatatggcaagaggaaatcacggagagtagggagtgatatagagttttc

SEQ ID NO: 615609 - DNA, 586 bp, Homo sapiens
gaagcttagtgcttctgcttctggggggcctcagaaatctttcaatcattgtgcaaggtaatgaaagagtgaattgtctcatatggcaagaggaaatcacggagagtagggagtgatatagagttttcagtggccagatctcacgagaattcactcatgattgtgaggagagtaccaaggggatagtgctgaaccactcatgagaaatttgccttcatgattcaatcaccttataccaggatccacctccaacattaggaagcataactcaacatgagatttggtggggacacatattcgaattgcctcatcagtctttgagtataaagacatccatagcaggctttatccagccagcttctttgggattctttatagggtttcaggtctatagcatatccactaaaatattcctacttcaaaaggcaataaagtaagtggtattaycattcttcaaaaagttataatggtagtgtaggcattcatagtatgatttagttcatttgctactgtttctattctatcaccatattaacactttcgtacacaattctatattcagctgggtttcagttgagcacaaagt

SEQ ID NO: 615610 - DNA, 267 bp, Homo sapiens
tttgatactgttatcattctgctgtagaaagtacccgtgaactggaaaaagtccacaatcgaatagctagtcattcaacactatcaaattttaggtgactttttgaaaaaatagtatctcttgttgcaagaaatgstccatctgtgatttcaagtctctcgcttgagtgaattggatggaagtggtgaatttcagccaaagtggccaaagaaatcctgttcctgtgataatgacgccatcagcctctgcatctctgtcttcccttct

SEQ ID NO: 615611 - DNA, 533 bp, Homo sapiens
cattcatagtatgatttagttcatttgctactgtttctattctatcaccatattaacactttcgtacacaattctatattcagctgggtttcagttgagcacaaagtcatccttgtactaccaccgatagctggcactagctctttgatactgttatcattctgctgtagaaagtacccgtgaactggaaaaagtccacaatcgaatagctagtcattcaacactatcaaattttaggtgactttttgaaaaaatagtatctcttgttgcaagaaatggtccatctgtgatttcaagtctctcgcttgagtgaattggatggaagtggtgaatttcagccaaagtggccaaagaaatcctgttcctgtgataatgaygccatcagcctctgcatctctgtcttcccttctgccacatgttgcctgttctccgtgactttggtaagagcttccttgtgtatgaggatgatgtccaggatgttggtctggtgtccctgagacagcactaacaggtccatggctgggtccaggtca

SEQ ID NO: 615612 - DNA, 368 bp, Homo sapiens
cttttcaagtatgacaggtcactcctgcaccccagaccacactttcaggccccttcaaataaggaatatttcctaggtccttgcctgttcttctcagctgaattcacctcaaccttctgaaagttcttccaaaccttccactatcacctagtctttgcaaatcttgtgcattctagggagtagaattaatatttcctgagcgaggaaaactgggatcttcacctgcgaccttttatcctcctctgaagcaccagtgagaagttagaccagagggctgttctttcaagtgcgcytcttattcatagggaaccctccctttcaaactttataacacacagtgaagactgaagtactcttaaggctgaaga

SEQ ID NO: 615613 - DNA, 582 bp, Homo sapiens
tttgtgggccccagtctcctatacataaaagtagagattgtaatastcatttgacttgcagatacctcaccccgaacccacctactataatgtaaaagccaagaatgcaaaccctttcctcaccccgtgaaggtaaagtcctcagagccaaggagagaaggctcagggatggtacctaggtgtttccaacactaaccatgcattgtagtttttagtgttcaagtttaagcttcttatgttaaagttaccccagctttaattatattgtaacaagatttatttttgtaattccatttttggattcttgatttcttggtaaagaaatacagttatttttgtataccaatcttatatagtgttacattccaaaatttgttcatgagtcctaacactttttagtaaatttcttatgattttctaaatgcaagatcatgtcatctgtacataaagataactgtacttcttcctttccaatctagatgccgtttatttatttacattgccaagttgtcccagctaccactgttatcaagtaaaagggtctcactacccaaagctctagaagccagtaacatgacacta

SEQ ID NO: 615614 - DNA, 582 bp, Homo sapiens
tttgtgggccccagtctcctatacataaaagtagagattgtaatagtcatttgacttgcagatacctcaccccgaacccacctactataaygtaaaagccaagaatgcaaaccctttcctcaccccgtgaaggtaaagtcctcagagccaaggagagaaggctcagggatggtacctaggtgtttccaacactaaccatgcattgtagtttttagtgttcaagtttaagcttcttatgttaaagttaccccagctttaattatattgtaacaagatttatttttgtaattccatttttggattcttgatttcttggtaaagaaatacagttatttttgtataccaatcttatatagtgttacattccaaaatttgttcatgagtcctaacactttttagtaaatttcttatgattttctaaatgcaagatcatgtcatctgtacataaagataactgtacttcttcctttccaatctagatgccgtttatttatttacattgccaagttgtcccagctaccactgttatcaagtaaaagggtctcactacccaaagctctagaagccagtaacatgacacta

SEQ ID NO: 615615 - DNA, 582 bp, Homo sapiens
tttgtgggccccagtctcctatacataaaagtagagattgtaatagtcatttgacttgcagatacctcaccccgaacccacctactataatgtaaaagccaagaatgcaaaccctttcctcaccccgtgaaggtaaagtcctcagagccaaggagagaaggctcagggatggtacctrggtgtttccaacactaaccatgcattgtagtttttagtgttcaagtttaagcttcttatgttaaagttaccccagctttaattatattgtaacaagatttatttttgtaattccatttttggattcttgatttcttggtaaagaaatacagttatttttgtataccaatcttatatagtgttacattccaaaatttgttcatgagtcctaacactttttagtaaatttcttatgattttctaaatgcaagatcatgtcatctgtacataaagataactgtacttcttcctttccaatctagatgccgtttatttatttacattgccaagttgtcccagctaccactgttatcaagtaaaagggtctcactacccaaagctctagaagccagtaacatgacacta

SEQ ID NO: 615616 - DNA, 582 bp, Homo sapiens
tttgtgggccccagtctcctatacataaaagtagagattgtaatagtcatttgacttgcagatacctcaccccgaacccacctactataatgtaaaagccaagaatgcaaaccctttcctcaccccgtgaaggtaaagtcctcagagccaaggagagaaggctcagggatggtacctaggtgtttccaacactaaccatgcattgtagtttttagtgttcaagtttaagcttcttatgttaaagttaccccagctttaattatattgtaacaagatttatttttgtaatyccatttttggattcttgatttcttggtaaagaaatacagttatttttgtataccaatcttatatagtgttacattccaaaatttgttcatgagtcctaacactttttagtaaatttcttatgattttctaaatgcaagatcatgtcatctgtacataaagataactgtacttcttcctttccaatctagatgccgtttatttatttacattgccaagttgtcccagctaccactgttatcaagtaaaagggtctcactacccaaagctctagaagccagtaacatgacacta

SEQ ID NO: 615617 - DNA, 568 bp, Homo sapiens
attatatctctgtgtattcacagaacatytagtacatctgggacttctacaaaatttccctagctgattttggtgttctagtgtcctggcagctctagccatgaagggatgatgctttatcagcatttctgttgagttttttttcctttttctcacaaactgattccacttttcccacatacgtttgacaattcatttgaactcatttattctaaacccattattttttgtctattatttaatagggtggggggcgagggataaaagataacaaataaggtgcagtgtacactgttcgggtgataggtgcacccaaatctcacaaataaccagtaaagaagttattcatggacccgaaccaaataccaccgtaccccaataacctatgggaaaaaaaataaaaaatacaataaaaaagagtcagaaaaaaagaaaataatcactgtacttaccatgacacttagaaatggtggctagcattatttgtgtcacctaatattattattttttctttatgctacaaactagctctgctattacaatcactactatttgaagtgttactaaa

SEQ ID NO: 615618 - DNA, 377 bp, Homo sapiens
ttaacaatattgatctttctaatccatgagcatggaatagttttccatttgctttgtcatctatgatttctttctgcagtgtttcgtacttctccttttagatatcctttacctccttgcttagacatattcttcttttmttttattttattttgggggttgctgttgtaaacaggattgcactcttgatttacctctcagtttaaacatttttggtgtacagaaatgatacttctttctatatgttgattttttttaatcctcaaagtttgctgaagttttttttatcagttctaggagccttttggcacagtctttagggatttctaggtgtagaatcatatcatcagtgaagagagataatttgacttcatttc

SEQ ID NO: 615619 - DNA, 377 bp, Homo sapiens
ttaacaatattgatctttctaatccatgagcatggaatagttttccatttgctttgtcatctatgatttctttctgcagtgtttcgtacttctccttttagatatcctttacctccttgcttagacatattcttcttttcttttattttattttgggggttgctgttgtaaacaggattgcactcttgatttacctctcagtttaaacatttttggtgtacagaaatgmtacttctttctatatgttgattttttttaatcctcaaagtttgctgaagttttttttatcagttctaggagccttttggcacagtctttagggatttctaggtgtagaatcatatcatcagtgaagagagataatttgacttcatttc

SEQ ID NO: 615620 - DNA, 377 bp, Homo sapiens
ttaacaatattgatctttctaatccatgagcatggaatagttttccatttgctttgtcatctatgatttctttctgcagtgtttcgtacttctccttttagatatcctttacctccttgcttagacatattcttcttttcttttattttattttgggggttgctgttgtaaacaggattgcactcttgatttacctctcagtttaaacatttttggtgtacagaaatgatacttctttctatatgttgattttttttaatcctcaaagtttgctgaagttttttttatmagttctaggagccttttggcacagtctttagggatttctaggtgtagaatcatatcatcagtgaagagagataatttgacttcatttc

SEQ ID NO: 615621 - DNA, 614 bp, Homo sapiens
ctgctgaattaagtgaatggccacctcctctctctcctctaaatgggtgagaaaatcaattrgctgaaaaacttactgctcctgtagttacaacattaaaacctggagcaattggtggtggtagacaaaattctattcaaaaagctaaagccaagggagaccttgaagcatggcaatttcccgttactataatccagcaagtaggacagaatatagctaattaggctgctttctcttttaagttactaaagaatttaagcaagccattagtcaatatggactgaactctctttttgtgcaaactttatttaaaaatatggctcttgataatagattactaccatataattaggatactttgacaaaacctgttctcactccatctcagtacttgcagtttaaaacttggtaggctgatgaagctcaaactcaggcaaaagaaaacacacaagtgcagccacctgtgcctgttttctttgatcagttaatatgagttggccctaactggggttgatttgagaatcaagcactaatggaagatgttgccattgttcagctgtgcttcatgtgcttacatgcatagaaaaaggataaatgttaccggggaaaagtat

SEQ ID NO: 615622 - DNA, 614 bp, Homo sapiens
ctgctgaattaagtgaatggccacctcctctctctcctctaaatgggtgagaaaatcaattagctgaaaaacttactgctcctgtagttacaacattaaaacctggagcaattggtggtggtagacaaaattctattcaaaaagctaaagccaagggagaccttgaagcatggcaatttcccgttactataatccagcaagtaggacagaatatagctaattaggctgctttctcttttaagttactaaagaatttaagcaagccattagtcaatatggactgaactctctttttgtgcaaactttatttaaaaatatggctcttgataatagattactaccatataattaggatactttgacaaaacctgttctcactccatctcagtacttgcagtttaaaacttggtaggytgatgaagctcaaactcaggcaaaagaaaacacacaagtgcagccacctgtgcctgttttctttgatcagttaatatgagttggccctaactggggttgatttgagaatcaagcactaatggaagatgttgccattgttcagctgtgcttcatgtgcttacatgcatagaaaaaggataaatgttaccggggaaaagtat

SEQ ID NO: 615623 - DNA, 614 bp, Homo sapiens
ctgctgaattaagtgaatggccacctcctctctctcctctaaatgggtgagaaaatcaattagctgaaaaacttactgctcctgtagttacaacattaaaacctggagcaattggtggtggtagacaaaattctattcaaaaagctaaagccaagggagaccttgaagcatggcaatttcccgttactataatccagcaagtaggacagaatatagctaattaggctgctttctcttttaagttactaaagaatttaagcaagccattagtcaatatggactgaactctctttttgtgcaaactttatttaaaaatatggctcttgataatagattactaccatataattaggatactttgacaaaacctgttctcactccatctcagtacttgcagtttaaaacttggtaggctgatgaagctcaaactcaggcaaaagaaaacacacaastgcagccacctgtgcctgttttctttgatcagttaatatgagttggccctaactggggttgatttgagaatcaagcactaatggaagatgttgccattgttcagctgtgcttcatgtgcttacatgcatagaaaaaggataaatgttaccggggaaaagtat

SEQ ID NO: 615624 - DNA, 580 bp, Homo sapiens
ctggggttgatttgagaatcaagcactaatggaagatgttgccattgttcagctgtgcttcatgtgcttacatgcatagaaaaaggataaatgttaccggggaaaagtatccttatttcagttctgtctgacaaggacctaaagaaccatatattaattttattgctcagctccaagaggctgtgtataaagcckcaaatgatcaaaacagcttaggatgttgtaatacagcttcttgcatacaataatgctaatgcagagtgtcaaactgctattagatcccagacagagagggcccatttaactaaatatattaaggcttgcgatggcattggagataacttacataaggttattcttttagctcaggctgtggctagattaagagtaagaaaaaatatgcttcatttctcaggctcttgacttaattgtgggcaaattggacacaagaaaggaatgtagaaaggaattcaaaagacgaaaactactaccatcaatcaacagaaaagtcccaacgtacgtccctggtgtaagaaaggcaatcactgggcaagtccgtgtcattctaaatttagcaaag

SEQ ID NO: 615625 - DNA, 406 bp, Homo sapiens
aacagggaaatattatagctacatttgagccttttccttttaaatyactcaaaaaaattaaacaagctataaatcagtatggaccaggttctccttttgaaatgggactgttaaagaatgttgctgtttccagtcggatgattcctactgactgggacacttttactctagcttgtctaactcctgctcagttcttacaatttaaaacttagtaggcagatgaagcttccattcaggctgctcgcaatgcctgggcccaacctcaaattaatataactgcagaccaacttttgggggttggtggctgggctggtttacatgcacaagtggtcatgcaggatgatgccatagaacagcttagagaagtgtgcattagagcttggaataaatcacttcatgtggagaa

SEQ ID NO: 615626 - DNA, 535 bp, Homo sapiens
ttggtggctgggctggtttacatgmacaagtggtcatgcaggatgatgccatagaacagcttagagaagtgtgcattagagcttggaataaatcacttcatgtggagaacaatacccttcctttagtgctataaaacagggaccaagagaaccatatgtggattttatagcttggttacaggagtctcttaaaaagatgattgcagatttggctgcttaggatatagtgttgcagttattggttttgacaatgctaatccttattgccaggctgctctgcgacctatcagagggaaagcacatttagttgattataacaaggcctgtgatgatatcagagataatctacataaagctactttgttggcacaggcgatggcaggactgagagtggataaaggaaatactctatttcctggagcttgttttaactgtgggaagcatggtcatactaaaaagaatgtaaaaaaaaaaaatcaccgagtcaggccaccagataggggaaaaaacaaaactgctgatcctgaaatatgtc

SEQ ID NO: 615627 - DNA, 591 bp, Homo sapiens
  misc_feature 404: n = A,T,C or G
ctggaggatttggaagcacaaataaaaaaggcaaggcagcttattgggtaaatcaaattactgataaacatcctatctgtgaaataactatccagggaaagaactttaaaggtttggtagatactatttttttttttttggtaggagtggacatttcaattatttctctacagcactggccgtccatgtggccaattcarcccactcaatttaacacagtagaaactgctaaagctccagaagtgtatcagagtagctatactttgcattgtgaagggcccaatggacaacctgggactgttcaaccaattgcaacttctgtacctataaatttatgggggagagatttattatgacaatggggagcacaagttctaattccataacaattatacagccctcanagtcaacatatgatgcacaaaatggggcatttccctggtataggagtagaaaaaaaattgcaaggtttgaaagaactgcttcaaacggaaagacaaagttcctgccaaagattaggataccatttttgatggtggccatagttaagcctccagaacctatacctttaaaatggttaacagataagcc

SEQ ID NO: 615628 - DNA, 591 bp, Homo sapiens
  misc_feature 404: n = A,T,C or G
ctggaggatttggaagcacaaataaaaaaggcaaggcagcttattgggtaaatcaaattactgataaacatcctatctgtgaaataactatccagggaaagaactttaaaggtttggtagatactatttttttttttttggtaggagtggacatttcaattatttctctacagcactggccgtccatgtggccaattcagcccactcaatttaacacagtagaaactgctaaagctccagaagtgtatcagagtagctatactttgcattgtgaagggcccaatggacaacctgggactgttcaaccaattgyaacttctgtacctataaatttatgggggagagatttattatgacaatggggagcacaagttctaattccataacaattatacagccctcanagtcaacatatgatgcacaaaatggggcatttccctggtataggagtagaaaaaaaattgcaaggtttgaaagaactgcttcaaacggaaagacaaagttcctgccaaagattaggataccatttttgatggtggccatagttaagcctccagaacctatacctttaaaatggttaacagataagcc

SEQ ID NO: 615629 - DNA, 591 bp, Homo sapiens
  misc_feature 404: n = A,T,C or G
ctggaggatttggaagcacaaataaaaaaggcaaggcagcttattgggtaaatcaaattactgataaacatcctatctgtgaaataactatccagggaaagaactttaaaggtttggtagatactatttttttttttttggtaggagtggacatttcaattatttctctacagcactggccgtccatgtggccaattcagcccactcaatttaacacagtagaaactgctaaagctccagaagtgtatcagagtagctatactttgcattgtgaagggcccaatggacaacctgggactgttcaaccaattgcaactyctgtacctataaatttatgggggagagatttattatgacaatggggagcacaagttctaattccataacaattatacagccctcanagtcaacatatgatgcacaaaatggggcatttccctggtataggagtagaaaaaaaattgcaaggtttgaaagaactgcttcaaacggaaagacaaagttcctgccaaagattaggataccatttttgatggtggccatagttaagcctccagaacctatacctttaaaatggttaacagataagcc

SEQ ID NO: 615630 - DNA, 514 bp, Homo sapiens
  misc_feature 244: n = A,T,C or G
tatttctctacagcactggccgtccatgtggccaattcagcccactcaatttaacacagtagaaactgctaaagctccagaagtgtatcagagtagctatactttgcattgtgaagggcccaatggacaacctgggactgttcaaccaattgcaacttctgtacctataaatttatgggggagagatttattatgacaatggggagcacaagttctaattccataacaattatacagccctcanagtcaacatatgatgcacraaatggggcatttccctggtataggagtagaaaaaaaattgcaaggtttgaaagaactgcttcaaacggaaagacaaagttcctgccaaagattaggataccatttttgatggtggccatagttaagcctccagaacctatacctttaaaatggttaacagataagccaatttggatagaataatggctgctaagcaaagggaaactggatgctttagagaaattagttactgaacaattagaaaatgggc

SEQ ID NO: 615631 - DNA, 484 bp, Homo sapiens
  misc_feature 136: n = A,T,C or G
ttgtgaagggcccaatggacaacctgggactgttcaaccaattgcaacttctgtacctataaatttatgggggagagatttattatgacaatggggagcacaagttctaattccataacaattatacagccctcanagtcaacatatgatgcacaaaatggggcatttccctggtataggagtagaaaaaaaattgcaaggtttgaaagaactgcttcaaacggaaagacaaagttcctgccaaagattaggataccatttttgatggtggccatagttaagcctccagaacctatacctttaaaatggttaacagataagccaatttggatagaataatggctgctaagcaaagggaaactggatgctttagagaaattagttactgaacaattagaaaatgggcacatractccaacattttccccttggaattctccagttttcataattaagaaaaaatcaggtaaatggagaatgttaa

SEQ ID NO: 615632 - DNA, 484 bp, Homo sapiens
  misc_feature 136: n = A,T,C or G
ttgtgaagggcccaatggacaacctgggactgttcaaccaattgcaacttctgtacctataaatttatgggggagagatttattatgacaatggggagcacaagttctaattccataacaattatacagccctcanagtcaacatatgatgcacaaaatggggcatttccctggtataggagtagaaaaaaaattgcaaggtttgaaagaactgcttcaaacggaaagacaaagttcctgccaaagattaggataccatttttgatggtggccatagttaagcctccagaacctatacctttaaaatggttaacagataagccaatttggatagaataatggctgctaagcaaagggaaactggatgctttagagaaattagttactgaacaattagaaaatgggcacatgrctccaacattttccccttggaattctccagttttcataattaagaaaaaatcaggtaaatggagaatgttaa

SEQ ID NO: 615633 - DNA, 565 bp, Homo sapiens
gttaagcctccagaacctatacctttaaaatggttaacagataagccaatttggatagaataatggctgctaagcaaagggaaactggatgctttagagaaattagttactgaacaattagaaaatgggcacatgactccaacattttccccttggaattctccagttttcataattaagaaaaaatcaggtaaatggagaatgttaactgacttaagagccatcaattcagttatacaacctatggaaatataacagccaggattcccttctctactataattccaaaaaattggcctttaatartcacagatttaaaagactgtttctttactatccttttagctgagcaagactgtgaacggtttgcatttacaattcctgcagtaaacaacctgcagcctgctaagcgttttcattgtttcacagatgggtctagtaatggtaaaggttcttattctggatcaaaagctaaagttttccagacaccctatacttcagctcaaaaggcggagcttgtagctgtaattgaggtgttgactgcttttgatatgcctgttaatgt

SEQ ID NO: 615634 - DNA, 565 bp, Homo sapiens
gttaagcctccagaacctatacctttaaaatggttaacagataagccaatttggatagaataatggctgctaagcaaagggaaactggatgctttagagaaattagttactgaacaattagaaaatgggcacatgactccaacattttccccttggaattctccagttttcataattaagaaaaaatcaggtaaatggagaatgttaactgacttaagagccatcaattcagttatacaacctatggaaatataacagccaggattcccttctctactataattccaaaaaattggcctttaataatcacagatttaaaagactgtttctttactayccttttagctgagcaagactgtgaacggtttgcatttacaattcctgcagtaaacaacctgcagcctgctaagcgttttcattgtttcacagatgggtctagtaatggtaaaggttcttattctggatcaaaagctaaagttttccagacaccctatacttcagctcaaaaggcggagcttgtagctgtaattgaggtgttgactgcttttgatatgcctgttaatgt

SEQ ID NO: 615635 - DNA, 565 bp, Homo sapiens
gttaagcctccagaacctatacctttaaaatggttaacagataagccaatttggatagaataatggctgctaagcaaagggaaactggatgctttagagaaattagttactgaacaattagaaaatgggcacatgactccaacattttccccttggaattctccagttttcataattaagaaaaaatcaggtaaatggagaatgttaactgacttaagagccatcaattcagttatacaacctatggaaatataacagccaggattcccttctctactataattccaaaaaattggcctttaataatcacagatttaaaagactgtttctttactatccttttagctgagcaagactgtgaacggtttgcatttacaattcctgcagtaaacaacctgcagcctgctaagckttttcattgtttcacagatgggtctagtaatggtaaaggttcttattctggatcaaaagctaaagttttccagacaccctatacttcagctcaaaaggcggagcttgtagctgtaattgaggtgttgactgcttttgatatgcctgttaatgt

SEQ ID NO: 615636 - DNA, 565 bp, Homo sapiens
gttaagcctccagaacctatacctttaaaatggttaacagataagccaatttggatagaataatggctgctaagcaaagggaaactggatgctttagagaaattagttactgaacaattagaaaatgggcacatgactccaacattttccccttggaattctccagttttcataattaagaaaaaatcaggtaaatggagaatgttaactgacttaagagccatcaattcagttatacaacctatggaaatataacagccaggattcccttctctactataattccaaaaaattggcctttaataatcacagatttaaaagactgtttctttactatccttttagctgagcaagactgtgaacggtttgcatttacaattcctgcagtaaacaacctgcagcctgctaagcgttttcattgtttcacagatgggtctagtaatggtaaaggttcttattctggatcaaaagctaaagttttccagacaccctatacttcagctcaaaaggcggagcttgtagctgtaattgaggtgttgrctgcttttgatatgcctgttaatgt

SEQ ID NO: 615637 - DNA, 627 bp, Homo sapiens
gcagtggcatgatcacagctcactgcaaccttgaccttctgcgctcaagggatcctcccacctcagcctcccatgtagctgttaattacaggcatacaccaccatggtcagctaacttttatttttttttgtagagtcagcmtctcactattttgctcaggctggtttcatgatactcctgcctaggcctcctaaagtgttgggattacaggtgtgagccaccatgcccagcctatttttgaaattttagttatgttaaattaaataatagatactcattaaatatctgggttatttccaatttaaaacttatgttttagcccaggcactgtggctcacgcctgtaatccctgcactttgggaggccaaggcgggtggctcacccgaggtcaggagctcaagaccagcctgatcaacatggtgaaaccccatctctactaaaaaatacaaaaaattagccaggtgtgatggtgggttcctgtaatcccagctactcgggaggctgaggcaggagaattacttgaacctggagggcggagattgcagtgagctgagatcacaccattgcactccagcctgggcaacaagagcgaaaatccatcttaaaaaatatgttttaggaacaca

SEQ ID NO: 615638 - DNA, 627 bp, Homo sapiens
gcagtggcatgatcacagctcactgcaaccttgaccttctgcgctcaagggatcctcccacctcagcctcccatgtagctgttaattacaggcatacaccaccatggtcagctaacttttatttttttttgtagagtcagcctctcactattttgctcaggctggtttcatgatactcctgcctaggcctcctaaagtgttgggattacaggtgtgagccaccatgcccagcctatttttgaaattttagttatgttaaattaaataatagatactcattaaatatctgggttatttccaatttaaaacttatgttttagcccaggcactgtggctcacgcctgtaatccctgcactttgggaggccaaggcrggtggctcacccgaggtcaggagctcaagaccagcctgatcaacatggtgaaaccccatctctactaaaaaatacaaaaaattagccaggtgtgatggtgggttcctgtaatcccagctactcgggaggctgaggcaggagaattacttgaacctggagggcggagattgcagtgagctgagatcacaccattgcactccagcctgggcaacaagagcgaaaatccatcttaaaaaatatgttttaggaacaca

SEQ ID NO: 615639 - DNA, 622 bp, Homo sapiens
aagtgttaatatcttgctagatatgtgtgattaagactactagatacaagagaaacaattctgtatgcaaaatgtataccggtttttgtttcagagaaagtaaattcgcttagagatttttaaggattattttaaattgaaggaataaaaaagatagataaaactacatgtgtataaaaagttgggaaagatgaaaaaattatagaaggttattaaaagtttatgtaaatcttacatcgaggccaaaactgattgagatcagatagattgtttataaagtttatttaaattagctataatattaaaaacagcgataaaaaactaaaaattttggttaaaacaacaaggttttcttaatgtatttatttgctcataataagaggtaataaatattgacttttaatcctgaaatctgttactataaaaacttttcagatttgtatatcagaagttcaacttttcctgtactttcatgttacacatgactcacagatcacatcactgtctcctgttccttcttgagaaggaataaaaggcttgggtttcytgcttggctgggatgataactccttcagctttttcatcaggtctaattttatactcttggcttttaaatatgtct

SEQ ID NO: 615640 - DNA, 605 bp, Homo sapiens
gctatgtgtcataacaagtgctcatagtcctggctacttgggatactaaggtggaggatcacctgagcctgggaggttgaggctgcagtgagccatgatttcaccactgcactccagcctgggcaacagggtgagaccctgtctcaaaaaaataataaaataaaaaacaataaactgtcattctgttttggtcaaatgttttcaattttttgacatctttgctaaatcttakttgataacattgtatgggaagcattgccaaaagataagtaacactaaatcttcttttttttttctctgagacacaatcttgctttgtcacccaggctggagtgcagtggcgtgatctaggtccattgcaacctctgccccaaggttcaagcgattctcctgcctcaacctcccaagtagctgagactacagacacatgccaccacgcccggctaattttgtatttttagtagaaacaagatttctccatgttggccaggctggtgtcaaactcctgacctctgatgatctgtccaacttggcctcccaaagtgttgggattacagacatgagccactgtgcctggcctaaatcttcttttggttacatttata

SEQ ID NO: 615641 - DNA, 605 bp, Homo sapiens
gctatgtgtcataacaagtgctcatagtcctggctacttgggatactaaggtggaggatcacctgagcctgggaggttgaggctgcagtgagccatgatttcaccactgcactccagcctgggcaacagggtgagaccctgtctcaaaaaaataataaaataaaaaacaataaactgtcattctgttttggtcaaatgttttcaattttttgacatctttgctaaatcttatttgataacattgtatgggaagcattgccaaaagataagtaacactaaatcttcttttttttttctctgagacasaatcttgctttgtcacccaggctggagtgcagtggcgtgatctaggtccattgcaacctctgccccaaggttcaagcgattctcctgcctcaacctcccaagtagctgagactacagacacatgccaccacgcccggctaattttgtatttttagtagaaacaagatttctccatgttggccaggctggtgtcaaactcctgacctctgatgatctgtccaacttggcctcccaaagtgttgggattacagacatgagccactgtgcctggcctaaatcttcttttggttacatttata

SEQ ID NO: 615642 - DNA, 489 bp, Homo sapiens
aaatcttccaggactctaaaaagctgaatgagaatttccaattgaaatcaagcaaaacacaaaaaactgaatgagaattgctatttgaaatcaagcagaacaagatttagttacattggactgaacttataaaagaaggaaaagattttattcatggcccttccattggaaacattgttgattctctttatgttttgttttccaaagtcaagaattttttttcttttcagctatttttaacttrccctacgttagaaaaactacattgtgaacaaaaatttgagccatttatctgtctctctaactgatttctccagaattcagaagccattcgtgagcattcctaaattatggcaatataattatttgcataatttcaataagaatctatttttggtaacaggattcaattggagacactgtttgttttatcaaggctttaactcgaacagcagatacaaccagaccactttaaggaattgagcttga

SEQ ID NO: 615643 - DNA, 489 bp, Homo sapiens
aaatcttccaggactctaaaaagctgaatgagaatttccaattgaaatcaagcaaaacacaaaaaactgaatgagaattgctatttgaaatcaagcagaacaagatttagttacattggactgaacttataaaagaaggaaaagattttattcatggcccttccattggaaacattgttgattctctttatgttttgttttccaaagtcaagaattttttttcttttcagctatttttaacttaccctacgttagaaaaactacattgtgaacaaaaatttgagcsatttatctgtctctctaactgatttctccagaattcagaagccattcgtgagcattcctaaattatggcaatataattatttgcataatttcaataagaatctatttttggtaacaggattcaattggagacactgtttgttttatcaaggctttaactcgaacagcagatacaaccagaccactttaaggaattgagcttga

SEQ ID NO: 615644 - DNA, 489 bp, Homo sapiens
aaatcttccaggactctaaaaagctgaatgagaatttccaattgaaatcaagcaaaacacaaaaaactgaatgagaattgctatttgaaatcaagcagaacaagatttagttacattggactgaacttataaaagaaggaaaagattttattcatggcccttccattggaaacattgttgattctctttatgttttgttttccaaagtcaagaattttttttcttttcagctatttttaacttaccctacgttagaaaaactacattgtgaacaaaaatttgagccatttatctgtctctctmactgatttctccagaattcagaagccattcgtgagcattcctaaattatggcaatataattatttgcataatttcaataagaatctatttttggtaacaggattcaattggagacactgtttgttttatcaaggctttaactcgaacagcagatacaaccagaccactttaaggaattgagcttga

SEQ ID NO: 615645 - DNA, 489 bp, Homo sapiens
aaatcttccaggactctaaaaagctgaatgagaatttccaattgaaatcaagcaaaacacaaaaaactgaatgagaattgctatttgaaatcaagcagaacaagatttagttacattggactgaacttataaaagaaggaaaagattttattcatggcccttccattggaaacattgttgattctctttatgttttgttttccaaagtcaagaattttttttcttttcagctatttttaacttaccctacgttagaaaaactacattgtgaacaaaaatttgagccatttatctgtctctctaactgatttctccagaattcagaagccattcgtgagcattcctaaattatggcaatataattatttgcataatttcaataagaatctrtttttggtaacaggattcaattggagacactgtttgttttatcaaggctttaactcgaacagcagatacaaccagaccactttaaggaattgagcttga

SEQ ID NO: 615646 - DNA, 572 bp, Homo sapiens
atctatttttggtaacaggattcaattggagacactgtttgttttatcaaggctttaactcgaacagcagatacaaccagaccactttaaggaattgagcttgactttatagcaccaatgcaaagccccttagaatgactggcttggtgtcttgtctacaarggtcctttacaaagttgctgtccttgtggtaagaagtaaagaatgtcactttctgacgggcccaggaacctcaagttatttggggaccttgagaagataggactacacccattcataaaagtattacagaagagctggcaagatgtctgaataggaacagctccggtctgcagcacccagtgggatcaacacagaaggcaggtggttcatgcatttccaactgagcctccactggtgatacccaggcaaacagggtctggagtggacctccagcaaactcgagcaaacctgcagcagagggacctgactggtagaaggaaaactaacaaacataaaggaatagtatcaacatcaccaacatcaaagaccaaaggtagataaatccacaaagatggggagaaaccagtgca

SEQ ID NO: 615647 - DNA, 405 bp, Homo sapiens
aactacaggcagtttcaagccctactttacctctaattactcttacagcaatgcaatgaatcatgatttaaaatttkaaaaaaaaactgctgttaaattattagtcaagcgtccagggcaatggacagtaaagaaataagtaggtcatgggccaagatgacaaaacggtccttttatttaaagctataacaataatctgaagccagccctgtaaaatagacatccattgaaaaagcatgctagcgcttttgcttttttggtaccttggcctcctgtgtccctaaacagacctcttctcagcagggtttgctcagcaagtcacttgttgagtcttgcagtctacagagggggtggggaatggcaggggctggcataggagtgagaggggaggaggcaaggtgaggg

SEQ ID NO: 615648 - DNA, 405 bp, Homo sapiens
aactacaggcagtttcaagccctactttacctctaattactcttacagcaatgcaatgaatcatgatttaaaattttaaaaaaaaactgctgttaaattattagtcaagygtccagggcaatggacagtaaagaaataagtaggtcatgggccaagatgacaaaacggtccttttatttaaagctataacaataatctgaagccagccctgtaaaatagacatccattgaaaaagcatgctagcgcttttgcttttttggtaccttggcctcctgtgtccctaaacagacctcttctcagcagggtttgctcagcaagtcacttgttgagtcttgcagtctacagagggggtggggaatggcaggggctggcataggagtgagaggggaggaggcaaggtgaggg

SEQ ID NO: 615649 - DNA, 405 bp, Homo sapiens
aactacaggcagtttcaagccctactttacctctaattactcttacagcaatgcaatgaatcatgatttaaaattttaaaaaaaaactgctgttaaattattagtcaagcrtccagggcaatggacagtaaagaaataagtaggtcatgggccaagatgacaaaacggtccttttatttaaagctataacaataatctgaagccagccctgtaaaatagacatccattgaaaaagcatgctagcgcttttgcttttttggtaccttggcctcctgtgtccctaaacagacctcttctcagcagggtttgctcagcaagtcacttgttgagtcttgcagtctacagagggggtggggaatggcaggggctggcataggagtgagaggggaggaggcaaggtgaggg

SEQ ID NO: 615650 - DNA, 405 bp, Homo sapiens
aactacaggcagtttcaagccctactttacctctaattactcttacagcaatgcaatgaatcatgatttaaaattttaaaaaaaaactgctgttaaattattagtcaagcgtccagggcaatggacagtaaagaaataagtaggtcatgggccaagatgacaaaacggtccttttatttaaagctataacaataatctgaagccagmcctgtaaaatagacatccattgaaaaagcatgctagcgcttttgcttttttggtaccttggcctcctgtgtccctaaacagacctcttctcagcagggtttgctcagcaagtcacttgttgagtcttgcagtctacagagggggtggggaatggcaggggctggcataggagtgagaggggaggaggcaaggtgaggg

SEQ ID NO: 615651 - DNA, 541 bp, Homo sapiens
ttaggcttaggcttaatggaattttttttgtttttttttatcttctatctagaccaattaaactttttcataacagcagcaagattgtttagctttttatcattcatgtattcactggagtagtactttraatttctttccagaacacttcctttgcattcacaacttggttaagtgtttgttgcatgaggtctagctactggcctgtcttgcttacagcatgccttcatcactaagcttaattatttcttccttttggtttaaagtgacagacatgcaactcttctttcacttgaacatatagaggctattgtagggttattaattggccacattttaatgttaataaaaggaagcctgagaaaaagagagagaaagagaaatggcccattggtggggcagtcagaacaaatgcatttgtcaattgtttgctgtcttatcctggtgtgatttgtggttcccaaaacaatgacaacagtagcattaaagatcactgattacagatcactataaccgattcaataataaaaagcttaaaata

SEQ ID NO: 615652 - DNA, 595 bp, Homo sapiens
tggatggttacatctggcaaaactcagcaaactgtgcactttaaaataggaatatttattttatgtaaattatgtttgaatacaattgattttttaaaaaaaaacgtttcccagagtgatcaaagtggagggcagggaacagtaaacatcagtgcttatgttatagctactagaagcctcccaattccaacgacatgttttcaagcaggtctgatccttcccctggaggatacctctgacccaggtgtgctacaaatgcattgcccctagttgcttctgtcaccttagtgatggaagtgacaagagggtactggagaaagaaaaggtgtacagggttccaaatgtactttctctttccaaaggacatttgtgaagccagtggaaagcgaacaaacaagctgctaaataagtcacaagtgtsttctcgtacagttttgtgattaactaaataggacattcaacagataaagtttgttttacatagttactcctctaataggatgaacttgtggattgtgagatagggctgatataacctgttttctctctgcctcttattttccccccaagttttgtgtgcaatacattaggaaaa

SEQ ID NO: 615653 - DNA, 595 bp, Homo sapiens
tggatggttacatctggcaaaactcagcaaactgtgcactttaaaataggaatatttattttatgtaaattatgtttgaatacaattgattttttaaaaaaaaacgtttcccagagtgatcaaagtggagggcagggaacagtaaacatcagtgcttatgttatagctactagaagcctcccaattccaacgacatgttttcaagcaggtctgatccttcccctggaggatacctctgacccaggtgtgctacaaatgcattgcccctagttgcttctgtcaccttagtgatggaagtgacaagagggtactggagaaagaaaaggtgtacagggttccaaatgtactttctctttccaaaggacatttgtgaagccagtggaaagcgaacaaacaagctgctaaataagtcacaagtgtcttctcgtacagttttgygattaactaaataggacattcaacagataaagtttgttttacatagttactcctctaataggatgaacttgtggattgtgagatagggctgatataacctgttttctctctgcctcttattttccccccaagttttgtgtgcaatacattaggaaaa

SEQ ID NO: 615654 - DNA, 407 bp, Homo sapiens
agatagggctgatataacctgttttctctctgcctcttattttycccccaagttttgtgtgcaatacattaggaaaaatataattgggctataaagctacaaaaatggcttcctggcagttccatgcttgtttccatgtggtgcctatgtttggcactgtgttctcatttgcactttcctacttgattagttaatgtatggacaagcctgatctctactgtgaatttttaccaaggtattctagtagaaaaatgagtatgtaatggtgctgtggaatgctaaagtgtgcaaaacattaagaatctaaaaatatgctcatttccaagttttgtcccagagcaactgtgcactctatatcgctactgctatttaaagttatccatttgcatgtctaaaaaatagattca

SEQ ID NO: 615655 - DNA, 541 bp, Homo sapiens
ttaggcttaggcttaatggaattttttttgtttttttttatcttctatctagaccaattaaactttttcataacagcagcaagattgtttagctttttatcattcatgtattcactggagtagtactttaaatttctttccagaacacttcctttgcattcacaacttggttaagtgtttgttgcatgaggtctagctactggcctgtcttgcttacagcatgccttcatcactaagcttaattatttcttccttttggtttaaagtgacagacatgcaactcttctttcacttgaacatatagaggctatwgtagggttattaattggccacattttaatgttaataaaaggaagcctgagaaaaagagagagaaagagaaatggcccattggtggggcagtcagaacaaatgcatttgtcaattgtttgctgtcttatcctggtgtgatttgtggttcccaaaacaatgacaacagtagcattaaagatcactgattacagatcactataaccgattcaataataaaaagcttaaaata

SEQ ID NO: 615656 - DNA, 541 bp, Homo sapiens
ttaggcttaggcttaatggaattttttttgtttttttttatcttctatctagaccaattaaactttttcataacagcagcaagattgtttagctttttatcattcatgtattcactggagtagtactttaaatttctttccagaacacttcctttgcattcacaacttggttaagtgtttgttgcatgaggtctagctactggcctgtcttgcttacagcatgccttcatcactaagcttaattatttcttccttttggtttaaagtgacagacatgcaactcttctttcacttgaacatatagaggctattgtagggttattaattggccacattttaatgttaataaaaggaagcctgagaaaaagagagagaaagagaaatggcccattggtggggcagtcagaacaaatgyatttgtcaattgtttgctgtcttatcctggtgtgatttgtggttcccaaaacaatgacaacagtagcattaaagatcactgattacagatcactataaccgattcaataataaaaagcttaaaata

SEQ ID NO: 615657 - DNA, 418 bp, Homo sapiens
tccccccacaccctgcatagtacaaacaatatcaaagagggtctgtgcaacacgtgcaatattgggagtaatatcctcccccaacatggatattagaaacagtatcacargaggttgtacaccacctgcgatattggggagtactatcattttctttccccatggatatttagaacaatatcacaaaggcggtgtacaacccctgctatattgggagaaatactgtactttccccacctagatattaggaactatatcacggggggttatacaccgctgcatcattgggagtaatatcatcctttccctccctggatattaggaacaatacctcatgggtgtgtacaccctgttccatattgggattaatattttctcccttgctggacataaggaacaatataacgaggggtataca

SEQ ID NO: 615658 - DNA, 418 bp, Homo sapiens
tccccccacaccctgcatagtacaaacaatatcaaagagggtctgtgcaacacgtgcaatattgggagtaatatcctcccccaacatggatattagaaacagtatcacaggaggttgtacaccacctgcgatattggggagtactatcattttctttccccatggatatttagaacaatatcacaaaggcggtgtacaacccctgctatattgggagaaatactgtactttccscacctagatattaggaactatatcacggggggttatacaccgctgcatcattgggagtaatatcatcctttccctccctggatattaggaacaatacctcatgggtgtgtacaccctgttccatattgggattaatattttctcccttgctggacataaggaacaatataacgaggggtataca

SEQ ID NO: 615659 - DNA, 418 bp, Homo sapiens
tccccccacaccctgcatagtacaaacaatatcaaagagggtctgtgcaacacgtgcaatattgggagtaatatcctcccccaacatggatattagaaacagtatcacaggaggttgtacaccacctgcgatattggggagtactatcattttctttccccatggatatttagaacaatatcacaaaggcggtgtacaacccctgctatattgggagaaatactgtactttccccacctagatattaggaactatatcackgggggttatacaccgctgcatcattgggagtaatatcatcctttccctccctggatattaggaacaatacctcatgggtgtgtacaccctgttccatattgggattaatattttctcccttgctggacataaggaacaatataacgaggggtataca

SEQ ID NO: 615660 - DNA, 577 bp, Homo sapiens
ggtgtatacccactgtgatattgggagtaatttcatcctctaccccttggatgttaggagcagtatcacaaggggggtgtgcaccctctgygatattaagaataataccattctctcctcctctggatactaggaataatatcacagggctggtgtgcaccttttgcattatttggagcaatatcaccctctccccaacttgatattagagacaatatcatggggggtggcgtgtaacaccctgcactgttgggagtaatatcatctagtcttcccctggatataagaaacagtatcacagaagggttctacacctccagagattttgggagtaatatcatcctctccaaatctggatattaagaacagtataatggggtgtggggagtaatatgttgggagtaatacaatcctaccccccacttgatattaggaacaatatcgcaaaacgtgtgtacacccactgtgatatttggagtaatatcaacatttccccacctggtatcacggggagagtgtacactccttatgatattggaagtatcattgtctctcactctcgatattaggaaaaata

SEQ ID NO: 615661 - DNA, 577 bp, Homo sapiens
ggtgtatacccactgtgatattgggagtaatttcatcctctaccccttggatgttaggagcagtatcacaaggggggtgtgcaccctctgtgatattaaraataataccattctctcctcctctggatactaggaataatatcacagggctggtgtgcaccttttgcattatttggagcaatatcaccctctccccaacttgatattagagacaatatcatggggggtggcgtgtaacaccctgcactgttgggagtaatatcatctagtcttcccctggatataagaaacagtatcacagaagggttctacacctccagagattttgggagtaatatcatcctctccaaatctggatattaagaacagtataatggggtgtggggagtaatatgttgggagtaatacaatcctaccccccacttgatattaggaacaatatcgcaaaacgtgtgtacacccactgtgatatttggagtaatatcaacatttccccacctggtatcacggggagagtgtacactccttatgatattggaagtatcattgtctctcactctcgatattaggaaaaata

SEQ ID NO: 615662 - DNA, 455 bp, Homo sapiens
ttagtaacaatatcagaaggggtgtacaccccttgcgatatttatagtactatcatcctataccccttggatattaggaaaaataccacgggggggtgtatacccactgtgatattgggagtaatttcatcctctaccccttggatgttaggagcagtatcacaaggggggtgtgcaccctctgtgatattaagaataataccattctctcctyctctggatactaggaataatatcacagggctggtgtgcaccttttgcattatttggagcaatatcaccctctccccaacttgatattagagacaatatcatggggggtggcgtgtaacaccctgcactgttgggagtaatatcatctagtcttcccctggatataagaaacagtatcacagaagggttctacacctccagagattttgggagtaatatcatcctctccaaatctggatatt

SEQ ID NO: 615663 - DNA, 455 bp, Homo sapiens
ttagtaacaatatcagaaggggtgtacaccccttgcgatatttatagtactatcatcctataccccttggatattaggaaaaataccacgggggggtgtatacccactgtgatattgggagtaatttcatcctctaccccttggatgttaggagcagtatcacaaggggggtgtgcaccctctgtgatattaagaataataccattctctcctcctctggatactaggaataatatcacagkgctggtgtgcaccttttgcattatttggagcaatatcaccctctccccaacttgatattagagacaatatcatggggggtggcgtgtaacaccctgcactgttgggagtaatatcatctagtcttcccctggatataagaaacagtatcacagaagggttctacacctccagagattttgggagtaatatcatcctctccaaatctggatatt

SEQ ID NO: 615664 - DNA, 577 bp, Homo sapiens
ggtgtatacccactgtgatattgggagtaatttcatcctctaccccttggatgttaggagcagtatcacaaggggggtgtgcaccctctgtgatattaagaataataccattctctcctcctctggatactaggaataatatcacagggctggtgtgcaccttttgcattatttggagcaatatcaccctctccccaacttgatattagagacaatatcatggggggtggcgtgtaacaccctgcactgttgggagtaatatcatctagtcttcccctggatataagaaacagtatcacagaagggktctacacctccagagattttgggagtaatatcatcctctccaaatctggatattaagaacagtataatggggtgtggggagtaatatgttgggagtaatacaatcctaccccccacttgatattaggaacaatatcgcaaaacgtgtgtacacccactgtgatatttggagtaatatcaacatttccccacctggtatcacggggagagtgtacactccttatgatattggaagtatcattgtctctcactctcgatattaggaaaaata

SEQ ID NO: 615665 - DNA, 577 bp, Homo sapiens
ggtgtatacccactgtgatattgggagtaatttcatcctctaccccttggatgttaggagcagtatcacaaggggggtgtgcaccctctgtgatattaagaataataccattctctcctcctctggatactaggaataatatcacagggctggtgtgcaccttttgcattatttggagcaatatcaccctctccccaacttgatattagagacaatatcatggggggtggcgtgtaacaccctgcactgttgggagtaatatcatctagtcttcccctggatataagaaacagtatcacagaagggttctacacctccagagattttgggagtaatatcatcctctccaaatctggatattaagaacagtataatggggtgtggggagtaatatgttgggagtaatacaatcctmccccccacttgatattaggaacaatatcgcaaaacgtgtgtacacccactgtgatatttggagtaatatcaacatttccccacctggtatcacggggagagtgtacactccttatgatattggaagtatcattgtctctcactctcgatattaggaaaaata

SEQ ID NO: 615666 - DNA, 480 bp, Homo sapiens
gaagacatctatcccttaactagttgttatacactctatgtaaataaaaccatataatttaaatttcctcaattaattctcacagacagtacccaacctcacatcaccatgatctctgacatgtcaatgttttattgtaaatcgtgacagactatctacatatatactcatgatttacaatttsagattgtcaacccagccagtaacctacgtagcactgaattcaaataccagaaaaaggacccagattccctcaccacctagcagagctcaagtgagttacacagcctggtagggaatggggagtaattaaaaggttgtaagcaggtactactatagtcagatgagtttttgacaggttattctaaaagcactgagaaaagaaaactgttgtagtattccagataagattatgtggtctgtaaaaggacagtgtcaaggatatagaaaagaaaaatcaaggaatttcaaagggtaaac

SEQ ID NO: 615667 - DNA, 480 bp, Homo sapiens
gaagacatctatcccttaactagttgttatacactctatgtaaataaaaccatataatttaaatttcctcaattaattctcacagacagtacccaacctcacatcaccatgatctctgacatgtcaatgttttattgtaaatcgtgacagactatctacatatatactcatgatttacaatttgagattgtcaacccagccagtaacctaygtagcactgaattcaaataccagaaaaaggacccagattccctcaccacctagcagagctcaagtgagttacacagcctggtagggaatggggagtaattaaaaggttgtaagcaggtactactatagtcagatgagtttttgacaggttattctaaaagcactgagaaaagaaaactgttgtagtattccagataagattatgtggtctgtaaaaggacagtgtcaaggatatagaaaagaaaaatcaaggaatttcaaagggtaaac

SEQ ID NO: 615668 - DNA, 480 bp, Homo sapiens
gaagacatctatcccttaactagttgttatacactctatgtaaataaaaccatataatttaaatttcctcaattaattctcacagacagtacccaacctcacatcaccatgatctctgacatgtcaatgttttattgtaaatcgtgacagactatctacatatatactcatgatttacaatttgagattgtcaacccagccagtaacctacgtagcactgaattcaaataccagaaaaaggacccagattccctcaccacctagcagagctcaagtgagytacacagcctggtagggaatggggagtaattaaaaggttgtaagcaggtactactatagtcagatgagtttttgacaggttattctaaaagcactgagaaaagaaaactgttgtagtattccagataagattatgtggtctgtaaaaggacagtgtcaaggatatagaaaagaaaaatcaaggaatttcaaagggtaaac

SEQ ID NO: 615669 - DNA, 573 bp, Homo sapiens
cctgtctttcttagcatgtacttctctttttaaaacttttttttaactagttgccacagaatttgcaatatacatttacaaccaattcaagtccactttcaaataacactatcccactatcccacaaataagactacctgcttaacaaacaaaacacttaattcctcagtaacatttacaacaaattgaagtccactttcaaataacgctatcccactatcccacaaataagactacctgcttaacaaagaacacacctaattcctcaatatacatttacaaccaattcaagtccactttcagataacactatcccacttcacgggtgactacctgcttaacaaagaaaacacctgattcctctctcccatccttccattccattccttgtattattkttccttatttcacttgtgtataagcatacataatctatctgtgtgtatttattattatctacaaacttattggtcagatcaattttgaataaatacatgtttttattgtaccacaattcctccctcccatccttccattccattccttgtattagtgttactcatttaacttgtg

SEQ ID NO: 615670 - DNA, 523 bp, Homo sapiens
attgtcagctgatgtaagtgttctgagcacattaaaggtatgccaggctaagctgtgatattcagtaagttargtattaaataccatttttaacttactgtattttcaatttataatcagcttatcaagacttaaccccattgtacattgaaaagcatttgtattgcattaaacatgttatataatatttttaattgaaattactggcaacttttgaaaaaatgtaatgaaataatgtgctttgctattggttaaaatgtttttgggcagggtcagtggcttacacctgtaatcccagcactttggtaggctgaggtgggcagatcacttgaggtcaggagtttgagaccagcctggcaaacagggtgaaaccccatctctactaaaaatacaaaaattatctgagtgtggtggcatgtgcctgtaatcccagctactagggaggctgaggtgtgagaattgcttgaactaggcaagcagaggttgcagtgagccaagatcatgccactgcactccagcctgg

SEQ ID NO: 615671 - DNA, 523 bp, Homo sapiens
attgtcagctgatgtaagtgttctgagcacattaaaggtatgccaggctaagctgtgatattcagtaagttaagtattaaataccatttttaacttactgtattttcaatttataatcagcttatcaagacttaaccccattgtacattgaaaagcatttgtattgcattaaacatgttatataatatttttaattgaaattactggcaacttttgaaaaaatgtaatgaaataatgtgctttgctattggttaaaatgtttttgggcagggtcagtggcttacacctgtaatcccagcactttggtaggctgaggtgggcagatcrcttgaggtcaggagtttgagaccagcctggcaaacagggtgaaaccccatctctactaaaaatacaaaaattatctgagtgtggtggcatgtgcctgtaatcccagctactagggaggctgaggtgtgagaattgcttgaactaggcaagcagaggttgcagtgagccaagatcatgccactgcactccagcctgg

SEQ ID NO: 615672 - DNA, 523 bp, Homo sapiens
attgtcagctgatgtaagtgttctgagcacattaaaggtatgccaggctaagctgtgatattcagtaagttaagtattaaataccatttttaacttactgtattttcaatttataatcagcttatcaagacttaaccccattgtacattgaaaagcatttgtattgcattaaacatgttatataatatttttaattgaaattactggcaacttttgaaaaaatgtaatgaaataatgtgctttgctattggttaaaatgtttttgggcagggtcagtggcttacacctgtaatcccagcactttggtaggctgaggtgggcagatcacttgaggtcaggagtttgagaccarcctggcaaacagggtgaaaccccatctctactaaaaatacaaaaattatctgagtgtggtggcatgtgcctgtaatcccagctactagggaggctgaggtgtgagaattgcttgaactaggcaagcagaggttgcagtgagccaagatcatgccactgcactccagcctgg

SEQ ID NO: 615673 - DNA, 357 bp, Homo sapiens
tttgctattggttaaaatgtttttgggcagggtcagtggcttacacctgtaatcccagcactttggtaggctgaggtgggcagatcacttgaggtcaggagtttgagaccagcctggcaaacagggtgaaaccccatctctactaaaaatacaaaaatyatctgagtgtggtggcatgtgcctgtaatcccagctactagggaggctgaggtgtgagaattgcttgaactaggcaagcagaggttgcagtgagccaagatcatgccactgcactccagcctgggcaactgagtaaggttctgtcaaaaataaaaaagaaagaaagaaaagaaaaaaatgtttttagcttcaagtaac

SEQ ID NO: 615674 - DNA, 357 bp, Homo sapiens
tttgctattggttaaaatgtttttgggcagggtcagtggcttacacctgtaatcccagcactttggtaggctgaggtgggcagatcacttgaggtcaggagtttgagaccagcctggcaaacagggtgaaaccccatctctactaaaaatacaaaaattatctgagtgtggtggcatgtgcctgtaatcccagctactagggaggctgaggtgtgagaattgcttgaactaggcaagcagaggttgcagtgagccaagatcatgccactgcactccagcctgggcaactgagtaaggttctgtcaaaaataaaaaagaargaaagaaaagaaaaaaatgtttttagcttcaagtaac

SEQ ID NO: 615675 - DNA, 326 bp, Homo sapiens
aaaaaatgtttttagcttcaagtaacagaatagtcaactaattgaagaaaaaaacaaggagcaactttkaccaaatcacacaacaaatagatggtatcaatgcttagttaattcaacatgatccacttctttgtgattctcttatctttctacctatgttttcaagatggctatggcattcccagccttacaacttcatgtgacaaaattcaatggcaggaaataataagtgacggcattttgatactttaaggaaaaactttaaggattggaaaacagggatgccatatgtccagtaacatgggatagccgctcctaattaagga

SEQ ID NO: 615676 - DNA, 326 bp, Homo sapiens
aaaaaatgtttttagcttcaagtaacagaatagtcaactaattgaagaaaaaaacaaggagcaactttgaccaaatcacacaacaaatagatggtatcaatgcttagttaattcaacatgatccacttctttrtgattctcttatctttctacctatgttttcaagatggctatggcattcccagccttacaacttcatgtgacaaaattcaatggcaggaaataataagtgacggcattttgatactttaaggaaaaactttaaggattggaaaacagggatgccatatgtccagtaacatgggatagccgctcctaattaagga

SEQ ID NO: 615677 - DNA, 326 bp, Homo sapiens
aaaaaatgtttttagcttcaagtaacagaatagtcaactaattgaagaaaaaaacaaggagcaactttgaccaaatcacacaacaaatagatggtatcaatgcttagttaattcaacatgatccacttctttgtgattctcttatctttctacctatgttttcaagatggctayggcattcccagccttacaacttcatgtgacaaaattcaatggcaggaaataataagtgacggcattttgatactttaaggaaaaactttaaggattggaaaacagggatgccatatgtccagtaacatgggatagccgctcctaattaagga

SEQ ID NO: 615678 - DNA, 326 bp, Homo sapiens
aaaaaatgtttttagcttcaagtaacagaatagtcaactaattgaagaaaaaaacaaggagcaactttgaccaaatcacacaacaaatagatggtatcaatgcttagttaattcaacatgatccacttctttgtgattctcttatctttctacctatgttttcaagatggctatggcattcccagccttacaacttcatgtgacaaaatycaatggcaggaaataataagtgacggcattttgatactttaaggaaaaactttaaggattggaaaacagggatgccatatgtccagtaacatgggatagccgctcctaattaagga

SEQ ID NO: 615679 - DNA, 488 bp, Homo sapiens
tgaataacctgctttgtttaattatacaatcccaaatgtaactgcctaagtgccaagtacttttgcatggttttaatatgccatgaattttgcaagaatgaaactactatgtatatgagaaaagayggtagattttttcatttagatactcatttcagagtctcaataggaaaaatagaacacacacaaactaagataatttaacatgggtttatttccaaagagactacttacgaaaatgtcaggggagaagggtgaaggaatcacagaaatcacacgccacaataactctgggttagcagtggcaggcagagttctggggagtaaactgccctgatcacagaaggaaacactaattttcttatgaaaaagattggtcaaggagacctagcagagagggagtttaggcaataacccccaatcccatttcctccttccctttaatctcatgaacatgcatagaaggcaatgagcaagggaaccgatgg

SEQ ID NO: 615680 - DNA, 551 bp, Homo sapiens
aaaactttaaggattggaaaacagggatgccatatgtccagtaacatgggatagccgctcctaattaaggattgctgtatgtcctgaatgactttctaatgtaatgaaggtgaataacctgctttgtttaattatacaatcccaaatgtaactgcctaagtgccaagtacttttgcatggttttaatatgccatgaattttgcaagaatgaaactactatgtatatgagaaaagatggtagattttttcatttagatactcatttcagagtctcaataggaaaaayagaacacacacaaactaagataatttaacatgggtttatttccaaagagactacttacgaaaatgtcaggggagaagggtgaaggaatcacagaaatcacacgccacaataactctgggttagcagtggcaggcagagttctggggagtaaactgccctgatcacagaaggaaacactaattttcttatgaaaaagattggtcaaggagacctagcagagagggagtttaggcaataacccccaatcccatttcctccttccctt

SEQ ID NO: 615681 - DNA, 551 bp, Homo sapiens
aaaactttaaggattggaaaacagggatgccatatgtccagtaacatgggatagccgctcctaattaaggattgctgtatgtcctgaatgactttctaatgtaatgaaggtgaataacctgctttgtttaattatacaatcccaaatgtaactgcctaagtgccaagtacttttgcatggttttaatatgccatgaattttgcaagaatgaaactactatgtatatgagaaaagatggtagattttttcatttagatactcatttcagagtctcaataggaaaaatagaacacacwcaaactaagataatttaacatgggtttatttccaaagagactacttacgaaaatgtcaggggagaagggtgaaggaatcacagaaatcacacgccacaataactctgggttagcagtggcaggcagagttctggggagtaaactgccctgatcacagaaggaaacactaattttcttatgaaaaagattggtcaaggagacctagcagagagggagtttaggcaataacccccaatcccatttcctccttccctt

SEQ ID NO: 615682 - DNA, 488 bp, Homo sapiens
tgaataacctgctttgtttaattatacaatcccaaatgtaactgcctaagtgccaagtacttttgcatggttttaatatgccatgaattttgcaagaatgaaactactatgtatatgagaaaagatggtagattttttcatttagatactcatttcagagtctcaataggaaaaatagaacacacacaaactaagataatttaacatgggtttatttccaaagagactacttacgaaaatktcaggggagaagggtgaaggaatcacagaaatcacacgccacaataactctgggttagcagtggcaggcagagttctggggagtaaactgccctgatcacagaaggaaacactaattttcttatgaaaaagattggtcaaggagacctagcagagagggagtttaggcaataacccccaatcccatttcctccttccctttaatctcatgaacatgcatagaaggcaatgagcaagggaaccgatgg

SEQ ID NO: 615683 - DNA, 598 bp, Homo sapiens
gaatgactttctaatgtaatgaaggtgaataacctgctttgtttaattatacaatcccaaatgtaactgcctaagtgccaagtacttttgcatggttttaatatgccatgaattttgcaagaatgaaactactatgtatatgagaaaagatggtagattttttcatttagatactcatttcagagtctcaataggaaaaatagaacacacacaaactaagataatttaacatgggtttatttccaaagagactacttacgaaaatgtcaggggagaagggtgaaggaatcacagaaatcacacsccacaataactctgggttagcagtggcaggcagagttctggggagtaaactgccctgatcacagaaggaaacactaattttcttatgaaaaagattggtcaaggagacctagcagagagggagtttaggcaataacccccaatcccatttcctccttccctttaatctcatgaacatgcatagaaggcaatgagcaagggaaccgatggagatattcaatatggaccattccacttggacaaaagccagtaaataggggagtataacaggggacaagggccaaacagaaagtat

SEQ ID NO: 615684 - DNA, 488 bp, Homo sapiens
tgaataacctgctttgtttaattatacaatcccaaatgtaactgcctaagtgccaagtacttttgcatggttttaatatgccatgaattttgcaagaatgaaactactatgtatatgagaaaagatggtagattttttcatttagatactcatttcagagtctcaataggaaaaatagaacacacacaaactaagataatttaacatgggtttatttccaaagagactacttacgaaaatgtcaggggagaagggtgaaggaatcacagaaatcacacgccacaataactctgggttagcagtggcaggcagagttctggggagtaaactgccctgatcacasaaggaaacactaattttcttatgaaaaagattggtcaaggagacctagcagagagggagtttaggcaataacccccaatcccatttcctccttccctttaatctcatgaacatgcatagaaggcaatgagcaagggaaccgatgg

SEQ ID NO: 615685 - DNA, 598 bp, Homo sapiens
gaatgactttctaatgtaatgaaggtgaataacctgctttgtttaattatacaatcccaaatgtaactgcctaagtgccaagtacttttgcatggttttaatatgccatgaattttgcaagaatgaaactactatgtatatgagaaaagatggtagattttttcatttagatactcatttcagagtctcaataggaaaaatagaacacacacaaactaagataatttaacatgggtttatttccaaagagactacttacgaaaatgtcaggggagaagggtgaaggaatcacagaaatcacacgccacaataactctgggttagcagtggcaggcagagttctggggagtaaactgccctgatcacagaaggaaacactaattttcttatgaaaaagattggtcaaggagacctagcagagagggagtttaggcaataacccccaatcccatttcctccttccctttaatctcatgaacatgcatagaaggcaatgagcaagggaacygatggagatattcaatatggaccattccacttggacaaaagccagtaaataggggagtataacaggggacaagggccaaacagaaagtat

SEQ ID NO: 615686 - DNA, 591 bp, Homo sapiens
aaatttcattatgttctattgtatttgagatgtaaatgttctggcacaattatatacattttggattatatattgacagtaaattatttctcctttgttagcttcagcataacattaatattttcaacaacttgaatgcatacattgtgttctcactaatagtttagaatagcgaaggggtctttaaagaatttcttatgaagtagaggcattgggtcagacagagccgaaaaccattggcttagattaatcactatttatcctagggctgaagagggccaattgaagacacaaatgtccaatccctctataaccttggagatctatgaaccagagaaatagagactggwtcttaaggaggtaataagtgtgccttctatggtttataataatatgcattgtcttaacaattgaatacttaaaagttaatgccctcataatatgcaaaatttttaataagcacattggtccctgtgttcaagtagttggtaatcaaattagtgaagtatggtaagtcttttgaagagcattaaacagcagaaaatgtaagaaatttgtctctataatagtgtgggccttctgtgtttccta

SEQ ID NO: 615687 - DNA, 598 bp, Homo sapiens
attaatcactatttatcctagggctgaagagggccaattgaagacacaaatgtccaatccctctataaccttggagatctatgaaccagagaaatagagactggatcttaaggaggtaataagtgtgccttctatggtktataataatatgcattgtcttaacaattgaatacttaaaagttaatgccctcataatatgcaaaatttttaataagcacattggtccctgtgttcaagtagttggtaatcaaattagtgaagtatggtaagtcttttgaagagcattaaacagcagaaaatgtaagaaatttgtctctataatagtgtgggccttctgtgtttcctaagggcacattcatatgatctaataactgagcagagagaagcctaaaggatattttatggtttcatttttttgtttttgccaattaacatatatttctagattaaaagtcaactatcttttccttggaagtcaactataggagaagatagtgaagaggcaaggaaaatacagcagctcaacagctttaccctgaaaatatctgtattgtgtaccgctatagactacctttatcagtcagataacaatgtcaaa

SEQ ID NO: 615688 - DNA, 598 bp, Homo sapiens
attaatcactatttatcctagggctgaagagggccaattgaagacacaaatgtccaatccctctataaccttggagatctatgaaccagagaaatagagactggatcttaaggaggtaataagtgtgccttctatggtttataatartatgcattgtcttaacaattgaatacttaaaagttaatgccctcataatatgcaaaatttttaataagcacattggtccctgtgttcaagtagttggtaatcaaattagtgaagtatggtaagtcttttgaagagcattaaacagcagaaaatgtaagaaatttgtctctataatagtgtgggccttctgtgtttcctaagggcacattcatatgatctaataactgagcagagagaagcctaaaggatattttatggtttcatttttttgtttttgccaattaacatatatttctagattaaaagtcaactatcttttccttggaagtcaactataggagaagatagtgaagaggcaaggaaaatacagcagctcaacagctttaccctgaaaatatctgtattgtgtaccgctatagactacctttatcagtcagataacaatgtcaaa

SEQ ID NO: 615689 - DNA, 598 bp, Homo sapiens
attaatcactatttatcctagggctgaagagggccaattgaagacacaaatgtccaatccctctataaccttggagatctatgaaccagagaaatagagactggatcttaaggaggtaataagtgtgccttctatggtttataataatatgcattgtcttaasaattgaatacttaaaagttaatgccctcataatatgcaaaatttttaataagcacattggtccctgtgttcaagtagttggtaatcaaattagtgaagtatggtaagtcttttgaagagcattaaacagcagaaaatgtaagaaatttgtctctataatagtgtgggccttctgtgtttcctaagggcacattcatatgatctaataactgagcagagagaagcctaaaggatattttatggtttcatttttttgtttttgccaattaacatatatttctagattaaaagtcaactatcttttccttggaagtcaactataggagaagatagtgaagaggcaaggaaaatacagcagctcaacagctttaccctgaaaatatctgtattgtgtaccgctatagactacctttatcagtcagataacaatgtcaaa

SEQ ID NO: 615690 - DNA, 268 bp, Homo sapiens
ggatcttaaggaggtaataagtgtgccttctatggtttataataatatgcattgtcttaacaatygaatacttaaaagttaatgccctcataatatgcaaaatttttaataagcacattggtccctgtgttcaagtagttggtaatcaaattagtgaagtatggtaagtcttttgaagagcattaaacagcagaaaatgtaagaaatttgtctctataatagtgtgggccttctgtgtttcctaagggcacattcatatgatctaata

SEQ ID NO: 615691 - DNA, 463 bp, Homo sapiens
gtccaatccctctataaccttggagatctatgaaccagagaaatagagactggatcttaaggaggtaataagtgtgccttctatggtttataataatatgcattgtcttaacaattgaatamttaaaagttaatgccctcataatatgcaaaatttttaataagcacattggtccctgtgttcaagtagttggtaatcaaattagtgaagtatggtaagtcttttgaagagcattaaacagcagaaaatgtaagaaatttgtctctataatagtgtgggccttctgtgtttcctaagggcacattcatatgatctaataactgagcagagagaagcctaaaggatattttatggtttcatttttttgtttttgccaattaacatatatttctagattaaaagtcaactatcttttccttggaagtcaactataggagaagatagtgaagaggcaaggaaaata

SEQ ID NO: 615692 - DNA, 463 bp, Homo sapiens
gtccaatccctctataaccttggagatctatgaaccagagaaatagagactggatcttaaggaggtaataagtgtgccttctatggtttataataatatgcattgtcttaacaattgaatacttaaaagttaatgccctcataatatgcaaaatttttaataarcacattggtccctgtgttcaagtagttggtaatcaaattagtgaagtatggtaagtcttttgaagagcattaaacagcagaaaatgtaagaaatttgtctctataatagtgtgggccttctgtgtttcctaagggcacattcatatgatctaataactgagcagagagaagcctaaaggatattttatggtttcatttttttgtttttgccaattaacatatatttctagattaaaagtcaactatcttttccttggaagtcaactataggagaagatagtgaagaggcaaggaaaata

SEQ ID NO: 615693 - DNA, 268 bp, Homo sapiens
ggatcttaaggaggtaataagtgtgccttctatggtttataataatatgcattgtcttaacaattgaatacttaaaagttaatgccctcataatatgcaaaatttttaataagcacattggtccctgtgttcaagtagttggtaatcaaattagtgaagtatggtaagtcttttgaagagcattaaacagcagaraatgtaagaaatttgtctctataatagtgtgggccttctgtgtttcctaagggcacattcatatgatctaata

SEQ ID NO: 615694 - DNA, 581 bp, Homo sapiens
ctgtattgtgtaccgctatagactacctttatcagtcagataacaatgtcaaagaggcaagcttggcaccattgttcttagtgaatctctgctgccagccttttatcctaagtgctctccaaagacccatttaatggacctttctgaaattgtgctcaggatcaatatgaggctcattgatacagcagctttggaactcascatttgcttatttattaaacctgggatatttgcccgacttctatcatctgaaatcctctccatgactttcaaaattaccaacattggttccaacatcattcctagaaaacatttcagtggagtatatttatctgacatttgactgtatttatagcagtaagaatatatgatgattcctcctaaaataatcccacaattacccactttgggtcacctttgagggtcttatccttaatatcagagatctgttctatacatttgagtcttagaaataattactagcttctctctgaatttaactgaagttccttacttttattcagcctgttacccaaattacataatgtattgaaggctaaaaactgtccaaatttctgatt

SEQ ID NO: 615695 - DNA, 581 bp, Homo sapiens
ctgtattgtgtaccgctatagactacctttatcagtcagataacaatgtcaaagaggcaagcttggcaccattgttcttagtgaatctctgctgccagccttttatcctaagtgctctccaaagacccatttaatggacctttctgaaattgtgctcaggatcaatatgaggctcattgatacagcagctttggaactcagcatttgcttatttattaaacctgggatatttgcccgacttctatcatctgaaatcctctccatgactttcaaaattaccaacattggttccaacatcattcctagaaaacatttcagtggagtatatttatctgacatttgactgtatttatagcagtaagaatatatgatgattcctcctaaaataatcccacaattacccaytttgggtcacctttgagggtcttatccttaatatcagagatctgttctatacatttgagtcttagaaataattactagcttctctctgaatttaactgaagttccttacttttattcagcctgttacccaaattacataatgtattgaaggctaaaaactgtccaaatttctgatt

SEQ ID NO: 615696 - DNA, 599 bp, Homo sapiens
tatctgacatttgactgtatttatagcagtaagaatatatgatgattcctcctaaaataatcccacaattacccactttgggtcacmtttgagggtcttatccttaatatcagagatctgttctatacatttgagtcttagaaataattactagcttctctctgaatttaactgaagttccttacttttattcagcctgttacccaaattacataatgtattgaaggctaaaaactgtccaaatttctgattacctttagttaaaaatgggaatatgagtttttctttttctaacttggcaaagattatgtttttttcatgaagaaatacagacatatttaaacactcaggatctgagaatttgaaatgcatgaaacttagcaggtggtctttaagtagttttcatttctaaattttagtacatagcattgaatgctacagaagaaaagacaatgagggattactcataaacattgcctttatgatatccttccaaagaaaaccaagtgtccctgtgcttggactcataaagcagaaatgcttaccttgcttttatgtcactaacaaacaattgtgcctagtcattgaattctaatgca

SEQ ID NO: 615697 - DNA, 599 bp, Homo sapiens
tatctgacatttgactgtatttatagcagtaagaatatatgatgattcctcctaaaataatcccacaattacccactttgggtcacctttgagggtcttatycttaatatcagagatctgttctatacatttgagtcttagaaataattactagcttctctctgaatttaactgaagttccttacttttattcagcctgttacccaaattacataatgtattgaaggctaaaaactgtccaaatttctgattacctttagttaaaaatgggaatatgagtttttctttttctaacttggcaaagattatgtttttttcatgaagaaatacagacatatttaaacactcaggatctgagaatttgaaatgcatgaaacttagcaggtggtctttaagtagttttcatttctaaattttagtacatagcattgaatgctacagaagaaaagacaatgagggattactcataaacattgcctttatgatatccttccaaagaaaaccaagtgtccctgtgcttggactcataaagcagaaatgcttaccttgcttttatgtcactaacaaacaattgtgcctagtcattgaattctaatgca

SEQ ID NO: 615698 - DNA, 581 bp, Homo sapiens
ctgtattgtgtaccgctatagactacctttatcagtcagataacaatgtcaaagaggcaagcttggcaccattgttcttagtgaatctctgctgccagccttttatcctaagtgctctccaaagacccatttaatggacctttctgaaattgtgctcaggatcaatatgaggctcattgatacagcagctttggaactcagcatttgcttatttattaaacctgggatatttgcccgacttctatcatctgaaatcctctccatgactttcaaaattaccaacattggttccaacatcattcctagaaaacatttcagtggagtatatttatctgacatttgactgtatttatagcagtaagaatatatgatgattcctcctaaaataatcccacaattacccactttgggtcacctttgagggtcttatccttaatatcagagatctgttctatacatttgagtcttagaaataattactagcttctctctgaatttaactgaagttccttacttttattcagcctgttacccaaattacataatgtattgaargctaaaaactgtccaaatttctgatt

SEQ ID NO: 615699 - DNA, 599 bp, Homo sapiens
tatctgacatttgactgtatttatagcagtaagaatatatgatgattcctcctaaaataatcccacaattacccactttgggtcacctttgagggtcttatccttaatatcagagatctgttctatacatttgagtcttagaaataattactagcttctctctgaatttaactgaagttccttacttttattcagcctgttacccaaattacataatgtattgaaggctaaaaactgtccaaatttctgattacctttagttaaaaatgggaatatgagtttttctttttctaacttggcaaagattatgtttttttcatgaagaaatacagacatatttaaacactcaggatctgagaatttgaaatrcatgaaacttagcaggtggtctttaagtagttttcatttctaaattttagtacatagcattgaatgctacagaagaaaagacaatgagggattactcataaacattgcctttatgatatccttccaaagaaaaccaagtgtccctgtgcttggactcataaagcagaaatgcttaccttgcttttatgtcactaacaaacaattgtgcctagtcattgaattctaatgca

SEQ ID NO: 615700 - DNA, 620 bp, Homo sapiens
ggactcataaagcagaaatgcttaccttgcttttatgtcactaacaaacaattgtgcctagtcattgaattctaatgcatttaagccatcttgagagtagagcccytagggaaaactacaaatggaaaattcattgatttttgattttgctttcctatggatcaaatttaatactttcttgtaaatctctccctttgcagatcatatgtgataaatagttatccaactttctagatgtccacccagagctgcttccatatgaagaggtggaaacggattctgtgcatgatactggttaggattgggaactgtttttttttaaaggagatttttaaaatttgttttccttgtacacatagccataatattgtgttgctaactgccctctgggaataaagtcatgtcaatcacaaatatattgcctaaagtgggaggcttattactctgctgtgaattccatctcctattatgttttaaagatgctacaaacttgagacattactatgtagacgacattcccagcaaatccccaaacaacacttaatgagatttcaaataccaggatcatgcaacagtaaaagatataaggaaataaagaaaagcacagtatatttgtagaa

SEQ ID NO: 615701 - DNA, 620 bp, Homo sapiens
ggactcataaagcagaaatgcttaccttgcttttatgtcactaacaaacaattgtgcctagtcattgaattctaatgcatttaagccatcttgagagtagagcccttagggaaaactacaaatggaaaattcattgatttttgattttgctttcctatggatcaaatttaatactttcttgtaaatctctccctttgcagatcatatgtgataaatagttatccaactttctagatgtccacccagagctgcttccatatgaagaggtggaaacggattctgtgcatgatactggttaggattgggaactgtttttttttaaaggagatttttaaaatttgttttccttgtacacatagccataatattgtgttgctaactgccctctgggaataaagtcatgtcaatcacaaatatattgcctaaagtgggaggcttattactctgctgtgaattccatctcctattatgttttaaagatgctacaaacttgagacattactatgtagaygacattcccagcaaatccccaaacaacacttaatgagatttcaaataccaggatcatgcaacagtaaaagatataaggaaataaagaaaagcacagtatatttgtagaa

SEQ ID NO: 615702 - DNA, 388 bp, Homo sapiens
gcacagtatatttgtagaaggcattaaaacacaaattttataattatgaatgcatataataaggaacaagttttattctaaatagyaattaaatcagaactatgatatagggaataaaagtgaatattaaaccattgtaccgacaataacagagccctttttctgctgcgtgatggaatttagtgtttactaaggaagaaaaaaagcaagatatcttaaatttggtactttccaacaaatttaagaaatgtgtacacacttgaagagacttaagaagtctctgactaaaacactagaaaagaaaagcagcgaaaagccaaataactattactcaacaataacaacatttgttactattatattaatattaaacacactattaaacaac

SEQ ID NO: 615703 - DNA, 525 bp, Homo sapiens
agtgaatattaaaccattgtaccgacaataacagagccctttttctgctgygtgatggaatttagtgtttactaaggaagaaaaaaagcaagatatcttaaatttggtactttccaacaaatttaagaaatgtgtacacacttgaagagacttaagaagtctctgactaaaacactagaaaagaaaagcagcgaaaagccaaataactattactcaacaataacaacatttgttactattatattaatattaaacacactattaaacaacaacatttcagttactcactgagcccaaagtcatttttcatgaaccattcacaacactgataacctattgaaaaatgattgaaaacaaaaaagcttattgctttccaagtccttttaaagccttctcttgtgtcatataatccttataacaaatctatggagtatatactgactttacctctgtacagaaaagaaaactgagtcatattcagaataagttgcaaagttccccagataatcagtgtcataggtgaaa

SEQ ID NO: 615704 - DNA, 388 bp, Homo sapiens
gcacagtatatttgtagaaggcattaaaacacaaattttataattatgaatgcatataataaggaacaagttttattctaaatagtaattaaatcagaactatgatatagggaataaaagtgaatattaaaccattgtaccgacaataacagagccctttttctgctgcgtgatggaatttagtgtttactaaggaagaaaaaaagcaagatatcttawatttggtactttccaacaaatttaagaaatgtgtacacacttgaagagacttaagaagtctctgactaaaacactagaaaagaaaagcagcgaaaagccaaataactattactcaacaataacaacatttgttactattatattaatattaaacacactattaaacaac

SEQ ID NO: 615705 - DNA, 525 bp, Homo sapiens
agtgaatattaaaccattgtaccgacaataacagagccctttttctgctgcgtgatggaatttagtgtttactaaggaagaaaaaaagcaagatatcttaaatttggtactttccaacaaatttaagaaatgtgtacacacttgargagacttaagaagtctctgactaaaacactagaaaagaaaagcagcgaaaagccaaataactattactcaacaataacaacatttgttactattatattaatattaaacacactattaaacaacaacatttcagttactcactgagcccaaagtcatttttcatgaaccattcacaacactgataacctattgaaaaatgattgaaaacaaaaaagcttattgctttccaagtccttttaaagccttctcttgtgtcatataatccttataacaaatctatggagtatatactgactttacctctgtacagaaaagaaaactgagtcatattcagaataagttgcaaagttccccagataatcagtgtcataggtgaaa

SEQ ID NO: 615706 - DNA, 388 bp, Homo sapiens
gcacagtatatttgtagaaggcattaaaacacaaattttataattatgaatgcatataataaggaacaagttttattctaaatagtaattaaatcagaactatgatatagggaataaaagtgaatattaaaccattgtaccgacaataacagagccctttttctgctgcgtgatggaatttagtgtttactaaggaagaaaaaaagcaagatatcttaaatttggtactttccaacaaatttaagaaatgtgtacacacttgaagagacttaagaagtctctgactaaaacactagaaaagaaaagcagygaaaagccaaataactattactcaacaataacaacatttgttactattatattaatattaaacacactattaaacaac

SEQ ID NO: 615707 - DNA, 391 bp, Homo sapiens
caagtccttttaaagccttctcttgtgtcatataatccttataacaaatctatggagtatatactractttacctctgtacagaaaagaaaactgagtcatattcagaataagttgcaaagttccccagataatcagtgtcataggtgaaatttgatgtcacagtgtactcaagtgtaatttagggaagcagtacaaatgacggttgaaagcacaggttctggggtaaacagcctgaagtcaaaatctagttcatatcctcagtggctgtgtgatcttgggaaatttcccttaactctctgtgtcttggttttatagtttcatccatttttgcctctcatatgagctggtgagcattacactagtttatgcttctaggacactgaaaacag

SEQ ID NO: 615708 - DNA, 551 bp, Homo sapiens
ataactattactcaacaataacaacatttgttactattatattaatattaaacacactattaaacaacaacatttcagttactcactgagcccaaagtcatttttcatgaaccattcacaacactgataacctattgaaaaatgattgaaaacaaaaaagcttattgctttccaagtccttttaaagccttctcttgtgtcatataatccttataacaaatctatggagtatatactgactttacctctgtacagaaaagaaaactgagtcatattcagaataagttgcaaagttccccagataatcagtgtcataggtgaaatttgatgtcacagtgtactcaagtgtaatttagggaagcagtacaaatgacggwtgaaagcacaggttctggggtaaacagcctgaagtcaaaatctagttcatatcctcagtggctgtgtgatcttgggaaatttcccttaactctctgtgtcttggttttatagtttcatccatttttgcctctcatatgagctggtgagcattacactagtttatgcttctagga

SEQ ID NO: 615709 - DNA, 391 bp, Homo sapiens
caagtccttttaaagccttctcttgtgtcatataatccttataacaaatctatggagtatatactgactttacctctgtacagaaaagaaaactgagtcatattcagaataagttgcaaagttccccagataatcagtgtcataggtgaaatttgatgtcacagtgtactcaagtgtaatttagggaagcagtacaaatgacggttgaaagcacaggttctggggtaaacagcctgaagtcaaaatctagttcatakcctcagtggctgtgtgatcttgggaaatttcccttaactctctgtgtcttggttttatagtttcatccatttttgcctctcatatgagctggtgagcattacactagtttatgcttctaggacactgaaaacag

SEQ ID NO: 615710 - DNA, 391 bp, Homo sapiens
caagtccttttaaagccttctcttgtgtcatataatccttataacaaatctatggagtatatactgactttacctctgtacagaaaagaaaactgagtcatattcagaataagttgcaaagttccccagataatcagtgtcataggtgaaatttgatgtcacagtgtactcaagtgtaatttagggaagcagtacaaatgacggttgaaagcacaggttctggggtaaacagcctgaagtcaaaatctagttcatatcctyagtggctgtgtgatcttgggaaatttcccttaactctctgtgtcttggttttatagtttcatccatttttgcctctcatatgagctggtgagcattacactagtttatgcttctaggacactgaaaacag

SEQ ID NO: 615711 - DNA, 517 bp, Homo sapiens
attcagaataagttgcaaagttccccagataatcagtgtcataggtgaaatttgatgtcacagtgtactcaagtgtaatttagggaagcagtacaaatgacggttgaaagcacaggttctggggtaaacagcctgaagtcaaaatctagttcatatcctcagtggctgtgtgatcttgggaaatttcccttaactctctgtgtcttggttttatagtttcatccatttttgcctctcatatgagctggtgagcattacactagtttatgcttctaggacactgaaaacagtacctggctcttgataaatattaacaattttgtttcattktcttcaccttgagtatttcatggccagatggaaatcaatgtcaatatgaaaaaatgttcataattcagcaggaagaaatacaaaaccatataaaccactttgttttactggcaagtgaattgggaagctatgttaaattgagaaggggaagggaaaccctctaagagcatcgattaatcaatgaccg

SEQ ID NO: 615712 - DNA, 595 bp, Homo sapiens
ccatataaaccactttgttttactggcaagtgaattgggaagctatgttaaattgagaaggggaagggaaascctctaagagcatcgattaatcaatgaccgaaagctgatgagacttttctggaatttttttttggagactctgatacttaaaattttgacaaaataaggagatgaactgagtagtgtggaacagacattttgtgaagtcagcagagaaaggagagacaaatatggtaaggggaaaatggtatgaagtaataatatctatgaagtgctttctaaagtataacacatgtaagttgtgttaaatgtaaactatcatgattatatcattactgtctgactgatacaactatatccacctcagttagccacataagatcaattttcctataccttagagaataccagtaacctccagttcagaaacagcataaatatctatccacagctgagcagacacatacagctagctaccagatgaaatgggctatatcttcaaatactattgttttctgttttttaattgtggcaaaacacactcaacaatttgcatcttaaccattgttaagtatacaattcggtgtcacta

SEQ ID NO: 615713 - DNA, 595 bp, Homo sapiens
ccatataaaccactttgttttactggcaagtgaattgggaagctatgttaaattgagaaggggaagggaaaccctctaagrgcatcgattaatcaatgaccgaaagctgatgagacttttctggaatttttttttggagactctgatacttaaaattttgacaaaataaggagatgaactgagtagtgtggaacagacattttgtgaagtcagcagagaaaggagagacaaatatggtaaggggaaaatggtatgaagtaataatatctatgaagtgctttctaaagtataacacatgtaagttgtgttaaatgtaaactatcatgattatatcattactgtctgactgatacaactatatccacctcagttagccacataagatcaattttcctataccttagagaataccagtaacctccagttcagaaacagcataaatatctatccacagctgagcagacacatacagctagctaccagatgaaatgggctatatcttcaaatactattgttttctgttttttaattgtggcaaaacacactcaacaatttgcatcttaaccattgttaagtatacaattcggtgtcacta

SEQ ID NO: 615714 - DNA, 595 bp, Homo sapiens
ccatataaaccactttgttttactggcaagtgaattgggaagctatgttaaattgagaaggggaagggaaaccctctaagagcatcgattaatcaatgaccgaaagctgatgagacttktctggaatttttttttggagactctgatacttaaaattttgacaaaataaggagatgaactgagtagtgtggaacagacattttgtgaagtcagcagagaaaggagagacaaatatggtaaggggaaaatggtatgaagtaataatatctatgaagtgctttctaaagtataacacatgtaagttgtgttaaatgtaaactatcatgattatatcattactgtctgactgatacaactatatccacctcagttagccacataagatcaattttcctataccttagagaataccagtaacctccagttcagaaacagcataaatatctatccacagctgagcagacacatacagctagctaccagatgaaatgggctatatcttcaaatactattgttttctgttttttaattgtggcaaaacacactcaacaatttgcatcttaaccattgttaagtatacaattcggtgtcacta

SEQ ID NO: 615715 - DNA, 487 bp, Homo sapiens
taactatttatcttttattacattctagacctattatttctttctggcacaaaaatatcttctttgtagattatggcattwacctctatctccacaccattttggtctctcatccacagatcatcagcctcttgcttagtcttccatttaatgacaatttctatttagtatacaacagtccttccccctgcaatgcaatttcttcactctttaaagctctgagtctggctactggcctctgttatgtactcatccctagagccaagtcttcaaatatttctcagaacttcttcacatctaaaaatctaggattaatttattgctctctgattatattcttctggtatttcaagtatcctgtataacttcttcatctgcccttgcttttcttctacatcaagatgtcaagttcatggacttcccaattaatcattttaaaaatgtatttcaagcctttatgagtcactaaaatatacatatgttctca

SEQ ID NO: 615716 - DNA, 487 bp, Homo sapiens
taactatttatcttttattacattctagacctattatttctttctggcacaaaaatatcttctttgtagattatggcattaacctctatctccacaccattttggtctctcatccacagatcatcagcctcttgcttagtcttccatttaatgacaatttctatttagtatacaacagtccttccccctgcaatgcaatttcttcactctttaaagctctgagtctggctactggyctctgttatgtactcatccctagagccaagtcttcaaatatttctcagaacttcttcacatctaaaaatctaggattaatttattgctctctgattatattcttctggtatttcaagtatcctgtataacttcttcatctgcccttgcttttcttctacatcaagatgtcaagttcatggacttcccaattaatcattttaaaaatgtatttcaagcctttatgagtcactaaaatatacatatgttctca

SEQ ID NO: 615717 - DNA, 637 bp, Homo sapiens
cctacaatttgtatgtgagaatagttcctgtgtcaggcattatggacataagaggaaataaattctagtccctgcctacaaggagytaattcccagcctaagacagattgcaagccaataatatgcagacttgtaagtctaaggaaactgatcaggatgtacctaattcgagctgggaatatcagaagaaaaactttttgaaagtcatgagacatgagctgtgcctaaaagagtaaaaaatagagagagaaataagaagaaataaattaaggaatgagatgggtataatagtagaaaaaggaaatctctttagataaaacagggtatgagagtatataggaggcttattaactcagtgtggttggagaaaacaggttgaaaggagaaataggggagaaagttacaaagggaatcaaacgtgttagtagttgagggaaaagcaaatattgaatacgacccatagatcttggataacccagtgtttggtagtagcttacataaaaagttgtgacaaaataaccagagatatgcggagaaaataataactgagtgttatatttcctctcagtagaaaccttaaaaaaaaaatgtaatcacacactgatcttttaactgacctccacttatcttgctgcct

SEQ ID NO: 615718 - DNA, 401 bp, Homo sapiens
taagtctaaggaaactgatcaggatgtacctaattcgagctgggaatatcagaagaaaaactttttgaaagtcatgagacatgagctgtgcctaaaagagtaaaaaatagagagagaaataagaagaaataaattaaggaatgagrtgggtataatagtagaaaaaggaaatctctttagataaaacagggtatgagagtatataggaggcttattaactcagtgtggttggagaaaacaggttgaaaggagaaataggggagaaagttacaaagggaatcaaacgtgttagtagttgagggaaaagcaaatattgaatacgacccatagatcttggataacccagtgtttggtagtagcttacataaaaagttgtgacaaaataaccagagatatgcgga

SEQ ID NO: 615719 - DNA, 591 bp, Homo sapiens
gacatgagctgtgcctaaaagagtaaaaaatagagagagaaataagaagaaataaattaaggaatgagatgggtataatagkagaaaaaggaaatctctttagataaaacagggtatgagagtatataggaggcttattaactcagtgtggttggagaaaacaggttgaaaggagaaataggggagaaagttacaaagggaatcaaacgtgttagtagttgagggaaaagcaaatattgaatacgacccatagatcttggataacccagtgtttggtagtagcttacataaaaagttgtgacaaaataaccagagatatgcggagaaaataataactgagtgttatatttcctctcagtagaaaccttaaaaaaaaaatgtaatcacacactgatcttttaactgacctccacttatcttgctgcctggattggcatacatattcctctgcctgaaaaattgctcaatacttttgaaaggttgtttctcactgttacacccaggcatttctgctaacaccagctgagttgtaaggggccctccaggagacctaggttgttctccttatcacatacattattttcatttatc

SEQ ID NO: 615720 - DNA, 591 bp, Homo sapiens
gacatgagctgtgcctaaaagagtaaaaaatagagagagaaataagaagaaataaattaaggaatgagatgggtataatagtagaaaaaggaaatctctttagataaaacagggtatgagagtatataggaggcttattaactcagtgtggttggrgaaaacaggttgaaaggagaaataggggagaaagttacaaagggaatcaaacgtgttagtagttgagggaaaagcaaatattgaatacgacccatagatcttggataacccagtgtttggtagtagcttacataaaaagttgtgacaaaataaccagagatatgcggagaaaataataactgagtgttatatttcctctcagtagaaaccttaaaaaaaaaatgtaatcacacactgatcttttaactgacctccacttatcttgctgcctggattggcatacatattcctctgcctgaaaaattgctcaatacttttgaaaggttgtttctcactgttacacccaggcatttctgctaacaccagctgagttgtaaggggccctccaggagacctaggttgttctccttatcacatacattattttcatttatc

SEQ ID NO: 615721 - DNA, 591 bp, Homo sapiens
gacatgagctgtgcctaaaagagtaaaaaatagagagagaaataagaagaaataaattaaggaatgagatgggtataatagtagaaaaaggaaatctctttagataaaacagggtatgagagtatataggaggcttattaactcagtgtggttggagaaaacaggttsaaaggagaaataggggagaaagttacaaagggaatcaaacgtgttagtagttgagggaaaagcaaatattgaatacgacccatagatcttggataacccagtgtttggtagtagcttacataaaaagttgtgacaaaataaccagagatatgcggagaaaataataactgagtgttatatttcctctcagtagaaaccttaaaaaaaaaatgtaatcacacactgatcttttaactgacctccacttatcttgctgcctggattggcatacatattcctctgcctgaaaaattgctcaatacttttgaaaggttgtttctcactgttacacccaggcatttctgctaacaccagctgagttgtaaggggccctccaggagacctaggttgttctccttatcacatacattattttcatttatc

SEQ ID NO: 615722 - DNA, 401 bp, Homo sapiens
taagtctaaggaaactgatcaggatgtacctaattcgagctgggaatatcagaagaaaaactttttgaaagtcatgagacatgagctgtgcctaaaagagtaaaaaatagagagagaaataagaagaaataaattaaggaatgagatgggtataatagtagaaaaaggaaatctctttagataaaacagggtatgagagtatataggaggcttattaactcagtgtggttggagaaaacaggttgaaaggagaaataggggagaaagttmcaaagggaatcaaacgtgttagtagttgagggaaaagcaaatattgaatacgacccatagatcttggataacccagtgtttggtagtagcttacataaaaagttgtgacaaaataaccagagatatgcgga

SEQ ID NO: 615723 - DNA, 401 bp, Homo sapiens
taagtctaaggaaactgatcaggatgtacctaattcgagctgggaatatcagaagaaaaactttttgaaagtcatgagacatgagctgtgcctaaaagagtaaaaaatagagagagaaataagaagaaataaattaaggaatgagatgggtataatagtagaaaaaggaaatctctttagataaaacagggtatgagagtatataggaggcttattaactcagtgtggttggagaaaacaggttgaaaggagaaataggggagaaagttacaaagggaatcaaacgtgttartagttgagggaaaagcaaatattgaatacgacccatagatcttggataacccagtgtttggtagtagcttacataaaaagttgtgacaaaataaccagagatatgcgga

SEQ ID NO: 615724 - DNA, 401 bp, Homo sapiens
taagtctaaggaaactgatcaggatgtacctaattcgagctgggaatatcagaagaaaaactttttgaaagtcatgagacatgagctgtgcctaaaagagtaaaaaatagagagagaaataagaagaaataaattaaggaatgagatgggtataatagtagaaaaaggaaatctctttagataaaacagggtatgagagtatataggaggcttattaactcagtgtggttggagaaaacaggttgaaaggagaaataggggagaaagttacaaagggaatcaaacgtgttagtagttgagggaaaagsaaatattgaatacgacccatagatcttggataacccagtgtttggtagtagcttacataaaaagttgtgacaaaataaccagagatatgcgga

SEQ ID NO: 615725 - DNA, 591 bp, Homo sapiens
gacatgagctgtgcctaaaagagtaaaaaatagagagagaaataagaagaaataaattaaggaatgagatgggtataatagtagaaaaaggaaatctctttagataaaacagggtatgagagtatataggaggcttattaactcagtgtggttggagaaaacaggttgaaaggagaaataggggagaaagttacaaagggaatcaaacgtgttagtagttgagggaaaagcaaatattgaatacgacccatagatcttggataacccagtgtttggtagtagcttacataaaaagttgtgacaaaataaccagagatatgcggagaaaataataactgagtgttatatttcctctcagtagaaaccttaaaaaaaaaatgtaatcacacactgatcttttaactgacctccacttatctkgctgcctggattggcatacatattcctctgcctgaaaaattgctcaatacttttgaaaggttgtttctcactgttacacccaggcatttctgctaacaccagctgagttgtaaggggccctccaggagacctaggttgttctccttatcacatacattattttcatttatc

SEQ ID NO: 615726 - DNA, 576 bp, Homo sapiens
aaaactttttgaaagtcatgagacatgagctgtgcctaaaagagtaaaaaatagagagagaaataagaagaaataaattaaggaatgagatgggtataatagtagaaaaaggaaatctctttagataaaacagggtatgagagtatataggaggcttattaactcagtgtggttggagaaaacaggttgaaaggagaaataggggagaaagttacaaagggaatcaaacgtgttagtagttgagggaaaagcaaatattgaatacgacccatagatcttggataacccagtgtttggtagtagcttacataaaaagttgtgacaaaataaccagagatatgcggagaaaataataactgagtgttatatttcctctcagtagaaaccttaaaaaaaaaatgtaatcacacactgatcttttaactgacctccacttatcttgctgcctggattggcatacatattcctctgcctgaaaaattgctcaatacttttgaaaggttgtttctcacygttacacccaggcatttctgctaacaccagctgagttgtaaggggccctccaggagacctagg

SEQ ID NO: 615727 - DNA, 598 bp, Homo sapiens
atatttcctctcagtagaaaccttaaaaaaaaaatgtaatcacacactgatcttttaactgacctccacttatcttgctgcctggattggcatacatattcctctgcctgaaaaattgctcaatacttttgaaaggttgtttctcactgttacacccaggcatttctgctaacaccagctgagttgtaaggggccctscaggagacctaggttgttctccttatcacatacattattttcatttatcaatttacccagaacatctaatgaaatattatggacaccaataacatgaatacaaatatagctatagaccctaaaaagtaaattgatgtctcttgaaaggctgtcatgtcttagatgctaaatttggagtatgtgtttgtaataaataaatagcttgctttaataattctgatttatgaatgtaatataggggagcagcttttatttcgcccttaatcttaaaaaacaattagctgggtgtggtggtgggcacctgtagtcccagctactcaggaggctgaagcaggaggatggtgtgcacctgggaggcggagcttgcagtaagccaaaattgtgccactgcactccagcc

SEQ ID NO: 615728 - DNA, 598 bp, Homo sapiens
atatttcctctcagtagaaaccttaaaaaaaaaatgtaatcacacactgatcttttaactgacctccacttatcttgctgcctggattggcatacatattcctctgcctgaaaaattgctcaatacttttgaaaggttgtttctcactgttacacccaggcatttctgctaacaccagctgagttgtaaggggccctccaggagacctaggttgttctccttatcacatacattattttcatttatcaatttacccagaacatctaatgaaatattayggacaccaataacatgaatacaaatatagctatagaccctaaaaagtaaattgatgtctcttgaaaggctgtcatgtcttagatgctaaatttggagtatgtgtttgtaataaataaatagcttgctttaataattctgatttatgaatgtaatataggggagcagcttttatttcgcccttaatcttaaaaaacaattagctgggtgtggtggtgggcacctgtagtcccagctactcaggaggctgaagcaggaggatggtgtgcacctgggaggcggagcttgcagtaagccaaaattgtgccactgcactccagcc

SEQ ID NO: 615729 - DNA, 594 bp, Homo sapiens
tgagtgaccctgctttgtaagttttacatcatatatcccctgtgttagaccaagagcttgtaaaagccagaagacatacacyatttatagttcaattagagatgttcactgataaaactgattcttccatctgagggtggtatttgtagttacagtaatgtagatcacaatctaagttatgttctataaactgtgtcactgacatctcaatctacagctaactttgattttttaaaagcagaggagtgggttgtataggtttagaaatacatccatcaagctagttaagtgagatggattcaagccttcaactcactggaatatttaccaaattgactattcattagctaaaggagccatataaacaaggtactttttaaaattcaaaattatgtaaggttttatttcctttttatgttgttatgaattggattgtagaggttataaggtaaaataagattacttttacagtaaaacatacaacacattgtcgcaagagggcagcctttgaacacgaattgcttctcaggcattccttgaaattttgagggttactttaattaacacaacaaaataataaaacactacagagga

SEQ ID NO: 615730 - DNA, 634 bp, Homo sapiens
catccatcaagctagttaagtgagatggattcaagccttcaactcactggaatatttaccaaattgactattcattagctaaaggagccatataaacaaggtactttttaaaattcaaaattatgtaaggttttatttcctttttatgttgttatgaattggattgtagaggttataaggtaaaataagattacttttacagtaaaacatacaacacattgtcgcaagagggcagcctttgaacacgaattgcttctcaggcattccttgaaattttgagrgttactttaattaacacaacaaaataataaaacactacagaggatctaagaagatactttgacttatgcatattgttacttttttattactgctagtggaagatgtaatcgacaagaaaggtaagggctgaatttgttttatgtaaaaagacaaatttctttgggttttagctttcaaacatcaagatagtaggtcaatgtctaaatgagtgtatcaaagttctcacaatggcacatgtaaatccacctcttgtctacccaaaactctaaccaagcaaaggcaagttggaagaatcagacaaatgtaagtccctaggatacataaatgccacgggattttatgtttttaactt

SEQ ID NO: 615731 - DNA, 505 bp, Homo sapiens
actactggcagctgctggcagacagcagcaaaggcccaaatcctctgtgtgatttcaagacccgtatctggttttcagccatatttccttctccttctcacagctgagtccactcctcctccctcaccacctgtaggctatgctttccagcctgtgtccaggattagtcctgatgtaaggcacgtggggtttaaggagctctctcttcagtcttatttccacaccatctctgacagatatattccagttgtaatcatggggctacctcctcttgtttccagtcccawgctcgttttctctatcacattctaccttgtaataacctaaatcttctggtgggcaaccttcttcctcaatcaaatttgtgtttatgattgtgttggggattggcatagtaatccaggtactgctactgccttgaaagcggagaatgcatccttctgtctggatatcttgagtttctggattgtaaaccttattagggcccatttttcctagaattgga

SEQ ID NO: 615732 - DNA, 505 bp, Homo sapiens
actactggcagctgctggcagacagcagcaaaggcccaaatcctctgtgtgatttcaagacccgtatctggttttcagccatatttccttctccttctcacagctgagtccactcctcctccctcaccacctgtaggctatgctttccagcctgtgtccaggattagtcctgatgtaaggcacgtggggtttaaggagctctctcttcagtcttatttccacaccatctctgacagatatattccagttgtaatcatggggctacctcctcttgtttccagtcccatkctcgttttctctatcacattctaccttgtaataacctaaatcttctggtgggcaaccttcttcctcaatcaaatttgtgtttatgattgtgttggggattggcatagtaatccaggtactgctactgccttgaaagcggagaatgcatccttctgtctggatatcttgagtttctggattgtaaaccttattagggcccatttttcctagaattgga

SEQ ID NO: 615733 - DNA, 505 bp, Homo sapiens
actactggcagctgctggcagacagcagcaaaggcccaaatcctctgtgtgatttcaagacccgtatctggttttcagccatatttccttctccttctcacagctgagtccactcctcctccctcaccacctgtaggctatgctttccagcctgtgtccaggattagtcctgatgtaaggcacgtggggtttaaggagctctctcttcagtcttatttccacaccatctctgacagatatattccagttgtaatcatggggctacctcctcttgtttccagtcccatgctcgttttctctatcacattctaccttgtaataacctaaatcttctggtgggcaascttcttcctcaatcaaatttgtgtttatgattgtgttggggattggcatagtaatccaggtactgctactgccttgaaagcggagaatgcatccttctgtctggatatcttgagtttctggattgtaaaccttattagggcccatttttcctagaattgga

SEQ ID NO: 615734 - DNA, 505 bp, Homo sapiens
actactggcagctgctggcagacagcagcaaaggcccaaatcctctgtgtgatttcaagacccgtatctggttttcagccatatttccttctccttctcacagctgagtccactcctcctccctcaccacctgtaggctatgctttccagcctgtgtccaggattagtcctgatgtaaggcacgtggggtttaaggagctctctcttcagtcttatttccacaccatctctgacagatatattccagttgtaatcatggggctacctcctcttgtttccagtcccatgctcgttttctctatcacattctaccttgtaataacctaaatcttctggtgggcaaccttcttcctcaatcaaatttgtgtttatgattgtgttggggattggcatagtaatccaggtactgctactgccttgaaagcggagamtgcatccttctgtctggatatcttgagtttctggattgtaaaccttattagggcccatttttcctagaattgga

SEQ ID NO: 615735 - DNA, 230 bp, Homo sapiens
ctacttcagtgttcagaaacattggagttataaatagaaagaggaagagtgacataacctaatggacaattatttctgatatgccagcggtcaacacattcataagcccatgggtggttgatccagggaccacacagcgggcctgacagaytctgaaagttaaggctttggtttactggtaacagagacaggttaaagtacatgtcttcagtcttgagtagagtgataat

SEQ ID NO: 615736 - DNA, 444 bp, Homo sapiens
tctaatttttaactttcaaaagattagatacatttaccctcytctgaattttaattcctgatggaaagattgtgaaatctcaagaggataatgaatcagcttctgattatattctggaattgctatttgatcacacatccaagaatgcgtattcactttcctttacattacacacatgcataataccatgctgagtgatgctggaaaagtgagtcttcagtaatgccctcatgaaatacagtctcactacactgaagtattttctttttaaccctttctttcttttctgctgtgaatatgtgccttctaagaggtgaacaacggaaaaaactgaaaaagatacttcatctaattcagtaactagtttttgtatcttctaaaaatttttatctccagaaagctctaattttcattcctttacaagctttatttctctctcctttc

SEQ ID NO: 615737 - DNA, 398 bp, Homo sapiens
gaatgcgtattcactttcctttacattacacacatgcataataccatgctgagtgatgctggaaaagtgagtcttcagtaatgccctcatgaaatacagtctcactacactgaagtattttctttttaamcctttctttcttttctgctgtgaatatgtgccttctaagaggtgaacaacggaaaaaactgaaaaagatacttcatctaattcagtaactagtttttgtatcttctaaaaatttttatctccagaaagctctaattttcattcctttacaagctttatttctctctcctttccaacaccagactttgctctgtttgttttctatatcttttttagagatgcctacaatagaaaaaatctatgacatattcaatacatctgaaaagttt

SEQ ID NO: 615738 - DNA, 398 bp, Homo sapiens
gaatgcgtattcactttcctttacattacacacatgcataataccatgctgagtgatgctggaaaagtgagtcttcagtaatgccctcatgaaatacagtctcactacactgaagtattttctttttaaccytttctttcttttctgctgtgaatatgtgccttctaagaggtgaacaacggaaaaaactgaaaaagatacttcatctaattcagtaactagtttttgtatcttctaaaaatttttatctccagaaagctctaattttcattcctttacaagctttatttctctctcctttccaacaccagactttgctctgtttgttttctatatcttttttagagatgcctacaatagaaaaaatctatgacatattcaatacatctgaaaagttt

SEQ ID NO: 615739 - DNA, 397 bp, Homo sapiens
gcaggttcttaaatagttgttttgttcaacgtcctttgttataatgttgattagaggaaaaaaaatgattcactgtctgtgtagtttgctcattctccccatgtctgccttgttttttctgggtactctggttacctctcacttcctaacgatctgcacattaggtgaattttggcttctctgaagcattccattgtgaacgtgtgatatgtatgcacgtgtgtgtgtgtgagcgagtgtgccctgtgatgggatggcatcctgtccagggtggttcttgccttgtaccatgagctgcagggataggatccagccgcttactaccctgaactgaaataacwgggcggataattatcttatttgttttaattaatctttttttaactgcatgtgtagc

SEQ ID NO: 615740 - DNA, 568 bp, Homo sapiens
cttaatagtaaagatggatagctttgacaataagatcagaaacataataatatcattcttactacactgattcaacaccctattggaaatcctagtcastgcaacaagacaagataataaatggcataaagatttgacatgaaaaagcaaaaacacaaaacatgtctcaattcacagacagcatgaatatcagaatactccaatgtttatgttaacagaatcaattcccagaaagttccgtaaatgaagctgtcactaaaaaggtagtatgtttagtcatgtttgttatttattccatggtctgaatggtgagaggtgttgcatttagaaacaaatgaatccactgaacacaaagaatcatctgaaaatacacctttttggaaaactttcctactaaaatctaagttttattagaacctattaaaaattagatttggttatttcccttataaagcaaggtctgtagaatttcatggcattccttcctagtttccttgaaaaaggatgtgagctccgaatgaatctttttaagtatgaattactttttaaatagtttctccctatgtaa

SEQ ID NO: 615741 - DNA, 568 bp, Homo sapiens
cttaatagtaaagatggatagctttgacaataagatcagaaacataataatatcattcttactacactgattcaacaccctattggaaatcctagtcactgcaacaagacaagataataaatggcataaagatttgacatgaaaaagcaaaaacacaaaacatgtctcaattcacagacagcatgaatatcagaatactccaatgtttatgttaacagaatcaattcccagaaagttccgtaaatgaagctgtcactaaaaaggtagtatgtttagtcatgtttgttatttattccatggtctgaatggtgagaggtgttgcatttagaaacaaatgaatcyactgaacacaaagaatcatctgaaaatacacctttttggaaaactttcctactaaaatctaagttttattagaacctattaaaaattagatttggttatttcccttataaagcaaggtctgtagaatttcatggcattccttcctagtttccttgaaaaaggatgtgagctccgaatgaatctttttaagtatgaattactttttaaatagtttctccctatgtaa

SEQ ID NO: 615742 - DNA, 575 bp, Homo sapiens
atggagacttgaacaatcactgctttctaaggatmatgatagtagtgatgtctcgcccttatgtggaaacctggataaccactagagtgtactttctcttcctgaaaaacaaatgatatatacacactgatcatctcaatagtctgagggaaggaatgtaatgaaacaagattcctcagagaaccagtaaaaaaggaaatgagtttttattatttctacactcgtgagcatacccaactacagtctcagcaataccttgaatctctgtccttttagcccaggcaaggctctgacaaatggaatattttcagctattaggaacttccctgacactttttctatgctttgagctttcacgcacagctttcacttgagatataatgagcaaaatggctgtaaggtgtcagcaattggaaggtgttgtgtaagggatgacttttcctacacatccattgtgaaggtatgttaactagatggctttaaaaatagatccagttccccttttgtctgcttagatatgatcctattacaatcaggagaaaaatatattctctatagaatgcaaactgcaaaat

SEQ ID NO: 615743 - DNA, 589 bp, Homo sapiens
aggctgagacctactgggttgcattctcaggagttaagcattcttagtcacagaagatttaccrctaagggaacaggttaataacgtttactgaagagacccaggaaatgcctgatgtccttatatcttaagaacaaaagcattcctagtttaagaataagttttgcttttaagatattaatagagattcttgtggaagatgatatttacacaaagactccactgataaaacgggatgtagtaaagaagccagtcaaaacctgtcaaaaccaagatggtgacaaaagtaacctctggtcatcttcactgctcattatacactaattataatgtattagcatgctaaaagacactcccgtcagtaccatgacagttttcaaatgccatgacaaccactggaagttactctatgtggtctaaaaaggggagggatcctcatttccaggaattccctgaccgtttcccagaaaactcatgaatagtgcacccactttttagcatataatcaaaaaataattgtaagtatacttggtcaagcagcccatcccactactctgcctgtggagtaaccattcttttgttcctttac

SEQ ID NO: 615744 - DNA, 589 bp, Homo sapiens
aggctgagacctactgggttgcattctcaggagttaagcattcttagtcacagaagatttaccgctaagggaacaggttaataacgtttactgaagagacccaggaaatgcctgatgtccttatatcttaagaacaaaagcattcctagtttaagaataagttttgcttttaagatattaatagagattcttgtggaagatgatatttacacaaagactccactgataaaacgggatgtagtaaagaagccagtcaaaacctgtcaaaaccaagatggtgacaaaagtaacctctggtcatcttcactgctcattatacactaattataatgtattagcatgctaaaagacactcccgtcagtaccatgacagttttcaaatgccatgacaaccactggaagttactctatgtggtctaaaaaggggagggatcctcakttccaggaattccctgaccgtttcccagaaaactcatgaatagtgcacccactttttagcatataatcaaaaaataattgtaagtatacttggtcaagcagcccatcccactactctgcctgtggagtaaccattcttttgttcctttac

SEQ ID NO: 615745 - DNA, 498 bp, Homo sapiens
aataaacgttattttaataattaatggctttatataacatgtaatattttcactgaagtaactaccaatattagtgattatgcatcatagttaagaaattttgactacttcaaatgtattttgcttcccaaaattatatgaaaatggccctcatcattttgtatcctcatgcttctttatgtggttctcattaaatatttaaaacatcctaaatgcaattatgctacttttaatattattttcttcaaatattaatttagatacattattaataggaaaggaratatttgctttttatttttgtagtctcattttaatattacatctctttaagagtttcttagtaacatgtatagttctctatatgactagtacagcgtgactttatattttgcctgagaaaattagtgttatatttatcctttcacagcaaaatcttgttcaagaacccaggaaatatgaaagaaatgggaaaacctaaagaatatgtcagccaga

SEQ ID NO: 615746 - DNA, 613 bp, Homo sapiens
cttgctttttacaattcctatagcttcattcattggatttatgatccaatcagttatttcattcttccatccatttggtacctactgggggttaagaacagaatgataaataaaacagagtcccttataaatgaataattattactacattgtgattacactataaaaaattatgagcaaagaggccaaggaaataagatttcattttttcagtcaataatttgctttattaaaaactcaaactggtaaagaccttcaattagaagtaaaggaatatagagtattgcaataagaagaaaaaaatgggcaggccaagtgaagaaatgacgtgttcccaaggaatccagtggagtagttcattttggcagaatgtttgtcttacagmgtttttattacaatacagttaaatcctgtcctttagtgctttggttatcagttatacatttgaacaggattagcagaaataagatagaactggtgaaccacagggcagggaaaagtgcacaggttttgcatttacactgttggattggtggctctatcacttgtaggcagatgcctttagattacttaacctgattgttaatttttttctgtaaaatgtgaatattat

SEQ ID NO: 615747 - DNA, 498 bp, Homo sapiens
aataaacgttattttaataattaatggctttatataacatgtaatattttcactgaagtaactaccaatattagtgattatgcatcatagttaagaaattttgactacttcaaatgtattttgcttcccaaaattatatgaaaatggccctcatcattttgtatcctcatgcttctttatgtggttctcattaaatatttaaaacatcctaaatgcaattatgctacttttaatattattttcttcaaatattaatttagatacattattaataggaaaggaaatatttgctttttatttttgtagtctcattttaatattacatctctttaagagtttcttagtaacatgtatagttctctatatgactagtacagygtgactttatattttgcctgagaaaattagtgttatatttatcctttcacagcaaaatcttgttcaagaacccaggaaatatgaaagaaatgggaaaacctaaagaatatgtcagccaga

SEQ ID NO: 615748 - DNA, 483 bp, Homo sapiens
cacaggggaatagtacctcagagagaagaaaaaaataaaatcggccytattagttgtactattatactcactgaagaaagatcacagacctaagccataaaagtgagctggtggagaccagtgaaccgcctgagatgaagaaatggaaggctaaaggaggagtaaaagaaggccaacatggctagaaattcacaagacaaaacaacagagaaaagagagctgcattggacatctgcaaagtgttcccttggagtcctcggctaggtactaatcagcatgtgtgagtgtgaggatgataccaagtgttggggaaagaaccacctaaaaagagcaagggaaaatgtcctctgagctcagagaggattgtaaagtgtccatgttaccataaaccagagggggaagtcttgtaattcaagaagaattaaggatgctcaccaggaggatataatagtcctaatgattcacgcaactattacaaacata

SEQ ID NO: 615749 - DNA, 483 bp, Homo sapiens
cacaggggaatagtacctcagagagaagaaaaaaataaaatcggccctattagttgyactattatactcactgaagaaagatcacagacctaagccataaaagtgagctggtggagaccagtgaaccgcctgagatgaagaaatggaaggctaaaggaggagtaaaagaaggccaacatggctagaaattcacaagacaaaacaacagagaaaagagagctgcattggacatctgcaaagtgttcccttggagtcctcggctaggtactaatcagcatgtgtgagtgtgaggatgataccaagtgttggggaaagaaccacctaaaaagagcaagggaaaatgtcctctgagctcagagaggattgtaaagtgtccatgttaccataaaccagagggggaagtcttgtaattcaagaagaattaaggatgctcaccaggaggatataatagtcctaatgattcacgcaactattacaaacata

SEQ ID NO: 615750 - DNA, 548 bp, Homo sapiens
taggtatttaatgctataaagtcccctctcagcactgcttttgctttatcctgtgaatttgaaatgttgaatattcattttcattcagttcattgtattttttaaaatttcactagagatgttggctttaaaccatggatgttttagaaatggtctggttagttcctaagtgttcagagaaattgatttgcttgattgtctgcttgtctttattggttttcaggtggttccattgtgattgaatgatttcacctgttttaaatttgggattttttttttttttttattccattctgtaatatgtaccatgggtacttgaaargaatgtatattcttctgttttagtgtaaagttgcggacaaatgctgattagattctgttagtggatgaggttgttaacttctatacccttgcagattatctatctaattgccctatcaattattgacagatgagtgttaaagtatctactgataattgtagattttgtctgtttatgctttcagttctatcagttgtttcatgaactatttgctctcctgtttggt

SEQ ID NO: 615751 - DNA, 563 bp, Homo sapiens
tgggtacttgaaaggaatgtatattcttctgttttagtgtaaagttgcrgacaaatgctgattagattctgttagtggatgaggttgttaacttctatacccttgcagattatctatctaattgccctatcaattattgacagatgagtgttaaagtatctactgataattgtagattttgtctgtttatgctttcagttctatcagttgtttcatgaactatttgctctcctgtttggtggatacacatttaggattgctatgttttcttggtgaaatgatccttctatcattatgcagtgccttttttatacatggtaatttattttgttcttaaatctactttatttgatattaatatagccactttaatatttgcatgatatgtattttccaaccttttgttttcaaactaccattactgttatatttgaagtgtgtttcttatagataacatacagttgcgctatgttgtttaatctattttgtcagtgtctattttggggtggtatatttggagcatttacatttagttattgatatgttgggattacttttgctct

SEQ ID NO: 615752 - DNA, 548 bp, Homo sapiens
taggtatttaatgctataaagtcccctctcagcactgcttttgctttatcctgtgaatttgaaatgttgaatattcattttcattcagttcattgtattttttaaaatttcactagagatgttggctttaaaccatggatgttttagaaatggtctggttagttcctaagtgttcagagaaattgatttgcttgattgtctgcttgtctttattggttttcaggtggttccattgtgattgaatgatttcacctgttttaaatttgggattttttttttttttttattccattctgtaatatgtaccatgggtacttgaaaggaatgtatattcttctgttttagtgtaaagttgcggacaaatgctgattagattctgttrgtggatgaggttgttaacttctatacccttgcagattatctatctaattgccctatcaattattgacagatgagtgttaaagtatctactgataattgtagattttgtctgtttatgctttcagttctatcagttgtttcatgaactatttgctctcctgtttggt

SEQ ID NO: 615753 - DNA, 571 bp, Homo sapiens
atgtgcccatggggttatgcagtacaaggtaagaataaggaaaagttgagaagagcattgtgtataccactcttgtatgcaatggttcatatcagtcctataatttctatattgctaaatatcattaaaaaatttcagagtacctaattatctctttataygcataggaggaagagtcttttagacgtaaggtattgcttcaaatagagaaacttttgaaaaaaggggaaataaaattaaatgctattataaatacagtcatcagccagttgcaatattccaataatttgcttaaaatatataccattactatagtaaactatgcatgagaagagcagatgcatgtaaaatttctccaagcattgtgataattattttgtgatgcttaaatacagaggtaaataactcagataaactttcctatttaaaactttttttttttgagatggagtctccctctgtcacccagactggagtgcagtggtgcaatcttggttgactgcaacctctgcctcctgggttcaagtgattctcctgccccagcctcccaagtagctgggattacaggcac

SEQ ID NO: 615754 - DNA, 571 bp, Homo sapiens
atgtgcccatggggttatgcagtacaaggtaagaataaggaaaagttgagaagagcattgtgtataccactcttgtatgcaatggttcatatcagtcctataatttctatattgctaaatatcattaaaaaatttcagagtacctaattatctctttatatgcataggaggaagagtcttttagacgtaaggtattgcttcaaatagagaaacttttgaaaaaaggggaaataaaattaaatgctattataaatacagtcatcagccagttgcaatattccaataatttgcttaaaatatataccattactatagtaaactatgcatgagaagagyagatgcatgtaaaatttctccaagcattgtgataattattttgtgatgcttaaatacagaggtaaataactcagataaactttcctatttaaaactttttttttttgagatggagtctccctctgtcacccagactggagtgcagtggtgcaatcttggttgactgcaacctctgcctcctgggttcaagtgattctcctgccccagcctcccaagtagctgggattacaggcac

SEQ ID NO: 615755 - DNA, 418 bp, Homo sapiens
gcatgttcttggtacagtgtttgagtgatagcaggctctcaatggatggtttttggataaatgctgctagattctgcagattggctcatttggcaccctctctgaatcccttctccctagcattcctctgttattgtggttgaactctaggaacaaaatcatctatattttttcacagcaaggacttgccatatgacctcagttagggcaaacagatrtattatatctctataagacttgggaaggcagaagttagtaatgtgatatggtagctctatatgaaaacatataacacaagtgtttggttctcttagggaagatctagcagagactttcctcttttttttttttttttttaagtgatttaatggtatttcctaggaggtgatttaatggtatttccattaggaccatccca

SEQ ID NO: 615756 - DNA, 494 bp, Homo sapiens
gacagaaatccaatagtgcttgcatggtttgatgttttgggttttcaaggtcatttcagtggttgatagatcatggtatctataaatacacattttgcagctctgtatctggtgacctgctactgtataaaattagaaattgttttcagtataatcttgctactrcagctgatactcctgataaataattatagttttttataaatgtatttccattttgaattttactatgaaatggcaacttttgccatttaagacatcaaatttagtaattataaaccagactattacaatggcttaggacaatatttgaaataaatgaagtagtaggtatttcatcttcagtggaggtggataggcatctataggtatgaaaatataagcgtttaacaagtatttaaatgatgacttacagataaatgaatttaaatcaaaggaacttaaaattcactttgctattggcataaacttctttgatattgttcagtgaaata

SEQ ID NO: 615757 - DNA, 558 bp, Homo sapiens
gatattaatgcaagctgcacctatctaatttgtattgtttcaaaatgacttgcagaagcaaggctgttagaaaggatgctgataatacagcatgagccttcaaagatatatttttagaagaatcatttccaattatcctggaatcatttttcctccttgtgattcccaaagaattttattattattggacagttttcttatttttcccytcattaattattcatgaattatcttattttcctttttcaacagctagactctaaatttcctgttatcttttcaacagctagaccctaagtaagtttcttgttgacaagaataatatctttgatctaagtgctcatcagtgtttggacataatgagcactcaaaaattacctgttgtgttaaaatacttcccatgtaagcataccttcatttcttttttcagttcccgcctacagattttagatgaaatatctgaatttttaatcaatatttttctacttttttcatagtctgtgacctcaattccattatggagatacactgtggattaagaatgttctataatcctaa

SEQ ID NO: 615758 - DNA, 509 bp, Homo sapiens
atcacattagtttggacaataatttttgggatataaatcccaaagcacagacaacaaaagcaaaaataaagtggattacataaaactaaaaagcttttggacagcaaaggaaacaataagcaaggtgaagagacaatatacagaataagttgtaacaatatttgcaaaccatatatctgataagaggctaacatccagcttayataaagaacttaaagaactcaatagcaagaaaacaatgttagttgaaatagcaaggcacagaactatataaagtaaaaactgtcagaactaatatttcttcatagaaaatataatatttctttagaacaaacataacaatgatgaagaatataataaaacgactcataagataaaggtaaaataatttaattataaaaatcaataattatattacaataattgtgcaatctcaattacaactccagatgataaattcaaaacatataaagtaggatattgtgaagaaaccctttattttgaaagta

SEQ ID NO: 615759 - DNA, 571 bp, Homo sapiens
ttttgccactcacttggccaaaatctttctaaccacattgcatgcaaattctcccttctctttggccccacctaaagtatcattttaaacttttctgccctctgatttcctatataatcatccatataagcatgtcgtgtagcttcctgctagcaggaatttcctaatgtgttactctctaacagaaattccagcctcctggtattattagcccctggccccattctatcttttctttataaatttcctttggatttcaaaactacatgatgcccccccyttttttttttttttttttttttttttttaacatccactgagtctctttttgtttttgttttctttagatagggtctgtctcttcacccaggctggagtgcagtggcgtgatcatggcttaccgcagcctaaacctccctgtgcttgggtgatcctcccatctcagcctctggagtagctagcactacaggcactgacgaccacgcccagcttttttttttttttttgtattttttgtacaaatgagatttccttatgttgcccaagctggtctgaaactcctgggctcaag

SEQ ID NO: 615760 - DNA, 571 bp, Homo sapiens
ttttgccactcacttggccaaaatctttctaaccacattgcatgcaaattctcccttctctttggccccacctaaagtatcattttaaacttttctgccctctgatttcctatataatcatccatataagcatgtcgtgtagcttcctgctagcaggaatttcctaatgtgttactctctaacagaaattccagcctcctggtattattagcccctggccccattctatcttttctttataaatttcctttggatttcaaaactacatgatgccccccctttttttttttttttttttttttttttttaacatccactgagtctctttttgtttttgttttctttagatagggtctgtctcttcacccaggctggagtgcagtggcgtgatcatggcttaccgcagcctaaacctccctgtgcttgggtgatcctcccatctcagcctctggagtagctagcactacaggcactgacgaccacgcccagcttttttttttttttttgtattttttgtacaaatgagatttccytatgttgcccaagctggtctgaaactcctgggctcaag

SEQ ID NO: 615761 - DNA, 427 bp, Homo sapiens
tagaaaaattgtgaaatcttctgttaagaaaataaaattgaaattgaattgctagtatgatagacctttaaagtargttatatttgctttaagtagtaaaaattattgaacaacttttttactctaaagaaacatacatttttataatgtcctgtggagatttgtccacttggtgatcaaggaaataaaatcaggcagaaattatgtcctgattttttttttttttgagacagggtgttgctctgtcacccaggctggagtgtagagaggcaagatcacagctcactgtagcctctaccacccagactcaaacagttctcccacatcagcatcacaagtagctggagactacaggtgtgtaccaccacacccagctaattttatttatttatttatttatttatttagagacggggtcttgctatgt

SEQ ID NO: 615762 - DNA, 578 bp, Homo sapiens
gatctgaaaccctggcctcaggcagtcctctcaccttggcctcccaaagtgctcccaaaatataccatatttttcttattcattcatttattaatgaacacttagggtagttccatatcttgactactgtgaatagatctacaayatacaggtctattacaagcatgacccaccatgcctggcccctgacatttttcaaaagttaatttttatgttgaaatttgcattaatttgatcagttaaaatcacattagtgtaattctccaagcactgactcattatatttcctggttcaaaacattatgcaagcataggtttatgtcctcagagagcatgcaattgattactacatcaagacagtaggtgagctgggtatggtggttcatgcctgtaatcccagcaccttgtgtgggccgaggcaggaggatcacttgaggccaagagtttaagaccagtctggccaacactgtgagactccttttctaccaaaaattttaaaagtagcttgctgtggtggcatgtaactgtggtccctgctgctttgggggctgaggcaggaagatcatgtgagcccagga

SEQ ID NO: 615763 - DNA, 578 bp, Homo sapiens
gatctgaaaccctggcctcaggcagtcctctcaccttggcctcccaaagtgctcccaaaatataccatatttttcttattcattcatttattaatgaacacttagggtagttccatatcttgactactgtgaatagatctacaatatacaggtctattacaagcatgacccaccatgcctggcccctgacatttttcaaaagttaatttttatgttgaaatttgcattaatttgatcagttaaaatcacattagtgtaattctccaagcactgactcattatatttcctggttcaaaacattatgcaagcataggtttatgtcctcagagagcatgcaattgattactacatcaagacagtaggtgagctgggtatggtggttcatgcctgtaatcccagcaccttgtgtgggccgaggcaggaggatcacttgaggccaagagtttragaccagtctggccaacactgtgagactccttttctaccaaaaattttaaaagtagcttgctgtggtggcatgtaactgtggtccctgctgctttgggggctgaggcaggaagatcatgtgagcccagga

SEQ ID NO: 615764 - DNA, 344 bp, Homo sapiens
ttttactcgtaattgttttgcattcacattgcttatctactggaagtttcctggataaaaatttcaaattsgtttatagctattgcatcaaaaattctcaataaaagaataacaggtaattgtatacttatcatattcatttagtagattgagaatctcatgtgtagatattagttgaaagttacacaacagtgttagtgaacgtggaatataaaatttcagtaacaagaaaatatattattttttgaatccaaagcaaacattatagacttacatgtctgaaggtatcttctcatcaatttatctaccattaagtaataaaaaataaataccaaacacattgt

SEQ ID NO: 615765 - DNA, 344 bp, Homo sapiens
ttttactcgtaattgttttgcattcacattgcttatctactggaagtttcctggataaaaatttcaaattggtttatagctattgcaycaaaaattctcaataaaagaataacaggtaattgtatacttatcatattcatttagtagattgagaatctcatgtgtagatattagttgaaagttacacaacagtgttagtgaacgtggaatataaaatttcagtaacaagaaaatatattattttttgaatccaaagcaaacattatagacttacatgtctgaaggtatcttctcatcaatttatctaccattaagtaataaaaaataaataccaaacacattgt

SEQ ID NO: 615766 - DNA, 344 bp, Homo sapiens
ttttactcgtaattgttttgcattcacattgcttatctactggaagtttcctggataaaaatttcaaattggtttatagctattgcatcaaaaattctcaataaaagaataacaggtaattgtatacttatcatrttcatttagtagattgagaatctcatgtgtagatattagttgaaagttacacaacagtgttagtgaacgtggaatataaaatttcagtaacaagaaaatatattattttttgaatccaaagcaaacattatagacttacatgtctgaaggtatcttctcatcaatttatctaccattaagtaataaaaaataaataccaaacacattgt

SEQ ID NO: 615767 - DNA, 344 bp, Homo sapiens
ttttactcgtaattgttttgcattcacattgcttatctactggaagtttcctggataaaaatttcaaattggtttatagctattgcatcaaaaattctcaataaaagaataacaggtaattgtatacttatcatattcatttagtagattgagaatctcatgtgtagatattagttgaaagttacacaacagtgttagtgaacgtggaatataaaatttcagtaacaagaaaatataytattttttgaatccaaagcaaacattatagacttacatgtctgaaggtatcttctcatcaatttatctaccattaagtaataaaaaataaataccaaacacattgt

SEQ ID NO: 615768 - DNA, 540 bp, Homo sapiens
ttttagagaatttttgcattttatttatcttctacatgttatgtcttcccaatgtaggcaataaaagctcttagagaccatgaataaataatctcacaaatgttctgctatatggtagttaaaaagagttgtctactaattgaataattatgtagatacacaaatgtattatatattttatagtacattgacacaaagtagttatgagaaatacatgtaaagttaaaagcagattgttgggcatatggaaagaatttttttwaaagatggttgttatactcaaaataatcattattgccatcccatctttaatgaaaggatgaaatatttagacattgggactacgcaaaaggaagatgagttttttgaagacaaactacaagacaggtattattccagacatttctacatactaaacttacttgcctgagttaaatgaagtgaaatagtgattagcaaatatagcagcatatatatatatatagatatatatatatatatatatatatatatatatatatgttatcgatgagaatagac

SEQ ID NO: 615769 - DNA, 540 bp, Homo sapiens
ttttagagaatttttgcattttatttatcttctacatgttatgtcttcccaatgtaggcaataaaagctcttagagaccatgaataaataatctcacaaatgttctgctatatggtagttaaaaagagttgtctactaattgaataattatgtagatacacaaatgtattatatattttatagtacattgacacaaagtagttatgagaaatacatgtaaagttaaaagcagattgttgggcatatggaaagaatttttttaaaagatggttgttatactcaaaataatcattattgccatcccatctttaatgaaaggatgaaatatttagacattgggactacgcaaaaggaagatgagttttttgaagacaaactacaagacaggtattattccagacatttctacatactaaacttacttgcctgagttaaatgaagtgaaatagtgattagcaaatatagcagcatatatatakatatagatatatatatatatatatatatatatatatatatatgttatcgatgagaatagac

SEQ ID NO: 615770 - DNA, 463 bp, Homo sapiens
tgaattctaaaaaatctttccaaaaatatataaataatttgtaaacaaacatttgttttgatacaactatgaaaaattgttgatgatttatattttcttgtaagtatatttacttatttgggaatactcagaaaatattataaaagtgttctatttctagttatacctgttatcttttttttaattagaaaggtaatttaagaggttttcagaacgtttaaaatattttctatgatttttcagataaactcctaatcatatattttagataacataatgcacctgactcattcttatcaaagttttgattacataatttgagttttataattatcatattcattcctmttcatggtaatatgctggtcacaaatttgctttgtgagaaatttaattgcttgaaattatttatgccaatttgcaaagcctgccccagctctgtggactatatcatgggctgaat

SEQ ID NO: 615771 - DNA, 550 bp, Homo sapiens
agtgcagtgggaaaaggatatcctcctgaacaaatatgctggattagttggctaactatatggtatagtttgggtgcttgtccccaccaaatcttgtgttgacgtttgatccccaatgttggaggtggggcctaatgggaggtgtttaggtcatggagcagatccctcatgaatagattaatgtcctggagtgagacctgaggagggagttcttgctctattagttcctgagaaagctggttaaaacaaacaaacaaacaaacaaaaaagacctggtgcttcaccttctctctctcttgctttctctcatgccatgagaacttgtcacatgccagcttccttttgcyttctgccataagtaaaagcagcctgaaaccctgatgagaaacagacgctagtgccatgcttcttgaataacctgcagaaccatgcaccaaataaacctctttagactcaaactcacgtgtttctttatagcaacacaaaatggattaagacactatatgaactgaatactaacccgttttctaccatataaaaatatgtattc

SEQ ID NO: 615772 - DNA, 462 bp, Homo sapiens
taagtaatgggcacatattcaagcagagaaaaaaagaaaaatctaagaaccaaaattgaaatctaagtttcatcgtttctgagcttattccactttatcaggacatgtattccttcaacaattttttgtgtagatgttaagtgttcatatcacaaaatgatagtacaaagaataattgttattataagtaaaaaagatgagggaaaacttttgtaggttacaatagttttatgacatacattgtgatgatgatttcacagrtgtacacctatttccaaactcatcaaattatatacattaaatatgtagagccttgttatgtcaatcatacctcaataaagcaattaaaataccaaatttttgttacgtacctatgatgtgataggctgctacatgttggggatacagcatttacaaaactgagaagtagaagtccctggtctcaagaagcttacattctaa

SEQ ID NO: 615773 - DNA, 462 bp, Homo sapiens
taagtaatgggcacatattcaagcagagaaaaaaagaaaaatctaagaaccaaaattgaaatctaagtttcatcgtttctgagcttattccactttatcaggacatgtattccttcaacaattttttgtgtagatgttaagtgttcatatcacaaaatgatagtacaaagaataattgttattataagtaaaaaagatgagggaaaacttttgtaggttacaatagttttatgacatacattgtgatgatgatttcacaggtgtacacctatttccaaactcatcaaattatatrcattaaatatgtagagccttgttatgtcaatcatacctcaataaagcaattaaaataccaaatttttgttacgtacctatgatgtgataggctgctacatgttggggatacagcatttacaaaactgagaagtagaagtccctggtctcaagaagcttacattctaa

SEQ ID NO: 615774 - DNA, 577 bp, Homo sapiens
cagtatatttcataattgagtctgaaaacttagtatgttgtaacagtgtaactgatcactagttgtccttcaaaatcaatttstcccccttcttgagtaataaaactctccattttttcactgggctatgaacacccaaaataacatttacataccttgacttccctagcatctagatatagaaatatgagaactttgtaataggacttaatagcaagtggagtgtgcacttttgggagaatttttttccttattccattcccttttctcccatcttttctggggtctggggtaagattataatggtgaaagctgtaatatgtgaatggtggagaacaagatagaaacattctctgataccacgatccaaaaacattagacctgggcaacatatcacttggtgtgttttacttacattaaaatgaaataaaattcttttagataagccactataactttgaattttcagtcactgacagctaaaaatcttctaacacaacaatttagtcaacagttttgtcattttctattaaatatatctttaagtgtatccaggaaatcagctggccacttaaag

SEQ ID NO: 615775 - DNA, 616 bp, Homo sapiens
aaatgctatagtgtaaaggattcagtgaagggsgtatctgtaaagacaaaatcaagtataaataatagcctgcctcacttcctcttaatagaatataagtgatatttacatgcaaaattaagaaagaatagaaaaaaataatgcatacaagttctgtttgaagacacagagagaaaaggatcaagaaaataaatcaaggaaaatgaaaaaaaactgacaagagttttcaaaggaaataagaaaatagtttctatagcatctaaggaatttgtcagattttttgaagagaccaaggaagaaatacggaatgtcaaagacaaaaatcatttgatatccaagtgaaatgattacatgagcaaatttcaagaaaacaatgaaaacataaaaaccatattagaaatagcagaaaaatctagtaaacatgaattgtgttttacacagtacattgtattcattaatgaattaatacattgtattcattaatgaattacaattatattacaataattacaattaattaatatgttgcattaattaatgaattaatacaatgctttactgtggaaaataaaaacaagcataaaacacagaaaagaccacagatgtgtaaagtaat

SEQ ID NO: 615776 - DNA, 616 bp, Homo sapiens
aaatgctatagtgtaaaggattcagtgaagggggtatctgtaaagacaaaatcaagtataaataatagcctgcctcacttcctcttaatagwatataagtgatatttacatgcaaaattaagaaagaatagaaaaaaataatgcatacaagttctgtttgaagacacagagagaaaaggatcaagaaaataaatcaaggaaaatgaaaaaaaactgacaagagttttcaaaggaaataagaaaatagtttctatagcatctaaggaatttgtcagattttttgaagagaccaaggaagaaatacggaatgtcaaagacaaaaatcatttgatatccaagtgaaatgattacatgagcaaatttcaagaaaacaatgaaaacataaaaaccatattagaaatagcagaaaaatctagtaaacatgaattgtgttttacacagtacattgtattcattaatgaattaatacattgtattcattaatgaattacaattatattacaataattacaattaattaatatgttgcattaattaatgaattaatacaatgctttactgtggaaaataaaaacaagcataaaacacagaaaagaccacagatgtgtaaagtaat

SEQ ID NO: 615777 - DNA, 616 bp, Homo sapiens
aaatgctatagtgtaaaggattcagtgaagggggtatctgtaaagacaaaatcaagtataaataatagcctgcctcacttcctcttaatagaatataagtgatatttacatgcaaaattaagaaagaatagaaaaaaataatgcatacaagttctgtttgaagacacagagagaaaaggatcaagaaaataaatcaaggaaaatgaaaaaaaactgacaagagttttcaaaggaaataagaaaatagtttctatagcatctaaggaatttgtcagattttttgaagagaccaaggaagaaatacggaatgtcaaagacaaaaatcatttgatatccaagtgaaatgattacatgagcaaatttcaagaaaacaatgaaaacataaaaaccatattagaaatagcagaaaaatctagtaaacatgaattgtgttttacacagtayattgtattcattaatgaattaatacattgtattcattaatgaattacaattatattacaataattacaattaattaatatgttgcattaattaatgaattaatacaatgctttactgtggaaaataaaaacaagcataaaacacagaaaagaccacagatgtgtaaagtaat

SEQ ID NO: 615778 - DNA, 541 bp, Homo sapiens
gtggagcatattcttcattccacagggaacctgatactactattaaagtatttttatcagcaaagccaatatctccctatacagatttattatccaggcttctaaggtgataaattttgtcaaagagagatgaatgattaacttmaatgtcaaagaaagctaaaataaattatcttttgtgtgttgtatgatattttgcccttacaaaatagtaaaagacatagaatattataagaaaagaatattgtacgtcttttctataattaacagcacgtcaaattttctttgtgtatttgagaaatctacaaaacaaaccctaaatgttaattttccaaaaagactgcttgacacactcctttgacaagcctcttacctcccaaacagatcctatgaacatagaatttttccctcatcttattttttttacatattttccacccccagaaaaatttgcttagtgaagtgatagtatctcttattaccgctacttttatagtcttaataataaacatatcttaaatgtattctgttattcactata

SEQ ID NO: 615779 - DNA, 600 bp, Homo sapiens
aaattttagtacaaaagttttgtaratagagtactgtattagtccattttcatattgccatagagaacttctctgagactgggtaatttataaagaaaagaggtttaattgacttctagttccacatggctggggagacctcaggaaacttaccatcatggagtaaggggaaacaggcaccttcttcacaaggtggcaggagagagaaaaatgaaggagaaacatctaaacacttatgcaaccatcaaatcttgtgaaaactcactcacttcatgagatcagcatggggaaactgcacccatgatccaatcacctccctgcttgacacatgtgaattacaatgagagattagatttgggtggggacacagagccaaaccatatcattctgcccctggcccctcccaaatcttatatctttttacattttaaaaccaatcatgccttcctaacagtcccccagattcttaactcatttcagcataactcaaatgtccatacccatagtctcatctgaaacaaggcagtttccttctacctatgaccttgtaaagtcaaaagcaagttggttactccctagatacaatggggatacaggtat

SEQ ID NO: 615780 - DNA, 558 bp, Homo sapiens
tctgaggtgatttctttgttgattctgtcaaaccaactctctaggagccctataaatcatatattcttatcataggcatttaatatgtgataatcacacaaactacttactttcccaaaactttttatgaaaactttatatggaaaaggaatgcaacatagatattttattgaatatttaatttttctaggyatctaatacaactggatatactttactagttctgattaacattttaaataatctgacgtgcacaatgaactgtgtcaagttttggtgttctaaaaattaaaatatatattatttatatatatcaggactatatatttatgtaatatatcaggactacatatattatatatatcaagactatatataaaatataaataggactatggatattatataatatattaagactatatataatatataaatcaggactatatttatgtgtgtatatatatgtatctctgtgtgtatatatatatttaagagacatagtttacagaaaatggattcataaacataattttggtagaataaataaggattaat

SEQ ID NO: 615781 - DNA, 585 bp, Homo sapiens
tgcttgtaatgatagaaatggcacttctcatggcattggttttattcaacaatatgagatgaatatagatttttgaactaaattcttcaaaagcactctttcttagtaagtacacatggcaaattttcagttatgttgaggtayacagttaagaaactagaagagcaatgtaggagattgcagtggactaggatagatttatagaatgagctcactttaacagacatcaggtttatgagttttcttgagagagagagtgcttttttatttactcagagggacaaaaacaatcataccataatatcggaccaatattaccaatgggaaaagagtagctgtagtaaaaatgcactttgctgcatgaaacaaaatgtttatatatgatgaaaaaaattgtcttaggaaatgaaatgagaagccccaggggactcagaaataaaaacactggaaatcaaatatcacatactaaagtcctttaattagtctttgtttactgaaaggtatcttgcagtaacagttttattaaaacagacttttaaaaattgtgttctaaagatgaaataaaatagtaaatacttcatgtga

SEQ ID NO: 615782 - DNA, 387 bp, Homo sapiens
aagcttgcagctaaagaatgcaccctggccatactttcccccatgactccagacctgtaggtgagcctaacctggaaatccttgtctttccttccccaagtatattctccaagtggcctgaattctgtaactagtaaaactattttatgtgttttgttatgtggagggtggaatttgaaaagttcatccctttcaatctgattgttcttygtgaactcttcttcctttgcatgcaccagtagcatattctttcaaataaattaattgtactcaagttctgctgaaagagagaaaccaaaagataggcattgtggaatttaggggaacacaatacaaatattcagatgctcatgctcccttcaatattatggtggaatgcatacattt

SEQ ID NO: 615783 - DNA, 323 bp, Homo sapiens
tccaaatacacatgtgattcctcatctgtgaaatgataataaaacctatgtgatagagttgctttgaagactaaatatgataatgcaagcatgcttagcagagtgactggtttataagggactctctacacttactaggttcaatttttcttatcccatctcagatgacagagactcattcatakttcagggtataggaatactcagagagattagaaaaggcttcataaaataaattatattaaaaccaaacactgcatgttcttattaacaagtgggagctaaatcatgagaacttatgaacacaaagaaggaaacaatag

SEQ ID NO: 615784 - DNA, 464 bp, Homo sapiens
aatctgtaacctcaacctctgcaacatgcaatttacccatgtaacaaacctgcacatgcamccccgaaccaaaataaaagttttggaaagaaaaaataaatacattaattaattaaaacaaaataaaaataacattaaacacaggtcgtattacatcattcttctgtagtcaaatcagtaatattattgtgaaaattaaaaatatcatattttaatttttaaatttcaactcactctgggacttcttttccttttacttaagataatctctagatgatttctaaatttccttcataggccacttttttttaactctatgtatgtaagtatttcagcttatgtcttatatttattagaaactaaatagagcaattttacatttttaataataccagaagcagaaagattaaatacaaaaataatttttaaaccatgtttcaatctctattttacagaaaacacag

SEQ ID NO: 615785 - DNA, 464 bp, Homo sapiens
aatctgtaacctcaacctctgcaacatgcaatttacccatgtaacaaacctgcacatgcacccccgaaccaaaataaaagttttggaaagaaaaaataaatacattaattaattaaaacaaaataaaaataacattaaacacaggtcgtattacatcattcttctgtagtcaaatcagtaatattattgtgaaaattaaaaatatcatattttaatttttaaatttcaactcactctgggacttcttttccttttacttaagataatctctagatgatttctaaatttccttcataggccacttttttttaactctatgtatgtaagtatttcagcttatgtcttayatttattagaaactaaatagagcaattttacatttttaataataccagaagcagaaagattaaatacaaaaataatttttaaaccatgtttcaatctctattttacagaaaacacag

SEQ ID NO: 615786 - DNA, 469 bp, Homo sapiens
gcactgcccctcagggcactgttgctcatggcttcccttggttaggggagggagttcccttagctgttgagcttcctgggtgrggcgatgccccaccctgcatctgctcgccctccatgggctgtactcactgtccaaccaatcccaatgagatgtaccaggtacctcagctagaaatgcagaaatcacactccttctgcattggtcttgctgggagctgcacaccagagctgttcctattgggccatcttgcccaggagtccatatttgcatttttaaaaaatttctgctgcgaaacataccagaccagtaaacatgggctgtggcagagtgctggagtcctgaatcacctttgtttcttctgtgagtctatagagcttcccagactgtgaaaagataactctagtggatggatatccatctgaatttctcttcttaaagtcttgttttggtgattactgttccttgt

SEQ ID NO: 615787 - DNA, 431 bp, Homo sapiens
gcttgttgctcttagattactggagtaaacactgtgtagctgagggaagcaaataaaagaagattttagtttcgaaggagggtctggaatacatgttttgtgcagaactttatgtcaggaagtgtcagggcaactgagagggccatatctctgattctcaggatcccagagcttgtctaagtctgaagcttaatcatgacagagaactccaccaccactccatcatcaagctaacaagcatcaaatgacaagcaaaacacttaaagctgaaggaggggatgattgagaacactctctggcacatggactcctacctgaaaacacatagtaaactagaaaaacatgaagcctgtgctgcactgaggataccatagcagtaataatgcccaaatccagtcrcatttcttactagattgactgcaaccctcaca

SEQ ID NO: 615788 - DNA, 450 bp, Homo sapiens
ctgccttgaaattttcaccctcttagtacttttttctgtgggcttgtcctgtctcatattctacatattctatgttggctatttacccctctttaccattttcctacatgaccttttatcattggaaaattgtaaattctggtatctgatttccataagcacacaaaatgtcatattttaaagttaaattgtgaatgcagagttacatttagaaaagattgtctgattctctaatatagcccagagtagcactgacccttcaggaggctcagtttttagcagtgagggtgggggaaagtagggaagagaawagaggtgaggagggtgtgaaacagaagtttatggggtttttttgttttgtttttcaatttttggctttttgttgtttttgttgtcgttgttttttttttgagacagagtctcgctctgtcacccaggctggggtacaat

SEQ ID NO: 615789 - DNA, 450 bp, Homo sapiens
ctgccttgaaattttcaccctcttagtacttttttctgtgggcttgtcctgtctcatattctacatattctatgttggctatttacccctctttaccattttcctacatgaccttttatcattggaaaattgtaaattctggtatctgatttccataagcacacaaaatgtcatattttaaagttaaattgtgaatgcagagttacatttagaaaagattgtctgattctctaatatagcccagagtagcactgacccttcaggaggctcagtttttagcagtgagggtgggggaaagtagggaagagaatagaggtgaggagggtgtgaaacagaagtttwtggggtttttttgttttgtttttcaatttttggctttttgttgtttttgttgtcgttgttttttttttgagacagagtctcgctctgtcacccaggctggggtacaat

SEQ ID NO: 615790 - DNA, 672 bp, Homo sapiens
tggggtccagagccaaagaggactgagggagacaaaggcagctgagacaaaatgacccattatcagaagccctacgtaaagccaagaaacaagccagactaaatccccagcaactgcattgaagccagcagaagaagtgcaatcaggtggcttggcaggagcagcatccactttttcttgggcattcttttcacagtgtagttaaatgtacagcagcatatcctagtccaattgtattacttatttattttctatctgccatactctagaatataaatatagtaatgaaggaattttttagtttaactgccttaaatcttcagcaaacagaaccctactgagcacttagtgcatactccaaaaatattttcgaaagaaaacttaacaaatacatactgaatagataaatgcgtaacaattgcaggaataaagggagtaatgttctgctaaaagtgttatctctgattattgcatttcattagtttattagtgagatggaccatgagaaaacagaagaggaaagcccaaaagggcagaggtgtgggcagagaagtgtgtaaaagttgaagccaaacatgcaattattcttttcattgaatttcattatgtttaactatgtggtytacgtaaagccaaaattattacttgagtaattttttttctaatttttaa

SEQ ID NO: 615791 - DNA, 641 bp, Homo sapiens
gcaggctcagcttgctattaaacaaaccaataacaaaaggctttgtggcactgcttttcttgagtgactttctccctagatcaagttctgttttatattccaaagcatttcttaaacagtaggcttttcacaaatcccccgttttctcaccacgtccctttgtattaattctattcaatcagctttttgcccaggactcaactgagtctgctcctatgaaactcactgtgacctgtactcaccacgtccagtggggtgtgccacagcctcctccctgacctccatcagcattgactactgctcacggccttctccttcctgaagctctctcctctcttagctccctgcagctcctgtccccaagggctctccttgatcttctagagcccaccatctatgatacttcactgacctcctttcttctcctgtccccataataaagttgttgtcccaaggttatctccttgtcctcctttccttagtgtcccaatataagtctttgrgtgatttaatgtgggcccctgcctacagttacttccttccatgaggatatctcccaaatcaatataattcagtgtcctcattctctgtagcttcctatttcctaactgcctggcacatgtctcaacctagattgtctt

SEQ ID NO: 615792 - DNA, 557 bp, Homo sapiens
gacatggggaaaatccaaagtatcatgtggctgcttctcacaatgccctcagagtaggtgagtgacctaagacagaggggtgtttggtaaaagtcctcctgtagatttgttcttgaagtagtcactcaccttcatcactactttccatggctgctgctcctgactttcttccctagactaccccacggcctcccttactctgtcccacaccagcactggatcagcccctgactcacagcacactgctcatcctctgtcttcagaaacctggccccgggaggcaygccctccaccctcatccctctagagggcccagcgcccccacctgtcccgtctctaccccgctacatggatgtctcacgtctcttcccccaaaacatcacatactctctgcgatggctaatttcattttatcttattttttaagagacagggcctcactctgtcacccaactggctgctacagctatgattgcagtggtgcgatcatagctcattgcagcttcaaactcctgtgctcaagcaatcctctcacctcagcctctcaagtagctagg

SEQ ID NO: 615793 - DNA, 557 bp, Homo sapiens
gacatggggaaaatccaaagtatcatgtggctgcttctcacaatgccctcagagtaggtgagtgacctaagacagaggggtgtttggtaaaagtcctcctgtagatttgttcttgaagtagtcactcaccttcatcactactttccatggctgctgctcctgactttcttccctagactaccccacggcctcccttactctgtcccacaccagcactggatcagcccctgactcacagcacactgctcatcctctgtcttcagaaacctggccccgggaggcatgccctccaccctcatccctctagagggcccagcgcccccacctgtcccrtctctaccccgctacatggatgtctcacgtctcttcccccaaaacatcacatactctctgcgatggctaatttcattttatcttattttttaagagacagggcctcactctgtcacccaactggctgctacagctatgattgcagtggtgcgatcatagctcattgcagcttcaaactcctgtgctcaagcaatcctctcacctcagcctctcaagtagctagg

SEQ ID NO: 615794 - DNA, 557 bp, Homo sapiens
gacatggggaaaatccaaagtatcatgtggctgcttctcacaatgccctcagagtaggtgagtgacctaagacagaggggtgtttggtaaaagtcctcctgtagatttgttcttgaagtagtcactcaccttcatcactactttccatggctgctgctcctgactttcttccctagactaccccacggcctcccttactctgtcccacaccagcactggatcagcccctgactcacagcacactgctcatcctctgtcttcagaaacctggccccgggaggcatgccctccaccctcatccctctagagggcccagcgcccccacctgtcccgtctctaccccgctacatggatgtctcacgtctcttcccccaaaacrtcacatactctctgcgatggctaatttcattttatcttattttttaagagacagggcctcactctgtcacccaactggctgctacagctatgattgcagtggtgcgatcatagctcattgcagcttcaaactcctgtgctcaagcaatcctctcacctcagcctctcaagtagctagg

SEQ ID NO: 615795 - DNA, 557 bp, Homo sapiens
gacatggggaaaatccaaagtatcatgtggctgcttctcacaatgccctcagagtaggtgagtgacctaagacagaggggtgtttggtaaaagtcctcctgtagatttgttcttgaagtagtcactcaccttcatcactactttccatggctgctgctcctgactttcttccctagactaccccacggcctcccttactctgtcccacaccagcactggatcagcccctgactcacagcacactgctcatcctctgtcttcagaaacctggccccgggaggcatgccctccaccctcatccctctagagggcccagcgcccccacctgtcccgtctctaccccgctacatggatgtctcacgtctcttcccccaaaacatcacatactstctgcgatggctaatttcattttatcttattttttaagagacagggcctcactctgtcacccaactggctgctacagctatgattgcagtggtgcgatcatagctcattgcagcttcaaactcctgtgctcaagcaatcctctcacctcagcctctcaagtagctagg

SEQ ID NO: 615796 - DNA, 560 bp, Homo sapiens
ttgtgctgtcttcaagagactcatctcacatgcaatgacacccacaggctcaaagtaaatagatggaaaaaaatctactaagcaaataaaaaacagaaaatagcaggggttgctattctaatttcagaaaaaacagaccttaagccaacaatgatttaaaaaacacaaagaagggcattacataataktaaagggttcaattcaacaagaaaacctaattatttttaaatatatatacacccaacacaggagcacccagattcataaaataatttcttagagacctacgaagagacttagataaccccacaataatagtgggagaattcagcaccccactggcaatattagacagatcactgaggcagaaaactaacaaaggtagtcaggacctgaactgaacacttgagcaaatggacctaacagacatctacagaactctccacctcaaaacaatagaatatacgttcttcttacctgcacatggcacatcacatactctaaaactgaccacaaaatcagccataagacaattctcagcaaattcaaaaaaaccaaaa

SEQ ID NO: 615797 - DNA, 405 bp, Homo sapiens
ttaaaatttttatttattaagacaggatctcactctgtcactcaagctggatccagtgcagtggcataattatggttcactgcagctttgacctcctaagctaaggcaccatgctcagctaattttttgtagagatggggtctcactatgttgctcaggttggtctcaaactcctgggctcaagcaatcatcccatcttggcctaccaaagtactgggattacaggcatgagccaccatgcctggtcacttttggttttttaatccatgctggcaatctctgtcttttgattggaatatttcrtccatttacatttaatgtagttacaggttgagcatcccaaatacaaaaatccaagtctgaaatgctccaaaatccaaaacattttggctgctaacatgatgc

SEQ ID NO: 615798 - DNA, 608 bp, Homo sapiens
ttttctttgccaatctattgattaaagctcaaaaccctgcctttaagtactggtccctgaccagtgtcccaaatcattattattgctaaaccacatctgcaatccatcatctaagatctccagtttaagactctttaaagtggagcaggaacttatagatacgtgtgagcaatggagagtctttctcgatgtttgctgtttcccctactcctttacagttgtctcacatacacgtaatctgatagtaatatattttaactgcttgcctttatggagactctccaaagcatttaagttactgtgtcatagaaacaacaatgctctttcttytgcactcatatttcatggatttaggtaatgtttaattaaattacatattacatattgtagttgcaattagtaaaacaggtttgataacagatgcacctaattttggaatgcctttgtcttagcaggtgagggagggcatgtaggaaggccacgggggccatgggcccgtatctggcctcactcaggaagacagagatggttaaaatggcaagtgggttaggtagaaattgggtaaagggggcttctatttgttacttactctaccgcatttaatcctt

SEQ ID NO: 615799 - DNA, 485 bp, Homo sapiens
atgtttaggtgtttataagctacccggtctatggtattttgcatacaaactaaaatgccattctattacagctacttagagcaattcctcaaaagatttatcgaatctgacttttagaatttcccccttctcttccccaaacaccaagatccactcccgccccctgagcttctctcaccttgcctgccatcctgcacttgacctcgccccccaccccrtgcccactgtccctccatccactctgccccaccccccaactcaactcaggcgcagccccctcatgaggtttcccacactctgaggggtttcccctcttgtcccgtggcacctgttccagcttctttgatggcatttatcacattttaatgaaaccttttgcttatgacatcctcactactagacggttgtttcttaggctgacatggagtttggctccctctcaaccatcagagtatcagctctctagcatccagcacatggtcggt

SEQ ID NO: 615800 - DNA, 592 bp, Homo sapiens
agctgcatggccagttggcagaggagcacaaaccagcactctgggttactgaccagtgctctttccatggagaggtttaggtggtggttagaagcacagacaccaggacagactgcctgggttcacaccccagctctgtcccttcctggctggatgatcttgtgcaaaagagttaaatcccataggggccacatcagccagagtttcagtaggaaacagatggaacaccaaattagggtcgttggaaggggtatttataaatgatcatttcaaagatgtgggtggagcatggggaaaacacaggcgccagtgcagggacacaggaccagcagtgttagagctgtccccagcactgggccagaaggaacaaggggagagagaggctgcagagccttgttctgaaagcagctgtgtcctcaggtgggggaacccagacagtcaccgtcatcttgtagggaggaaaccagggtaacgggtgcacgtcctcactctcccttctctccctccattctcctgatgaggctccttacyggctaaacccaactaaaagcacagaacacagaagcttgtctgtgtggtctagctagacctg

SEQ ID NO: 615801 - DNA, 588 bp, Homo sapiens
aagattctttaaaaatgcagtgcagtgctggttcaggccccagctccccacctgtagacatgagaccctgatccagwtgtacatcctctgagcccttccttgttgcaagcaggtgcacctttgcatctctgccatgtggctgtgacgccaacctgatgtgatttctcttggtcttaaggacctattcctgaccccacttcctctccagctcctgcccccatttttcctctccctttacagcagaactactgaaaagaggaggcaatgcctgctgtctctgcttacctcctcctactttctagtgaactcactcagtcaggcatttgtccttaccaccccaaggtcactggtgactcacaccctctgccgctcctcagaacaccttcccctgggtgctcatcagcatgtggggccccttgctgggcctcagggatgtcacctggctgggctcccctcccatttctctggccattgcttctcagactgtcttgctgattcagtcttgtctccccaaaccccaggtgttgccaagccctcgactcagaccttgggcctttcctccttttggtccagcctcactcactaaat

SEQ ID NO: 615802 - DNA, 567 bp, Homo sapiens
tccctttacagcagaactactgaaaagaggaggcaatgcctgctgtctctgcttacctcctcctactttctagtgaactcactcagtcaggcatttgtccttaccaccccaaggtcactggtgactcacaccctctgccgctcctcagaacaccttyccctgggtgctcatcagcatgtggggccccttgctgggcctcagggatgtcacctggctgggctcccctcccatttctctggccattgcttctcagactgtcttgctgattcagtcttgtctccccaaaccccaggtgttgccaagccctcgactcagaccttgggcctttcctccttttggtccagcctcactcactaaatgatctcttgccaaatcatgatttccaaaacgatctctatgctcatgacttccaaatgtgcatctcctgcacagacctttccctgacctcttgacccattgcccaaactgcctgcttccccgttccccttggatggcgatgggtcacctcaaacttcacaagatccaaactaagatcctgatattcccttctcaaatgagcacttgggc

SEQ ID NO: 615803 - DNA, 567 bp, Homo sapiens
tccctttacagcagaactactgaaaagaggaggcaatgcctgctgtctctgcttacctcctcctactttctagtgaactcactcagtcaggcatttgtccttaccaccccaaggtcactggtgactcacaccctctgccgctcctcagaacaccttcccctgggtgctcatcagcatgtggggccccttgctgggcctcagggatgtcacctggctgggctcccctcccatttctctggccattgcttctcagactgtcttgctgattcagtcttgtctccccaaaccccaggtgttgccaagccctckactcagaccttgggcctttcctccttttggtccagcctcactcactaaatgatctcttgccaaatcatgatttccaaaacgatctctatgctcatgacttccaaatgtgcatctcctgcacagacctttccctgacctcttgacccattgcccaaactgcctgcttccccgttccccttggatggcgatgggtcacctcaaacttcacaagatccaaactaagatcctgatattcccttctcaaatgagcacttgggc

SEQ ID NO: 615804 - DNA, 567 bp, Homo sapiens
tccctttacagcagaactactgaaaagaggaggcaatgcctgctgtctctgcttacctcctcctactttctagtgaactcactcagtcaggcatttgtccttaccaccccaaggtcactggtgactcacaccctctgccgctcctcagaacaccttcccctgggtgctcatcagcatgtggggccccttgctgggcctcagggatgtcacctggctgggctcccctcccatttctctggccattgcttctcagactgtcttgctgattcagtcttgtctccccaaaccccaggtgttgccaagccctcgactcagaccttgggcctttcctccttttggtccagcctcactcactaaatgatctcttgccaaatcwtgatttccaaaacgatctctatgctcatgacttccaaatgtgcatctcctgcacagacctttccctgacctcttgacccattgcccaaactgcctgcttccccgttccccttggatggcgatgggtcacctcaaacttcacaagatccaaactaagatcctgatattcccttctcaaatgagcacttgggc

SEQ ID NO: 615805 - DNA, 588 bp, Homo sapiens
gttaccctcagaagaatagatgaaaagtttgtctgggcatggggtaactcccagtctcttctcttctccaatggttgatagttcctggttatttgatgagatccctagggagggggtttaagacaattatgtttcttttggaaagaagctttcttggtcagagaaggaaattccaaagagagtccctccctgcacttggtgggtgggggtagaacaaaacagggttagaggcagcttgattatgaggcagcctctatggtctctcagcatgtcaaagcatcgacttttggggtgtcgttttctaagccccaaaggcaaccactaatctacttcctatctctatagatttataratttgtctcttctggacatttcatataaatggaatcatacaatatgtggacttttgaactgacttctttcacttacgtacataatgtttttgaggttcatgtatgttgtagcatgtatcagcacttcattcctttttattgtcaagtaaaattccactgaataaatataccacattttatgtattcattcatcagtggagtatttgagttgtttccaccattttttggcttgtta

SEQ ID NO: 615806 - DNA, 596 bp, Homo sapiens
ggtaagcattatttttctttaaatatgtggtacaatttggtagtgaagtcatctgggactctagttttctttgtggaaatgatattttaaagtattttttaaagtaatatttttgagatataatttacaaaakgtaaaacatgctctttttaagtatacaattcaatgagttttgacaaatgtatacagttgtgaatcagtatctagaacatttccaactgcccagaaagtcccctatgtttttatttagtcaattctcttcctttaatagcagagtctggcaattgctgctgttttctgtccttgccattttgccgtttctagaatgccatatccacagaatcatagtttgtagccttttgagttcggcttctttcactgagcataatacttatgggattcgtccagctgtcgcatgtgtcagtagtttattttattgctgagtaatagtcaagtaaatgaatgtattcaatttgtttgtccattcagcaggacatggacttttgggctgctcctggtttgtctactataaaaaggtgactacaaacattcatgtgcagatccttacgtggacatgcctaggagcaagcagctag

SEQ ID NO: 615807 - DNA, 575 bp, Homo sapiens
ataaataaaaaaacaaagcaaatattaactctaggaagaaaagaaactgttgtagaagacagatgtcatcataatggacattttggctcatgagtgaatcatatttcatagtcatagggatgtaaatgctgcttattgagaataaaaatcrttatataaatatgtagggagagctgtagggaatgctggtagaagaatggagcaggattgctaaatcctcagctctcatggtaggtgtcaatagacaatgtctaaaattgacaaattagaatttagcaatgtaagcctattatttagaaacaaagaggttaaagacaagggaaaaagctctatgatctcaagaatagcttgcaggagtgatgcagggaagggagagacagaggtttttattattagctttttggtattatttgaatttaaagccatggcacagtggctcacacctgtaatcccaatactttgggaggctaaggcagggggatcacttgaggccaggactttgagatcagcctggggaacatagagagaccttgtctctacaaaaacaaaaaattagcaaaatgtggtggtgcttg

SEQ ID NO: 615808 - DNA, 596 bp, Homo sapiens
ggtaagcattatttttctttaaatatgtggtacaatttggtagtgaagtcatctgggactctagttttctttgtggaaatgatattttaaagtattttttaaagtaatatttttgagatataatttacaaaatgtaaaacatgctctttttaagtatacaattcaatgagttttgacaaatgtatacagttgtgaatcagtatctagaacatttccaactgcccagaaagtcccctatgtttttatttagtcaattctcttcctttaatagcagagtctggcaattgctgctgttttctgtccttgccattttgccgtttctagaatgccatatccacagaatcatagtttgtagccttttgagttcggcttctttcactgagcataatacttatgggattcgtccagctgtcrcatgtgtcagtagtttattttattgctgagtaatagtcaagtaaatgaatgtattcaatttgtttgtccattcagcaggacatggacttttgggctgctcctggtttgtctactataaaaaggtgactacaaacattcatgtgcagatccttacgtggacatgcctaggagcaagcagctag

SEQ ID NO: 615809 - DNA, 605 bp, Homo sapiens
tgctgaacatgtgtgtttgactaacctgttccacttaaattcctgtcttacctctccctcctttgaagtgcctgtctctggtctttgctgcaggctacatttcccagcctgcaagatggtcaccttgcagggtgtaccctttataagaaataaagtctcctttccaaaattacaattctgtgatttttcagttaacacactttccttacacttacagatttattgtaaaagatatttttggggctcagaaattgataccctcaaaaactggcactttgacatgctgagcagttttaaaagctgccctagaatcaaagttcctctaaccatgtcttgtttcccatctccacctccaggcgtaagcaggggactcwctttcgaatttccttatctgaccaagagagcttctttctaaaagaaacagtgtcttaaactcccttcctagaatttcttttttaacttaacttttattttaagttcaggggtacctgtgcaagtttgttacagagataaacttgtgtcatgggggtttgttgtacagattattttgtcaacctggtattccattaaataactaggaactatcaaccactggagaagagaag

SEQ ID NO: 615810 - DNA, 483 bp, Homo sapiens
agggaaataatagtgttggggtccctctctcactattgcccaccttgcctttctggaagggagcagatactctttttttttttgagacctaaatgggctgggcttttwtttttaatcgagacctaaatgggctgggcttttttaaaaatcagatactctttttttctttttctttttcttttttttttttttttttttgagggtcttgctctgtcacccaggctggagtgcgtggcaccatctcgcctcactgcaacctccatctcccaggttcaagcgactctcctgcctcagcctcctgagtatctgggattacagctacttaactgggcaaaatctgtccacagtacaatcctggaaaacgattacatgcccccatggaccacttttcactaccaaatgccccttcaagatatggcaacaagattcagttcaactttctacctcacaagggtaccagtatgtgttggctatggtttgaat

SEQ ID NO: 615811 - DNA, 614 bp, Homo sapiens
tattatggagcctattgctatttttgtaagaaatgctaataaggatataagaatccatctgaacagcaaatgtgttctagtataaytgctagttacattggctattaataaaatttgtttctgtaatatacctgttacaagaataattcttttgcactgtatttccatcaagcatataagacaaatatgaactatcaattgataaaacctaatttcaaatgtctttctcttcagactaatgtggaaactagagttgtaattataaattgcttgtacatattaaaactcttagctctaatcttgtatatttcctataaaccatatgatcgttggaagattttgtatgttttgaacatgtatccctatagcactttctattttttaccaatgtttttcattttcataaagcaacattttagtaataatttataaagcttttctttcttaaacagcaagtcaaatgactcaattctatttctaaacagtattattttatgagaaaattattattattctctcaaatttttaaaattataatctttttttttgcttcagccttttaaggaaagcttctataattggcttactttcaaaggatataaaatatgtattca

SEQ ID NO: 615812 - DNA, 615 bp, Homo sapiens
tttaatttcacatgcatcttaagtgtaatttccatggctgtgttggtatgatccttaaagaccccagaaaggggacttgctccctcatttaygacataatatggagaggcaaaagacccagaatagccaacactatattagggagaagaacaaaattgagagaatgacactacctgactttaaaattattataaaggtatggtaatcaggatggtgtggtattggcagaagaatggaaaaatgatcaatgaaacaaaatagatactccagaaatagattaatttaaacatagcgaactgatcttcaacaaaggagcaaagacagtataatggagaaaagatagtcttttcagcaaatggtgttgaaccaacctgcacacgtaccccctgaatttgaaagttgtaattatttaaaacaacaaaaacaaaaacaggacattcacataaaaaagagtctaagcattgtccttacactcttcaaaaaaaaaaataatttaaaatgtatcatagacctaaatgtaaaacgtaaaattataaaactcttagaagataatgtagaagaaaatctaggcgaccttgggtttagcaatgacttttttaggtaaaacaccaaaag

SEQ ID NO: 615813 - DNA, 542 bp, Homo sapiens
aaggaaaaaaagaaaaaagattattgtggtcttaaataaaaattaaaaatatttctccatttttattatctggaaggcttttgaataataaatatgtaattaggaaaagtcatgtatgaaaccttcaacttcaaaaatatgttatcatcattctgctatgagttcaattgttttattttttagctccgataaatgagtgaggatatgtgaaatttttctttctgtcccaggcttatttcacttaacatactgacctccagttccatccaygttctgcaaatgactgaatcttattatttttttatggctgactagtactctattaagtatattatggttactagaggctgagatgggcaatggagaggggagacgtaaagtggggatggttagtggatgaaaaaatatagttacatagaatgaataagatctagtaaatgatggcacaacagtgtgactacagtcaacaataatttatagtacatttgaaaagaacgaaaagaatataattagaatgttcctaacacgaggaaatgataaat

SEQ ID NO: 615814 - DNA, 309 bp, Homo sapiens
acttcaaatgaaacttggcatattccyagctgtggtggctatgagcaaaaaccgttgcctgagacaatagatagaaaaggaagggaactttgtcttgcgccttaggtaccagattgtccacagtgggatgaagcaccaaggaggctcttgggatttccaaagccaggatttggattttggaagacatttctggaccttctctgggtcagagaggagacctcagcctgaaggatgaatcccaggccaggcagcattcaccacaagctgactgaggaacccttggaccctaagggaacattggcggtaggc

SEQ ID NO: 615815 - DNA, 623 bp, Homo sapiens
tatagaacaccaaaaagattgaacccaragaagactacctcaaggtatttaataatcaaattccaaaatgtcaaggataaagaaagaactctaaaagcagcaagagaagagaaacaaataactttcaatgccattccaatacatcagtcagcagacttttcagtggaaaccttacaggccaggagagagtggcataacatgtttgaagtgctgaaggaaaacaaacaaacaaaaaaactctttatcctggaataatatatccacaggaaatatacttcaaatatgaaggagaaataaagactttcccagacaaacaaaagctgagagatttcatcaacaactgaactattcaacaagaaatactaaagagagtacttcaatcagaaaaaaaaaagatgttaataagtgaaaggaaattaccagaggtacaaaactcattgatgatagtaagtatggagaaaaacacagaatagtacaacagtgtaactgtagtttctaaactattcttatctaaacaataacccaatcaaaaataactactatgacttttcaagacatagacaatacaataaaatataaattgaaacaacaaaagttaaacactgggaaaataaagctaacat

SEQ ID NO: 615816 - DNA, 623 bp, Homo sapiens
tatagaacaccaaaaagattgaacccaaagaagactacctcaaggtatttaataatcaaattccaaaatgtcaaggataaagaaagaactctaaaagcagcaagagaagagaaacaaataactttcaatgccattccaatacatcagtcagcagacttttcagtggaaaccttacaggccaggagagagtggcataacatgtttgaagtgctgaaggaaaacaaacaaacaaaaaaactctttatcctggaataatatatccacaggaaatatacttcaaatatgaaggagaaataaagactttcccagacaaacaaaagctgagagatttcatcaacaactgaactattcaacaagaaatactaaagagagtacttcaatcagaaaaaaaaaagatgttaataagtgaaaggaaattaccagaggtacaaaactcattgatgatagtaagtatgkagaaaaacacagaatagtacaacagtgtaactgtagtttctaaactattcttatctaaacaataacccaatcaaaaataactactatgacttttcaagacatagacaatacaataaaatataaattgaaacaacaaaagttaaacactgggaaaataaagctaacat

SEQ ID NO: 615817 - DNA, 476 bp, Homo sapiens
gttctgtaaatatttattaggtccatttagtctgtagggctgattcagtctaatatttcattgttgatattctgtctggatgaccyatagaatgatgaaacagggtgttgacatctccagatatttttttaaattgaggtctatctttctcttcagctctaattatatgccaacagcaaacaatctgaaaaggaaatcaagaaaataaccctatttacaatagctgcaatataatacaatttctagaaattaactaaagaagtcaaagatctctacagtaagaagtataaaacattgatgcaagaaactgaagacaacacacaaaaatggaaggatattccatgtttatagattgaaagaatcaatgttgttaaaatatctatactacccaaagcaatttatagatttattgtatttcccgttaaaaaaataatgaaattcttcacagaaacagaaaaaattctaaagtttatatg

SEQ ID NO: 615818 - DNA, 593 bp, Homo sapiens
tactggcccttttcggcttgggatccatgtcagcagatgctcttgcctgagtgtaagggaaccaacaaatgaaaaagaataggctgaatatagaatgtaaatataaaaaatgtagcatataaaactgaaactattggaattagtttcataacaaatgaagagtgwaaagaaaaaaaataaatgtttcagggaaaaatatattagaaatgaatagaaaattaaagtccataaaaaaattacagagatcaacatgggaagtgggaagaaagatcatatggaaccacttactgtaaaatgggagaattttaatgaggtaaatgaataaatgctgcagaaatgtctaataagataatatccagaaataattttatgtagaagaatactattagttgtctgcctgacagcattttcccaatttgttctttgtagtaagaatctcattttgagaatataaataaaaataataatctgtgtagagggattagaaaagaaaaagaataccagaaaaaataaaaagtaaggatttatataagtcacaatgagccaagtttagtagcagataaaaacatttgaaatgttacatatggattaac

SEQ ID NO: 615819 - DNA, 593 bp, Homo sapiens
tactggcccttttcggcttgggatccatgtcagcagatgctcttgcctgagtgtaagggaaccaacaaatgaaaaagaataggctgaatatagaatgtaaatataaaaaatgtagcatataaaactgaaactattggaattagtttcataacaaatgaagagtgaaaagaaaaaaaataaatgtttcagggaaaaatatattagaaatgaatagaaaattaaagtccataaaaaaattacagagatcaacatgggaagtgggaagaaagatcatatggaaccacttactgtaaaatgggagaattttaatgaggtaaatgwataaatgctgcagaaatgtctaataagataatatccagaaataattttatgtagaagaatactattagttgtctgcctgacagcattttcccaatttgttctttgtagtaagaatctcattttgagaatataaataaaaataataatctgtgtagagggattagaaaagaaaaagaataccagaaaaaataaaaagtaaggatttatataagtcacaatgagccaagtttagtagcagataaaaacatttgaaatgttacatatggattaac

SEQ ID NO: 615820 - DNA, 466 bp, Homo sapiens
gatttttgtataagctgagagatgaggatccagtttcattctcctacatgtggctagccaattatcccagcaccatttgttgaaaagggtgtcctttccccactttatatttttgtttgctttgttgaagatcatcccactactgggtatgtacccagaggaaaataagtcattattcaaaaaagatatttgcacacacatgtttacagcagcacaattcataatatagcagcaaaattcataatagcaaagttgtggaaccaacccaaatgcccatcaatgagtggataaactctgatatatatatattccatyatatatatattctatcatatatatatgaatatatatattctatcatatatatgaatatatatattctatcatatatatatgaatatatatattctatcacatatatatgaatatatatattctatcatacatatgaatatatataatattc

SEQ ID NO: 615821 - DNA, 597 bp, Homo sapiens
attactttaaaggtgaattagacactagattggtggatagactaaagacctctaaaatatttattaaggaaaaaaatatgtataaacaaaactgaaaatgtaacaaatgtatgaaagatttagacataggaaaacttttatcactgagctgcaggagcaagacaagtcaagaaaaatgatacaggccagaacttttagaaactccaagaaccttaaatagaagtaatggatagtcactggagtattgtaaaaagggaatarcttgctctggtgtcagttttaagaagacctctccactgctgtgtgaatgacagaaccaagaggagagaggcggattcaccagtatggagttgcctcagttattcagccacatggtcaccaaaactggttgtttaaccatcaagttagatgataaaagatgacttcagcatacacgctggaaaatatttatttttgaatgatatacatgactactagcttgatcaacatgcgtattctaaatcaggtacaacaatgtaagaagaatgtaaaatgaatgtatataattataaatatataattatatatcatatatcacatataataattattaaatta

SEQ ID NO: 615822 - DNA, 536 bp, Homo sapiens
tttaaatgcaaatatatgcaaaattttatatgaatataaaaggatcttagcctccacacttttctgttttccattactattacatcacagaataaaatatgcacaaagtcagaagagaatatgccaagctgctttattctttttgcaaataagaaacaaactgcaactcagtaaagattagtaagttgtatgattactttaaaggtgaattagacactagattggtggatagactaaagacctctaaaatatttattaaggaaaaaaatatgtataaacaaaactgaaaatgtaacaaatgtatgaaagatttagacataggaaaacttttatcactgagctgcaggagcaagacaagtcaagaaaaatgatacaggccagaacttttagaaactccaagaaccttaaatagaagtaatggatagtcactggagtattgtaaaaagggaatagcttgytctggtgtcagttttaagaagacctctccactgctgtgtgaatgacagaaccaagaggagagaggcggattcaccagt

SEQ ID NO: 615823 - DNA, 567 bp, Homo sapiens
caagatgaaaaatcacagaatacccacagaaaacaatgatacaaacaacagctaaattatcatcagaaaataaaggtataaaaagaattatatatttaacatgctaagaaagtaaattatcaaccaataattttgtatcccataaaaatattcttaaacagatgtgtgtgaaatacatattcagaaaaatgaaaactgagcacagggttcaccatatatatgcagtacaagaaatactaaagaaaacttttcaggctgaaaataaattgtacyatatgaaaattcagatttgtagttaggaataattagcatgttaaatgacaaattataaacatgttagtaaataagtgaatgatttttttccaacaagaaactgtttaaaggtagtaaattttatcattaggtaggacttgtactatgcatggaagtaaaatgtatattagaaacaacacaaagggtaattggttaatgaaaaaaatgttatcaagttgagagtttcttatatttgtgtaatggaaattgtgaagtgtaaagtaataggttattaattctaagtaaattatgaaa

SEQ ID NO: 615824 - DNA, 551 bp, Homo sapiens
tcaatctaccattctgggatctgtaagacagtggccatcttctcacagctccactaggtagtgccccagtggagactctgtgtgggggctctcacccatatttcccttacacactgccctagcacaggttctccatgagggctccatccctgcatcaaacttttgcctggacatttaggtgtttctgtacatcctctgaaatctaggcagaggttctgaaacctcaattcttgacatcagtgcacctgcaggctcaacaccacatgaaagctgctaaagcttgggggttggaccctctgaagtgagtgcttgaactttaatttgaccccttttagccatggctgagatgcagggcaccgagtcttgaggctgtatgaagaagcaargccctgggcctgacacttgaagcctatttttcctcctaggcctccaggcctttgatgggacgagctgccttgaagacatctgaaatgctctggagacattttcttcattgtcttggtgattaacatttggctcctcattacttatgtaaatttagccagcaggct

SEQ ID NO: 615825 - DNA, 551 bp, Homo sapiens
tcaatctaccattctgggatctgtaagacagtggccatcttctcacagctccactaggtagtgccccagtggagactctgtgtgggggctctcacccatatttcccttacacactgccctagcacaggttctccatgagggctccatccctgcatcaaacttttgcctggacatttaggtgtttctgtacatcctctgaaatctaggcagaggttctgaaacctcaattcttgacatcagtgcacctgcaggctcaacaccacatgaaagctgctaaagcttgggggttggaccctctgaagtgagtgcttgaactttaatttgaccccttttagccatggctgagatgcagggcaccgagtcttgaggctgtatgaagaagcaaagccctgggcctgacacttgaagcctatttttcctcctaggcctccaggcctttgatgggacgagctgccttgaagacatctgamatgctctggagacattttcttcattgtcttggtgattaacatttggctcctcattacttatgtaaatttagccagcaggct

SEQ ID NO: 615826 - DNA, 587 bp, Homo sapiens
agttacattaacatggatgccttccatttatttagatctctaattatttcagtgacatttttgtagttttcagaatataaattgtactgcttttgttacatttattcctaaatatttttaatctgttgcaaatgaaattgtttattaatgccattttccatttgttcactyctgtcttgcatattttttcaactctattttgaacattgttaagtactatagtgagttatattaaaactaacaaatatctgagtcagatgtaatctgatatgttctgacattctaaatatttcattaatagttatgaataaatgatataaaagaaaaaataaatcaataatatataaaatatataaaagagaatatgttcaagtagaaataaaactcagtgctataaaacttcatattaaggtatagtaagaattttgaacagattaaaataatttatctctactttgaaggagagaccttcaaaactgattttagagcactaataaattaatatattatattccactcccaagatttgtaatactagtttaaatttaactacttgctcaattttcaataaaagattttatgtgaaa

SEQ ID NO: 615827 - DNA, 320 bp, Homo sapiens
taagtatttggctttatttctgggttctttattctattcctttggtctacgtgcctatttttataccagtactatgctgttttgktaactataacctggtagtatagtttgaagtcgaataatgtggtgcctccagatttgttctttttgcttagtcttgctttggctatgtgggctcttttttggttccacataaattttaggactgtttttcctagttctgtgaagaatgatattcatctttctcttaatccttctgtatatctctcttttcttctttcttcttcctctttccttttattttctgattttacaaataa

SEQ ID NO: 615828 - DNA, 573 bp, Homo sapiens
atcttgtttgtttattggttacttgtttattttctgtctccccccataagaatgttcattgagaggagtagggccctttcctgtcttgtcttctgtcctatgttcagcatgtggaatagtttgttatacatagtgtagtagctactctactggtaggataaatgaatgaattatctcatctaatatttacaaaaaatatattttttctcacttaaaaatgtggaaatgggaaaactcaggaaagttaagtaatttccttgtcattgcagagccagtaaatgaaggaattttgtgtcattggctttatcaggtcttcataaggctcagaatctgtgtcttcattttcatcctcatcttagtcatgccttcatgagaatcaccttggagtgtgactgacagataggcttaaccctaggacatttagccattcatttatttataccctgacatgctctatagaaatttmatggataccattcttggttgaataagtggaagagtagaaacatcccaagagtagatcagattaaaaatgttgtatgaagccaggcacgagatcagattatacaaaat

SEQ ID NO: 615829 - DNA, 573 bp, Homo sapiens
atcttgtttgtttattggttacttgtttattttctgtctccccccataagaatgttcattgagaggagtagggccctttcctgtcttgtcttctgtcctatgttcagcatgtggaatagtttgttatacatagtgtagtagctactctactggtaggataaatgaatgaattatctcatctaatatttacaaaaaatatattttttctcacttaaaaatgtggaaatgggaaaactcaggaaagttaagtaatttccttgtcattgcagagccagtaaatgaaggaattttgtgtcattggctttatcaggtcttcataaggctcagaatctgtgtcttcattttcatcctcatcttagtcatgccttcatgagaatcaccttggagtgtgactgacagataggcttaaccctaggacatttagccattcatttatttataccctgacatgctctatagaaatttaatggataccattcttggttgaataagtggaagagtagaaacatcccaagagtagatcagattaaaaatgttgtatgaagccagscacgagatcagattatacaaaat

SEQ ID NO: 615830 - DNA, 562 bp, Homo sapiens
gtataggggaaattaaatggaccaaaaatatacaacagatggttagatgtttcccaatctcattccctcttcttgggctggtaggaagactgtttcccagcccttgtggtagctaggctggaccgtgtgactatattatggtcacttggtratcacatgtgacacgtcttcactctgggccttttcataaacctccctccatatcctccatgttctcatttcctcttcttgtgctgactacagagaccatttgttaagaatgtaagagtcggccgggcgcagtggctcacgcctgtaatcccagcactttgggaggccgaggcaggcggatcatgaggtcaggagtttgagaccagcctgaccaacatggtaaaaccctgtctctagtataaaaaaaaatacaaaaattagctggctgtggtgctgcacacctgtagtcccagctacgtgggaggctgaggcagaagaatcgcttgaacccaggaggtagaggttgcagtgagccgagattgtgccactgcactccagcctgggaaccagcctgggcgacagagtgagaatc

SEQ ID NO: 615831 - DNA, 562 bp, Homo sapiens
gtataggggaaattaaatggaccaaaaatatacaacagatggttagatgtttcccaatctcattccctcttcttgggctggtaggaagactgtttcccagcccttgtggtagctaggctggaccgtgtgactatattatggtcacttggtgatcacatgtgacacgtcttcactctgggccttttcataaacctccctccatatcctccatgttctcatttcctcttcttgtgctgactacagagaccatttgttaagaatgtaagagtcggccgggcgcagtggctcacgcctgtaatcccagcactttgggaggccgaggcaggcggatcatgaggtcaggagtttgagaccagcctgaccaacatggtaaaaccctgtctctastataaaaaaaaatacaaaaattagctggctgtggtgctgcacacctgtagtcccagctacgtgggaggctgaggcagaagaatcgcttgaacccaggaggtagaggttgcagtgagccgagattgtgccactgcactccagcctgggaaccagcctgggcgacagagtgagaatc

SEQ ID NO: 615832 - DNA, 538 bp, Homo sapiens
tctacctgaatttacatcatgttgtagcctggctccttgcattttggttttattttgctgtctccatgcctttttttgttttgttttgtttttctgagacagagtcttgctctgtcacccaggccagagtgcagtggcacgatctcagctcactgcaagctctgcctccagggttcatgccattctcccgtctcagcctccygactagctgggactacaggcgccagccaccatgcccagctaattttgtttttgtatttttagtagagacggggtttcaccatgttagccaggatggtctcgatctcctgacctcgtgatccacctgcctcagcctcccaaagtgctgagattacaggtgtgagccaccacgaccagcctgctgtctccatgcctcttatggatgtgtctgtattgactatctcagaggatgactgctagaaggcagggacctggtttatgtcattctttgtacacagacccaagaacaatgaagaacttgctaaagctattggatgtgatgcccagaatttataat

SEQ ID NO: 615833 - DNA, 584 bp, Homo sapiens
tttactcaactagtagtcttgttagtgcaggcagttgaattgtaaagtcattttaatgtaaacaatgtgctatgtaatggcagataatttargttctgtatagcaagttttttcaatgtaattttcagtaacatttaatattttggggtcatttgttggcttttcaagatataaataaccaacatttataagggagggtcaacttagaaaatattgttcaaatttcatggctgaaataaatggaagtaatgaaaaaattgaacttattaaataagccagaataatcctaaaaagatgaaatagagtttatttttagaaaaacagaattattttgctagttattttactttgaagtaatttgtagttcagtctatggtttgtgatgtttccagaaaaggtaagtcacttttattgtaactccctcaatagctaaaatctttataggcagtaaacttaattcatggttttttttttttttttttttagttttattattagaagttaacattaactggtgacattattagtgcttctgtaaattcagaattagcattttggcaagccatttgtttttggaaatgcat

SEQ ID NO: 615834 - DNA, 625 bp, Homo sapiens
ctggcttcatagaatgagtcrgggaggagtccctcctccttgatattttggaaaagtttcagtagaattgacactagttctttgtatgtctggtagaaactgactgaatccatctagtctggggttttgttgtttgggttttggttggtaggttttttattactaattcaatttcagaactcagtactggtctgttcagggtttccatttcttcctgactcattcttagaagattttgtgcttccaggaatttatccatttcctcgagattttctagttcgtgtgcatcaaagttcttcataaggttctctaaggatcttttgtatttctgtgggattatttgtaatatcatctttatcatttctgattttgcttatttgtatcttctatctttgttaatctagtgagtagtctattgattttctttatcctttcagaaaaaaacaaccaacttttggcttggttgattacttatatagatattttggtctcagtgtcattcagtccttctctcattttaattattccttttcttctgctagctttgaagtcagtttgttcatgtttttctagttcatctaggtgtgatgttgattattgatttgagatctttctaacatttcga

SEQ ID NO: 615835 - DNA, 625 bp, Homo sapiens
ctggcttcatagaatgagtcggggaggagtccctcctccttgatattttggaaaagtttcagtagaattgacactagttctttgtatgtctggtagaaactgactgaatccatctagtctggggttttgttgtttgggttttggttggtaggttttttattactaattcaatttcagaactcagtactggtctgttcagggtttccatttcttcctgactcattcttagaagattttgtgcttccaggaatttatccatttcctcgagattttctagttcgtgtgcatcaaagttcttcataaggytctctaaggatcttttgtatttctgtgggattatttgtaatatcatctttatcatttctgattttgcttatttgtatcttctatctttgttaatctagtgagtagtctattgattttctttatcctttcagaaaaaaacaaccaacttttggcttggttgattacttatatagatattttggtctcagtgtcattcagtccttctctcattttaattattccttttcttctgctagctttgaagtcagtttgttcatgtttttctagttcatctaggtgtgatgttgattattgatttgagatctttctaacatttcga

SEQ ID NO: 615836 - DNA, 625 bp, Homo sapiens
ctggcttcatagaatgagtcggggaggagtccctcctccttgatattttggaaaagtttcagtagaattgacactagttctttgtatgtctggtagaaactgactgaatccatctagtctggggttttgttgtttgggttttggttggtaggttttttattactaattcaatttcagaactcagtactggtctgttcagggtttccatttcttcctgactcattcttagaagattttgtgcttccaggaatttatccatttcctcgagattttctagttcgtgtgcatcaaagttcttcataaggttctctaaggatcttttgyatttctgtgggattatttgtaatatcatctttatcatttctgattttgcttatttgtatcttctatctttgttaatctagtgagtagtctattgattttctttatcctttcagaaaaaaacaaccaacttttggcttggttgattacttatatagatattttggtctcagtgtcattcagtccttctctcattttaattattccttttcttctgctagctttgaagtcagtttgttcatgtttttctagttcatctaggtgtgatgttgattattgatttgagatctttctaacatttcga

SEQ ID NO: 615837 - DNA, 520 bp, Homo sapiens
agaacccttaaaaatttcatcaatatactgatccaactttgtgtatcatttcacattaaaagtaacaaactggtagkcagaagtttttaaattttttaatccctttctccaaggaaaacaatcaaatttaatagaaacttatgcacagaattctgcttacatactaactacccaagcctttgatgcctagtactggcaacatggttaaacatggacataccctgttttctaaaacagttgaatttacttaatcatgaaatatataaatacttttttgaaataaatataagggggaaaaagacccaaaaaagtatctatggttttatttatcatctcttgaaaatatttccttaaaaatagtttttccttaaattttttttccttaaaaaatgtgtttaattatacaaggcaaaatctatacacagaaatactgatacatgtgctatcaaaaagataacacatcatgatcaagcaggtttcatcccagggatatagaaatggtttaacataggccaatcag

SEQ ID NO: 615838 - DNA, 538 bp, Homo sapiens
ctcctccctgggtcgccagcttccagaccctcgaactacaacaaaattgctcctccctgggtcagcagctccacgaccctcagaccacaacaagacctctcctccctgggtcgccagctttctgaccctccaactrtaacaataatgctcctgcctcagtctgcagctccacgaccctgaaactagaacaagacgtctcctccctaagtctccagcttcccgatcctcaaattgcaacaaccttgctcctgcctgggtcctcagctccacaaaaatcaatctagaacaagacctctcctccctgggtcgccagcttcctgaccctcgaactacaacaaaattgctcctccctgggtcagcagctccacgaccctcagaccacaacaagacctctcctccctgggtcgccagctttctgaacctccaactataacaacaatgctcctgcctcagtctgcagctccacgaccctgaaactagaacaagacgtctcctccctaagtctccagcttccggatcctcgaattgcaacaacgtt

SEQ ID NO: 615839 - DNA, 538 bp, Homo sapiens
ctcctccctgggtcgccagcttccagaccctcgaactacaacaaaattgctcctccctgggtcagcagctccacgaccctcagaccacaacaagacctctcctccctgggtcgccagctttctgaccctccaactataacaataatgctcctgcctcagtctgcagctccacgaccctgaaactagaacaagacgtctcctccctmagtctccagcttcccgatcctcaaattgcaacaaccttgctcctgcctgggtcctcagctccacaaaaatcaatctagaacaagacctctcctccctgggtcgccagcttcctgaccctcgaactacaacaaaattgctcctccctgggtcagcagctccacgaccctcagaccacaacaagacctctcctccctgggtcgccagctttctgaacctccaactataacaacaatgctcctgcctcagtctgcagctccacgaccctgaaactagaacaagacgtctcctccctaagtctccagcttccggatcctcgaattgcaacaacgtt

SEQ ID NO: 615840 - DNA, 538 bp, Homo sapiens
ctcctccctgggtcgccagcttccagaccctcgaactacaacaaaattgctcctccctgggtcagcagctccacgaccctcagaccacaacaagacctctcctccctgggtcgccagctttctgaccctccaactataacaataatgctcctgcctcagtctgcagctccacgaccctgaaactagaacaagacgtctcctccctaagtctccagcttccsgatcctcaaattgcaacaaccttgctcctgcctgggtcctcagctccacaaaaatcaatctagaacaagacctctcctccctgggtcgccagcttcctgaccctcgaactacaacaaaattgctcctccctgggtcagcagctccacgaccctcagaccacaacaagacctctcctccctgggtcgccagctttctgaacctccaactataacaacaatgctcctgcctcagtctgcagctccacgaccctgaaactagaacaagacgtctcctccctaagtctccagcttccggatcctcgaattgcaacaacgtt

SEQ ID NO: 615841 - DNA, 538 bp, Homo sapiens
ctcctccctgggtcgccagcttccagaccctcgaactacaacaaaattgctcctccctgggtcagcagctccacgaccctcagaccacaacaagacctctcctccctgggtcgccagctttctgaccctccaactataacaataatgctcctgcctcagtctgcagctccacgaccctgaaactagaacaagacgtctcctccctaagtctccagcttcccgatcctcaaattgcaacaaccttgctcctgcctgggtcctcagctccacaaaaatcaatstagaacaagacctctcctccctgggtcgccagcttcctgaccctcgaactacaacaaaattgctcctccctgggtcagcagctccacgaccctcagaccacaacaagacctctcctccctgggtcgccagctttctgaacctccaactataacaacaatgctcctgcctcagtctgcagctccacgaccctgaaactagaacaagacgtctcctccctaagtctccagcttccggatcctcgaattgcaacaacgtt

SEQ ID NO: 615842 - DNA, 547 bp, Homo sapiens
gcatgcccggctaatttttttttttttttttttttttttgtaattttagtagagacagggtttaaccatgttggccaggctggtcacaaactcctgacctcaggtgawccacctgccttggcctcccaaagtgctggaattacaggcgtgagccaccatgccccgccgactctgacttttaagttgacagtcaatgggaaacaggttacctgataggaaagaactctgcagctcaaagcagttcatatgctccattttaatgttaccaatctccattctcctgccaactcgcccacttgagggagggagttgaagaagatgagggtggtaaagtctacacggcgttaatgaatgaatgaatggaacaatattacttaaaaatgcaatgagttctctagtcagacttgaggtagatgcaaaagaaaaaaatggttgtagaagacagtcaaaatctttgggatgagtattggggtatagggtcctctattttcgtactgttcaaaatagctaaaacaatcaagcaatgctctcagaccaagcaaggtaa

SEQ ID NO: 615843 - DNA, 372 bp, Homo sapiens
tatattaataacattattcttacattttatgatacatttattactagttcaagtaatcttccaaaccatttttcyttttggaaagtttggtttattgcaatcctgcaattttgttcaaagttggaaaggtaaatgtaagccatgtctcctccaaatgaagtgagttggagttacccttcattgcacccctttccctggtgcactagctgttttgtgtgatctgtgaaataaaggtgctgtctggtccttgcctgtcacagttgcctgccagcagccattacgggctacataaaaactgcgtaagatccttttatcatgcaatggaagtttggcagtgcaggtgaaacctttttctgtcaggtaattcattgt

SEQ ID NO: 615844 - DNA, 372 bp, Homo sapiens
tatattaataacattattcttacattttatgatacatttattactagttcaagtaatcttccaaaccatttttccttttggaaagtttggtttattgcaatcctgcaattttgttcaaagttggaaaggtaaatgtaagccatgtctcctccaaatgaagtgagttggagttaccyttcattgcacccctttccctggtgcactagctgttttgtgtgatctgtgaaataaaggtgctgtctggtccttgcctgtcacagttgcctgccagcagccattacgggctacataaaaactgcgtaagatccttttatcatgcaatggaagtttggcagtgcaggtgaaacctttttctgtcaggtaattcattgt

SEQ ID NO: 615845 - DNA, 592 bp, Homo sapiens
cttttgccttcttcataactttgtctaggacagatagcacatatatataggctcaatgcagaaaggtttactacataagattttgattaggtcactgaaaaattagctgtatttttgaaaataatttgttgggagactaagctttcaatttcttattagaaaggagtattttcaattaaggtgatgaatggtcaatatctttgtaatgttttctccttgattccagttttccttttgatatattctgttaccagaggagagttaactcataaaagacctttcctttaggcttctgtttggcatacagagaagtgaagaacagggataaatagacaacgtaataacagtgaccagcaggaaggtgttgcagtcaacaagattaaaacaaaacctaatctgcaaagtgaattgttcaatttcatcattgaaaactgtatatatattttttaaacctgaggggctgaggagattagatgtattgtacatttagaatgttaagtgaatgtaactgtattcatccacatagtgattwcccttagtaacataagaaattgtacttatactttaaagtggcttttgaaagtagaaggaa

SEQ ID NO: 615846 - DNA, 597 bp, Homo sapiens
aatacctaatatacatgtttatatgtcacagctaaaatgatttttagttgaaaaaaacaagaggcagagaataagggtttggtgaagaaaaattgttctataaataaaaatatggctaactaagtcagtattaaaatacaagcctattattaaaatactgggtaacaaaatgaattaactatatatatatgtttcaacacttgggtctttctcataagcagaggttgcaggacggagtaagttgtccttcctcttgcagagggtaccttgatatgtcccagacctctaatacctctttgaggtttttcttctttaggttcttggcttttaaatacacacacatgcacacacgcacacacacaaactagatacattacactatatgtagtatatgtatagacatactatatatactatatctaacatatatactatatgacatatatacactatatgtagtatatgtatagacattatactatatatactatatmtaacatatatactatatataacatatagaaatactatatatgtaaaatatatagtattaagtaataaatagtatagatgtatatattaatatgtatataatgt

SEQ ID NO: 615847 - DNA, 597 bp, Homo sapiens
aatacctaatatacatgtttatatgtcacagctaaaatgatttttagttgaaaaaaacaagaggcagagaataagggtttggtgaagaaaaattgttctataaataaaaatatggctaactaagtcagtattaaaatacaagcctattattaaaatactgggtaacaaaatgaattaactatatatatatgtttcaacacttgggtctttctcataagcagaggttgcaggacggagtaagttgtccttcctcttgcagagggtaccttgatatgtcccagacctctaatacctctttgaggtttttcttctttaggttcttggcttttaaatacacacacatgcacacacgcacacacacaaactagatacattacactatatgtagtatatgtatagacatactatatatactatatctaacatatatactatatgacatatatacactatatgtagtatatgtatagacattatactatatatactatatctaacatatatactatatataacatatakaaatactatatatgtaaaatatatagtattaagtaataaatagtatagatgtatatattaatatgtatataatgt

SEQ ID NO: 615848 - DNA, 636 bp, Homo sapiens
acgtgctgttctattcacatattctggtcttttctttcaaatgttctcatttcttttttccttttctgcaatttagaatacatgttttgctctaaaaattttaaattagtattttaamtaacctgtgttatcattccatgtcaaactctaaacaacacggacatttctgaacagggccacaggaaaatgcagtttaatgaagaataaaggtttggggtccttctgcaaggcagaacatagagttgagaaaaattagaaagtacatggtaatatccattgagtattaggaaaggaatatggatttaaagagacgatgacacagtatgttttatgaacaacccagctaagctagttctgcttaacccattctttttatttcaatcatgttcacttttacttgtatctttggtaataaggaaaacattgcaaactagatttcccgtgaagatgtttatggcactctccaggtttccttgccctttgttcaacatgtggatttcatgaactaatgatgctcagtgatgaaaatctaggttagtggccattgctttggtaaactctctgactcccattgttattcacccctaacccataggagattacatcatcctctatgctgcttagacctctccatac

SEQ ID NO: 615849 - DNA, 636 bp, Homo sapiens
acgtgctgttctattcacatattctggtcttttctttcaaatgttctcatttcttttttccttttctgcaatttagaatacatgttttgctctaaaaattttaaattagtattttaaataacctgtgttatcattccatgtcaaactctaaacaacacggacatttctgaacagggccacaggaaaatgcagtttaatgaagaataaaggtttggggtccttctgcaaggcagaacatagagttgagaaaaattagaaagtacatggtaatatccattgagtattaggaaaggaatatggatttaaagagacgatgacacagtatgttttatgaacaacccagctaagctagttctgcttaacccattctttttatttcaatcatgttcacttttacttgtatctttggtaataaggaaaacattgcaaactagatttcccgtgaagatgtttatggcactctccaggtttccttgccctttgttcaacatgtggatttcatgaactaatgatgctcagtgatgaaaatctaggttagtggccattgctttggyaaactctctgactcccattgttattcacccctaacccataggagattacatcatcctctatgctgcttagacctctccatac

SEQ ID NO: 615850 - DNA, 492 bp, Homo sapiens
cacaacagcctttggaagcctacgttggccataaggttcaggtccagaggagatcatacatacaaggacctctagatgggaaaggcggagctctggagctaggagtcaagaagcagagaggggcctggggaactcgagcaataatagcacttgcaattacttctgcttctcttggtagaggttagatctcagagatgctgctgctgttgtgatggttttacaggagtcagagcactaagagtgggatttcctggctcataaaatattattaaaagcaacaaacaaacaaaaaaacacacaaaacatatttccagccagaccgagtgcagaaatggtgtgttgtccttgaatcgagtaggcatctagaggtggtctctccatgtcatgggtggcgtttgcgtagcccrcagcatcgacaaactgtcagtgcccaaatatcacacacacacacacacacacacacacacacacatacacacacacttctgggat

SEQ ID NO: 615851 - DNA, 266 bp, Homo sapiens
atgaaacaggttttgtgttttaaaattttctttatctattttattatttatttttgctctaaacttyattgtttcctacattcagtttgctttaggtttatttttttcttctctttgtctacttaaggtagaaatttgggtaattgatttgatttttcttttcattgaaatgtaggcatttttagctatatattttcctctaagtactgctttttctacatgtcatatattttatgtgctctttggttttgtttctttgtttaatt

SEQ ID NO: 615852 - DNA, 614 bp, Homo sapiens
ctgttacctgtaggaggaagaaagaaccaggattgggaaatagagatagaaatgaaccccctccgctgggcgcggtggctcatgcctgtaatcccatcactctgggaggccgaggcgagtggatcacctgaggtcagcctggccaacatgaggaaaccscgtctctactaaaaatacaaaaattagccaggcatggtggcgggcacctgtaatcccagctactcaggaggctgaggcaagagaatcacttgaatctggaaggtggaggttgcagtgagccaagatcacgtcactgcactccagcctgggcaagagaggttccatcttaaaaaaaaaaaaaaaaggaaaaaagaaaaaagaaaccctgtctttcataggttttacttcaggtacttgtatatattttacataaatatacaaaataattaaataaaactagtccctaaatactgataattgacaatgaagttaaataaataaactaatgtcataaattattggtaaacaacacaaagagaaactatgccaagtcagtttaagagtttaagatatggcaatttcgtcattcatccttacttggatatgcccttaggataaaaagaattaaaggaaaa

SEQ ID NO: 615853 - DNA, 614 bp, Homo sapiens
ctgttacctgtaggaggaagaaagaaccaggattgggaaatagagatagaaatgaaccccctccgctgggcgcggtggctcatgcctgtaatcccatcactctgggaggccgaggcgagtggatcacctgaggtcagcctggccaacatgaggaaaccccgtctctactaaaaatacaaaaattagccaggyatggtggcgggcacctgtaatcccagctactcaggaggctgaggcaagagaatcacttgaatctggaaggtggaggttgcagtgagccaagatcacgtcactgcactccagcctgggcaagagaggttccatcttaaaaaaaaaaaaaaaaggaaaaaagaaaaaagaaaccctgtctttcataggttttacttcaggtacttgtatatattttacataaatatacaaaataattaaataaaactagtccctaaatactgataattgacaatgaagttaaataaataaactaatgtcataaattattggtaaacaacacaaagagaaactatgccaagtcagtttaagagtttaagatatggcaatttcgtcattcatccttacttggatatgcccttaggataaaaagaattaaaggaaaa

SEQ ID NO: 615854 - DNA, 614 bp, Homo sapiens
ctgttacctgtaggaggaagaaagaaccaggattgggaaatagagatagaaatgaaccccctccgctgggcgcggtggctcatgcctgtaatcccatcactctgggaggccgaggcgagtggatcacctgaggtcagcctggccaacatgaggaaaccccgtctctactaaaaatacaaaaattagccaggcatggtggcgggcacctgtaatcccagctactcaggaggctgaggcaagagaatcacttgaatctggaaggtggaggttgcagtgagccaagatcacgycactgcactccagcctgggcaagagaggttccatcttaaaaaaaaaaaaaaaaggaaaaaagaaaaaagaaaccctgtctttcataggttttacttcaggtacttgtatatattttacataaatatacaaaataattaaataaaactagtccctaaatactgataattgacaatgaagttaaataaataaactaatgtcataaattattggtaaacaacacaaagagaaactatgccaagtcagtttaagagtttaagatatggcaatttcgtcattcatccttacttggatatgcccttaggataaaaagaattaaaggaaaa

SEQ ID NO: 615855 - DNA, 597 bp, Homo sapiens
tttttaaatcctttgagacatgtagcttctaagatagatcagatccctcacttgccagaagtaagccttattcccttgagcctgagcttcctggggaagggtggagacagctcctggaatctatgtaggcaggtgtacaggaaatacttccactgaaaaygaatgcttgatgctgaccttctggcaagctgtgattcctctttctttgtccttctatgtaaatgtgatgtcacatgtgacctataatagtcttgtgaggtggagcatatattagagcctaataagaccacctcctcttggatgatgacgaatttaatgcacacgcacacatacatacagtctctttccactgaaacacctaggaacaatgactatgccgtgagcacaaggttgtgctctctaaatattctttcctacttgaaaataaaaatattgctgcttgaaaaaaggactaattctaggtttggggcacaaagtcatgccaggaaatcctataccagaagacaagaaagttaccaaagctttcagggatcatatcaaaaaggactttaggagccaacttgaagaagctccaatggtcaaactatttagagtttg

SEQ ID NO: 615856 - DNA, 435 bp, Homo sapiens
ataaagtgaagcagcaaattatgatgtattatagaagtttcacaatgttatccagaagatctagctaagatcattgatgaaaatccagatcattttttagtggctacactaaacaaaaggtttcaatgtagagaaaacagccttgcattgaaagaaggtgccatctagaactttcctagctagagagaaattaatgyctggcttcaaaatatggtctgactctctcgttagtactaatgcggctggtgaccataagttgaagccaatgttcatttaccattatgaatatcctagggcccctgggaattatgctaaatctactctgcctgtgctgtataaatgtaacaatgaggcctggatggcagcctgtcagttgtcagcatggtttactaaacatttttagcccactgttgaaacctactgctcggaaaaaaa

SEQ ID NO: 615857 - DNA, 435 bp, Homo sapiens
ataaagtgaagcagcaaattatgatgtattatagaagtttcacaatgttatccagaagatctagctaagatcattgatgaaaatccagatcattttttagtggctacactaaacaaaaggtttcaatgtagagaaaacagccttgcattgaaagaaggtgccatctagaactttcctagctagagagaaattaatgtctggcttcaaaatatggtctgactctctcgttagtactaatgcrgctggtgaccataagttgaagccaatgttcatttaccattatgaatatcctagggcccctgggaattatgctaaatctactctgcctgtgctgtataaatgtaacaatgaggcctggatggcagcctgtcagttgtcagcatggtttactaaacatttttagcccactgttgaaacctactgctcggaaaaaaa

SEQ ID NO: 615858 - DNA, 435 bp, Homo sapiens
ataaagtgaagcagcaaattatgatgtattatagaagtttcacaatgttatccagaagatctagctaagatcattgatgaaaatccagatcattttttagtggctacactaaacaaaaggtttcaatgtagagaaaacagccttgcattgaaagaaggtgccatctagaactttcctagctagagagaaattaatgtctggcttcaaaatatggtctgactctctcgttagtactaatgcggctggtraccataagttgaagccaatgttcatttaccattatgaatatcctagggcccctgggaattatgctaaatctactctgcctgtgctgtataaatgtaacaatgaggcctggatggcagcctgtcagttgtcagcatggtttactaaacatttttagcccactgttgaaacctactgctcggaaaaaaa

SEQ ID NO: 615859 - DNA, 600 bp, Homo sapiens
caaattggaaaaaaagaaaacaatttatttttgcttgcaggttatatgatcttatatttatagaaacctaagatgccaccaaaaaactattaacagataaagtcagtaaaactgcaggatacaaaatccacatacaaaaaaattagtagtatttctgtatgccgatagtgaacaatctgaaaaagaaaccaagaatgtaatcccatttacaatagctaataataaaacaaaactctttggttaaggaataaacttatccaaagaagtgaaaaacctctacaatgaaaactgtaagacattgatgaaagaaatcgaagagaactcacaaaaaaggaaagatattttgtttgtggattagaagaatcaatattattaaaatgtccctactatccaaagctatctacagattcaatgaaatccctatcaaaatatcaatgacattattcacagaaatagaaaaaarcccctaaaatttgtatggaaccacaaacgacccagaatagacaaataaatcctgagcaaaaagaacaaagctggaggcatcacattacctgacttcaaattatgctacaaagctgtagtaacaaaaacagcatggta

SEQ ID NO: 615860 - DNA, 567 bp, Homo sapiens
caaaaaaggaaagatattttgtttgtggattagaagaatcaatattattaaaatgtccctactatccaaagctatctacagattcaatgaaatccctatcaaaatatcaatgacattattcacagaaatagaaaaaagcccctaaaatttgtatggaaccacaaacgacccagaatagacaaataaatcctgagcaaaaagaacaaagctggagrcatcacattacctgacttcaaattatgctacaaagctgtagtaacaaaaacagcatggtagctaggtgtggtggcatgtgcctatagtcctagatacttgagaggctgaagcaggagctcaggaggttgcaaccagcctgagcaatatagtgagacccatctagaaataaataaataaacccagcatgatactggcataaaaactgacactgaccaatggagaaaaatagagaagccagaaataattccacacatttatggtcaactcatttttggcaaagtcaccaagaacacatcagggaaaggacagtatcttccttcaataaatagcgctgggtaaactggatattca

SEQ ID NO: 615861 - DNA, 558 bp, Homo sapiens
gggtggctacttgtctgaaagtgagagtagtttagccaagtggataaggcaattgaacagtgggtaggcaactgacaaatatttaacatggcaggatatcaccaagtgttcctcactagggaaattggaccatttgtggacaaaaggtggagcatgctaaaactgggtttctcttgctatggcttttgtctttctctgtcccaggcctaggtataytctgagccaccatgcctacactcactgccatctccctgtgaaaggctgctcaagcgaagactctacataatgagccacatgtacacctgtgcctgtgaactcaatgtcttaccttttgagcttgaatcatacacattatttgcagttgtagagtgaatgtccataccatcttaaattaagtctaagaatattcacaagaatatgggacagcaaatttttcagatatgggtttcttcctatgacagtaaaaatcataaaaacacatgcacacatatgactagatttacattttgatatatatgattgactagaatgtatcgcacttccgaaactagtatagac

SEQ ID NO: 615862 - DNA, 579 bp, Homo sapiens
aaacctgcacgttgtgcacatgtaccccagaacttaaagtctaataataataaaattaaaaaaaaaaagactagcagtgagaacttagaggtgtgacaagcctgcagggtggagatagagaggtggagccacagcttcagaaccacgtgtttctgactgcgggcttgaatcattatcagataaccttacagacccaggtattacagtgcaactttaggacactaataaaataaattttaggtgtatgtaattcaggactgcaaaattactatagtytttctattctccaacattttttttttaagttgcatggagttttcctcatattttatgccatttatactcttttttataaacagcataaagtgtcatggctcccagcacctgaaaactagatttaggagatttttatagcacatgttgagaagatagtttttttaaattgattattcactattccaaatttttaagtattgtctattaaattttactgatgtatttctttcaatatcttaaaactattttttttaaattggagaactgcattatactaataacatccctttatttttttttttg

SEQ ID NO: 615863 - DNA, 579 bp, Homo sapiens
aaacctgcacgttgtgcacatgtaccccagaacttaaagtctaataataataaaattaaaaaaaaaaagactagcagtgagaacttagaggtgtgacaagcctgcagggtggagatagagaggtggagccacagcttcagaaccacgtgtttctgactgcgggcttgaatcattatcagataaccttacagacccaggtattacagtgcaactttaggacactaataaaataaattttaggtgtatgtaattcaggactgcaaaattactatagtttttctattctccaacatttkttttttaagttgcatggagttttcctcatattttatgccatttatactcttttttataaacagcataaagtgtcatggctcccagcacctgaaaactagatttaggagatttttatagcacatgttgagaagatagtttttttaaattgattattcactattccaaatttttaagtattgtctattaaattttactgatgtatttctttcaatatcttaaaactattttttttaaattggagaactgcattatactaataacatccctttatttttttttttg

SEQ ID NO: 615864 - DNA, 466 bp, Homo sapiens
actcaggaagtcataagtaaaaaggattagatagaggtagagaaacagattcggaggatgtgacattaatctaggtgagagatgatgaaaacctaatttaggtcagtggctgtggaatggtgatagattcaagggatactgaagagccaaaatcagctggatgtggggaacaaytgtttatggccagattaatgaagtttgaccctctgtgtactgatttgagagatgtgattaatgatgattaagaaacaaaacaaaacacaacacaacaaaaactgaataaaggataaagaagaggtttggaacaaaaacataatttaaattctaaaattcatttgtgagttagttgttcagaattcacagcaatgaatttataaatgtttgctaaagagatagaaatgcagacaaaaatactacccaaagcaataagagctaacatgtatttcctcactcaatattgttataa

SEQ ID NO: 615865 - DNA, 633 bp, Homo sapiens
ctagtaaacaaggaccagatcaattgctgagaaaatgttagattcaaatgtagaacaagttacttttatttcagtactgaatgcaaaacacaggtcaagtgtgaggacagtgttctaaaaaaggtggctctattaaagcaaggaggccatttccttttgcatttttataattttggaattctatttttgacgttcactttctctacttttcctcccctgagcactaatttatttaaaaaaaaagatttcaaggtgcaagttgtacattcttatcgttataccatctcatctctttctggaagagagtattacaatcagcattacaatgttaattctttttctcttaatatttgtttcacatacatgtatttcgaaatcataatgttgattaggaaaagaaacttacaaacgagatagtgatgtaatcatacacttcctattgtgctgtgtgtctttcccatcccttctcccctttccctgtaaagagctgtaaaaaatttaaggcagatgaggtatattgctgaaggaaaaakttatttttgaaaaaaactcaaaaaaacttttattctgcccttctactcaagaaagactactcaactataaatctagtgctagaaaaaagcaggaaagaca

SEQ ID NO: 615866 - DNA, 595 bp, Homo sapiens
tagaattgtaaagtgctggacttagtataaacacttgtacacactgcagacactgaaaaataaccctcaagcacattgtgttatagttccaaaaatatatttacagtctattacaaagattacaaatggaagtgtctaggtgactgtattatgctaattaaaattatttttacagattacttttcyttagggacaaaaaacattttagtgaaattaaaatgatttttctagtcaatcaaaaaataaattaaaatatcaaataacactgtacagtgatttaaaaccaaaaaaaaagggtggggaggggtttgggaagcaatccatttgagtttttctatagccgtctttggtcctaaatgtgggaaaacacattatgtagcactgaaaatacctgttcttttgtgatgctctgcaagtaaaatagaaaaatatagtgcattttcaatgtattcagagcccactacagagaaatgtgtgtacaaaacaagacagtataaataaaatttacaagttttacaaaggaacatttacagattttgtttctgttatttgtttgtttgtttgtggatgcccacattatcaaacaagaccaatt

SEQ ID NO: 615867 - DNA, 568 bp, Homo sapiens
gacaaacagcagaaataagaagggatcggagaacactaaaayagcattcgagggggaagaacaaatcctttgacactgactgatataatggtagaaatgtaacaaaaaatgaccctctgaggaaaaaaaaaatctttgaattttcaaagaaaataaggccaaaagtaggcaaacaaaaagctggctttaagaaatgttgatggtcttaatatttttagggaaacacatccttaagatgcatgctgacattcaaaaatagcaccttaaaatataaaaggttgtaggataggatgtaatgagttcagtacttggcatcaacaatatttgaaaaaaaattcttttgtataagggaaaaaagtatacttttttctttaagaaaaatctctaactctaaagtttaaaaagtaaatagatggacttagttatagtaatttttgaaaatttatataagtataaaatttaagaccaaactctctcctaatcactaggttgtatttctatcagtttattaaacttttcatctgaattgtccataggtacctcccctgtatatatttaaaattgaatt

SEQ ID NO: 615868 - DNA, 678 bp, Homo sapiens
cacaacaatctcattactgggtaggtacccagaggaatataaatctttctaccataaagacaaatgcccactgcagcactattcacaatagcaaagatatggaatcaacttaaatgcccatcaatgaaagactggataaagaaaacgtggtacatatacaccatggaatactatgcagccrtaaaaaagaatgagatcacgtcttttgcaggaacttggatggagctggaggactttatccttagcaaagtagcagaggaacagaaaagtgaatactacatgttctcacttgtaagtgggagctaaaggatgggaactcatggacacaaataggggaacagaagactctggagcctacttgaagatggatggtgggaagaggaagaggaacagaataaataactactgggtagtaggcttagtatctgggtgatgaaataatctgtacaacaaacccctgtcacacacgagtttatctacataacaaacctgcgcatgtatccctgaactgaaagtttttttaaaaaaagataggtatagtgatttaaacacagattgtttctcacgtgagaagcaccagtaacaactgcttaaatatacatgattaaaataatagtactacaatcatagaacaggattcagtgatagttgaaatcatgcattcagataatagctaga

SEQ ID NO: 615869 - DNA, 498 bp, Homo sapiens
agtagccataaaaaccctgaaagttggttacacagaaaaacaaaggagagactttttgtgtgaagcaagcatcatggggcagtttgaccacccraatgttgtccatttggaaggggttgttacaagaggtagatattggttatatctttattttatcaaaaagactgagtgtcagaaattagtattattatgtacacaataaaacaaattatgaaatatgttgcacagtctaaatgaatgtgttttcttggtatgtaactaatcaaaaaattcttcctttatgttatcacctcaagggaaaagaaagcagaaaaaaaatgaatgcaagattagagttgaagaataactctgatagatggaatgactgataaatgtttttatttctcttcaagagacataataattatgcaatatagtctttacattttacataaagtgtaattttctctgagttttactcacaaagcaggagtcagaagaacacagtgacttttattt

SEQ ID NO: 615870 - DNA, 433 bp, Homo sapiens
cgagttatagaggatgatccagaagctgtctatacaactactgtaagaaaaagtcatttactgcacttcttcatattcttaagatttttctaccacgaaagcaggacctaataatgtaaaactaaacaggagaaatgaagcaaattgagctaagcattttgaggttgctttttttgttttttgttttttgtttttctggaagaatcattgtttgtacaatatatatatagactaagaaggaaagtgttgataacatgactgccctatattgggagagtcatagaatatagttacrtacaaaaacatctagctactagcactcatatttgtagaaaactgtaatcacattttaaataaagatttaaaggaatattaactatgctaatccttataacttttgtaagattagaaaaaaagaaaatatgtgagaatg

SEQ ID NO: 615871 - DNA, 584 bp, Homo sapiens
atgtgtacacacaaaattggccctctcaataattattaagtattaagaaaggtaaatatttatgaggctaatattttagacttatgtaaagataaagctatcatttcttatggaatagacctaagatactagctcagagtaatctctattaatccatgtccacctttctwtaagattcctaaccagtcttacttctaattttcctgcacaattacagaagattattcttgtcaaaataccccacttttgatcatgttgtctgcctacttaagaatctttaataatgcccctccacctataaactgcatatcttaaacatttaaagtgtttataacacaatgctggatgtgtgcaggaagtaaccaataggtattgaggaccaattatgtatcaggtatattaaattggttactttagtaaatttaacccttatatcggacctattagttaaataacataatgtcatattttatgttgaagaaactgagtttttacatagtctgaagttagtttatagggaaaaggaacaagataaaaatacagatctctaagactccaaagactatttttattacaccacatag

SEQ ID NO: 615872 - DNA, 555 bp, Homo sapiens
catattaatttaagcaacttctgacctttcctaaaaagagaagtttaaaaagacaatcaaaaaggtaactcgaaactcctaggattaaaaaaataatgctttaggagatagtttctgggtgccatcattcacagctttttcttcattttgtatttgctatagacatagtaggaatttctggtataaaatatcagaaaacaaatgaattctgttctgtgttaaaatatcagcgacaacttggcaaaaatatacaatggtgagcatagataaatatgtttttagatttcaataagccagttctttttaataaaataaaattttaatgaatttcaaacttaaatgtcagttattcctaagattttccaggcaatatatatttgtgcaaacacctggcaaaattctagatataacatctggtaggtgtggrtgaaattcattagactaaatcttctaagcatagatgtttgccaaagctttgatatgacaagcacttattcccgatggcagccatttattctttgccagttcataagtgcttccttctagcagagattg

SEQ ID NO: 615873 - DNA, 555 bp, Homo sapiens
catattaatttaagcaacttctgacctttcctaaaaagagaagtttaaaaagacaatcaaaaaggtaactcgaaactcctaggattaaaaaaataatgctttaggagatagtttctgggtgccatcattcacagctttttcttcattttgtatttgctatagacatagtaggaatttctggtataaaatatcagaaaacaaatgaattctgttctgtgttaaaatatcagcgacaacttggcaaaaatatacaatggtgagcatagataaatatgtttttagatttcaataagccagttctttttaataaaataaaattttaatgaatttcaaacttaaatgtcagttattcctaagattttccaggcaatatatatttgtgcaaacacctggcaaaattctagatataacatctggtaggtgtgggtgaaattcatyagactaaatcttctaagcatagatgtttgccaaagctttgatatgacaagcacttattcccgatggcagccatttattctttgccagttcataagtgcttccttctagcagagattg

SEQ ID NO: 615874 - DNA, 607 bp, Homo sapiens
atgacaagcacttattcccgatggcagccatttattctttgccagttcataagtgcttccttctagcagagattgcatttccgctggcatttgaaacactggctaccacatcagtatatattagaatacatgtgcagagagattactatcaatccaaaacaaccaaatgggagttgcagtttgcagaagattrttgagctaaaagtcagcagtgtactcatggctttagcgagaaagttttagcaagggaaggaagtacgtgcacatgtctgaagggccacttcttgagtatttgattagggacaaaaataggattcctaaaaagtctttttaatgggaaagataggagtcaggctagtttgataaagaaatacttctgctttctactttggggtctcccaataagcaactggaaaatgttttgcatttttcttcaagtggacatgtaagcaaatggttatcatggaagctatttgcagatatgacttaggtgctagaaagaagagttgacaaggaaatgatttgctttaaagtgatcctaaacaatgagtacaacatacctgttgttaagttgcctttctttctcagtatatgtcttgaagaaatt

SEQ ID NO: 615875 - DNA, 607 bp, Homo sapiens
atgacaagcacttattcccgatggcagccatttattctttgccagttcataagtgcttccttctagcagagattgcatttccgctggcatttgaaacactggctaccacatcagtatatattagaatacatgtgcagagagattactatcaatccaaaacaaccaaatgggagttgcagtttgcagaagattattgagctaaaagtcagcmgtgtactcatggctttagcgagaaagttttagcaagggaaggaagtacgtgcacatgtctgaagggccacttcttgagtatttgattagggacaaaaataggattcctaaaaagtctttttaatgggaaagataggagtcaggctagtttgataaagaaatacttctgctttctactttggggtctcccaataagcaactggaaaatgttttgcatttttcttcaagtggacatgtaagcaaatggttatcatggaagctatttgcagatatgacttaggtgctagaaagaagagttgacaaggaaatgatttgctttaaagtgatcctaaacaatgagtacaacatacctgttgttaagttgcctttctttctcagtatatgtcttgaagaaatt

SEQ ID NO: 615876 - DNA, 607 bp, Homo sapiens
atgacaagcacttattcccgatggcagccatttattctttgccagttcataagtgcttccttctagcagagattgcatttccgctggcatttgaaacactggctaccacatcagtatatattagaatacatgtgcagagagattactatcaatccaaaacaaccaaatgggagttgcagtttgcagaagattattgagctaaaagtcagcagtgtactcatggctttagcgagaaagttttagcaagggaaggaagtamgtgcacatgtctgaagggccacttcttgagtatttgattagggacaaaaataggattcctaaaaagtctttttaatgggaaagataggagtcaggctagtttgataaagaaatacttctgctttctactttggggtctcccaataagcaactggaaaatgttttgcatttttcttcaagtggacatgtaagcaaatggttatcatggaagctatttgcagatatgacttaggtgctagaaagaagagttgacaaggaaatgatttgctttaaagtgatcctaaacaatgagtacaacatacctgttgttaagttgcctttctttctcagtatatgtcttgaagaaatt

SEQ ID NO: 615877 - DNA, 575 bp, Homo sapiens
aatgagtagcatattctggaatacattctacagaaaaaaatataataaatagtcttagattaagggttctaatactagacactrgagcatctcaaaaaaaaaaaaaaaagatcctagagaaatgtaatatggatatggcagagtgagaaacctatttatctgtatttggttatctctctctctctctctctctctctctctctctcacactctctctctctctctatatgtatatatataaaatatatatttattattatactttaagttttagggtacatgtgcacaatgtgcaggttagttacatatgtatacatgtgccatgctggtgtgctgcacctgttaactcgtcatttagcattagttatatctcctaatgctatccctcccccctccctatatatatatttttttaattactgagaattcaaatgtgaagtatcccccaaaagagaaagtaactcacatcatttatataccgtttttcaatactttattgaccaaaagtagttttcaatttctgtcttcattatctcaaactccctgcactacaaaattaaaactaattgtcagat

SEQ ID NO: 615878 - DNA, 575 bp, Homo sapiens
aatgagtagcatattctggaatacattctacagaaaaaaatataataaatagtcttagattaagggttctaatactagacactagagcatctcaaaaaaaaaaaaaaaagatccyagagaaatgtaatatggatatggcagagtgagaaacctatttatctgtatttggttatctctctctctctctctctctctctctctctctcacactctctctctctctctatatgtatatatataaaatatatatttattattatactttaagttttagggtacatgtgcacaatgtgcaggttagttacatatgtatacatgtgccatgctggtgtgctgcacctgttaactcgtcatttagcattagttatatctcctaatgctatccctcccccctccctatatatatatttttttaattactgagaattcaaatgtgaagtatcccccaaaagagaaagtaactcacatcatttatataccgtttttcaatactttattgaccaaaagtagttttcaatttctgtcttcattatctcaaactccctgcactacaaaattaaaactaattgtcagat

SEQ ID NO: 615879 - DNA, 575 bp, Homo sapiens
aatgagtagcatattctggaatacattctacagaaaaaaatataataaatagtcttagattaagggttctaatactagacactagagcatctcaaaaaaaaaaaaaaaagatcctagagaaatgtaatatggatatggcagagtgagaaacctatttatctgtatttggttatctctctctctctctctctctctctctctcwctcacactctctctctctctctatatgtatatatataaaatatatatttattattatactttaagttttagggtacatgtgcacaatgtgcaggttagttacatatgtatacatgtgccatgctggtgtgctgcacctgttaactcgtcatttagcattagttatatctcctaatgctatccctcccccctccctatatatatatttttttaattactgagaattcaaatgtgaagtatcccccaaaagagaaagtaactcacatcatttatataccgtttttcaatactttattgaccaaaagtagttttcaatttctgtcttcattatctcaaactccctgcactacaaaattaaaactaattgtcagat

SEQ ID NO: 615880 - DNA, 575 bp, Homo sapiens
aatgagtagcatattctggaatacattctacagaaaaaaatataataaatagtcttagattaagggttctaatactagacactagagcatctcaaaaaaaaaaaaaaaagatcctagagaaatgtaatatggatatggcagagtgagaaacctatttatctgtatttggttatctctctctctctctctctctctctctctctcwcacactctctctctctctctatatgtatatatataaaatatatatttattattatactttaagttttagggtacatgtgcacaatgtgcaggttagttacatatgtatacatgtgccatgctggtgtgctgcacctgttaactcgtcatttagcattagttatatctcctaatgctatccctcccccctccctatatatatatttttttaattactgagaattcaaatgtgaagtatcccccaaaagagaaagtaactcacatcatttatataccgtttttcaatactttattgaccaaaagtagttttcaatttctgtcttcattatctcaaactccctgcactacaaaattaaaactaattgtcagat

SEQ ID NO: 615881 - DNA, 540 bp, Homo sapiens
cggtgatttaaacatatttccagtgacagaagtcatttactagatggcatrtataatatgttaactagcatgaatatagtactttttaaaagactttcaataacatttaatttctctgttttataattgagaaatatttatttgaaaaagtctcaaattgattcacagtactaacaaggaatactccaccatgcatatttttggcacttagtatatgctaaataaacgaataatggtgtgacactacaaattaccttcactcttttatataagccagtgtcttcctatctattggattcttcctgaaagattttgtgtaaactctcccatgaaaataaaattgtttctcaagcctataactctttccacctgctggggaatctcttttcttcactgtatagccaaatatgaaaaaaattgtccatattctttttctccatttctcaactcctttcatgtttcaaccttctttagtctggcttcggtccacctcattccattaaatgagttattgataaggttactcacactgaagtgctt

SEQ ID NO: 615882 - DNA, 376 bp, Homo sapiens
cctacttttcttggactctcagtagcattaatatttttaatctctctgtccttttctccttggcttttgtggcacattctcttctagtttttctcctgtctggttgattctttttttttttttaacttttatttttagttcaagggtacctgtgcaggtatgttatataggtaaactcgtgtcatgggggtttgttgtacagattatttcatcaccaagatattaagcctagtacccattagttatttttcctgatcctctccctccttccaccctccaacctccraaatgccccagtatgtgttgttccctctgtgtgtccatgtgttctccttatttagctaccactttgtttcctttgcaaaccccttctcct

SEQ ID NO: 615883 - DNA, 432 bp, Homo sapiens
ctgcatttcatcatcatcatcataaagcaaacaaaaaatacagctgcaaacaatgaatacaacattgaaatagatcccagtagtttatgttgcaaatactactctgtagatgttcacttactatttgcaaatcactgaccaagaaatccgaatttttctttaaaatgagtaaattttatattttgatagtaataaaatttgttcagtagtgcrtgtctctgaaaacccccttatggatacatccctgatttctgtcctaaactgtcttggatggcaagcaaaagcaattgtgtaacatattttgtttataaagtactacatatcaatgagaaataaaaggaatactctctacagtttgtacttactaaaattttattttgaatgcaatgttccttatgcaatgttttaaaataagaacttttgaatttaaca

SEQ ID NO: 615884 - DNA, 625 bp, Homo sapiens
tttgtacaaatgtccattaaggtgttggcactgcaactaacatacaaagacttacaaaggatgacattaggaatagagatagcttccttcatgtgcagcctcagacccaaagacagtgagctcccacttcagaatcttgtacttaaactgtgccaggacattgacacaaaaattaccacaggaagaatagccatagccactttttccttcatctgtgcctcctttcttggttttcatcatccagcagccatcatagaacaatcatactaatattgcccatttggccctacaaaatttttcctttaagagaaaatcaaatgaacaagcttagctatargctaagaggttacctgtgtggctgttagtccaggtcagcatactcttccatgcagccagccagatggtcctgtggcacttttccaatgactcaattatcagaagctgcataaggtatacttgagaatttgcatctttctccttccatcatggcttattctacatggagtgttgcaggggttttaatttgaaattgtctggcatgatgtctattaagcaagtcatagctttttattattcattaggtaccataactatacaaaattaggcatccatttttaatgaaaga

SEQ ID NO: 615885 - DNA, 592 bp, Homo sapiens
gtctgttttgtgtaatataagaatagctactactgctcgcttttggtgtccatttgcgtaaagtgtctttctccactccttcacctttagtttttgtgagtccttatgtactaggtgagtctctkgaacacaggagagacttggttggtgaattcttattctgccattctgtatcttttaaataaagcattaggtcatttacattcaatatcagtattgagatatgaggtactattctatgcatcatgctatttgttgtctgaataccttgtgttttttttttcttttcattgtgttattgttatacaggtcctgtgagatttatcctttaaggaggttctattttggcttattttgagcatttagaactccttgtagtgctggcttggtagtggtgaattctctcagcatttgtttgtctggaaaagactgtatctttcctttatttatgaagcttagttttgctcaatacaaaattcttggctgatcattgttttgtttcaggaggctaaaattaggatcccaatccctcctagcttgtagggtttctgctgagaaatttgctgttaatctgataggttttactttacag

SEQ ID NO: 615886 - DNA, 592 bp, Homo sapiens
attctcaactttcttcaattgttaaagaacaaaagtctgaagtccctaattctaactctrtcactaatttactacacatcattggaaattttatttatcctgttttagtccagtagccacatttgtaaagggattttttttccaaaaaaatagataaataaacagatatatacttcacgggaattttattggaatcaaattagatagtacataaagcaaaataatcaacatatactaaacagtcagacagtttattattgttaatattattggcacaacttaagtattatctccaccatggatactttcatgaattcttaggattattataccactacttctctaaactccaatacaatcttgtgccactttcttatattacttactatgatatattgaaattttctctttttttattatactttaagttctagggtacatgtgcacaacgtgcaggtttgttacatatgtatacatgtgccatgttggtgtgccgcacccaccaagtcgtcatttacattaggtatatctcctaatgctatccttccaccctccccccaccccacaacaggccccagtgtgagatgttccc

SEQ ID NO: 615887 - DNA, 592 bp, Homo sapiens
attctcaactttcttcaattgttaaagaacaaaagtctgaagtccctaattctaactctgtcactaatttactacacatcattggaaattttatttatcctgttttagtccagtagccacatttgtaaagggattttttttccaaaaaaatagataaataaacagatatatacttcaygggaattttattggaatcaaattagatagtacataaagcaaaataatcaacatatactaaacagtcagacagtttattattgttaatattattggcacaacttaagtattatctccaccatggatactttcatgaattcttaggattattataccactacttctctaaactccaatacaatcttgtgccactttcttatattacttactatgatatattgaaattttctctttttttattatactttaagttctagggtacatgtgcacaacgtgcaggtttgttacatatgtatacatgtgccatgttggtgtgccgcacccaccaagtcgtcatttacattaggtatatctcctaatgctatccttccaccctccccccaccccacaacaggccccagtgtgagatgttccc

SEQ ID NO: 615888 - DNA, 592 bp, Homo sapiens
attctcaactttcttcaattgttaaagaacaaaagtctgaagtccctaattctaactctgtcactaatttactacacatcattggaaattttatttatcctgttttagtccagtagccacatttgtaaagggattttttttccaaaaaaatagataaataaacagatatatacttcacgggaattttattggaatcaaattagatagtacayaaagcaaaataatcaacatatactaaacagtcagacagtttattattgttaatattattggcacaacttaagtattatctccaccatggatactttcatgaattcttaggattattataccactacttctctaaactccaatacaatcttgtgccactttcttatattacttactatgatatattgaaattttctctttttttattatactttaagttctagggtacatgtgcacaacgtgcaggtttgttacatatgtatacatgtgccatgttggtgtgccgcacccaccaagtcgtcatttacattaggtatatctcctaatgctatccttccaccctccccccaccccacaacaggccccagtgtgagatgttccc

SEQ ID NO: 615889 - DNA, 350 bp, Homo sapiens
agtttatcctgtgtggccagactatatacttttttaaaarcttgggagtagcaattgtttcataattatattatacctaaaataactatgcttatgtagcatatgttaagaattgcatccatatgatagtattcatatctaaagaattcataatatgtgtctaaaagaataacaagttatataccttcaaagtaagctagggaaacataaaagcccacgtaaggtcagccattcctaagttagctaaccaaagacaaattgggatttccctgaagccatatcccatggaaatttaccaaacagctttctctttcctactgtgaacactgaaagcttgtgactcccagggc

SEQ ID NO: 615890 - DNA, 568 bp, Homo sapiens
tgccaacacaaaacattttactttctctagattcatacaaaagaaattttggtcagctctgccaaatttgtacactttctaaaaacttcctaaataggaaagtcttattaaaggagataaagggaaaaaaaagacacacaaaacccaaagttttagtttggggaagaaagactgagggaggatctaaagtgtaaaccaaccgtatttatttgtaacagagtgattctttcactgaactcacctgaggaaattcacatgtyccagcaggaacagtcaattgcgtgaactgacagcaggcttcagtctatttcccaatcaggactaagacccttttgttagaacaaaggacacactttcttcattgctttataaacacaccatgactacaaagttctaccaagtacaatttacaaaagagaactatgaagaatcactttgcattgtacttgacttactttaatatctctggcatagaatttgtcatttttataatgtgattagtctccagtgttacgttgtaagaaggagtaagggccagtttcttgaagaagtgaggaaaccatcactc

SEQ ID NO: 615891 - DNA, 630 bp, Homo sapiens
gaaatactatctcattctatgaagtcgttattgccctgacacaaaaatcaaacagttatcacaaggaaagaaaatcacagacctaaatccctcatgaatataggttcaacaatccttaacaaaataatgaaaaactaaatccaacaacatayaaaaagtgctgtggatcatgatcaaattcgatttagcctaggaatgcaaagttgtttcatacaataaaactaatcaatgtaatatactatattaatcgaaaaaagaagaaaacacttgatcatctcaatagatgtataaaaagcatttggcaaggtctaacatcttttcaactctacaagctacaaatgggaaagacgtcctcaatgtaacaaagggaattcatagagaatgtatagtttacatcatacttaatggttaaagacaaaaagatttcttcataaaagactgaagggtttccacataagacaaagacgtccactttccccactggtatttaacattttatgggaggttacactagaacatttagataggaaaaagacataaaggcattcagactgggaaaaaaagaagtaaaattttctgtatttgttaatgacatgatcttatatatacaaaactttaaagaattcacac

SEQ ID NO: 615892 - DNA, 618 bp, Homo sapiens
tagacaagagtttcttagatataacacaaaaaaccttcaagaaaccaaagaaaaatatatagaaattggacttcatccaaaaaaaattattcaaatggaaatataatttgtagtatgatttcctagtatggtgtaagatggcrtattattgtggttttaacttgcatttctctgatgattagtgatattgaattttattttatgtttgttcatcatttgaatgtctttttttgagaaatatctgttcatatactttgcctactttttaattggttctttgtttttttcttgttgagttgtttgagtttcttgtagattttggaaaaactcttctggacaatggcctcgacaaagaatttatgactacgacctcaaaaacaaatacacaaattggacaaatggacaaaagggacttaattaaactaaagagattctacacagcaaaagaaagtcagcagcgtaaacaggcaacttacgaataggaaaaaatatttgcaaactatacatctgacaaaggactaatattcagaatctataaggaacttaaatcaacaagaaaatacaactcattaaaagtgagcaaatgacatgaacagacacttctgaaaagaagacaca

SEQ ID NO: 615893 - DNA, 535 bp, Homo sapiens
actgtggcatatttgttacaactgatgaactaatattagtaccttatattaactaaagtgcagagtttacattagggtccattctctgtactatatagttctatggattttgacaaatgcataatgtcatatatgcatcattataggttcaggcagaatgctttcacttcccccaaaatcttctgtgctcctccacccattcatccctctctctctccccataaacccctcacaagcactggtcttttttatctctagttttgtctcttccagaatgtcatggttggaatcatacagaatgtagttttttaagatttgcttcattctttcacttagctagcaatatgcatttaagttttcttgcatkttttttcatagcttgatagattattcttctttttgctgaataatattctattgtatggatgtaccacagttgtttatccctttacctattgaaagatgtcttggtgacttccagtttttggcaatcacaaataatgctgttataaacatttgcatggacataaatttc

SEQ ID NO: 615894 - DNA, 564 bp, Homo sapiens
ccctttctcttctccaattcagaacatttcttcaattatatgtttgattattgctttctgttttattygtttctattctttcttacattgaatatgttcattctaaattatgtatcttctccatatgtttttgtctcttttatttgttattattttcatgtaatttctatgctatggcttgaatatttttgtctctttcagaattcatgttgaaacttaattcccaatagaacagtattaggaggtgtggccattagaaggtgattgagtccctcatgactaggattcggtgtcgttaaaatagggcatgatggaggaagttcattcatttttgcccttctatttcttctgccacataaaaaacaacatttcttccctctggggatgtagcaacaagacctcattaagggagcagcaagagcacccctctctggacacaaacaaacaaacaaacaaacaaaaaacaaaactgccggtgcattaatcttggacttcccagtcttctgaactgtgagaaaataaattcctgtttattataaattaccagcttaggtatcttgttat

SEQ ID NO: 615895 - DNA, 564 bp, Homo sapiens
ccctttctcttctccaattcagaacatttcttcaattatatgtttgattattgctttctgttttatttgtttctattctttcttacattgaatatgttcattctaaattatgtatcttctccatatgtttttgtctcttttatttgttattattttcatgtaatttctatgctatggcttgaatatttttgtctctttcagaattcatgttgaaacttaattcccaatagaacagtattaggaggtgtggccattagaaggtgattgagtccctcatgactaggattcggtgycgttaaaatagggcatgatggaggaagttcattcatttttgcccttctatttcttctgccacataaaaaacaacatttcttccctctggggatgtagcaacaagacctcattaagggagcagcaagagcacccctctctggacacaaacaaacaaacaaacaaacaaaaaacaaaactgccggtgcattaatcttggacttcccagtcttctgaactgtgagaaaataaattcctgtttattataaattaccagcttaggtatcttgttat

SEQ ID NO: 615896 - DNA, 564 bp, Homo sapiens
ccctttctcttctccaattcagaacatttcttcaattatatgtttgattattgctttctgttttatttgtttctattctttcttacattgaatatgttcattctaaattatgtatcttctccatatgtttttgtctcttttatttgttattattttcatgtaatttctatgctatggcttgaatatttttgtctctttcagaattcatgttgaaacttaattcccaatagaacagtattaggaggtgtggccattagaaggtgattgagtccctcatgactaggattcggtgtcgttaaaatarggcatgatggaggaagttcattcatttttgcccttctatttcttctgccacataaaaaacaacatttcttccctctggggatgtagcaacaagacctcattaagggagcagcaagagcacccctctctggacacaaacaaacaaacaaacaaacaaaaaacaaaactgccggtgcattaatcttggacttcccagtcttctgaactgtgagaaaataaattcctgtttattataaattaccagcttaggtatcttgttat

SEQ ID NO: 615897 - DNA, 627 bp, Homo sapiens
agcatccacatggtgttgggcctgcaggtgtgcagaagtcaagaattaaggtttgggaacctttgcctagatttcaggagatgtatcgaaatgcctggatgtccagcagaagtttgctgcaggagcagagccctcatggagaatctctgctagggcagtgtggaagggaaatgtgaggttggagcctccacrcagagtccccatgggcgcactgcctagtggagctgtgagaagagggccaccgtccgccagaccccagaatggtaaatttaccaacagcttatgctgtgcacctggaaaagccacagacactcaatgccagcccgtgaaagcagccaggaaggggactgtaccttgcaaagccacaggggcagaggtgcccaaggctgtgggagcccacctcttgcatcagcatgacctggatgggagacatggagtgaaaggagatctttttggaacttttaaggtttaatgactgccctattggatttcggacttgcatggggcctggagccaattcttttggccaatttatcccaatgggccatatttggaatgggcatatttacccaataggtttatttacccagtgcctttgcccccattgtatccaggaagtaactaact

SEQ ID NO: 615898 - DNA, 627 bp, Homo sapiens
agcatccacatggtgttgggcctgcaggtgtgcagaagtcaagaattaaggtttgggaacctttgcctagatttcaggagatgtatcgaaatgcctggatgtccagcagaagtttgctgcaggagcagagccctcatggagaatctctgctagggcagtgtggaagggaaatgtgaggttggagcctccacgcagagtccccatgggcgcactgcctagtggagctgtgagaagagggccaccgtccgccagaccccagaatggtaaatttaccaacagcttatgctgtgcacctggaaaagccacagacactcaatgccagcccgtgaaagcagccaggaaggggactgtaccttgcaaagccacaggggcagagstgcccaaggctgtgggagcccacctcttgcatcagcatgacctggatgggagacatggagtgaaaggagatctttttggaacttttaaggtttaatgactgccctattggatttcggacttgcatggggcctggagccaattcttttggccaatttatcccaatgggccatatttggaatgggcatatttacccaataggtttatttacccagtgcctttgcccccattgtatccaggaagtaactaact

SEQ ID NO: 615899 - DNA, 451 bp, Homo sapiens
tgcccacctaattttttttgtattatttgtagagacaaggttttgccatgtttaccaggctggtctcaaactactgacmtcaagtaatcagcctgtcttagcctccctaagtgctgggattacaggcatgagccaccgcgcctggctgataagtttttccaactatatttttctctctactcccagagttaccaatatcctacagcggtgtatcttttcccacaaatttcatgtaaatatatatatatacatacatatatataatatataaacacaaatccatgtatacacacatatatgtatacatatatacacacatatatacacacacatatatatacacatgtatacacatatatatcttcttcaataagggcatattcttaaataatatataatgactttgcaagtttttaaattttcatagttataattttctaatattattctg

SEQ ID NO: 615900 - DNA, 451 bp, Homo sapiens
tgcccacctaattttttttgtattatttgtagagacaaggttttgccatgtttaccaggctggtctcaaactactgacatcaagtaatcagcctgtcttagcctccctaagtgctgggattacaggcatgagccaccgcgcctggctgataagtttttccaactatatttttctctctactcccagagttaccaatatcctacagcggtgtatcttttcccacaaatttcatgtaaatatatatatatacatacatatatataatatataaacacaaatccaygtatacacacatatatgtatacatatatacacacatatatacacacacatatatatacacatgtatacacatatatatcttcttcaataagggcatattcttaaataatatataatgactttgcaagtttttaaattttcatagttataattttctaatattattctg

SEQ ID NO: 615901 - DNA, 584 bp, Homo sapiens
aaatggaagaggtatatatgtgatggagcctgaataggccctgaaagcacaagtaagtacatgaagaagtggctcaaatgcccatgcttcctactcctgctacactgccttctttctcccagcctgcacctgggacctcatgaggagtttcctacaattcattgataaaggaagagaagactcaggcctggcttataaatggttctgcgtgatatgcaggcaccactcaaaagtggacaactatagcactacagctactctctgagacatccctgaagggcagtggtaaagattaatcttcacagtgggaagaattccaggtagtacacctggttatacacttttattggaagggaaaatgattatatgtgttattatacactgactcataggctgtagctaatggtttagtaggagcatcagggacttggagggaacatgattagaaaactggtaacaaatacatttggagaagaggtatgtggaaaaccctcttttaaatgggmaaaaatcatacagacatttgtgtccttgtgaatactcaccaaaggatgatattagaagaggaatattttaataaccaa

SEQ ID NO: 615902 - DNA, 578 bp, Homo sapiens
tgttttgctgctttaaattttttagaacctttaaaatcacatcatcattagttgaacttattcttaagttttggatattctactaacataaaagcataaggcaaatttgctttcaataattttcttcaagctttgtactttattagaaataactcatttatagaaaatcttttattgyattggtggtgagaataaacacatagttctcagtgacttttattatttattataaagtaatttggcagggtgttgtgtaggcaactaaacgaaataaaagattaatcagaactaccaatctttttctgatttgcagagtaacagaaaacagcagcctagccctgttttactccccgaaggtttagttcagtatgtgccagtgatggaaaacatcgtccgcctataaagcaacaattagggctggtttccattgactcaatcagttaaatgtaaaaatacaaaagaccaatataaaataagctctcttctgtgaggcttcacatgccagaaacgtgaacacccttggatatgtgttactcctgctatttaccaatgctccagtggaatttttaggtttaaaa

SEQ ID NO: 615903 - DNA, 592 bp, Homo sapiens
aaactctgtagaaactttatattgcgaatttaagaacagtatgtagaaggtaaattgatgaagcataagttgatccaaggtagaactgttaaccagagatcatctttgtcatttgcatctctagacaagcctcaatataaggttatgtatgatactttttacaagcatgacttygacatttgcaaaagaaactctatcattctatctcatataatattattcagattctcaactacataaggagaaatagcagttaaattttgatatgttttggctgtgtccccacccaaatctcatcttgaatcttagctcccacaatcttcatgtgtcatggaaggaaccctgtgggaggtagctgaatcatggggatgggtttttcctgggctgttcttgtgatagtgaataagtctcacaggatctgatggttttataaaaggcagtctcttgcctgccgccatgtaagatgtgactttgctcctccttcatcttccaccatgattgtgaggcctccccagccatggaactgtgagtcaattaaacctctttttcttgataacttacctagtcttgggtatgtccttatagcagcgtg

SEQ ID NO: 615904 - DNA, 551 bp, Homo sapiens
ctttctttgactataatgctgttgattttgttacatgataacttttactttttaaaatacattgttaacttaaaggaaaaagtgttgtgagttaactacaaaaattgtggtgtggctttgaaccattgtgaagtctttggatataaagatgacatctcacatttcttttggcttatggcacctagtccagtgcttggcacatgctaggtgttcaatacatgtttattgaattgggtttccatttgtgagacccattcactattgatatattattatcagggcagtaatcatataagcaatcacaagaccattaaattgacacaaggagtattaattagaaagaaaatgtcaatattcacagaccctatttggcccttaaattatatggtcccttctgattacatggttctttataataattatatgggccttatactatatgggcagctctgactgatawgccaatgtaatcctttcccctttccaggttctaggattcaccaacaccaaattggttgctatgccatacttttccttacccacaatgctta

SEQ ID NO: 615905 - DNA, 486 bp, Homo sapiens
gccaacctcattcattctggccatcttcatgggcaataatggtcttcttacccaggtccattgcaccatgatctttattattttcagataatcagaaaaataagcattgctgtacaatgatgtcttcatttcttttgcttaaaactggcataatacttcaattgaagcaaccaaattagtgacaagtaggaaagattttccaggtctaagtttcttgctcattatgtttataaagaaagtagtaaaggcaaaagtaggcttcatttcaaagaatctagctcattaacgtatcaaagaagacttgtgtaaatrttttacataagcttctttcatggcttctacctcttcttccctacagtaataaagaaacctgattcctgtctatcaagaaaaatccaaatttatttacagctggatggacgtgggccaaactgttttccttagcatgactttgggttgtcctttcactgtagacttgctcagcat

SEQ ID NO: 615906 - DNA, 524 bp, Homo sapiens
aagtagttctttatagcagtgtgaaaatggactaatacaataggtacaggtatgtgtgtatttatgcatatatgtatatatgtwcatgtatatatacacacatacatttacacatatgtgcatatatgtagatacatatatgtgggtgttttgtatatatatgtataaacatgcacacatatattcatatatatgcatatatgtattatgtatctgcatgtaagtatatatatcattttcaatatatatagagaaaaatattaacagatattcaaccaggattgtaaagtaaagccaagtgaataatgagcaactattgaatttaattgataggtctcaattacctataagatatgtagcattattctttaaactatagaatggtatgttatcacatgtaagtgttgtgtttgccatccatgcctataatatggtaaaaagtttcaaaaagcagtttagtgaataagactgctctagtgtacaatagcaaaattagaactattaattgcagtaatagtattgag

SEQ ID NO: 615907 - DNA, 524 bp, Homo sapiens
aagtagttctttatagcagtgtgaaaatggactaatacaataggtacaggtatgtgtgtatttatgcatatatgtatatatgttcatgtatatatacacacatacatttacacatatgtgcatatatgtagatacatatatgtgggtgttttgtatatatatgtataaacatgcacacatatattcatatatatgcatatatgtattatgtatctgcatgtaagtatatatatcattttcaatatatatagagaaaaatattaacagatattcaaccaggattgtaaagtaaagccaagtgaataatgagcaactattgaatttaattgataggtctcaattacctataagatatgtagcattattctttaaactatagaatggtatgttatcacatgtaagtgttgtgtttgccatccatgcctataatatggtaaaaagtttcaaaaagcagtttagtgaataagactgctstagtgtacaatagcaaaattagaactattaattgcagtaatagtattgag

SEQ ID NO: 615908 - DNA, 437 bp, Homo sapiens
tggaagcaatgagacagaaggtataaacaaaagaagaattgtgttccagaaaatatacccaggcattctaaaaatatctgggtctgagaatttaaaaataccaaaacacagacttctctgtccacacaacaggctacaacattgtaaatatcttactaggttcatatttgcagtggcaggagaaggaagtgttacgctgatgtgttacaatgcaatatcaaaaggaccacgtaaacaaaatccatttgccgccctttcaaaaaaaaaaaaawaaaataagaaaagaatcttacctgaagccactcatgaaaattatcagaatccaatttactgtttgcatcaggctgcttttcaacccctgttgctagatattcaagacccttctctcatattctcctcctttcttcttttcttgttcactcttcattcctgagtcc

SEQ ID NO: 615909 - DNA, 612 bp, Homo sapiens
atctggaaaccaaaatggtacaaaaggttgatagtgtgtatactttacataaatggcttaatagataaatataaatagatattagaaatgattatattaaaatcaaacaaataaaattaatggtaaaacaaattaaaggggcaagaagggatcatactaatttgatcatagacacaattcacaattaaggcaaaatagtgatttatgcaataataaattgactaagaaaagctttagtactatgaattactattgctatatgagttcaggtcaaatgtgataaaaattaatgatataaaggatttgactattgtaatgctaatagattaagaaataaaagtaatgctaatagattaagaagcaagtatcatatttatatacactcataaaacacactgaaaattctcaacaaattccaaataatacaagtttttaggtaacatttgaccatgataccgacatatccaaatttagtagcaaaattgtaaacataaacatcctattatctggatatataattaaaawttttgtatacaactaggacaataaaaggaaaaatataaattcactttaaattcaataaatctaagaataataatatccgcatatata

SEQ ID NO: 615910 - DNA, 689 bp, Homo sapiens
aatattttttaaaatgccttccttgtttcttttatggtaagacattaaagacatcaacattgtgaaagttttttaaagagaaaatattttagaatatatttttagaaatagctctaattttttttttaatttctcaaatgatcacctaaaacaacaaaattagaaatcaaaacattaaccttgacattaagagtgaatctgacttggaaatattcacctagacaaatttgcaaaaatgaaaattgtataagcatcttgaattttatcaggtcagtaaccctcttctggcgattttgacatttgctcagtcagaggtcaccctgactgtgcatataatctgcataaatgcttctggtgactttcaagtacaagtagcagaaggcacctgatgatcacgacaatgaaagcatgtcattgagtctgttacgcaaggacagcaggtggcttgggatttggaaagttatagggtaggaggtcctcagtcatttagggttagtctcggggctgcaagaagagggtacatatatcgcaatatgaaaataaaatagcaarcatccctcacacgaaagagaaatcagaagatgggccagaatgctaaatgtaatgtgagcttagctgatgtctgggctaatacgtcatccttctgtcctttgttgtgcctcaaaatagaaaacaaaggccatccgcac

SEQ ID NO: 615911 - DNA, 689 bp, Homo sapiens
aatattttttaaaatgccttccttgtttcttttatggtaagacattaaagacatcaacattgtgaaagttttttaaagagaaaatattttagaatatatttttagaaatagctctaattttttttttaatttctcaaatgatcacctaaaacaacaaaattagaaatcaaaacattaaccttgacattaagagtgaatctgacttggaaatattcacctagacaaatttgcaaaaatgaaaattgtataagcatcttgaattttatcaggtcagtaaccctcttctggcgattttgacatttgctcagtcagaggtcaccctgactgtgcatataatctgcataaatgcttctggtgactttcaagtacaagtagcagaaggcacctgatgatcacgacaatgaaagcatgtcattgagtctgttacgcaaggacagcaggtggcttgggatttggaaagttatagggtaggaggtcctcagtcatttagggttagtctcggggctgcaagaagagggtacatatatcgcaatatgaaaataaaatagcaagcatccctcacacgaaagagaaatcagaagatgggccrgaatgctaaatgtaatgtgagcttagctgatgtctgggctaatacgtcatccttctgtcctttgttgtgcctcaaaatagaaaacaaaggccatccgcac

SEQ ID NO: 615912 - DNA, 562 bp, Homo sapiens
ccagcaccatttattgaacagggaacstttccccattgtttgtttttgtcagctctgttgtagatcagatggttgtaggtatgtaaccttgtttctgggctctctattctgttccattggtctatgtgtctgctttttatgccaataccgtgttgttttggttactgtagccctgtggtatagtctgaagttgggtagcgtgatacctccagctttgtggtttttgttttgtttttgtttctttttttttttttttttgcttaggattgccttggctattcaggttcttttctggttccatgtgaattttaaaatagttttttctagttctatgagaatgttgttggtaatctgacaggaatagcattgaatctataaattgcttcaggcagtatggccatttgaatgatatttattctctgaatccatgagcataggatgtttttctatttgggtgtcatctctgatttctttgtagtgttttataattctcattgtagagatctttcacctttctggttagctgtattcctaggtattttattctttttgtgataattgt

SEQ ID NO: 615913 - DNA, 550 bp, Homo sapiens
actaccaggcccagggtgtggcgctgggctgtcggcttgtggatttcatttctgccttttagtttttactttttctttctttggtcgcagaaactaggtataagacaatatgagaggtggtctcctcccttatattgacagtaaaaccccaagggcaggaatactcttatttctcaacaccatttcaacaaccaaactaaaacctctcacctgagtgtaagggagtggtgaccttcttaagccgggagctcttccatcagggggttccctaagggcatctctgttcctarcgggggagccgtcaccccactttgctctgcttagcctgagacacgcaattttctccaacttttactcttcgctgaattctcaaggcggggttggggggatgttcaggctcaggaaggaggttgggggcccggccgctggacgctgttcaccggtagcccggaccagagcaggagtttcatcaccacctgcggggacaggtgggacacatgcatttccggggccatcctagacctcctggaggatgctgattgacactgtc

SEQ ID NO: 615914 - DNA, 550 bp, Homo sapiens
actaccaggcccagggtgtggcgctgggctgtcggcttgtggatttcatttctgccttttagtttttactttttctttctttggtcgcagaaactaggtataagacaatatgagaggtggtctcctcccttatattgacagtaaaaccccaagggcaggaatactcttatttctcaacaccatttcaacaaccaaactaaaacctctcacctgagtgtaagggagtggtgaccttcttaagccgggagctcttccatcagggggttccctaagggcatctctgttcctaacgggggagccgtcaccccactttgctctgcttagcctgagacacgcaattttctccarcttttactcttcgctgaattctcaaggcggggttggggggatgttcaggctcaggaaggaggttgggggcccggccgctggacgctgttcaccggtagcccggaccagagcaggagtttcatcaccacctgcggggacaggtgggacacatgcatttccggggccatcctagacctcctggaggatgctgattgacactgtc

SEQ ID NO: 615915 - DNA, 563 bp, Homo sapiens
gggctgtgtccagctgcaggggcagtacttaagcttactgcacccctactatgtgccaggtgcagggtgggcacctgcatgtgaggaccagggattggggtgttggaagattttggcttttggccaggactaaagggtgagaggtagtatggagaaggaattaaggccctgtggagaggcctgggcttaaatcctggcattgatgtttaccagctctgaggcttgtacgtggccaatcacttaaacactctgggccagtttcctcaactgtaaaacgggcatagtcacagtgcctacttgatccatccttgtgttcctctcaggcttgctttgtaagactcctggactccttaggttttatcaatcctggtgcccttccattgtatcacatccytggatcacagtgatgggttcaggaatagacacatgacccaagggaggctaatcaggtgaatatagggagatgttctttctttcttaaggtggctacgtttaggacatgagccagggttgccagtgtcacccatcacatgtaccatatgaataactcttgtctaagatct

SEQ ID NO: 615916 - DNA, 414 bp, Homo sapiens
acctcatgggagcactgagagaattaaatgagataatacatgaaacgtgcttagcacaggttgtgacgtatcataagagtttaaaattactggttcagatccttaaacttatccaakccacatgttttatgctcatgaaaactgaggcccagagaggtggcaagacctcctgggaggcagtgacctgctgccactggagtccttgaatattcacagatcatgacgggccctaagaaggtccttgtggtggtttcactggggtggaaggatcctgctctccaatcctcaccttcccatcccatttccgttagtcttcacttctggccccttaatatttcatccatccctactagatctgcatccctggtgccttcctgtcatttcccttgtttctttcccaccacaccacagaga

SEQ ID NO: 615917 - DNA, 414 bp, Homo sapiens
acctcatgggagcactgagagaattaaatgagataatacatgaaacgtgcttagcacaggttgtgacgtatcataagagtttaaaattactggttcagatccttaaacttatccaagccacawgttttatgctcatgaaaactgaggcccagagaggtggcaagacctcctgggaggcagtgacctgctgccactggagtccttgaatattcacagatcatgacgggccctaagaaggtccttgtggtggtttcactggggtggaaggatcctgctctccaatcctcaccttcccatcccatttccgttagtcttcacttctggccccttaatatttcatccatccctactagatctgcatccctggtgccttcctgtcatttcccttgtttctttcccaccacaccacagaga

SEQ ID NO: 615918 - DNA, 414 bp, Homo sapiens
acctcatgggagcactgagagaattaaatgagataatacatgaaacgtgcttagcacaggttgtgacgtatcataagagtttaaaattactggttcagatccttaaacttatccaagccacatgttttaygctcatgaaaactgaggcccagagaggtggcaagacctcctgggaggcagtgacctgctgccactggagtccttgaatattcacagatcatgacgggccctaagaaggtccttgtggtggtttcactggggtggaaggatcctgctctccaatcctcaccttcccatcccatttccgttagtcttcacttctggccccttaatatttcatccatccctactagatctgcatccctggtgccttcctgtcatttcccttgtttctttcccaccacaccacagaga

SEQ ID NO: 615919 - DNA, 414 bp, Homo sapiens
acctcatgggagcactgagagaattaaatgagataatacatgaaacgtgcttagcacaggttgtgacgtatcataagagtttaaaattactggttcagatccttaaacttatccaagccacatgttttatgctcatgaaaactgaggcccagagaggtggyaagacctcctgggaggcagtgacctgctgccactggagtccttgaatattcacagatcatgacgggccctaagaaggtccttgtggtggtttcactggggtggaaggatcctgctctccaatcctcaccttcccatcccatttccgttagtcttcacttctggccccttaatatttcatccatccctactagatctgcatccctggtgccttcctgtcatttcccttgtttctttcccaccacaccacagaga

SEQ ID NO: 615920 - DNA, 615 bp, Homo sapiens
agctgtccaacttgagccagtgatgaataaagacagatatggttgctgttctttcatggagcttacatcctaggggagaagtcaatccctaartaaggaaactaatagataaataatttcagagagtgatacattctatgcaacacatatcagagtggtggtttagagtgaggggtgctattttggatagagtgggcagggcagctttctgcgaggaggtgactaaattaagatcttgctgtgaagatgtttagttgcctgctaccctccacttctccctgaataaaacagccatgctctgctgctgagttcagcaatatccctggctatataagcatgtttcctagcttccttgcaggagggttggataggagtaaataagttgttagatagacattgcttataagttccttaaaagaggaaaactcaactcaagaggtgagaataattttgccattccttcctttttcctgtctataatgcagatgtgatggctggtgctgcagcagccatcaggcaccataaggtgagatgctaagaatggtagagcagaaagacacaaggagccttcgtcttgtgtggaaactctatactgccctggatgtcatccttcta

SEQ ID NO: 615921 - DNA, 587 bp, Homo sapiens
aagtctgcctgactaaattattctcttyctataggcctctggttcttattttaagattaaagacccttttgagaatcctactaagtgagagcctccccctcccaaaagtgcgctaactcacttacacagatttatctgaaaagctacactataactagaatgtccagtttgctacattgcattaaacactggctcccacaggagcctacgtgcccagcgtctgtgtggctggagctctctctcttgtgggtcccccttgtgggaagcaaaatgaccatcagaaggtggtgtagcgggcacagacccacagtcagatgagtcagatggttacttgggaccaagtcacccctcctaggagaggcttacgctggatgtccagtacttgcaatccccgactacggtggctttgggacaagtcatctttccttattttcatgtttcccgttgtaattggtgggcacacgtccactggatttgagactatagttcatgaaaccactgccaaagctgcctagaccagaaacctttggcatttctcggccctttgtgttatgtattgacttagtttttattctcagagagcaagc

SEQ ID NO: 615922 - DNA, 506 bp, Homo sapiens
ttgtgtcaccacccaaatctcatgttgaattgtaatccccataatccccacatgtcaagggagagaccaggtggaggcaaatggatcatgggggtggtttccctcatgctgtycttgtgatagtgagtgagttctcatgagatctgatggttttatgagtgtttggcctgtcctcctgtgttcattctctctcctgtcaccctgtgaagaggtgccttctgccatgagtgtatgtttcctgaggcctccccagccatgtagaactgagtcaattaaacctcttttctttataattacccagtcttgagaagttctttatagcaatgtgagaatggactaacacgctcatggaccaatgaaattataaaaaatagctaacatttgtgtccacagagtcctggaggtgagaagaaaaaatgagaggctagaaaactactcaaagaaataatggctgaaaactacccaaatatgtcaagaagaaacttaagaagctgagcaaaccaaag

SEQ ID NO: 615923 - DNA, 633 bp, Homo sapiens
gaaacaaacgaaaaaaaatagaaatcctcagcaaagaaataagacagctcagaaaggaaatagctataaagaaggaacagatggaaattttagaagtgaaaaataccattactgaaacaccaagctgagtggaccagctcacagcagaaaagagggaacagaggaaagaatctgtgaactggagggtagcgcaatagaaatgacttaagctgaacaacggagagaaaatagagtgaaaaaaaataaacagagactcataaagcctatggttaggctttgtgtcaccacccaaatctcatgttgaattgtaatccccataatccccacatgtcaagggagagaccaggtggaggcaaatggatcatgggggtggtttccctcatgctgtccttgtgatagtgagtgagttctcatgagatctgatggttttatsagtgtttggcctgtcctcctgtgttcattctctctcctgtcaccctgtgaagaggtgccttctgccatgagtgtatgtttcctgaggcctccccagccatgtagaactgagtcaattaaacctcttttctttataattacccagtcttgagaagttctttatagcaatgtgagaatggactaacacgctcatggaccaat

SEQ ID NO: 615924 - DNA, 298 bp, Homo sapiens
gcgattctcctgactcagcctcccaagtagctgggaktacaggcatgcgccaccgcgcctggctcatttttgtaattttagtagagacagggtttcaccatgttggtctggctggtcttcaactcgtgacctcaggtgatccacccgccttggcctcccaaagtactgggatgacaggcatgagccgctgtgcccggctctagtacttaggactacagacagggaccatcatgcctggtgatcctcccaccttttctgcttcaactctttcaccccacttagccacatggctttactc

SEQ ID NO: 615925 - DNA, 298 bp, Homo sapiens
gcgattctcctgactcagcctcccaagtagctgggatyacaggcatgcgccaccgcgcctggctcatttttgtaattttagtagagacagggtttcaccatgttggtctggctggtcttcaactcgtgacctcaggtgatccacccgccttggcctcccaaagtactgggatgacaggcatgagccgctgtgcccggctctagtacttaggactacagacagggaccatcatgcctggtgatcctcccaccttttctgcttcaactctttcaccccacttagccacatggctttactc

SEQ ID NO: 615926 - DNA, 298 bp, Homo sapiens
gcgattctcctgactcagcctcccaagtagctgggattacaggcatgcgccaccgcgcctggctcatttttgtaattttagtagagacagggtttcaccatgttggtctggctggtcttcaactcgtgacctcaggtgatccacccgccttggcctcccaaagtactgggatgacaggcatgagccgctgtgcccggctytagtacttaggactacagacagggaccatcatgcctggtgatcctcccaccttttctgcttcaactctttcaccccacttagccacatggctttactc

SEQ ID NO: 615927 - DNA, 598 bp, Homo sapiens
tgcctattgggtacaatgttcgctattctgatgatgggtagactaaaagcccagatttcaccactatgggatatatgtatgtaagaaacctgcatttgtactctctaaatatataaaaataaaaataaggccatgcacgatggcacacctagcactttgggaagctgaagccaggaatttgagaccagcctgggcaacacagggacacccacctctacaaaaaaaaatttwaaaaattagctaggggtggtggcatgcacctgtagtccccagctacttgggggactgaggcaagaagattgcttgaggctgggaggttgaggctgcagtgaattatgatcacactactgcaccccatctggaacaacagagcgagaccctgtctctaaaataaataaaataaaagagttgcaatattgaaacaaagattgtagaaaccaaaggcatacatctgagcctgaaggctgttacttacctaccagctgtgtgatgcaattaagatctctggacctttgtttccttatgtgtaaattgaaggcaataaagcaaattttacaaagatattgcgtgatctagggatcatatctgtgaagtgtct

SEQ ID NO: 615928 - DNA, 407 bp, Homo sapiens
tagaagctccaatgtgcttctgtgctgcaggcaactgtgagaaactacttcgacacgagagggcttaaaaaaccccatatatacacgtgatatcctccaggcccctgtgccctccttgcttagaattcccactggagtcatccctttcctaagacacatcataggacacacttatttttagcttattgtttattgcctgtctgccccagccccaactataaggtctgayagggacagggtctgaggcttctgtgaggcttgcacctggggtggcagcctgcatagcaggagctccggcagtggccaccgaccctgtgaatgacccagggctctcagaggatgtgccgctcagaggaaagccttggagctgaggttgtgcagggagccaggggacatctcaccaaggt

SEQ ID NO: 615929 - DNA, 581 bp, Homo sapiens
cttgctctgttgcccagcatggagtgcagtggcatgatctcagctcactgcaacctctgcctcctgggttcaagctatcctcctgcctcagcctccctagtagctgggactacaggtgcacaccaccacacccagctaattctactttctatcttcatagattaagcaacattttagcaacacatcttaattgtctcaaagttttggtgatttcatgaccttattaaaactaatatattcaacataatattcaggtatataatgacatttttcatctttgtacaatttttatctttaaaatgaagcatctggtttgtcacaatttcaaatccatagttaaatggcaggaatgttaggtttgcctgtgctgcctttctgcttggttggtactttaagagctttacatttgyacctacaaaaatgcagaaatgttaagttagaaatatggtgaatatttgaatggttagcatgaaacatactcacaacagaatagctgaggcaactgtatcgtccttcctttttattcttcagtttcttctccctgcctcccaatacataaacactcacacacacacagacac

SEQ ID NO: 615930 - DNA, 570 bp, Homo sapiens
aggaagctattaataatttgggaattctgaaattttagatctacctactgaagaattacaccaaacttatatttaactcactgaccctaatattagtaaaatgcaaatcaggatacatatgatgtttcatgctcttgggytattttctgaatctcttcctgcaagtggcagacacaaaaaaatataaacagactttgaaggggtttctggtccctgtgtgatggccaagaattttacaactatttttagttggttcaggaatagttgttcatccaacgacttttgtaaaactcttcagtagactaggatcttggcctccaagaagtcacagttcagtgtaataaataaatatgccagcaaataaggttaatacaatatggtagagggctgcaaacaaggtatgtacacaaaactctagatgctcatggaagggagtgataggctctttctaggggagatggggaaacattctcacaaaagacagtctttagattcctaaatgaagaacaggagtgaccaagtataagagaggggcatggaaggccaagggaaaagcaaatgaaaaggcac

SEQ ID NO: 615931 - DNA, 527 bp, Homo sapiens
taaccctcacacctcatccaaaagttaactcaaaatggatcactaacttaagtataaaagataaaaccaggtcagacatggcagctcatgcctataatcttgacattttgggaggccaaggtgggagaatttcttgagcccagaagtttgagaccagcctggacaacatagggaaacaccacctttacccacccaaaaaaatctaaaaaaaaaatagctgtatgtggtgctgcacacctatggtcccagctactcaggaggctgaggtgggagaattgcttgagcccagaaggttgaggctgcagtgggctgtgatcatgccactgcactccagcctaggcaacagagcaagaccctgcctcaaaaattaaaaaygtaaaactaaaaatcaaaatggattttgaggggttttttcttagggaaaaaattgagaaaatcttcagaatttagggtaggtaaagttattagatttgtcaccaaaatcacattccataaaagaaaaatttgataaattatacttcatcaaa

SEQ ID NO: 615932 - DNA, 527 bp, Homo sapiens
taaccctcacacctcatccaaaagttaactcaaaatggatcactaacttaagtataaaagataaaaccaggtcagacatggcagctcatgcctataatcttgacattttgggaggccaaggtgggagaatttcttgagcccagaagtttgagaccagcctggacaacatagggaaacaccacctttacccacccaaaaaaatctaaaaaaaaaatagctgtatgtggtgctgcacacctatggtcccagctactcaggaggctgaggtgggagaattgcttgagcccagaaggttgaggctgcagtgggctgtgatcatgccactgcactccagcctaggcaacagagcaagaccctgcctcaaaaattaaaaatgtaaaactaaaaatcaaaatggattttgagggkttttttcttagggaaaaaattgagaaaatcttcagaatttagggtaggtaaagttattagatttgtcaccaaaatcacattccataaaagaaaaatttgataaattatacttcatcaaa

SEQ ID NO: 615933 - DNA, 619 bp, Homo sapiens
gaaattcattttaattatacattttatttaacccagtatttccaaaatgcaagtattttgtcattatggttaatatgaaaacatttttttcatgagctatcttacattcttttttcctaagtctttaaattcccgtatgtattttatacttttagcccatctcaacaactcagactagctatatttcaagtgttcaacagccatgcatggctagcagctcctgtatttgacaacacagctccagatataaaaagaagtaggggagagggatcctaagccctgggacaatctgcagcgggggtaggggaaatcagagtggcatgacctcctcattgtctgtgtttctctccttggccattcttccacctcgctgccctggctggctgtttccaaccaaatcggcctcactttcaaggctctctaaagatgaaggttctgggaaggacagagaagaatccagaggaaatggattcctgcgccggtgcatacacatggggcmggggagtgctactgctgctgcacaaagagttatgccctgcagtctgggagcacgattgtgtctgtgcacctgtgtgtttcagagatgctccagcacaccagcactgaccttcaggcagcc

SEQ ID NO: 615934 - DNA, 575 bp, Homo sapiens
tgagaaagagattagagaaaacggagagaagagagagcacagaaataatagaacgtttctcagaggtaaaagacatgagtttctagaacaaaaagacttacccaaagacctacaaatacaatatataaaaatatgcccaaaccaagtctcatttgcatgaaatttttgatgaactaggatatggataaaatacttaaagtttccttacagaaaggagagggtgcacacaaaggatagcgtggaatcaggaatggcaatggacttctcaacagccgtcctggagcaatgcctttaaaagtctaaagaattcctatactggccgggctcagtggctcacatctgtaatcccaacactttgggaggctgaggtgggtggatcccgaggtcaggggatcaagaccatcttggccaacatgatgaaaccccctctctactaaaaatacaaaaattagttgggggtggtggtgcgcgcctgtagtcccagctacttgggaggctgaggcaggagaattgcttgcacccaggaggtgcaggttgcagtgagccaagatcgygccactaccctccagcctggt

SEQ ID NO: 615935 - DNA, 576 bp, Homo sapiens
tagtttacaaccacaattacagtgttatactattttgcgtttttctgtgtgcttacaattactagtatgttatgtactttcagatgatttcttcatgctcattaacatcttttcagattgaagaactacctttatgatttcatgtaggacaagtctggtgatgacgaagtccatcagcttttgtttgtctaggaaagtctttatttctccttcatacttaaataatattttcaataaatacactgttccagagtaattttttcagcattttaaatatgtcatgccactatgtcctggcctgtattgtttccatggaaaagtctgttgccagatgtagtagagctccattgtatggtttttgtttattttctcttgctgttcttaaaatcctttctttatccatgacctttgatagtttgattattaaatgcmttgaggtagttttctttgggttaaatctgtttggtgttctacaaccttcttatactttgatattgatatctttctctaggtttgggaggttctttgctattatctttttgaataaactttctacttctatctctttctctacct

SEQ ID NO: 615936 - DNA, 333 bp, Homo sapiens
tttttttttgtctcctctgactatgtattttcaaataggctgtcttcaaattcactaattctttcttctgcttgatcaattctgttattaagatactctgatggattcttcagcatraaagttgcaattctaaactctagaatttctgcttgattctttttaataattttaatattttaaaattttatctaataaaattctgaattctttttctgtgttatttgaatttctttgagtttcctcaaaacacctattttgagttctctttttaaaagatcatatatctctatttatctaggattagtccttggtaccttatttagttcatttgct

SEQ ID NO: 615937 - DNA, 333 bp, Homo sapiens
tttttttttgtctcctctgactatgtattttcaaataggctgtcttcaaattcactaattctttcttctgcttgatcaattctgttattaagatactctgatggattcttcagcataaaagttgcaattctaawctctagaatttctgcttgattctttttaataattttaatattttaaaattttatctaataaaattctgaattctttttctgtgttatttgaatttctttgagtttcctcaaaacacctattttgagttctctttttaaaagatcatatatctctatttatctaggattagtccttggtaccttatttagttcatttgct

SEQ ID NO: 615938 - DNA, 333 bp, Homo sapiens
tttttttttgtctcctctgactatgtattttcaaataggctgtcttcaaattcactaattctttcttctgcttgatcaattctgttattaagatactctgatggattcttcagcataaaagttgcaattctaaactctagaatttctgcttgattctttttaataattttaatattttaaaattttatctaataaaattctgaattctttttctgtgttatttgaatttctttgagtttcctcaaaacacctaytttgagttctctttttaaaagatcatatatctctatttatctaggattagtccttggtaccttatttagttcatttgct

SEQ ID NO: 615939 - DNA, 599 bp, Homo sapiens
tatcaaatttcaaagaccttttattctgggcaatcaggaatgcagctggggttggcaatggcaggttcagagagaaagactgaaacacacttctgaccaaaaaatgwcagagaagccctttaggagggcttctgagactctcttggcctatgggagaggagctaccagcagagaaccaagagctgttactgaaatgccagaggtttggtctaggttctgttgctcacttcacagaaagtcaatcactagacaatgactattgccaggaaaaaaggcttgtttaggtgctgcagctgaggagcatgagagatcaacttcatatttatcttactgactcactaaaaatgcggggtttatatagtcagagaagggatgttggtacatgtggagataaattatgaagatgtaagcaagcaatgttgacaaataaagggtctggtgtctcattgtctggatgcagttatctgatgagtttccattccttgcttgaatgttggttccccgaggaagaaacttagataagacaaatgtaagtgtcagaggcatttgaacaagatcaactacatcttgaataggggctgggtaaaatgagactgagt

SEQ ID NO: 615940 - DNA, 599 bp, Homo sapiens
tatcaaatttcaaagaccttttattctgggcaatcaggaatgcagctggggttggcaatggcaggttcagagagaaagactgaaacacacttctgaccaaaaaatgtcagagaagccstttaggagggcttctgagactctcttggcctatgggagaggagctaccagcagagaaccaagagctgttactgaaatgccagaggtttggtctaggttctgttgctcacttcacagaaagtcaatcactagacaatgactattgccaggaaaaaaggcttgtttaggtgctgcagctgaggagcatgagagatcaacttcatatttatcttactgactcactaaaaatgcggggtttatatagtcagagaagggatgttggtacatgtggagataaattatgaagatgtaagcaagcaatgttgacaaataaagggtctggtgtctcattgtctggatgcagttatctgatgagtttccattccttgcttgaatgttggttccccgaggaagaaacttagataagacaaatgtaagtgtcagaggcatttgaacaagatcaactacatcttgaataggggctgggtaaaatgagactgagt

SEQ ID NO: 615941 - DNA, 559 bp, Homo sapiens
caacacaattttagtattatgaacttactattaccagtgagttttgtaccttcagatgacttcttattgctcawtaagagctttttttccaaattaaggaaacatttgttgcattttgcatagacatgtctggtgttgatggaatccctcaggttttttttgcatgggaaagtctttatttctcatttgtgtttgaagcatattttcactggagatactattttataataaaagtttttttttcttcagaactttaaatgtcatgccactctttcctggtctataaggttttactgagaaatctgcttccagatacattggagctcctttgtatgttttatttatttatttagacagagtttcactctgtctcccaggctggaatgcagtggcgtgaaatcagttcactgcaacctctgcttactgggttcaagttattctcctgccttagcctctggagtagctgagattacaggcacccgctaccatgcccagctaatttttgtatttttagtagaaacggggttttgctatattggccaggctggtctcgaactcc

SEQ ID NO: 615942 - DNA, 607 bp, Homo sapiens
ctggccacatccaaagccagcatagtactgggtctcacaaaatgtccacagagaccactgccttgctactgctaatgttcactcaagtcccaagaactttttagttaacaggttgtgaatgaaaccaggcttgtgtctttcccttcagaatgatgagttccctccacctgccaatcaaccaaaggtgatctagaaatgccatccaggagttagagcctgtagttggaaaccttaggaatctgctcagtgctctattctactgtggctgagctggcacccaatgccacaagacaaagtccttctcactgcctcctctgcttttctcatgctgaagttgtctgtccttgtgtccatcactgccccaggccyacagcaaatactgcctggctactgctgatgttcactcaaggctcatgggcacttcagtgagcttctggtaaatgccaccaggcttgggtctctaccttcagagcagtgggcttctttgaggaccagcgtgggtccagaaatgtcattcaggagtcaaggactagaatcagtgaccccagaagcccactttgtgctctactccactgtggcagagctggtgcctaagcttcaagacagt

SEQ ID NO: 615943 - DNA, 606 bp, Homo sapiens
aaaaatgtatgttcaaagtcccaagctaaggaatctgggagtggctaatccagagattcacttttttatctatgaaggacatctgaacccctggcccatttttggaatacacctgtacaggggattggggccctttgttttgggttaaatggtggttacaaggagaaggttgctaggtggagggtgctaagwgaaaatgctatataaacagcatgcattttacaaatagttgcagtcttcctgtccagctcaccagcactggacatgccttgtatgtaagtctccccagtaaaatgtatgtctcatttactggctctgggtcttttccttgtcctcttggacatggtgccatccctgttagagttactaaggagcttgaggctcagcccaccagccctcttgcagagaaattgcaggtgtcaacccctttagactaggatgaaggccaagaccccagaatcccaataagagcaatggtagccaggatgtctggagattgaaggccacatttagaactaaatgtatattggaaacctaggaataaagagactatccttgtattagtggatactggagccaaatgcactcatatatggcatcatttat

SEQ ID NO: 615944 - DNA, 606 bp, Homo sapiens
aaaaatgtatgttcaaagtcccaagctaaggaatctgggagtggctaatccagagattcacttttttatctatgaaggacatctgaacccctggcccatttttggaatacacctgtacaggggattggggccctttgttttgggttaaatggtggttacaaggagaaggttgctaggtggagggtgctaagtgaaaatgctatataaacagcatgcattttacaaatagttgcagtcttcctgtccagctcacyagcactggacatgccttgtatgtaagtctccccagtaaaatgtatgtctcatttactggctctgggtcttttccttgtcctcttggacatggtgccatccctgttagagttactaaggagcttgaggctcagcccaccagccctcttgcagagaaattgcaggtgtcaacccctttagactaggatgaaggccaagaccccagaatcccaataagagcaatggtagccaggatgtctggagattgaaggccacatttagaactaaatgtatattggaaacctaggaataaagagactatccttgtattagtggatactggagccaaatgcactcatatatggcatcatttat

SEQ ID NO: 615945 - DNA, 599 bp, Homo sapiens
gggaatacccacactacatctacaccattggaaatcaacaggcagacaaagtagcccataggagactttgcctcctaaagggtttactggctacataagaagacagaaaatcagggacaatatactttttgggtcagagcaaataattgggacctgcaactgtgatataaaggcatagtactcatctgtcattaatatcctacttgtgcacaggaatgccataggcctttattgcacagtactgggcagataacctggggccagagcctagtgcaagtgtggcaggtagaccatataggacttttgcctttatctgatgactgcccctatgacttgactcatgtgaacacmtggacagggctactgtgggcatatcccagcaagcatgccactgaaaaagccactataaaaggtctagagcagctgtgagtggtctatggcatccccactgatatcaacagtgaccagggctcacactttaccagacacaaactgcagaaatgggcaggggccctggatatacaatggcatttccacttgctatacaaacctacagcagagggtctgattgaacgagtgaatagattgttgaagcaaca

SEQ ID NO: 615946 - DNA, 652 bp, Homo sapiens
cacctactacaggagcagattaatcttatcccactgtggggtttgctatacacaatgggctcaggtggatgatgggagtacagatacaagtagtggtttgtgtacccttatgtatcaaaaagcatgataacaacataccgaaagctaaaatccgtaatatgggatggctactcttacagaccaatctcttcagataaccggtgatatgtaactggggtggcagacagactgtctccacttgggggcccaccccttcccttgaggatgacgatgggcatgctgcatccatggctggccttacttaccctatcattggaccagtagatgcacttgagagcatccttccttacttgccrggatggattgtgacctctttagaagttattcctactaactgggagagtgtgaaaaccaggctccaccagaagcatacaatctgctggttttatcacttggccatttttgtcccccaattcagggcaataaaaatagagatgcacatcgagtccctggataaacatatggctgcagcattcgatgatacctgccatgctattactcttctcactgaagaaacaactccaattagacgtgttactttgcaaaattgcatgaccctgaacatcttaactgtcacccagaatggaacctg

SEQ ID NO: 615947 - DNA, 510 bp, Homo sapiens
aatagtactctattgtgtatatgtatcacattttctttattcattcatctgctgatggacatttaggttgctttcaaatcttagctattgtgaacagtgctgcaacaaacacgagagtgcagatatctcatcaatatacaaatttcctttcttttggatatatacccagcagtgagattactaaatcatatggtagctttatttttggtattttgaggaacctccaractgttctccatagtggttatactcatttacattcccaccaacaatgcatgagggttcccttttctccagatccttgtcagcatttaacggcttgacttttgtataaaagccattttaactggtgtgagatgacatctcattgtagtattgatttgcatttctctgatgatcaataatattgagcacattctcacatgcgtgtttgccatttatatgtcttcttttcagaaatgtctattcagatcctttgcccatttcaaaatcagaatattagatttttcc

SEQ ID NO: 615948 - DNA, 612 bp, Homo sapiens
gggtggagccctcatggagaacctctactagggcagtgcagagggaaaatgtggggtttgagcccccacagagagtccccactagagcactgcctagtgaagctaagagaacagggccacaattctccagaccccagaatgatagacccactgacagtttgcaccatgtgcttggaaaagccacaggcccttaataccagcttgtgaaagcagcggttggtggcagggtgggrcggggggagctgtaaactgcaaagccacagaggcagagctattgaagaccttgggagcccacctcttgcatcagtgttacttagatgtgagacatggagacaaaggagattattttgtagctttaagattgaatgactgatctgcttgtttttggacttgcatagggcctgtaacccctttgttttgtctgatttctctcttttgaaacaggagtactaacaaatgcctgcactctatcttggaattaactgacttgtttaaaattttacaggttcattggtgtaagggacttgccttgtctgaggtaagactttgaactgtgaacttttgtttaaatgctggagtgaattaagactttgggagactgtcaggaaagca

SEQ ID NO: 615949 - DNA, 552 bp, Homo sapiens
aagtagccattctttgatttctttactttcttaagtaaagtatttctgggcagtatttctgggctctttgtccttttctattggtctatgtgcctgtttttgtacctttaccatgctgttttgattactgtagccctgtagcattgtttgaatttgggtagcatggtgcctccaggtttgctctttttgcttargattaccttggctatttgggctcttttttcatttcaaatgaattttatcttattttattaatttatttacttatttatttttaattgtattttaagatctcccttacatgcgcagaatgttcaggtttgttacataggtatacatgtgccatgttggtttgatttgctttaattaattaattaattaattaatttctaaatatactttaaattctccagtacatgtacagaacgtgcaggtttcttacataggtatacatgtgccatattggtttgctacacccatcaacttttcatttacgttagatatttctgctaatgctatttctcccccagcctcccacccccacaacagaca

SEQ ID NO: 615950 - DNA, 552 bp, Homo sapiens
aagtagccattctttgatttctttactttcttaagtaaagtatttctgggcagtatttctgggctctttgtccttttctattggtctatgtgcctgtttttgtacctttaccatgctgttttgattactgtagccctgtagcattgtttgaatttgggtagcatggtgcctccaggtttgctctttttgcttaggattaccttggctatttgggctcttttttcatttcaaatgaattttatcttattttattaatttatttacttatttatttttaattgtattttaagatctcccttacatgcgcagaatgttcaggtttgttacataggtatacatgtgccatgttggtttgatttgctttawttaattaattaattaattaatttctaaatatactttaaattctccagtacatgtacagaacgtgcaggtttcttacataggtatacatgtgccatattggtttgctacacccatcaacttttcatttacgttagatatttctgctaatgctatttctcccccagcctcccacccccacaacagaca

SEQ ID NO: 615951 - DNA, 482 bp, Homo sapiens
aaagtagcacaccgttgggtcttgctttygtatccagcttgccattctgtgccttttaattggggcatttagccgttaaggctggtattcatatgtgtgaatttgatcctctcgttgtgttgttagccgattattattcagacttgtttatgtggtttctttgcagtgtccctggtttatatacatacatgtgatattgtattgggtggtaaaggtgtttcttttccttatttcatgctcctttaaagacctgttgtaagatgggtgtggtggtaataaagtccctcagcatttgctcgtctaaatataatcttatttctctttcacttaggaatcttattttggctggatgtgaaattcttggttggacattttgttttttaaaaatgttgaatatagacccctaatgtcttctggattatagagattctgctgaaaattgtgttgttggcctgatggcattccctttatagatcacctgt

SEQ ID NO: 615952 - DNA, 596 bp, Homo sapiens
aacaccaatttaataattacacaataggccaagtgctgtggctcatgcatgtattcccagcactttgggaggctgaggtgggcagattacttgaagtcaaaagtttgagatcagcctggccaacaagctgaaaccccatctttactaaaaatacaaaaattagcaaggtgtggtggcacgtgcctgtagtcccagctactcaggaggctgaggcaagagaaccacttgaacctgagaggctgaggttgcagtgagctgagactgtcccactgcactccagcctgrggaagagtgagactgtatctcaaaaaaaaaaaaatctacacaataaagcaccttcataagaatcaataataaggtgagcactcacagtacctggttttaactttctgttgctaaaagaggcactgaaatcattaaaaaaaaaaaaggtttgaatcactgaaaccacccttcatcaacctcccagcagcagtggtgtgatgtggagaggttttctgcggactggatgaaagagtgttcagtaattgtgaaacatctaactcagtggtgtattgttagaccagaaagaaaaaccagacccccaacaactggac

SEQ ID NO: 615953 - DNA, 547 bp, Homo sapiens
gtttcttagcttccttgcattgggttagaacatgctcctttagcctggaggagttttttattacccaccttctggagcctacttctgtcaattcgtcaaactcattctccgtccagttttgttctcttgctggtgaaaagttgtgatcctttggaggagaagaggcattcttgtttttgaaattttcagcctttttgcagtggtttctccccatcttcttgtatttatctacctttggtctttgatgttggtgaccttcagatggggactctstgtggatgtgctattcctttctgttggttagttgtatttctaacagtcaggcccctctgctgcaggtctgctggagtttgctggaggtccactccagaccctgtttgcctgggtatcaccagcggaagctgcagaacagaaatgattgtttcctgttatttcctctggaagcttcgtcctagaggggtacctgccagatgccagccagagctctcctgtatgaggtgtctgtcagttcctactgggaggtgtctcttagtcagaatacacagag

SEQ ID NO: 615954 - DNA, 369 bp, Homo sapiens
ggatgttttagtctgctgaagctgtgcccacagccacccctgccctctggtgctctgtcccagggagatgggggttttatctgtaagcttctgactagggctgctgccttttttttcagagatgtcctgcccagagagtaggaatctagagagacagtctggccacagtggccttgctgagctgtggtgggctccacactgttcaaacttcctggcagctttgtttacactgtragggtaaaactgcctacccaagcctcagccatggtggatgcccctccccccaccaagctcgagtgtcccaggttgacattagactgctgtgctggcagcgataatttcaagccattggatcttagttgctgggct

SEQ ID NO: 615955 - DNA, 402 bp, Homo sapiens
agatctgctgctctctcgagagccatcaggaagggatgttttagtctgctgaagctgtgcccacagccacccctgccctctggtgctctgtcccagggagatgggggttttatctgtaagcttctgactagggctgctgccttttttttcagagatgtcctgcccagagagtaggaatctagagagacagtctggccacagtggccttgctgagctgtggtgggctccacactgttcaaacttcctggcagctttgtttacactgtgagggtaaaactgcctacccaagcctcagccatggtggatgcccctccccccaccaagctcgagtgtcccaggttgacattagactgctgtgctggcagcgakaatttcaagccattggatcttagttgctgggct

SEQ ID NO: 615956 - DNA, 624 bp, Homo sapiens
ggcaagttgtgtcctgttgcctttctttccagcccagccatgtgaacacaacagcgatccacatttcagtgtgtacaggcaggctgtctctgccacgtgcccattttcccactctcactcacacaggcagatgcccacagaccacagacacacccacacacgcactcagaagggactccacaccccaaaacataatcacaaacacacaagcagagaaacacacaagaaacttgacacgggcacaagggtgtgggcccaagtgttcccccacacagacatgtacgcacatgcacccccacaggcataacactgcccacaaactctcccatrcaggctctgaatcaccacttgcgatgggcatgcttttttgtctccaggcctgggtcatcatgccattgattgggtaacttgggcgttcctttgagaatgaatgcaggaagtctgttatcagataggccccagcagttggtgtgaaactggagctttcttggtcaaactgcttaaaaacttacactcggaaaggatcccatcatcacaaagcttcttggttgtgtgttttttcacggggatgtcactggtgtctctttgccactcccgttcattgtcattgcttcttctcagtct

SEQ ID NO: 615957 - DNA, 538 bp, Homo sapiens
agtggcttttcctttttaattttatactcatttgacttatggactaattcttaatgctcataccttatcaaaaactgaaaaaaaaaatgaaaaataaggtcaaatgtctgttttttccccaacccaaaaggaaggtagtttgaagtatttaacacacatattttattgggatgacttattaaaacgaagttgacctaaatgattataaaatttctacatttatagatgctagtggataatgttatctggcaagtcctgaataaaaggttaagwtcatttccactttgaacctaaaactaaccaatttagtagtaagagttttctttgtagcttgtgaaagtaacaccatgtactttggtttcaggtaataggataaagaagtgacagacagaaactgtcttcctgatctgaaaaaagtaaggtgtgaaagacataagcaatacttgtggaaattcaagcatgtgatcacatactaaccaagtctgaccgttttagtatttcccttgtgaactagatttttattggacataaatatagc

SEQ ID NO: 615958 - DNA, 525 bp, Homo sapiens
ttatctggcaagtcctgaataaaaggttaagatcatttccactttgaacctaaaactaaccaatttagtagtaagagttttctttgtagcttgtgaaagtaacaccatgtactttggtttcaggtaataggataaagaagtgacagacagaaactgtcttcctgatctgaaaaaagtaaggtgtgaaagacataagcaatacttgtggaaattcaagcatgtgatcacatactaaccaagtctgaccgttttagtatttcccttgtgaactagatttttattggacataaatatagcaaatataagtacatttaatttcagtttcctttttcctgaaawcaagagataaggcacatgttgtcctataagatgaataaatttaaaatggtgtttgcaaattaccctgtcttctaaatatggtctctagagtttatttggtgtggttcatctttaggaagctgcagtgtaattaagaagaatgattatatgggaaacataattttactcttatctataggaaaagtc

SEQ ID NO: 615959 - DNA, 617 bp, Homo sapiens
gttgtcctataagatgaataaatttaaaatggtgtttgcaaattaccctgtcttctaaatatggtctctagagtttatttggtgtggttcatctttaggaagctgcagtgtaattaagaagaatgattatatgggaaacataattttactcttatctataggaaaagtcccttgaaacaacagaaaccatttctaaactgtcttagaatagttttttctttcttttttaaaaagctcagtttaggacagtataatagaaattaaagcattaatgttatttacagttatttctccagcgataataaatcacaccagtatttgatgattaataatgcaattgacataattccctaaagcccttataaattttatatgataaaagtagagagggtttttttttccctccttaaggcttggaatatatatgtaaagacttgtcccaagccccatagctagttagtggcagaactrgtgctaagtaccatgacccttgacttagctctgtctctgttgcatttctttttcttttcttttctcattacatcatcctgtcttttttatagtggagaaatatactctgaatacaataaaaataaatggaaaataataaattgaat

SEQ ID NO: 615960 - DNA, 418 bp, Homo sapiens
tatgtaatgaagtttatattgaagacttcagtttccatgatggggtcacttggacaaactyctctacagcaaacaattataaaagcagtacagaacatgtaaaacaataaattgaaggcattggagaacaaccaacataattagggcataattatgatctttgagagaagagaagcacaaaagttgagtctatgttttctctggctgcttccgtgagggcattttctaaatcacagcacaggtgaatgaagtataggaaaaagatggtattctgttattggaagttaaggttggtgccacctaattgggtctctgctgcaagaaacttgaggacatccccctccttcatttgcaggatatcaagggctccagacatcgtgaaaattttcctttaagttacaatggactaaggagaaag

SEQ ID NO: 615961 - DNA, 534 bp, Homo sapiens
tggaaacctcagaaaagtagcccaaatatctgcatataaatgagcaagacccccaaaaacccaggttaaaagaacatttggacggccaaatagcttatctgagatattttgcagcctcatggtgctgggggagacataggaattcaagtgcttccaaggtagtgggggcattggtaaacaacctcaggctttcagtggagaccctgtctgccaagccctaggagtaggaaccatactctagtaggaaaactgaaatagacaagccctaacagagctttagatcaggcttagacaggatcaaggtgatccaccagtaattgttttctgacttccagaagaaaatttaatcctctttgaaggaagatattattcagagcctcacaatttttccatccataatattcagcattcaataaaaaattgcaaggcatgctataaaacaggaagaaatgactgaaacccaagagaaaaaaaagacagtaaacccaaagaagatttagatattrcaattattaaatagggatttaaaaaaaa

SEQ ID NO: 615962 - DNA, 563 bp, Homo sapiens
tttttggactgtgcaatagtggtttgtccagataaggaccttggcgatccggagtcatttaaaccatctagcagcatgatgccaagcacaatagaaacatgtttgctgtgagtgctcagtgtcaaggtcatgctggtagacaattctccacgggcttctcacatttctacatgtcttatgagcagaggaactaactgacattatttcattctgtcatttcaaaaatgtttgtacagtgaacagccttggaagatggagatagtgcctctctctagagcaaagggcaggcatgcttgctattcaccataaaaaattcaggttctgtaagcttggagtctctctcctataatgcttactatgtgtgcaggtagtcgaactggtgcaagaaactgctgaaatgctagctactgctgttgctaagagtaataaagtcratggtctttctcccaggaatgtcacttctttttccagcacccatgaaaaaatgctaattattagctggcaagtagtttttgcaggcagttcctgacagatcacagggcatctctccaccccatctgtag

SEQ ID NO: 615963 - DNA, 601 bp, Homo sapiens
ggagctggtcaaccttgataccttgcagaagctcaaaaagtattcttagaaagattgagtgaaggtaccaggtatttcaggggacctttcagcagagctcttcaatctaactagaatcttgaatgcccaataagaatacatgggaacaggaataatagtgctacaagtaatacaatgataataatcataataccaatgttgyctgggtgcttactatacgcctagtactgggccaagtgctttgaatgtactgcctcatataatccttgcaaaattactgtgtgattattaacattattggataaataaaaggacacagagaggttacgtaattttctcaaagtcacttagtgacagaactgagatcccaccaccttgtaatctgctgaacatattacatgattaaaaacgaacagggaagtttttattttgggtaaatctgaattaaatcaaccataaaaatgtcttctttgtttcagattacagatgggtcatcaactaatacacttgaaagcttagaatcagagctaacctggacaaaccaaacttttattgaaagcaagccatcgatattttggttcaactcctcattcacagatct

SEQ ID NO: 615964 - DNA, 601 bp, Homo sapiens
ggagctggtcaaccttgataccttgcagaagctcaaaaagtattcttagaaagattgagtgaaggtaccaggtatttcaggggacctttcagcagagctcttcaatctaactagaatcttgaatgcccaataagaatacatgggaacaggaataatagtgctacaagtaatacaatgataataatcataataccaatgttgcctgggtgcttactatacgcctagtactgggccaagtgctttgaatgtactgcctcatataatccttgcaaaattactgtgtgattattaacattattrgataaataaaaggacacagagaggttacgtaattttctcaaagtcacttagtgacagaactgagatcccaccaccttgtaatctgctgaacatattacatgattaaaaacgaacagggaagtttttattttgggtaaatctgaattaaatcaaccataaaaatgtcttctttgtttcagattacagatgggtcatcaactaatacacttgaaagcttagaatcagagctaacctggacaaaccaaacttttattgaaagcaagccatcgatattttggttcaactcctcattcacagatct

SEQ ID NO: 615965 - DNA, 493 bp, Homo sapiens
atagtgaactgaatggattacactatttcatttgttctcttgggatagctatctaatgtgatcctacacaccatttatggttatcaaacatgatacgtggtgaagtaactatgattccagatagagttgttaaataaattgagtttacttgccttcataagctatgacttgttacactttttttaatctttgatttttgtattaaaagcaagttatctgaaagaaggaagatgaaaaaaagtaatatcaaggagtataaaatatagagataaaggaagtatattargaggaatcagagcctttaagctttaacccttattggaaaagatatttaactcaatatttgttgaagttctgaaatgactgaatagttctttttattccatgtcttcttgcttccatttagctggaatgtactgggcaggattagaaatggctgttctttcagttttttatggtttaaactaaaagcaaagtgccagaattcttaaaa

SEQ ID NO: 615966 - DNA, 444 bp, Homo sapiens
cattatttctacttgtcatgtggattataaagttcaagttgcagagaaaggttcattatgatttaaataacccaggaccttaatacaggtggataaygtcctatgttaataaccaactgttatattactttaggaagtaactttttttcatagataatctctgttccttccactatgtctaccaaagtaaagcctaaaaggaattcttgtctgttatttaaatatctacattttgagagaggcttttattttcttctcaaaaagaaaataacatttttatgtagcaaagaacaatgtcttttaggatttggtgttatttaggtatttttttcttaaaataaggtaaatcgaggctttaaaaagaatgaccttattagctaggtcctatcttagccattttttatttgatattttacttatttattcagaggctaattccactat

SEQ ID NO: 615967 - DNA, 452 bp, Homo sapiens
actgaaatctgcctgcctttgtgcactctaaaaatgagtggttgtatttcttcaattgaccagtatttggaccgaacgatctctagagtccctgctgtcctgccgctctcacagtcagtgcacactgacaaggctgcctataaagtttcaatgaaaatatgagacacacagtaaaagtctgccacaataaaaaaaaaacctatacaataggaatagttcattaatgataatgtacatgctatcttatattataatttacattgcatttttgtgactttccgtttttatttctttttaatgcatcttttgtctctaaactgacataattctagtatttattttttcagttaattttctgaacacagtacttaaaagccaaattgccartttaaagccagatatctgacaacaccatcattagagattacatttgttctacaaacactcaacaa

SEQ ID NO: 615968 - DNA, 567 bp, Homo sapiens
tgtgaaaagccagtttataagctttgctcatttttctatttttgtcattgttttagttttttcttactgatttgatccagatgatctgttcacaatgcagtttaaatattaatattttgtctgtaatacatacaattaaaatatttttctgcatgctgtcaattttcttttaacttggtatgtgcccttgtttgtatggctatattttgaagttttagagttgatacagtcaaattgaccactcttttcttttytaatatttatcttatttttattgctttttaatatatcttaggcaggaaggcttccctacattatagttataaatatatttacttcattctcttttagtaattttatattctttaattttacataaagttctttgacatttaaaatttttttgtgtgcacatgttaaggctactatataactatttttcaacatttgtcttacagcgtgtgtgaattatttgatcatatttttcactcattttttcttttggcaaatgaaggctatattttcccccaaatgttgttggaatagctagttccatcctttttctca

SEQ ID NO: 615969 - DNA, 561 bp, Homo sapiens
tcagtaaatgtcttcttaacatttgctaatccctgaattagtatagagcaatatgtatgttagagatgtgtgtgtgtgtgtgtgtgtgtgtatttcaaaaaactaaaggactggaaatgaaagcaacgtattcaacattagaataaaagaaagaagaaaaaattaggattctggctcttacaacgcagtcccttccttaatctttcaatccccatgttgacccaggtcaaaatggcccatttactctcttccatgtgccacggcatccccaaagtcaggactgttgtccccactactaaggtctgaaatgcccatgctgctcctctcttcttcatcctttggcccagctatgtccacaaaamacgtcaggctgggttttttcaggttggttatttcttcctttgtggaacacttagtgctaaatccttctatttccacttaatgaccgacctctgctgactcaccgacacttgagaaagagctctcaagcctcatggtgtgtggttctatcatcatctgtgcctcaaagtgcctcagaaattctaatttcagggtcatgac

SEQ ID NO: 615970 - DNA, 582 bp, Homo sapiens
aatggcaaggggcctggcatacatgttattttccaaacctaaatagactttcatgaagctatctggttgtattggcataacatgaaaccgattcttaacacccaatggtaagcgaagtagggtagactaacaaagagtcagtttgggttagaagaacttccccttgttcaagtttattctctttagttcagcacttttttggatatttaacagacaaggatacaagtgaatagactggctctttgatgctccctgatatggcacagcagagggccagtggtgggggstagtcaatccggccaccacagaaactcattaagtcacaggggccatgaaactgcatggagttaatgcagtctcctaccatttgtaactaacaggctgggacaaaggccccttagcacacacagaaactacgccatgtaagggattattcgctgtatcccaattaacatactacagtggtctcctcgctgccatctagctgcagtaggcctggccctgtcctgctataacaacattatagtaaccacaagaggccctggaaactatcagtcatttcttgtgttgaaatgctattaa

SEQ ID NO: 615971 - DNA, 437 bp, Homo sapiens
gagaagccaacttggctcttttaacatggtgataggttatagttgaaagaagagtagcaatggctatgaacaggaatgttttaatgtctttgccaagaagggaggaaagaagaaagaaagagagagagagagagagaaagaaagaaagaaagaaagaaagaaagaaagaaagaaagaaagaaagaaagaaagaaagagaaagaaagaaaagcagagggggagagagagagagaaggggagggagtgagggagggagggaggraggaaggaaggaaggaaggaaattttcttcataaataatttttctttctctcaataaatgaaagttctgaaactctggaggtttttgtttcagcaatggcagtgcagtgctcttgaaagaagtcttcagcagtactgcgaagaatgtgctaaaagccatgtttcagatacataaa

SEQ ID NO: 615972 - DNA, 560 bp, Homo sapiens
cacgtatatataataaatatatataaatttacatatataatttatatatataaagatatatatatatctcttatttccaagatgtcaattagacagtagaataaacttggagatgaagactagaattttctttaaaatgaaatggaacgtattttaaaataccaagggcatcacatccagtaacgataaaattacaaaatttttgtttcactgtgaatgtgtatgtgtgagtatatatttactggatcaaacagaaaaaaagcttcctactagagtcaaaagtttattagggttgggcatgacagctcacgcctgtaaccccaactctttgtgagtctgaggcaagatgatcacttgaggccaggaatttgagactagcctgggcaacatascgagacaccgtctctacaaaaagaaattaaaaattaaccaggtgtgatggtgcattcctgtagtcctagctactttggaggctgagatggaagaattgtttgagcccaggaggtcgaggctgcatgaaccataaccactgcactccagcctaggcaacagagtgagac

SEQ ID NO: 615973 - DNA, 396 bp, Homo sapiens
tatgttttggttgggaaggtattcgataaataaataaataagcaaatagcagataaggataaaattgctgtgcagaggattaaaataaagtaatagaaagcaagtggatggctgtttaaatcgtgtggtcagggaaggcctctctgaagtgatatcatttcaacygatatttgatgactaaagaggagacttccatgagcaaatcttgcggggagaggatgccaggtggaagagactaagggcattggtcctatggaagttggacgcttgatctgaggatcagaaagaaagccagaaaggtaagggccagattatgcaggcctttgtaagcttaggcaaagtgttggtattttattcttatttaaaggaaaacattggaaggcttaaacaaacttg

SEQ ID NO: 615974 - DNA, 586 bp, Homo sapiens
aaattaaacaatgcattagttgacttttacttcaaatctgatgatgtcaggattttaaatagaatgtggtttttcttcatatgtggtgaaagttctgacttagaagataagataccttctcaaaaagccttatccaggtgctcagattttaatatatgattcccataggcatggttatttaaagatttacacacaggaaaatagtttagaaactctttggatgattcraacaacttggtttttagcattctagaacatactggctaccaagtttgcttttaatttgaaaacttgtcaccatcatggtagcacagttcacattacaaaatgaaatgaaagaaaactgtcaacccaaatatatgtaaagtgttaaagtctgtagcatcacattaagtaaaataccaccttggtttccaagaaatacaaatctaaagaaaatgtgatggacacaagcaatcataattttttggttgtttctttatcatttgcataccatattcttattagtgataagttacacatttttcactgaagaaaggaagactgttaggaactccctaactctccccatcctccacaaatcaat

SEQ ID NO: 615975 - DNA, 628 bp, Homo sapiens
tgccatgtgcctaaacaaatcaactaacagcaaaacacattctagtaaaactgctggagtttaaagaaaagggaaaagctatttgaacatgaagacaaaaagaacatgagccttataaataaaaagaaaattagctcatcgttagattttttttacagcaatactttatgacagaaaaaaatggaataacttatttaagatacttaaggaaagaaaatgagagtcaagaaacttttatcctctaaaactgattttcaagaatgacttgattcttgaaatcaaaccttgaatgactaggttcatccctgttgtcacaaatgacaggattcccttcttttttaatgaatagtactccattgtgtatatatacctcatcttctttacccatccatctgttgatggacacttaggttgattccataacttagctatcrtggatagtgctgcaatgaacaggaaggacacagacaaactgttaaaaacacacaagaactcagggcatatttttcctgtgagcccttgctgaggaacctactagcaaacaagctcaaacaacacaaatgtctgagagatactaacctaaggactgtagtgagaattgaatatagctcacctttagaactaagac

SEQ ID NO: 615976 - DNA, 565 bp, Homo sapiens
ctcagttcctaatctacttcctattgtactagggatgtagaagcaaatcaaacagaggcccaatcttcctggagtttagaaattagtaagacaaacaatcttgaagtaaataatttttataacttactaaacaaataattcattataatttatttacctaasgtaataaacaaaaaaaaaattacaattttgataaatttcgtcggctttcactagttcttatcctgggtcaatgtgaacataaacgtgtcctgagaatagagttaaacttggtacctgtaatactctcactcatatgtctaacatgttgagattctaagtgattctgagctgacaactcagtaaaccaaagtaacacctgcttctcaccctgcacctctcaccgttccctggcagaaagagtcctttctttttttttttttttgagacagagtctcactctgactcccgggctgaagtgcagtggcacactctaagcttactgcaacctctgcctctcgggtttaagagattctcctgcctcagcctcccaatagctgggattatacgtgtgtgccaccatgcc

SEQ ID NO: 615977 - DNA, 565 bp, Homo sapiens
ctcagttcctaatctacttcctattgtactagggatgtagaagcaaatcaaacagaggcccaatcttcctggagtttagaaattagtaagacaaacaatcttgaagtaaataatttttataacttactaaacaaataattcattataatttatttacctaaggtaataaacaaaaaaaaaattacaattttgataaatttcgtcggctttcactagttcttatcctgggtcaatgtgaacataaacgtgtcctgagaatagagttaaacttggtacctgtaatactctcactcatatgtctaacatgttgagattctaagtgattctgagctgacaactcagtaaaccaaagtaacacctgcttctcaccctgcacctctcaccgttccctggcagaaagagtcctttctttttttttttttttgagacagagtctcactctgactcccgggctgaagtgcagtggcacactctaagcttactgcaacctctgcctctcgggtttaagagattctcctgcctcagcctcccaatagctgggattakacgtgtgtgccaccatgcc

SEQ ID NO: 615978 - DNA, 440 bp, Homo sapiens
gcaatattttagatgcttatgttctaaattagtgctgtacrttggatttggggacttaattttgtgtggggtatggatcaagtcaactccatgcctgccaagcttcaaagctaacaatttcccagctcaataatcctggaggctgattgtgattcatattcatttcatgacatgatccatgactgcggaatgactcactggatcttcctttccatttccctgtaagtgtagtccttaaaccttgtaaggcttttcttctgcaatgcttttggcctataatcatttccaaaacatttattgaacctctattatataatgggcattgttctagggacatagaagcaaatcaaatagaggcccaatcttcctggagtttagaaattagtaagataagcagacttgaagtaaattatatttataaggcactaaagaaagaattc

SEQ ID NO: 615979 - DNA, 440 bp, Homo sapiens
gcaatattttagatgcttatgttctaaattagtgctgtacattggatttggggacttaattttgtgtggggtatggatcaagtcaactccatgcctgccaagcttcaaagctaacaatttcccagctcaataatcctggaggctgattgtgattcatattcatttcatgacatgatccatgactgcggaatgactcactggatcttcctttccatttccctgtaagtgtagtccttaaaccttgtaaggcttttcttctgcaatgcttttggcctataatcatttccaaaacatttattgaacctctattatataatgggcattgttctagggayatagaagcaaatcaaatagaggcccaatcttcctggagtttagaaattagtaagataagcagacttgaagtaaattatatttataaggcactaaagaaagaattc

SEQ ID NO: 615980 - DNA, 581 bp, Homo sapiens
gctgttgtttcaccactttattttcttgataaacttgcttttgttttgcgctgtggattcactctgaattttttcttgcacgagatccaagaaccctcttttggggtctggatctggacccctgtccggttaacaatgctgtgtctgaataaatctgatgatctaagtattagaatatcaccctttataaatatatgcatgtatcaaataactttaattattcttaaagcatgtctacaaaaaccacatgaaaatgcagacatttgcatggaggtaataaacgtgaatatgtttcagaacatctggacagtkgttctcatgcttgttggaatgaagctcagtgtagaaagtagaatgtagatgtgtacaggatgtagttgactgcaacatttcaagaaatgaagttcttgcccttcagctataccgatataaaaaatttaaattacattatacactttattttaatccttgatgaagagattgttatattcagtattgtagtcctgatgtagagaggtataattacatttgtcaaccaaaagtatgcgagacaggtctcaatcagtttagaaagtttattc

SEQ ID NO: 615981 - DNA, 543 bp, Homo sapiens
ttgtgccctgttacagaaagcctttcccttcctgcctagatagctgtgttcaatttcaaacattagccagttgggtcagtttagattgtgcggtccaaccctagccaataggggaaagacacagcagtagggactagctgcattaggaataagaaccccttcccttcccttgtacagtgtgctctcgccattgctccaccagtgagccgcacccttctatagaagtaaattgccttgctgagaaaacttttgcctgagtgctattttcattttgcggcaccaagcatttacttccaacattggcgcaagatacaggtcataaagaccttgttgataaaacagattgcagtaaagaagccagccaaaacccactaaaacctagatggccacaagagtgacctctggttgtccttactgctacactcccaccagtgccatgacagtttacaaatgccatgacaacaaaaggaagttaccttrtctgttctaaaaaggggaagcatgaataatccattccttgtttagcatatcatcaagaaataa

SEQ ID NO: 615982 - DNA, 499 bp, Homo sapiens
ccacaatgtttatcttaacctgaacattccctttctatctatcccaggccttttttttttttttttttttttgatacaaagtctctctctgtcgcccaggccggagtgcagtggcgtgatctcgactcactgcaacctctgcctcccgggttcaagtgattctcctgcctcagcctcccgagtagctgggattacaggcatgcactaccacactaggctgattttttgtatttttaatagagacggggtttcaccatgttgcccaggctggtcttgaacttctgagctcaggtgatccgcccgcctcggcctcccaaagtgctgggattataggcgtgagccactgcgcccagcctctatcccacgtyttgagacaaactcaaccaattgtcaaccagaaaatgtttaaattcacctataacctggaagcctccccttcccccaccacccgctccacatctggaccaaaccaatgtatttcttaaacggatgtgattga

SEQ ID NO: 615983 - DNA, 596 bp, Homo sapiens
ccccaacaggcccccatgtgtgatgttcccctccctgtgtccatgtgttctcattgttcaactcccacttatgagtgagaatatgcggtgttwggttttctgttcctgggttagtttgctaagaatgatggctttcagcttcatctatgtccctccaaaggacatgaactcattcttttttatggatgcatagtattccatgatgtatatgtgccacattttctttagcactttttaaaaagaattttgccaaaacattaaaagtgattatctaggagttatctttttcatctttattatattccatactttccatatcatttacaaagagtacttattccttgcaattagaaaaaaaaacttatttttaaatatttaagatgagttcctgaaaaataacacataatgttcataacacgtttcattgcataattaaatttctacagcaccatataaatgtgagattggaaggactatttaatgaggatagaaactcaaagatagaagtacctataagaagaaattccctcaaagtgtacaaatgtcttagggagtcactgaatttcccttttaacatccaatgtgtactcatgtca

SEQ ID NO: 615984 - DNA, 602 bp, Homo sapiens
tatttctaaaatttccattcagtttttctttatatcttctatttgctgagaatttctgtctctttgctgagactttctacgttttcatttgtttcaagtgcatttatacttgcttgttgaagaatttttatgatggctgctgtaaaatccttatcagataattccaacatctgtcacctcattgtttgcatctactgatggtcttttttccattcggaaacattttcctgtttcttggtgtgtggaatgattttttattgaaacctggatatttttaggtattatgttatgagactatgggtcttatttaaaccttctgctttagccaactttctcagataccaccacagcaggggaattgggagcactgcttcattattaccaggtgtggctaggagtccaggttccccagtcagcctccctttatactgagtaacagggtcccctcattactactgggcaaggtgagaattcagtttcccattaggtctttattgattcttccctggctggaatgtgcagcggcaccttttgstgcaccctgggaatctccactaatgctatgggacagagtgaccaggaagagcttcattacaccaggt

SEQ ID NO: 615985 - DNA, 485 bp, Homo sapiens
caagtgatttgtcagccttggcctcccaaattgctaggattacaggagtgagccaccgcacccggcactgccaaaattcttactgctaraaattcatatgttccgctgactctttttgacacaccatgctagctacaatgtgcaattgtcctgtctgggaaatggaaaggccaggtatcgtctgggtggaaaggggttttcagtgtcattttacggccttaataagctctgagaattcttactatggaagttcctctctacagcatattaaaaaatcaaaacaaaaccctatcccacattaaatataattcaggactgtaatttttttgaaaggatgtttataattttgcttttgaaattatttgcctccaagtggcatttgacttatgattcgctatgatttgttagctatcatcaccatgtatacttcagaattctttcaaagtaagaaatcccaacttccaaaattattttcgaatgtaatg

SEQ ID NO: 615986 - DNA, 565 bp, Homo sapiens
tctagagacaatattcatcatcaacactacttctcagagatgcaacatggttttgggaaaaaattagaggtttctagtgtttcaacaacctgcatttaaatcctggattcacatttaccagttgtgtgatcttagaatgtaatttaaccttcctaaacctttccccatcttaaaaggaagcagtaataaatgcactgtatgtcaacgtaaatatcaacatttagtatttcattcattggatcctttgaagcatttattttgtgctaggtacatagtagctcatatataagtgctaagtaaaattctttctcttttcttttcccctttatgttacttaaacatctaacccagctacactggagaacacacaggtaaaagagcagagataggaagaaaayaaaaataaaacatgacaccctgccataaaagactaataggattatatacagtttgggtttttttccccctcatttcgcttgcccctaatgattttgtttcaaaagacattgcaatggaagtccactgcaatagagtcatttgctctttcttttgtattacactgaca

SEQ ID NO: 615987 - DNA, 628 bp, Homo sapiens
tcaacatttagtatttcattcattggatcctttgaagcatttattttgtgctaggtacatagtagctcatatataagtgctaagtaaaattctttctcttttcttttcccctttatgttacttaaacatctaacccagctacactggagaacacacaggtaaaagagcagagataggaagaaaataaaaataaaacatgacamcctgccataaaagactaataggattatatacagtttgggtttttttccccctcatttcgcttgcccctaatgattttgtttcaaaagacattgcaatggaagtccactgcaatagagtcatttgctctttcttttgtattacactgacatcgtgtggccatctgaagacgtctctagaaattgacaactgtcattcccagatttttaaccttcagctgcagagatgccatatgagtagttgaatctctacatttaagaaccaaatgacaaaacaagtcccttttggaggctttaaacatattatatacatagataattctaagaattcagattagctgaataatttgacatattattctgttatggtttagatagttaataaaatatttattttttgtttgttttagggagaaaggtctcatcct

SEQ ID NO: 615988 - DNA, 579 bp, Homo sapiens
aatacaaaaaagaacaagtgacaattttctctgtcttagggagaagagacagcagaagtgtaaatgatccctaaagagtgatagatgttatcatgaagccacaggaggggtgccaggctgcacaaaagagacactggatgcttcttggtagtagaggcagtggcttcccagccttggggctaaggcttgtagggtgaattggaacttttcagatgagcaaggcaaagaagggaccttctaacattccttggatggaacatttttgacattttcycatttacagctacttatattttctacaagtgtcactgtgaccaacttatgtacacatactttttcttgcttagttataataatctgttcttaaagaaaatgtcagtctctacattctatgctgactgttaaggaaagagcacccacatctgctcctacttagctttttttctgtggttcttacacagtattcctttttttcttttcttgaaagagactcctcctttcttttcttttcttgaaagagttttaaacagataagatggcaaaagtgactgatctctactcccccagtttgaatggtaa

SEQ ID NO: 615989 - DNA, 593 bp, Homo sapiens
aagcagctctgctgtaaaatctgtttacgctcaaacagtatgcaccgcttcaccattttagaggcacccaataaaacagtattacagttgatatctaaattgaaagctaaattcagattcgcagaatgttgaagagttaatccttccaagtagccctgagtatactccaaagtytcttacgctgatgcttgttaccatatgtctcgtaatcgcttactgccacctgctgggcaaagagatgtagcactcaaggacaaattgtatctcaagaacaaatttaaccctaagcagctgtaacatccagttcttggtcctccggtgtcactacagttgttaagacagaagctgttaaaaaatgacagtctaggcagttcagagaaatgtccccagtggcagctgcagccatcgccagtcattctgagagctttcacgtgactggtgaaggtcccattgattggcccagacttcagtgacccctgaggtacaagggaaggcatttctccccatatgatgctcctctcagtgttcaaagatcccaatggatactccaacacccaagccaacatcttgattcccccaaaattcccatggca

SEQ ID NO: 615990 - DNA, 609 bp, Homo sapiens
cttgattgaagtggtgcttatcaaatctaaacatatggtaaaaggacatagaattatgcacatgctttttatcattgtcaatcaactccttggttttgatgatgtaatcactggggaaaccaggtaaaggatacacagaacctctgtactatccatctctgcaatttcctgtgaatttgtaattatttcaaaatgaaagtcttttttaaaaaaaaatccaactcacaagaatagagagaggatgcgctttgacaattaatatatttgtgtgctatgcatgatcgaattacctcttcttggtaaattcaaagggcaggaagtccgggcgyggtggttcatgcctgtaatcccagctactcaggagactgaggcaggagaatcgcttgaacccaggagcgggaggtttgcagtgacccgacgtgccactgcactccagcctgggcaacagagcgagactcagtctcaaaaaaaaaaaaaaaaaagaaataattaatttaaaaaaaagacaggaatccaatatattaattatactcctgctgaatctctttactgctttctttatgccgtaattcttatactgtagtacacagatggtttctattacactta

SEQ ID NO: 615991 - DNA, 605 bp, Homo sapiens
ctccttggttttgatgatgtaatcactggggaaaccaggtaaaggatacacagaacctctgtactatccatctctgcaatttcctgtgaatttgtaattatttcaaaatgaaagtcttttttaaaaaaaaatccaactcacaagaatagagagaggatgcgctttgacaattaatatatttgtgtgctatgcatgatcgaattacctcttcttggtaaattcaaagggcaggaagtccgggcgtggtggttcatgcctgtaatcccagctactcaggagactgaggcaggagaatcgcttgaacccaggagcgggaggtttgcagtgacccgacgtgccactgcactccagcctgggcaacagagcgagactcagtctcaaaaaaaaaaaaaaaaaagaaataattaatttwaaaaaaagacaggaatccaatatattaattatactcctgctgaatctctttactgctttctttatgccgtaattcttatactgtagtacacagatggtttctattacacttacaactctttactaaatttgatttaatgatttacatgtctatatccctctatcagatatcaaacctgggtccacaccaatgt

SEQ ID NO: 615992 - DNA, 643 bp, Homo sapiens
ggatgtttggtatgactgtacctttggttttcattcatctggacattttttactgagcaactccgatgtgccagacattatgctagaaataacagatggttttggagacatgactgatatggtttggatgkttttttcccctccaaatctcatgttgaaatgtgatattcgatgccagagttgggcctggtgggaggtgttttggtcatgggggtggatccctcatgaatggctctgtccttgtgctaatgaattctcaccttaagagttcacacaagacctagtgtttaaaagagcctgacacctcctccctctctctcttgctccttctctttccatgtgacatgctggctcaccctttgccttctgccatgattggaagctttctggggcctcacaagaagccaagcagatgctggtgccatgcttacatagcctgcagaactgtgaagcaaataaacctcttttctttttagattaccaagttgtgggtattcctgtatggcaatgcaaacagacaaacacaatgacgataaacatatgaaaaggaaactatctttgtaagaaatatatgccaacttggtgtgggtctgtgtccctacccaactctcatgtcaaattgcaattctcactgttagaggag

SEQ ID NO: 615993 - DNA, 643 bp, Homo sapiens
ggatgtttggtatgactgtacctttggttttcattcatctggacattttttactgagcaactccgatgtgccagacattatgctagaaataacagatggttttggagacatgactgatatggtttggatggttttttcccctccaaatctcatgttgaaatgtgatattcgatgccagagttgggcctggtgggaggtgttttggtcatgggggtggatccctcatgaatggctctgtccttgtgctaatgaattctcaccttaagagttcacacaagacctrgtgtttaaaagagcctgacacctcctccctctctctcttgctccttctctttccatgtgacatgctggctcaccctttgccttctgccatgattggaagctttctggggcctcacaagaagccaagcagatgctggtgccatgcttacatagcctgcagaactgtgaagcaaataaacctcttttctttttagattaccaagttgtgggtattcctgtatggcaatgcaaacagacaaacacaatgacgataaacatatgaaaaggaaactatctttgtaagaaatatatgccaacttggtgtgggtctgtgtccctacccaactctcatgtcaaattgcaattctcactgttagaggag

SEQ ID NO: 615994 - DNA, 643 bp, Homo sapiens
ggatgtttggtatgactgtacctttggttttcattcatctggacattttttactgagcaactccgatgtgccagacattatgctagaaataacagatggttttggagacatgactgatatggtttggatggttttttcccctccaaatctcatgttgaaatgtgatattcgatgccagagttgggcctggtgggaggtgttttggtcatgggggtggatccctcatgaatggctctgtccttgtgctaatgaattctcaccttaagagttcacacaagacctagtgtttaaaagagcctgacacctcctccctctctctcttgctccttstctttccatgtgacatgctggctcaccctttgccttctgccatgattggaagctttctggggcctcacaagaagccaagcagatgctggtgccatgcttacatagcctgcagaactgtgaagcaaataaacctcttttctttttagattaccaagttgtgggtattcctgtatggcaatgcaaacagacaaacacaatgacgataaacatatgaaaaggaaactatctttgtaagaaatatatgccaacttggtgtgggtctgtgtccctacccaactctcatgtcaaattgcaattctcactgttagaggag

SEQ ID NO: 615995 - DNA, 643 bp, Homo sapiens
ggatgtttggtatgactgtacctttggttttcattcatctggacattttttactgagcaactccgatgtgccagacattatgctagaaataacagatggttttggagacatgactgatatggtttggatggttttttcccctccaaatctcatgttgaaatgtgatattcgatgccagagttgggcctggtgggaggtgttttggtcatgggggtggatccctcatgaatggctctgtccttgtgctaatgaattctcaccttaagagttcacacaagacctagtgtttaaaagagcctgacacctcctccctctctctcttgctccttctctttccatgtgacatgctggctcaccctttgccttctgccatgattggaagctttctggggcctcacaagaagccaagcagatgctggtgccatgcttacatagcctgcagaactgtgaagcaaataaacctcttttctttttagattaccaagttgtgggtattcctgtatggcaatgcaaacasacaaacacaatgacgataaacatatgaaaaggaaactatctttgtaagaaatatatgccaacttggtgtgggtctgtgtccctacccaactctcatgtcaaattgcaattctcactgttagaggag

SEQ ID NO: 615996 - DNA, 609 bp, Homo sapiens
tgcacaatcaatttttgagaaatatatgcatcaatgccgtttactaacaatgactttggaaaatcactttttctcttcaaacttcaatactctcaactgaaaagcactgagcrtaatccctaccctttaaagctattgcatacaataagtacatacaaaatcactttgtctggccaggcacagtggctcatgcctgtaatcccaggactttgggaggccgaggcgggcagatcacttgaggccaggagtttgagaacagcctggcaacatggtgaaacctcctgtacaaacattacaaaaattagctaggcgtggtggcacacacctgtagtcccagctacttggaagcctgaggtgagaggattgcttgagcccaggaggtcaaggctgcagtgagccaacattgcaccactgcactccaccctgggtgacagagcaagactctgtctcaaaaaaacaaaaaacaaacaaacaaaccatcactttgtccattttaaagatattccaagaatataataatttattactgtcgttacagaggatagacatttatgatttccatttcagatttctggacaaagaatatgccttttagcttcaaatactaaa

SEQ ID NO: 615997 - DNA, 609 bp, Homo sapiens
tgcacaatcaatttttgagaaatatatgcatcaatgccgtttactaacaatgactttggaaaatcactttttctcttcaaacttcaatactctcaactgaaaagcactgagcataatccctaccctttaaagctattgcatacaataagtacatacaaaatcactttgtctggccaggcacagtggctcatgcctgtaatcccaggactttgggaggccgaggcgggcagatcacttgaggccaggagtttgagaacagcctggcaacatggtgaaacctcctgtacaaacattacaaaaattagctrggcgtggtggcacacacctgtagtcccagctacttggaagcctgaggtgagaggattgcttgagcccaggaggtcaaggctgcagtgagccaacattgcaccactgcactccaccctgggtgacagagcaagactctgtctcaaaaaaacaaaaaacaaacaaacaaaccatcactttgtccattttaaagatattccaagaatataataatttattactgtcgttacagaggatagacatttatgatttccatttcagatttctggacaaagaatatgccttttagcttcaaatactaaa

SEQ ID NO: 615998 - DNA, 579 bp, Homo sapiens
cttctcctctgctgctgcccagacaacagtatcttctttcttctactcttccactcttgtccactcccgtccccatccactctatccagctgtcacagttattcttttaaaacaaaaatcaggccatgccactttcctgttcaaagccctcattggcttcctattatacttagaataaaatataaagtccttcctaacctacaaggagccatatgatctagcctctggygcctgtttgacctcattcctcaccatagctcagcgtgggcatgctggctccgaaggcttcttgctgtttttcaaacacatgcagccttgctgggacacctggatagctataagcaaaagaatggagcctggactcctaccccactcaacaacctaaagattagagctgcaactataaaggtctttgaagaaaacaaaggggcttggacttgacaataaattcttatatatggcactaaaagcacaaacaaaagggaaaatagataaattggaattcatctaaattaaaaacttctgtgcatcaaaggacgttaccaagacaatgaaaagaaacctacagaattggagaaa

SEQ ID NO: 615999 - DNA, 567 bp, Homo sapiens
agcctctttgcccaaattagttttggtgtggatggtatggggcagcgcaaaaaacactcacgctggcctctgcctgctaatgtgaacaggggaacccagcaggaaacagagcaacctgatctaaccccaggtgaggtgtgtcacatacctggcagtggcagcagctgcataatgaaagtgagacttagggccacctggatacaggcgctcctggtgctcactgatgcatcaggagccatgcagagaagcccaggacatgggaaagaacccagatagtctgtctyttccaggcacacaccagctgaggaggccaggtggctgcatgagctccagtccaccccagcccttgactgcaagccacttcctatctctgggcctcctctgtgaaatgggggtaggctgcttctcacaggattgcagcaatgtttacacggggcagtgcctgcagagggcccatcacagggcctggcacacagggacaaattcctgaatgcttagaaacagaaatgtttggaagcaatgcttctaaaatgaaatgcccagatgtctaatggcatccaccactct

SEQ ID NO: 616000 - DNA, 371 bp, Homo sapiens
tatattatcaacatatcttattaacattgaccttttagctctataatgaagagaaaaagggggtccttctrtatgtttgtatagggataagggggttagaaaatgttccagcaagtgtaaaccttttatttgtaatctgttgaggcattggtgtgtccatctttgtgtaggtgattcagaccacatgtcacacacaaacacacgtcctgggggagcacaggtggtacccctgaaggtgtgctcactaatagattcattcatggggaatgctgacaacaccaaattgaaccatgggttcctttctttgcaagcttttcagaatttgtttatatcatagcctatatataggtatggttggcatagtaaggact

SEQ ID NO: 616001 - DNA, 613 bp, Homo sapiens
ctctgctttctggagtatctgatctggaattacctggaattttactagtggccagtgactgtggtaataatatggcttctagtagttgtgaaataagatgtccattttttatgcattgatccagagaggttaagatccctttttgtttctataacatttcaaaatcatgggctactctaaaagcatacctactgtttgtataaatattagtggatatttcttttgccaaygggcaggccctaattaatgctattaattctgcttgttgagccgaggtggcttccagaagataggcactttccatttcttcagacaccatagtgtaatatgcacaggagattccagattcatccttcaagtaaaatctatctgcattttactacagcatttataagtgggagtgtcttatagttctcacctgagagaaagaaattgatcagttgtgtttaggcagtcatgtggcatttcatctgaaaatgaaggcaaaagtgttgcaggttttaaatcgttacacctagagatggtgatatgagaggctgacagaagcaggacctcatatgaagccagtcggctaaccaagtaatgttgagtatgatatgaattcagcaatgct

SEQ ID NO: 616002 - DNA, 613 bp, Homo sapiens
ctctgctttctggagtatctgatctggaattacctggaattttactagtggccagtgactgtggtaataatatggcttctagtagttgtgaaataagatgtccattttttatgcattgatccagagaggttaagatccctttttgtttctataacatttcaaaatcatgggctactctaaaagcatacctactgtttgtataaatattagtggatatttcttttgccaacgggcaggccctaattaatgctattaattctgcttgttgagccgaggtggcttccagaagataggcactttccatttcttcagacaccatagtgtaatatgcacaggagattccagattcatccttcaagtaaaatctatctgcattttactacagcatttataagtgggagtgtcttatagttctsacctgagagaaagaaattgatcagttgtgtttaggcagtcatgtggcatttcatctgaaaatgaaggcaaaagtgttgcaggttttaaatcgttacacctagagatggtgatatgagaggctgacagaagcaggacctcatatgaagccagtcggctaaccaagtaatgttgagtatgatatgaattcagcaatgct

SEQ ID NO: 616003 - DNA, 318 bp, Homo sapiens
ctctacctccactgctaagctacctaacccccaagccccaattccctacctgcaaaagggggataagaatacctgcaccatcttcttcaccaggttaacggggttaaacaagagaaatcctccaaaagccttttctgggctgcagaatgagcagttgggtttctctcacgcctcrcgttccgtgtgcctcctggcgtcctcacccacttctctgcctctgcagcttccagatgctgtatgccgactgctacatgaaccgggaggagttctgggagatgtttgatggctccttgtaccacaagctgcgagagaagctgg

SEQ ID NO: 616004 - DNA, 443 bp, Homo sapiens
catgtctgggcaccccgtagcgctgtgaaattgacacagaattaactatcacaggagggctttgttttgttttgagagacaaacatttaccagcataccacttaacagagacctctcttaataagccctccaaatscaagcttagcaggaaaggtggctcctgcaccctggctctggcctcagtacattcgcctcttaggcttctgaacctcaggcatctctatgatcatccccactcccttgttaatcattctcattattggtgaacccccattccctggctaatgccgccgcaggtccaggaagagggagtggatcaactgaacctgggaacaggtgtaaactgctcctgagaaggaggagctccaagggtcaagttggcgaaggtgaaactgccttcagggccaaaggactatggcagggccggagtgggacctgggctt

SEQ ID NO: 616005 - DNA, 443 bp, Homo sapiens
catgtctgggcaccccgtagcgctgtgaaattgacacagaattaactatcacaggagggctttgttttgttttgagagacaaacatttaccagcataccacttaacagagacctctcttaataagccctccaaatccaagcttagcaggaaaggtggctcctgcaccctggctctggcctcagtacattcgcctcttaggcttctgaacctcaggcatctctatgatcatycccactcccttgttaatcattctcattattggtgaacccccattccctggctaatgccgccgcaggtccaggaagagggagtggatcaactgaacctgggaacaggtgtaaactgctcctgagaaggaggagctccaagggtcaagttggcgaaggtgaaactgccttcagggccaaaggactatggcagggccggagtgggacctgggctt

SEQ ID NO: 616006 - DNA, 554 bp, Homo sapiens
tatggtgatgactttttagatacggctccaatggtaaaattcattttaaaaaattgataaattaaactttattgaaactaaaaacttctgctccgcaaaagacaatgtcaagaaaatggaaagataagtcacagactgaagaaaatatttacaaagacatgtctgatgaagggctcttttccaaaatacatgaagaactattaaagctcaacagttaaaaaaatatgggcaaccaacttaaaaatgaggaaaagactggaacagacacattaccaaggagattatacagatgtcaagtaagcataataaaagatgcttatgcttattaaaacatcatatgtcattagggaattgaaaattaaaacaatgagataccactatatatctattasaatggccaaaatccagaacaaggacaataccaaatggtgatgaggatgtggagcaacaggtactctcattcgttgctgatggaaatgcaaaatggtacaaccacattggaagacagtgtggcaagtttttccaaaactctgacaatatgatttagcaatatc

SEQ ID NO: 616007 - DNA, 544 bp, Homo sapiens
gagacctggactgtaatgtgaggaaggtgcattgcctgccttgtttctgcaagagtgatgcttaaaaaaagcagaaaaaggatggaattgggagtggggagaacagagtgtcaatcctggctccattsccagggctgttgtggtgctgatccacatttactttgtcacttgtgaatcagccctggtaatagttgccctacatacctcacaaaactgttgtaaaatgaggtactataaataaaagtactctgagaaaacacaaacgtagtaaacatatcatacctggacttatccaggatggccctatgcaaaataacgatgtaggtggcatttgcctaagcatattcactttctcactggtgtctcttaaagaattccctcctttgtcaaatatcccaggaactgttgcaaccatgtttcctctctcctgctatcattttacccatcaccccatgatcactgaatcctctgcactccctcaaaactacagcctcaatggtttccaactttttatggagaccattagccagacaatggtgtcatg

SEQ ID NO: 616008 - DNA, 544 bp, Homo sapiens
gagacctggactgtaatgtgaggaaggtgcattgcctgccttgtttctgcaagagtgatgcttaaaaaaagcagaaaaaggatggaattgggagtggggagaacagagtgtcaatcctggctccattgccagggctgttgtggtgctgatccacatttactttgtcacttgtgaatcagccctggtaatagttgccctacatacctcacaaaactgttgtaaaatgaggtactataaataaaagtactctgagaaaacacaaacgtagtaaacatatcatacctggacttatccaggatggccckatgcaaaataacgatgtaggtggcatttgcctaagcatattcactttctcactggtgtctcttaaagaattccctcctttgtcaaatatcccaggaactgttgcaaccatgtttcctctctcctgctatcattttacccatcaccccatgatcactgaatcctctgcactccctcaaaactacagcctcaatggtttccaactttttatggagaccattagccagacaatggtgtcatg

SEQ ID NO: 616009 - DNA, 544 bp, Homo sapiens
gagacctggactgtaatgtgaggaaggtgcattgcctgccttgtttctgcaagagtgatgcttaaaaaaagcagaaaaaggatggaattgggagtggggagaacagagtgtcaatcctggctccattgccagggctgttgtggtgctgatccacatttactttgtcacttgtgaatcagccctggtaatagttgccctacatacctcacaaaactgttgtaaaatgaggtactataaataaaagtactctgagaaaacacaaacgtagtaaacatatcatacctggacttatccaggatggccctatgcaaaataacgatgtaggtggcatttgcctaagcatattcactttctcactggtgtctcttaaagaattccctcctttgtcaaatatcccaggaactgttgcaaccatgtttcctctctcctgctatcattttacccatcaccccatgatcactgaatcctctkcactccctcaaaactacagcctcaatggtttccaactttttatggagaccattagccagacaatggtgtcatg

SEQ ID NO: 616010 - DNA, 420 bp, Homo sapiens
tttttcatgacaataagtacaatgatcttttctccccaccatatattatatgcaaggttacacttccttttgcttgtgcccatatctgctagcagttcccagagtacagagctcaattcaaaattgacccactgccttcctcttataatgggcataatattctgagaagcagtcaaattttctgggacttagaggctcattattctctaaactcttttgtgtctgaaaatttttataagaggttttttgttttttttttaagatcagttacaaggtaggcacagtggtrtgcaccttgtagtcccagctacacaggaggctagagtgggaggatcacttgagtccaggagttggagtccagcccagacaacgtagtgagatcctgtttctaacaataataaggccagggtcagcagtaaa

SEQ ID NO: 616011 - DNA, 420 bp, Homo sapiens
tttttcatgacaataagtacaatgatcttttctccccaccatatattatatgcaaggttacacttccttttgcttgtgcccatatctgctagcagttcccagagtacagagctcaattcaaaattgacccactgccttcctcttataatgggcataatattctgagaagcagtcaaattttctgggacttagaggctcattattctctaaactcttttgtgtctgaaaatttttataagaggttttttgttttttttttaagatcagttacaaggtaggcacagtggtgtgcaccttgtagtcccagctacacaggaggctagagtgggaggatcacttgagtccaggagttggagtccagcccagacaaygtagtgagatcctgtttctaacaataataaggccagggtcagcagtaaa

SEQ ID NO: 616012 - DNA, 464 bp, Homo sapiens
aatcacagttcaaaaaagactgaaaatctctccccagtgtcaatagcaaatactctctggacatgtgtttaaggagaatctgttgagtatacactaccaaatgcaacagtgcataaggatccaggtaattttaaataatgttaaacttactgagaaacaagaaaaagtccattcctaaaccaattttcatctgtaaaaagttccactgctttarttaatgattttaaaaatagttcatcaaagtcacttagatctgttccgtatgaaataccatgcctgtctatcaacttttctgatatgcgaagcgtaattgcaccattaagagcaacttaattcgttcagtccatgagtccaggaatatatcagatagattacctgcatctagctcacttttcccaagtaaaaccaagttagaacattgtgcctgtaattctccatttgtctgtccctccagatccatgccc

SEQ ID NO: 616013 - DNA, 588 bp, Homo sapiens
taacatcttacccagaattagactcaaagtcatcagtttgttggttgcagaattatsgtcttgcctcttttgaaggcattcagaatcttgaggaaagtgaaatctgagcacagtcaggatttagagagaaaatggacattggaggaagatgaggtaggattaaaaaaaatcagcatgtctggccaggagcagtggctcacgcctgtaatcccagcactttgggaggccgaggtgggtggatcacctgaggtcagaacttcaagaccagtgtagtcaacatggcgaaaccccgtctctactgaaactacaaaaattagccgggcgtggtggcgggcgcctgtaatcccagctacttgggaggctaaggcaggagaatcgcttgaacctgggaagcggaggttgcagtgaggcgagattgcaccattgcactccagcctgggcgacagaacaagactttgtctcaaaaaaaaaaaaaaaagaaaagaaaagaaaagaaaaaagaaaaaaagaaaaggaaagaaaagaaatggtttgcacaattgcaccactgaaggaatgtagagtataccttccaaagcaaccactgca

SEQ ID NO: 616014 - DNA, 588 bp, Homo sapiens
taacatcttacccagaattagactcaaagtcatcagtttgttggttgcagaattatggtcttgcctcttttgaaggcattcagaatcttgaggaaagtgaaatctgagcacagtcaggatttagagagaaaatggacattggaggaagatgaggtaggattaaaaaaaatcagcatgtctggccaggagcagtggctcacgcctgtaatcccagcactttgggaggccgagrtgggtggatcacctgaggtcagaacttcaagaccagtgtagtcaacatggcgaaaccccgtctctactgaaactacaaaaattagccgggcgtggtggcgggcgcctgtaatcccagctacttgggaggctaaggcaggagaatcgcttgaacctgggaagcggaggttgcagtgaggcgagattgcaccattgcactccagcctgggcgacagaacaagactttgtctcaaaaaaaaaaaaaaaagaaaagaaaagaaaagaaaaaagaaaaaaagaaaaggaaagaaaagaaatggtttgcacaattgcaccactgaaggaatgtagagtataccttccaaagcaaccactgca

SEQ ID NO: 616015 - DNA, 483 bp, Homo sapiens
ctccacctatggggaaggtctctacaggtccccargaagcctgtgctctgctctatattttcacttaatcatcttctccatatactacattatataacatacaaatattatctattataataattatatgctgtaatgcaattatttgttcacatatccatctctccaactaaactctgtgcttctagtacagtgcctgacacacagagagaaaaaacagatctgatgaatgaaataagtcagcagaatggcgttattggagcttgatgagaataagtagttttgttctaatcattttagtagcaacactcactcaagaacattgtattgcatttgtccaatgtactcacaaattaatatatactagtttatgattttaatttttttatttccagagtctcaaattgtgcacttgaattttgaaagcataataaacctccaactactctttttgccttcaatccctccttccaattcaagcta

SEQ ID NO: 616016 - DNA, 436 bp, Homo sapiens
aagcagttccctccggaacttctccaaaggccacaaggaaaaacactgctctcctactggtgctgctgacagaaccgtcttgccaccatytggggacaagactgcccaaatgaagtgagcagagggaaaaacagattccagagatggggagatgtgtcctcttgacatcgctccagtacctggttccaatgatccaggtttctgattaagctgctttgagctgggttttctgtcacttgcaaccaagagtcttgacaaatagagcactatactaatttaacctcttcagaataaacatccctcctactccacccctccctcaacatcaccaccactcccagaagagaacaaggcttaacaacaaaggaagagatccccagtgaggggattttaggcacctacggcaaattaatgaagctgatagttacaggcagga

SEQ ID NO: 616017 - DNA, 549 bp, Homo sapiens
taaacgtcttttctttatagattacccagtctcaggtatttcttcatagttgtatgagaacagactaatacaatacctgaataagaccttcccataaaagaagtatgccagcttcccaatgagaagccattgcacatccacacaatggatgaaacccaaaccaaccacccaaagcttttttcttaggtgaagacatataacaaaggaccaccaggtctagaaaaggaacacagcaacaacaacaacaaaasatcaagataactaagcaaaataactaacccagaggaaacagaaaattccaaaagcagaagagacatttttaaagaatcaatttcttataaagagagatcaaagatactattacatctagaaaatgatgataagaagctatgaaaaaggaacaatcagagaacaagaaataaattttgaggaattaaaagtataattgcttagattaaaaagaaaagtcaagtttctaaaataaagttgaggaactctcccagaatatacacgataagataaataagataagagactagaaaagtaatt

SEQ ID NO: 616018 - DNA, 442 bp, Homo sapiens
acaaaccttcaatttgtaaaaagcacggtatctacaaaatgcaataaagcaaagtgcaacaaaataaggaatgcctgtaattccactaccctaaaaaatcctctgtgctccctactcacaaccccatttcctggccaccactggtctttttactctctccatagttttgccttttccagaatgccatatagttagagtcatacagtatgtagctttttcagactgactgcctttgtttttttgtttgtttggtttttgttttttgacacagggtctggctcttgctcaggctggagtgcagtcrcacaatctcagctggttcactgtatcctctgcatgcctggcccaagccatcctcctacctcagccttctgagtagctgagaagtgtgcaccttcaatgccaggctaatttttgtatttatttatttttcttggtagag

SEQ ID NO: 616019 - DNA, 606 bp, Homo sapiens
gagcttttaaaattccttatgttttaaatacaggtattaatattttatcagatgtatagcttgcaatttttttctctcattctgtaggttttatctttagtctgttgattgtttgctttattgtatagaaactttttagtttgatgaattmccatttggctatttttacttatgttgcctgaggtaatattcaataaaaatatttcctggatcactgtcatggagcttgtattagtccgttttcatactgctataaaaaacttcccaagactaagtttacaaaggaaagaagtttaactaactcacagttcagcatggctgaggaggcctcaagaaacttacaatcgtggcagaaggtaaaggggaagcaaggcaccttcttcataaggcggcaggaaggagaagtgccaagtgaagggagaggagccccttataaaaccatcagatctcatgggaactcactcactatcatgagaacaccattggggaaaccatccccatgatccaattacctccatctgatctctcccttgacgtgtggagattatgggaattataattcaagatgagatttgagtggagacacaaagcctaatcatatcagag

SEQ ID NO: 616020 - DNA, 555 bp, Homo sapiens
taggcaacaaacgcaaaaataggcaaatggaattatatcaagataacaagcttctgcccaacaaaggcaacaattaaagtaaagagacaacctacagatggaagaaaatatttgcaaactcttcattcagcagggaattaataaccakaatatataaggaactcaacccaatggccaaaaaacaaataatctgatttttaaaatgagcaaaagacctgaatagacatttctcaaaagaagacatacaaatggccaaaaggcatatgaaaatatcctcaatatcactaaccataagagatgtgcaaatcaccattataatgagatatcacctcaccccagttagaatagctattatcaaaaaatgaaaaaataacaaaagccgatgaggatgtggagaaagaggaatgctcacagaccgttggtggaaatgtaaagtggtacattatagaaaacagtatggggttttctgaaaaaactaaatacagaggtatcatacgatccagcaattccactactggtatatatccagagaaaattaaatcagtgtgctgaaga

SEQ ID NO: 616021 - DNA, 655 bp, Homo sapiens
ggatttactactgccattttgctaattctttctagttgttttgtatattttagtttcttcctcttttgctgtctttctttgttgttaagtgattttctcagtggtatgtttcaattccttgatttttacttttggtgtatctactattggtttttactttgtggttactatgaggcttaaaagaacaacttactgttatagcagtgtattttaggctgataacaacttcattttgatcaccataagaagcactctacagtttacttgactccttccatttggaatttttgatgttacaattaatattttttatattgcatatacctgcagttattaattaaacaattttgtcttttaatgtttatactaaaggtataagtgatttacatatcaccattacagtactagagttttctgaatttgactgtctacttacttttactagtgagttttawactttcatatatttgtatgttactcattagcacgcctttcttttaccatgaagaattctcttaagcatttattataagataggtctattgtagatgaactccctcaatttttgtttgtctaggaaagtgtttatcttgccttcatttctgaaggagagttttgctatgttttgttttttcttctcaccactttgaatata

SEQ ID NO: 616022 - DNA, 599 bp, Homo sapiens
actttcacttactaattccctaaataaactttaaaaccactgttaagctgtccccaaaattcattgagaataaaaakaattctgttggctaataaaataattggcaaggaattgatgttttcaaccagaaaagtgcatattctctttttttaagagactaattagaacttctttatatttctcaatatgcttagttactttacccaaattatacaatgaaatggaaaagtgagatttgtactcatgtattttttactgaaggtacagtactctttataacattacattctaacatttggcaaagggcctaaaatgtactgataagatctagaatacgaagcactgtgccaaatgctgtgatagaaaaacaatattgtatgaactggtttttgcattcaaggcacattttttgaaaaacaaaaatcaagtctatgacacatgcaattaattagaaaacaatgaaagagatcagtggaattgttttgcaatagtggttgctcatggacctctgtgaattgaatgactgaatgcaaggtgagcttttactaaatttcctttttcttgttggccactcagcctcttttttgactactgcactt

SEQ ID NO: 616023 - DNA, 559 bp, Homo sapiens
agtaatgcttttgcatcttaagagtactgcagtgtatggtaacatttgcaggttctaagaagacttgttgagattttttaaactcaagacttttcccaaatagcaactacaattaaaaaaataataataacaatagatacttcaaagaactaaggtttgtggaactctgtggaggtgctgatttaggatgtatctctacctcctaaacaaacatctgtataagttccagagtactctttttcacagggagaggcatggaggatggtgacatcaggcatatattttggaatatttctaacraaagtgacacatgcttggcatggtgggaatggtagaagctgagcagttagtgaagtagcataaagtacagaaccagaaaatggcaaagctgtagaagattgtattgtttagaaaagaggcgaatatgctgaaagtataagttaagcccttgtgaaattacagaaggatgatgacattacaaagtttttagaaaagatatacacaactactattacactaatacgaaagaatatactgtttatattttttgctggttata

SEQ ID NO: 616024 - DNA, 543 bp, Homo sapiens
ttgttagaatttaaaacacaaggatccatttctgcctaacagtcttgtagttgtacattccctgaagtgtatcccatctgcttttgggagctctcattgcaatatgcagtgattgcaggataagcacaccattttcctgtcaatactttcctattagcctcctggatccatacatcatcatcttgctggcctgcagtttkcttatctttgtctcagaggttgcctttgatttatctaacacccaagctaatgaggcatggagcccagggtggctccaaggataatgcactcctgtataaaaatgcttaaggaaggatcaagtgctaatccattctagactaaaaggccttagtccttcaacaaatgttgtatttcttaatcgctaaactaagactataatagctcccccttaagctactaccatcagtaaaaccacacacactaactacatgcaatttaccaaaagaactaaaaattggattttaatttgtgcttccaaaaaaaagccaaaaaatggtttctatcttagcaacagttatcagc

SEQ ID NO: 616025 - DNA, 554 bp, Homo sapiens
tggttttgtggtagactcactctaaataaagatgagctatatatgtaaaacttcatatgtaataaaagaaaacaatgtataatcaaatccatgaatgaacactacactgaatacagaccctaaatttggaggtaccctgaaagacaatggtatcacttgaaggttccatccaatgtccacttttatggtttcaatgttactgcatattttaaagagatatatgttaaaggatatttataaagcagaccagtgaaatttgtgaggttgaaatagctgaacasatcatttcagaaagatcttacaaggataattttagacatgggcactctgtttatattaatatgtgttgtattttcaaattgctatggtgtaaaatttctaaatcaacattatgcatgctgatgcttcaagtactttatgaaaacagtttattctatctccaagtgaaaaaggtagaataaagttttttgtttgttttatttaacttttatttttgttgttgatatattttgttaaaacacaccgatcaaccaactgtttgattggtgttgaca

SEQ ID NO: 616026 - DNA, 624 bp, Homo sapiens
gagaatataaactactgcattcactggagcatatacaaattcttaattttactggaaatttcatttgagtcagcaaaaacatacaagggctttgttctctgaaccaatccaagcacattaagtcaatagcaaacaattgagcaactgtcactctcctgtaacttcatctatcagaaataagctttaattacagtcttccacagcgcttattcagtattctaaaactacagttataaaaggatattgtcagaggtgagtaggatttattaacttattatttttattaatcttatttaccagtaggcttcattgcccttcacaacccttcagaataaaaactgtctcagatcatgctggaatcttttaaagtttattcactacaccaggaawatcttaatttcataactcatgtgtgtgtgtttgtgtgtgtgtatgtgtgtgtgtgtttctgttttaactattgaagatatttgcttcaatatttgcttcctctattccctaaaatcaagtgtgttttcagatggttatatttttcagtctacataatattctgtattatataaaaatttccccatgttaatcatgggcattattaattaaaaaccacatgcttagtaattagcc

SEQ ID NO: 616027 - DNA, 579 bp, Homo sapiens
gacttcacactgactaagctgatgctgtgcttgctgttagccaaaaggccaagcagtaaggcagccagttggctggaatttagcagtccgtcaaatggtttagtccctgctggatgtaaagtcatggagtagatgccatgggggctctgtgatgaagcagaagacataaaaagaggttcaaaatctaatgaagcgaaaggactattgaaaatggaaataaacaattatacaactaacagaaatgatgaataaatgattggttttagcgattaaatattccrtactatgtaattgttgagtattatagacacagtcaaatttgcgtttttaaaaattcttctttgggcagttttttgcttcaggacttagagctagactacctttagccatcttcaactaatactgctgattgcctgcctagtggctgctcctctcttcctccctccaaccagaattccagggctgttcaggcatctatttctcccctgacagcccgtggaactcaggggaagctgaatccatctttagcttgaagggactccaactgccattggtccagctgtggtgggcatgtgacca

SEQ ID NO: 616028 - DNA, 599 bp, Homo sapiens
actttcacttactaattccctaaataaactttaaaaccactgttaagctgtccccaaaattcattgagaataaaaagaattctgttggctaataaaataattggcaaggaattgatgttttcaaccagaaaagtgcatattctctttttttaagagactaattagaacttctttatatttctcaatatgcttagttactttacccaaattatacaatgaaatggaaaagtgagatttgtactcatgtattttttactgaaggtacagtactctttataacattacattctaacatttggcaaagggcctaaaatgtactgataagatctagaatacgaagcactgtgccaaatgctgtgatagaaraacaatattgtatgaactggtttttgcattcaaggcacattttttgaaaaacaaaaatcaagtctatgacacatgcaattaattagaaaacaatgaaagagatcagtggaattgttttgcaatagtggttgctcatggacctctgtgaattgaatgactgaatgcaaggtgagcttttactaaatttcctttttcttgttggccactcagcctcttttttgactactgcactt

SEQ ID NO: 616029 - DNA, 609 bp, Homo sapiens
attaaaaataagagggctattgtgtccccaaaatagcacttagttggaagtcgaagatctgaatttgaggactggttgggacatttgttggctgtgtaaagttgggcattctagacccaacatagtcaaagtagacaccttagtcttaccttacacatgtacatttctttcacttaataatgaacacaatattctccagctaaggtggaaaacctgttttcattcattattttccttctgtgagccctaaattcactcagttgcratgtcctgttggttctatatgcggcagatcttctccatctaccacccttgtgtccccgccaccccctgccacccacggcctctattgaatgctagtgtgatctcagaccagacaataatggtttcctcacatcctaccaccagtctttttccacagctcaggtggtgtccttccctattgaaaaatgttcaaccagttccccattatacaaagacaaagtccagacctgacatcccaggtcttctaatagttgtctccagctcagattcctcacttaggctctcacaactcttcttcgtactgctatcgccccagcaaactcagctcatcaccacttgatacgc

SEQ ID NO: 616030 - DNA, 570 bp, Homo sapiens
tgctgatctctaggtctagaatgataaaacaatgtccctgcactcaagaatcttgagggactgtcaaaaatcaagtgccatgtggccattcttgcttaaggtcatawggcagagcagcgcacagaggaagaagtagtcagttcttgtgatttcagatcatcttgtggtctcacgtgagctaaatgatctcatctattttgttaagctcaaagctattttgttaatatttacttcccacctgagccaacactaatgtcccaaagtgagggaaaaaattacagataatctaggttaaaacatgcttgggactgactattctgaaggtgacatgatcataggtcataactgcccttattcttctagctcatgcaggctcaagcacagggctgtttgatgaactcaggtcccaagcacagataatggagagacataaatacttcttataatgaaatatactcattaggaattacaaatgatttttttcagtgacaatgtttatcacatattgtttatcattccttttccttctgccacttttataagaagctgatcacactctgcaggaaggta

SEQ ID NO: 616031 - DNA, 570 bp, Homo sapiens
tgctgatctctaggtctagaatgataaaacaatgtccctgcactcaagaatcttgagggactgtcaaaaatcaagtgccatgtggccattcttgcttaaggtcataaggcagagcagcgcacagaggaagaagtagtcagttcttgtgatttcagatcatcttgtggtctcacgtgagctaaatgatctcatctattttgttaagctcaaagctattttgttaatatttacttcccacytgagccaacactaatgtcccaaagtgagggaaaaaattacagataatctaggttaaaacatgcttgggactgactattctgaaggtgacatgatcataggtcataactgcccttattcttctagctcatgcaggctcaagcacagggctgtttgatgaactcaggtcccaagcacagataatggagagacataaatacttcttataatgaaatatactcattaggaattacaaatgatttttttcagtgacaatgtttatcacatattgtttatcattccttttccttctgccacttttataagaagctgatcacactctgcaggaaggta

SEQ ID NO: 616032 - DNA, 599 bp, Homo sapiens
gcttaaattgaaaaatgtattcaagaaatcattaagtagttagatatcataactagtggatatgaaaagaaaaaactgaatgaatatctggcaaaactttcagatggagtagccgtgttgatggttggtgagacaagtgatgttcaggtgaaagacaagaaagacagatttaccgatgtccttaatgctacaagagctgctattgaagatggcattgttctgcttcagtgcattccagccttggactcattaactccaactaatgacgatttttttaagtggtatagaaattattaaaagaacactcaaaattccttcaatgaccaatgctaagaatgcaagtgttgaaggatctttgatagctgaaaaaattatgcaagattcctctgaagttggttatgatgctatgattggagattctgtgaayatggtagaaaaaggaatcattgactcaacaaacattgtgagaactgctttactgcatgctgctgaggtggcctctctgttacctaccgcagaagttgtagtcatagaaattcctaaaaaagagaaccctggaatgagtgcaataggtggaatgggagatggtttgttctaat

SEQ ID NO: 616033 - DNA, 605 bp, Homo sapiens
tggccagaatctctaggcagggctgcctgaaacagcttttccacacaaagccagtctgcaaagactggaaatagtcctcactttctgaatgtgcagtcatccatgtgaggtaacggaaaccccaaaaagccaagaagatataccaaacccaaagaacacaccaaacaataatctcttagtagctgacccacaagaaataaagatatatggactgcctgacaaaatattcaaaacaacttttttaaggaacataggacaacttcaataaatacttaaaaatcttcaataagatcaggaaaacaataaagtaccaatactaaaaattaacagagaaatttaagttatttaaaaaaatagtaattctggagctggaaaatacaatgaataaaatraataatgcaatagtgagcattaatagcaaaattgatcaagcagaagaaagaacctatgattctgaagaccggttattggaaaatataaagtcagagaagaaaaaagaatgaaaaggaatgaagtaagattataagattgatgagcaaatgtttgggttataggagtttgtgaaggagaagagaaagataaagaattaaagtgtttatttaaag

SEQ ID NO: 616034 - DNA, 613 bp, Homo sapiens
gttttgctgtccaaacgtagtctctgttaaatattcttgttttgtttcattttgttttttacaaccttttaaaacggtgaaaataattcttagtttgaaagctgtactaaagaggatatggggtagatttggcccacaaggaatggtttgccaaaccctgatttatctcctggtaacactggaaagccagctttttcgattcaattgtcttgatattagttatctatttctacataaagaattatccccaaacttagcagctgaaactaatatttgttattttacacttccatgagccagaaatctaggtgcaggtcacctgggtgcctctgcctstatgttgctccagaggtcagttgagttgatagtctgagctgctgtcccatatgaagatttgactagtggggaggatccacttccaagattactcatgtattttttttgtaggtcttggtctcttgacacattaaacctccataaggctgcctcatgacatagcagctgacttccctctgagtaagtgatctgaaagagtgatagtaattaagcaaggcagaagccacagtctttttataccctaagctcagaagcaatgtcccgtcacttctgttgt

SEQ ID NO: 616035 - DNA, 590 bp, Homo sapiens
atcttgcattctgggaggtcagaaatcttaaaagtaaggtgtttaaagggttgctttcctctggaagctctggaagtcagtccctttccttgcctttccaggttctgaagactgcctgcattccttggctagtggccccttcctcyatcttcaagacctgaagccttgcaccttcaatggctttctctctgacttctgcttccaacatcatatctctttctctgattctaatcttcctgctttttacaaggaacattgtgatagattgggatcaccttgataattcaggataatctatttcaagttccttaatcacattacaaagtcccttttgccacataaggtaataaatttagtttctgaggataaggacatagatattttaggaggtcattattctgtctactggagttagctagagttggaagaaagaggataatatttggaagctcagagttcaggaaaagtattttgtaaactgtgtaaatgtgtccattttatcatataacaggctctgtggatgaataattctgtctcttttattgattgatttacagcaccagtaagggtctacagatgttgaatggaac

SEQ ID NO: 616036 - DNA, 649 bp, Homo sapiens
ttttagggtctactatgatctgaatgtttgtgttcccctaaattcatatgttgaaatcctaaccttcacacggggaggggattaggtcccagtttgtgcccttataagaatagtactcttataaaagaggtttcagataattacatcattcttttcatcatgtgaggttacagcaaaaagatggccagagsagaccctcgtcagacattgaatcctcttgttccttgatcttagacttcccagcctccagaactgtgagaaataaacttctgttatttataaaccaccagttcatgatactttattggcagcctgaatggactaagacagggtcttaattaaagacattggaagtatcataaacagtgtaccaattaaattgtaagacataataattggatggatactatgaacacaacagaagataaagaaatgggggcaaaagtgctggtgaaaaatagtaatatcaagaaataaagaatgtcaaaatgagaagatgaagcctaatatattttgaaacaagttcattttaaaacccctatatttaattccattccattaataatgcagcacatctgggaagaagcatttggaagagagcagtacttaaagagatttacatatgattgtgattaagcccaaaaagtag

SEQ ID NO: 616037 - DNA, 518 bp, Homo sapiens
acatttctttcaacaaggacatcaccattctcatggacaaaaaaagtgattttaacttggagatgaatatgtttagaatgatcagttaggtaggaataatagtaatagtaaattctatactttaaagttgtataactcaggcgacagcagttgatgaagcatcttaacataaaggcaccatagactcagtagagaaggggcacatacttggggtaagatgtgggcaaatcctggctgtgaacctttctacctactgaccatggggaagttaataattagacttgttgagcttaagatttgttttctataaaaatagagaaaataaattctacttcttaggttctgttgaagctatgtttcaataaaataatatttgtgagtaaaataatgtttgctactaacaaaccaagtgcttattcaatagcaaccatggccttattattatcaccacaattttctaactacattatagtggggcttaataagtgtttgctaygaaaagttaaaaatctttacac

SEQ ID NO: 616038 - DNA, 549 bp, Homo sapiens
ttgacagcaactaccacgtacctctggtcgaagtaggtctcctcagcaatacttgttgaaatatttaactttatggaattgtataattacatattctgaaattcccttgttttaagtttacaatctaatgatttttaataaatttactgagttatgtaaccatcaccataatccagtttgggaactttttatccccccartaggatcctcattctcatttatggttaatccccatttccgtcccaagccctgggccaccactaatctacttcctgtctctagagatttgatttttgtggatattttatataagtggaaacatacaatgggtttttgtgtctgacttctttcaatgaacacaatgattttgcatcttatccatgttattcacatatcagaagtccactccattttattgttgaataatcttcattgtatgaatgtaccatattttgtttctctattcaccatttcatagacattctggttgtttgcaccttttggctattattaataatgctgttatgaacattgtgtacaaggtttttt

SEQ ID NO: 616039 - DNA, 464 bp, Homo sapiens
aatgataagggtgacattactgtagatgctacagatattcagaagataataaaagaacatttagagcaattttattttaatacatttctacaacttagatacaataagcttattatttaaagataccaactaccaaaccttactcataaataaatagataacctaaattgccctatatctattaaagaaattgaatttgtagttacaaaccttcctacaaagtaaacttcaggtgtggatgatctcattggtaaattctaccaaacatttgatgtggaaataatacaaattctacacaaaatttcccaaaaaaactaaagagagggcatattttcaaactaattctctagagacaatataatcttgattccaaaaccagccaaagacattacatgaaaagaaaaygacaaactgatatttctgatgaacagagatgctaagattatgggccaaatattagcaaa

SEQ ID NO: 616040 - DNA, 507 bp, Homo sapiens
gaattcttctttcatgccttgtcaggaaattgtgggattaagcaggcctcactatgtccttctgctgccaaattcagattttctctcgtttagtttgtttyctgtccaaggggcctgataaaaccattttataacattgtctcacccagctgctgatggaatagacaatctatgagtattaaaatgattgattaattgttgggctacttggctattttggtgggtttcttttctggaaaatttcagccattttgtcttactttgttatagtttgatgaaatctaaattaaaagctagtctcttgggtgatattctcttcttcttattcataaagaacttaaaccttatagatgaatttaataaaatgttaaaggcttactcagttcaacttttaaacttttttattttttaaataaaaagcagtctagatgctgaaattatgaaatctaattatttgataataatagtgggacaagcaaggccaatcttaagaagaagaagaggtgg

SEQ ID NO: 616041 - DNA, 550 bp, Homo sapiens
tctcccaaggcccaagtgattcttctgcctcagcctcccaaataggtgggaccacaggtgtgtgacatcatgcctggctaatttttaaatttttagtagaggtggagtttcgccatgttgcccaggctggtcttgaactcctaggctcaaacgatacacttgccttggcctcccaaagtgctgggattacaggtgtgagtcaccatgcctggcctgaaatatctttttggtggtaggggtgggggtggggttagggggtggcagctggggatgattttcgtattgctatcattccttcattcctatttagstgtcatgcattagactctgtctcaaggagagggattattccactgcctttcttttcttttcttttctatttttcttgtcacccaggctggagtgcagtggtgcaatcttggctcactgctgcctccgcctcctgggttcaggcaattctcctgcctcagcctcctgagtagctgggattacaggcacctgccaccacgtccagctaacttttgtatgtttactagagacagggttttgc

SEQ ID NO: 616042 - DNA, 597 bp, Homo sapiens
cacctgccaccacgtccagctaacttttgtatgtttactagagacagggttttgccatgttggccaggctagtctcaaactcctgaccttgggtgatccacctgccttggcctcccaaagtgctgggattacaggcgtgagccactgcccccggcctccactgcttttcatagatctcggtaaagactttgtaatgaaaaatatgtcacctgccttaaaaacagtgtgttgtcagtaaattatcagcccacttccagagtccaatcaaatatatcagtataactggagactctacwatgtgttccatgaaaacatagcatctgaatgatgaatggtctttgccttcaagagatttatatcctggtggtaacaagaacatattgaaaataagagtaataataatttcctttaaattatctttattaattgaattgtttaaactatttaggtacacaacaggggcagctgctttaatttgaacttctccagcgggaaacctgaaacacaaagtagataggtgacctgcttcagtctccttgtgggatcagccatagattcactgctgctgaggcctcctgctttctggcaagctgggca

SEQ ID NO: 616043 - DNA, 571 bp, Homo sapiens
ggaatctgatttccatgtaaggggttcacaagcagggttggttccctaacaccactgctctaagtgctgtggcgagagtayaaattcctcaatgacaatcagttagtcacaatgtccagatgagggccagcggaacatacaggtgaaccacataatggcaaaaacccaaagaccagaaagggctattgctcaggaatacacagcctcgggaattttaggttaccatgggctcgagttgaacatgaaagagctgtaggccagatttaaaaagtaacctggactttaaaagaagtcaaatctgatccaacctttctatttttttttttttttcagaaaagaaaaaggagatgcatagaggttaaataactggcctatggccactcagctaagagttgaagggcaaggactggaagcagagtcttctaactgtatccaagccacttgagcctataagcagccctttcaggttgccctggagacaatggcagaaggtacacagagcgacatcctattaaagagacatgggaaaagatggctaaatattgatactgtttttagatttgagtttaca

SEQ ID NO: 616044 - DNA, 453 bp, Homo sapiens
tctactgtctcaattctctgtgtctctctctctcttttcttcttctttctcttgataacagcaccatattttcttatgtgtaggacatgagacaagtgtcccacaccagattttactgcacacactctttctctcttctactgttgctttccaatcagtgtctcctgggcctggtttgctattcatatagatttactgggtggaaaatccggagtrctcataagctgcttcacttgtcagccactaagagccctctcagccaacaaaaatgcaggtggctgtgttctgaccaggtctgttgttcttcaacatgaaatcaaaacccaccctcactgcatcttggtcgtcctgatggaacttgtagtgcccttgtgcctcatcttccattcctgccccttagccaaggtgcaagtccatggtccaaactggccatactttatctttttggggatt

SEQ ID NO: 616045 - DNA, 453 bp, Homo sapiens
tctactgtctcaattctctgtgtctctctctctcttttcttcttctttctcttgataacagcaccatattttcttatgtgtaggacatgagacaagtgtcccacaccagattttactgcacacactctttctctcttctactgttgctttccaatcagtgtctcctgggcctggtttgctattcatatagatttactgggtggaaaatccggagtgctcataagctgcttcacttgtcagccactaagagccctctcagccaacaaaaatgcaggtggctgtgttctgaccaggtctgttgttcttcaacatgaaatcaaaacccaccctcactgcatcttggtcgtcctgatggaacttgtagtgyccttgtgcctcatcttccattcctgccccttagccaaggtgcaagtccatggtccaaactggccatactttatctttttggggatt

SEQ ID NO: 616046 - DNA, 568 bp, Homo sapiens
cctgtggcatggctggggaggcctcaggaaacttacaatcatggtggaagggtgaatgggaagcaagcatgtcttcacacggtggcagaggagagaaagagagagagagagagaaagggggaagtactacacactttcaaacaaccagatctcttgagaactcagtcactataatgagaacagcaagggggaaatcccacctccatggtccaaccccctccagcaagaatacagaggctgcagttatcatggctcactgcagccttgacctcctgggcttaattgatcctccccagtcagcctcccaaatagctgggactacaggtgtgcaacaccatgcctggctaatttatgtatgttttgtagagacggtttttcattatgttgtccaggctggtctggaacacctgggctcaagcaatcctcctgcctcagcctcccaaagtgctaggattacagatgtgagccatggtacccagcyttaatttctttgtaaaagtcctaaagaaaatagagagtagcattgtatttatttgctaaaagagagtcaattttgggagccccatta

SEQ ID NO: 616047 - DNA, 464 bp, Homo sapiens
taaggaccaaaacttgtctacataatccaggttgaccaggaggcagcagtcaagaagaaagatgtgtggtccctagaatgtggtgcaaccagggatgtttatgggcagggattggggatggggatgaagggtacatctagtggaggtgtctaaagtggttgttgcaaatcattcctgctgtttataggcccactattttaggcattaaaacaatttctgtgtagtctctccaggacattcagatgcctcctgaagccttgttcaacgtttttgaggtgtctttgtgagatgatctgcagttaggcccttttgttcagtaaagtaakgtgctttattcagaattttccctaacggatttttttccctactttgcctttttcagaaagctcataatctcccgttttcgagcaacggtgtctcttgttgtctcatctccagagaatagtcaatttagcagtctgagg

SEQ ID NO: 616048 - DNA, 558 bp, Homo sapiens
aaccattttctttataaattacccagtttcaggcatttctttatcacagtgttagaatagattaatacagacattatgagggatgtgggcccaagcgatgccccttattttgggatctgggaatctgaagttcagagtttgaggactcccarattctctcacaatattcttctgcttttccttcacacatctctaatattatggagaaggtggggaatagcagttattgcgattattactgtatgattagtgtaggctcgttaaagacatgaaaatatgccagggacgacactgagttctccacacatgtgatttagttaatacccttactgccctccctgaagtaggcattattatttctatttaattgatgagaaatagagacttagaggagtaaaacgatctgtctgaagtcacatgatttctaaggaacaactgagatttccacctgggtttgtgtgactccacctctcaggcttttttccatgactggactggaggagggattgctgttctcttggacaaaattgtattcaacttcaaataaataaagcctca

SEQ ID NO: 616049 - DNA, 558 bp, Homo sapiens
aaccattttctttataaattacccagtttcaggcatttctttatcacagtgttagaatagattaatacagacattatgagggatgtgggcccaagcgatgccccttattttgggatctgggaatctgaagttcagagtttgaggactcccagattctctcacaatattcttctgcttttcctycacacatctctaatattatggagaaggtggggaatagcagttattgcgattattactgtatgattagtgtaggctcgttaaagacatgaaaatatgccagggacgacactgagttctccacacatgtgatttagttaatacccttactgccctccctgaagtaggcattattatttctatttaattgatgagaaatagagacttagaggagtaaaacgatctgtctgaagtcacatgatttctaaggaacaactgagatttccacctgggtttgtgtgactccacctctcaggcttttttccatgactggactggaggagggattgctgttctcttggacaaaattgtattcaacttcaaataaataaagcctca

SEQ ID NO: 616050 - DNA, 576 bp, Homo sapiens
ggggctacacagtcttgataaaacctgaagtaggcagtgtttttataaacttatgagttctaatttggggggaaagtataaatgaagccacttacaaccatcttaccatatctcaatttgtttaatccagttcatrgtcacacaactttatgcaatttttccaaacaaatgtaaggaaacatgacatgaatggaaaggaataggctgttgtgttctgggatacacatgtattttcatagaaatgaaattaggaagaaaatctcaagcacaggcaatatatgttactgtggaaacccaatccatgagttttcaaaatgatcaacattataatcagtgatataattttatcttgtcaagagttttagattgcttattttggtagtgtagataatggtatcaaattcctccttgtctctgtcttcttgagttcttgtcacataacatcaaaaaacaagaaaaacaatgcaatttagaaccttatatattgttatatttgctacatggtatctgattgccctgtaattatctgaaaaataaatttttaaagtaagaattattttgggtggaagagcagag

SEQ ID NO: 616051 - DNA, 576 bp, Homo sapiens
ggggctacacagtcttgataaaacctgaagtaggcagtgtttttataaacttatgagttctaatttggggggaaagtataaatgaagccacttacaaccatcttaccatatctcaatttgtttaatccagttcatggtcacacaactttatgcaatttttccaaacaaatgtaaggaaacatgacatgaatggaaaggaataggctgttgtgttctrggatacacatgtattttcatagaaatgaaattaggaagaaaatctcaagcacaggcaatatatgttactgtggaaacccaatccatgagttttcaaaatgatcaacattataatcagtgatataattttatcttgtcaagagttttagattgcttattttggtagtgtagataatggtatcaaattcctccttgtctctgtcttcttgagttcttgtcacataacatcaaaaaacaagaaaaacaatgcaatttagaaccttatatattgttatatttgctacatggtatctgattgccctgtaattatctgaaaaataaatttttaaagtaagaattattttgggtggaagagcagag

SEQ ID NO: 616052 - DNA, 593 bp, Homo sapiens
tgagctccagaaaacctcggacacacttcctgtttgcgcatgttgagctctggctggggcgctcctctcctgcctgtctcctacgtgcagagtcagtgcggtagttctcccatttctctaagagcctgctctctctgtctctggcataagtgagaggaaaaaaaaaaagaccattacaaatgaggagagacatagagctcttaggcaaaagggaatatagaacccacagagtttaaataaaagctgtcactgctgagtgaactgaaggctccaactctggcacgggatcgctttttaaagaagccctggctcagtgagggagaaataggagctttcgaatacttatttgtttcctacaagccctctatttctgctttgaaaaagaaccagaaagccaaaaagaaatactttgggtttctttttctaaatatctgtctatatgagttatcgcatatggaagattgattttattttttccaagtctatttycaattcacagtgatgctaggtaaaacagaacctgcctatgtttttagaagacagtgaattggttccctactttgccagttataaagccttggacaaattattta

SEQ ID NO: 616053 - DNA, 390 bp, Homo sapiens
aattcagctgccttttggaaattgccacttagatgtcctcacagtttcctcaaacctaggatgtctgaaatagaattcatcrtcttcccattaaccactcctccttccatttttcctactgtacaagatgacatgccccaattgcctaagccaaaaacctggactcctcattgtcttttcctctccgtttgccattaatcaccgtgtcctgttgaatcagctttctaaatatatctccaatctgtcacctctcttcatcctcactaccacataccaggcctctgtcatcactggactagagtactgttagagttttctaatgacatctttctctagtcttgcttccctccacttcttcttcctccttcccaccaaagtgttactctaaaa

SEQ ID NO: 616054 - DNA, 540 bp, Homo sapiens
actatctatggcagctatagcttacaaaattcttaaataatgagacttaaaagtcaaattttttctgaatccacaggccgaagaatggaggttatgttagcagatatgaaaaacccatcgatttccttgtacatctccatcagaggtcttggatgatcaggtgcattatgaatgagcaaasataaaaaagaaatctcaagaatcttttttctgagaagtaggtttcaatagtaggtggcttcaaaattcagtaaaccatgctgtaaacagatatgctgttatccaggctttgttattgcatttatagagcacaggcagagtagatttagcataattcctaagggtcccaggattttcagaatgggaaattggcttcaacttaaagtcacctgcagcgttagcccctaagaagagagtcagcctgtcctttgaagctttgaaaccaggttttgactttttctgtctagctataaaagtcctagaagacatcttcttccaagagaaggctgtttcatctacatcaaaaatctgttgtttagt

SEQ ID NO: 616055 - DNA, 497 bp, Homo sapiens
tgcagctaatttgcatactttgggtaagatttgatatggattttaaagataagtaggatttgataactgaacaggagaaaggagggtttctgagaagggggaatagcatgatattcaaattagcttaagttcatactgacattgtttgattagcacagcaccaatagttcagcttctctatccatctaagcagccctcactaaaatcctggccttcttgcaatagttctctttaactatgctttgttattytttggatgaggttttctaagaatctattgtattagggagccccaaatctgcaatttccttctaatgaggcctgttaatttgatgatagcataatcaaatataaacaccaccctcccttggtctgtagggtgcttcataatgagatggatccagaggggcagagagttgccagacacatgaaagaagcctgtgtccctaactaaggaaggacttattaatgactttagtcccaaaggaagagacaca

SEQ ID NO: 616056 - DNA, 489 bp, Homo sapiens
acatatggtaggtacttagtgaaaattgaatgaaaccaaattactgattatatattctcccttggatatctcacgtgcatctaaaacttagtacgtggaaaactgaactcattatccttcttccatgctcaacattgtcttttccttcctatgtttcytattttgatgaatagcccgtattctcaaccagtcacctgggccaagagctttggagccaacctgactttctattttcccctcacaactaattgataaccaactcttgtctattctccccacccaaaaagagcagtttaatccatgaccacctccccactctcactgtactgccttggttacgacccccaaaattcttagtctggaatgtagtatctcctaatagtcctatccattccaattcactttccagattcctgacaaaaatgatttttctgaagagaaatctgatcattaaatttagctaatcgattgcaaaatttagttctccat

SEQ ID NO: 616057 - DNA, 573 bp, Homo sapiens
catcaataatgtgaagatctgcaraagtgtcacagccaagaggagcctatagagacatgacaaccaaatggaatatatgattgtggttgggatcctggaacagaaagaggatgctacagaaaaactaaggaaatctgaataaagtgtgggcttcagttaataatatatcaatattgattcattaattgtaaagaatgtaccatactaatgaaaaatgttaataataggagaaatttgatgtgggctgtatagaagtctctgtactatcttagtaattttttggtaaatctaaaactattttaaaattaaaagcttattaaaaagaaatttaaaatgtgattgataattaaagtagtataattatgcagctgatgctataattaaactaataagaatataattagattcacatgtactgatatggaagaacgtcaaggatacattatgtaaaaaaaagcaaattgcaaaaatattgcatttttgtgacccactttatgcaaaaatgtgaacacatatgcatacacccaaatatttgaagaggtacatactaaagtgtggttacattaaagatag

SEQ ID NO: 616058 - DNA, 587 bp, Homo sapiens
ttaagtaatccattctctcccccaatcccatcataaggtctccaccctcctgaccttattactttccaaagaccccatctccaaataccttcactttgaggattagggtttcaacatataaaatttgggaggggacaaacwtccagtcaatagcgctaacagttatcaaatctcatgttaatattttccaaaagatgagttattgttcccaatttactgagtaatccattctctccccctatttttttttggagacagagtttcctctgtcatccaggctagagtgcagttgtgtgaactcagatcactgcaacctctgcctcccgggttcaagcgattctcctgcctcagcctcctgagtagctgggattacaagcgtgtgccaccacacctggctaatttttgtatttttggtagagacagggttttgccttgttggccaggcaggcctcgaactcttgacctcaggtgatctgcccacctaggcctcccaaagcactgggattacaggcgagagtggccgccccctgcctctccccctaatcttaaaggcgtctttattataaactaatttctgtatgctcaca

SEQ ID NO: 616059 - DNA, 643 bp, Homo sapiens
aaagtctctgaaggtgaacartatcaatttcattatatatagaggaaaataagcacatcagataaactattttctaagcaaaaatgtcaaatttcctgcaggaaccacagctgggccctgggctcaattccttggaacatgccagtctgacacaaggagtaatcaatggcccttggagtcctgtcctacctatgaaagaaataggtgaaatttctctattattccttccttctgactataatcttctctcactgcccgctcctctttagggatcctccatttcccaattgcctgcattttgatacttgatactctgaagaacatggagtaaatcaacaaactaattcactaagatggtaatgactaattatatttattaaagtttctgatcttgtgtcccctttactattatggaaggagctcctagacctctgaagtgaatgagagggggaccccaggacctagaagcacgcaccttagcatgaataacactcccttagtgagccaaatgcacacctgggcctgtctctctcagcatgactttccaagcctacacctcttttgttccccctacaaacagccctctggcaagccctctctccctagctcagccaaacatatctggcttcctcttaaactcaac

SEQ ID NO: 616060 - DNA, 581 bp, Homo sapiens
gccaagtattaatattattctaagcaggtggaggtcttactatattartcggataaattctaaaaattaggtttatgctttaatgagctgcagaaggtttgatttttttaatgcttcaactgatctgaattcctaactcacaatacagaatggtcttatgaaatgtccctattcataaaaggtgcgtatttcaatttctagacaattcattagacattcttctctgtttaatccataaaaataaagcctatttcatcatgatttggataattttgcaaaggacgatgaggcatcccagagctggttgcttgcataaactgttttcattttcatgaatttgtaaataaattactgcctgaacaaccagacttttataagtcttcagggtagctgtatttaaaaaattatacatagtactctgacagtacatttctctaaaggaagtcagaaaattgttcaaaaagtatttggattcagcttctaggacatatttaaggtagcaaacctgcccaccaccagagtatgaagtaaaacaaggctaagagtgatagaagcatttttttttctttgagatggagttt

SEQ ID NO: 616061 - DNA, 590 bp, Homo sapiens
ttatcctgtttttcctctactgtttcatttcagatggttgggtagctaaatttgatatgtggcaggatcccatgaagctattcatccagaactgacccagaaaacaaaccttggccacagttctgagctcagagttagacccaaagctgccttgctttgacattcatccttcctcatcctcagcctgcctgttccctggagggtgctcctgcgtgccctccttacgtggtgcttgtgtgcccacctgcaccccagaaggagctcccagctggcctgttscagccccatgtcacctcctaccagcttctgcccggggcaacccagagaacctcctctcaagctggtgagctgcaaccacacctccaatgagtcagaggcccagtcttggggagtggggccccttttcaagtttgtttcttccttggggactctcccagagcccaaatattttcttcaggtacccctttattgttaaccccatataacatttaatattatttatattgattttcctttccaaattactatgtggtttctgtttcctcattggatgttgattgattcaattgcagaaactgatacaagttttt

SEQ ID NO: 616062 - DNA, 625 bp, Homo sapiens
tggtctggaatccaagcagcagaggaacaggtggataatacgcattgttaatttcagtatctgaaactcaatgaataacgaaagcaataaaaacaaaaatggctgccacttattgaggatttacatatgccagatctctgtcatattatttaaccttcaatgaaaacttattggaatatagcctgtcattattcccagcctgcwgatgagaaaattgcgggacatgacctacctggagactcagattaagtggcaaagtcatgactgaatcaaaattcaaacttttggccgggtatggtggctcatgcctgtaatccgagcactttggaaggccgaagtgggtggatcacctgaagtcaggagttcgagaccatcctggccaacatagtgaaacctcgtctccactaaaaatacaaaattagccaggcgtggtggcacatgcctgttatcctagctactcgggaggctgaggcaggagaattgcttgaacccaggaggtggaggttgcagtgagccaagatcatgctccatccagcctgggcaacaagagcaaaactccatcaaaaaaaaaaataaatccaaactcttagctactgcccttatactaattgtcaagaaagaagaa

SEQ ID NO: 616063 - DNA, 625 bp, Homo sapiens
tggtctggaatccaagcagcagaggaacaggtggataatacgcattgttaatttcagtatctgaaactcaatgaataacgaaagcaataaaaacaaaaatggctgccacttattgaggatttacatatgccagatctctgtcatattatttaaccttcaatgaaaacttattggaatatagcctgtcattattcccagcctgctgatgagaaaattgcgggacatgacctacctggagactcagattaagtggcaaagtcatgactgaatcaaaattcaaacttttggccgggtatggtggctcatgcctgtaatccgagcactttggaaggccgaagtgggtggatcacctgaagtcaggagttcgagaccatcctggccaacatagtgaaacctcgtctccactaaaaatacaaaattagccaggcgtggtggcacatgcctgttatccyagctactcgggaggctgaggcaggagaattgcttgaacccaggaggtggaggttgcagtgagccaagatcatgctccatccagcctgggcaacaagagcaaaactccatcaaaaaaaaaaataaatccaaactcttagctactgcccttatactaattgtcaagaaagaagaa

SEQ ID NO: 616064 - DNA, 326 bp, Homo sapiens
tttctaattcaatctgttttctagtatttctttagaaacaaactaatgaaattctctatcacccagctgtatttacaacagagtaagctttgtgacaccctatacatggagtttgcacagcagcagtatccatgggaaaaaatagtgggactgtgtcccagtgatcacagacgaaggatgccaggacactctgtcaaaggaaactcagacctccacataggatgcttgactcaggtcccaggtactrtcaccatgactgtcccccacaattttcccaggagggaggcacgagtaggagagaacagcccctgtgatgtcagggccaa

SEQ ID NO: 616065 - DNA, 539 bp, Homo sapiens
atctggcatccatctgttgacataccttgactcagtgcagttaaggatttatgaatgaaacacctcatacatgtttagtcaccctccctgttagccagcaagcaaggcagcatcctctctcgaagctggctgccttcagagggtctgttctgtaaaccaaggctgtttctcggaccaactatcccaaaactaggacgtgccgaataagtagaaagaagtatttgtcttatgttttagtcagaagtttcagataccaggataaaatcacttttgtcagacctggataaaataaagtcaggatagtatgaaggagagatggctcatgctcacatatgggagataaaaactgctttcagggactttctaaaaaccccacaagaaacctttttgcatccttcatgcatctcctgttttgacaaggtttatcactagatattctttagtactgcagtaattcagataagatatctcagaacactcrcccagtaatgacatctccaccagtgaactgacaacagctctctggaaccaatgaattc

SEQ ID NO: 616066 - DNA, 631 bp, Homo sapiens
aggtgctgcctatctgtaagtaacaaatycacgtacgtgacttttgtgtgtttgtgttccatctcagcagactcagccaagttggtaaccagtgtcatactaagtatgtactgtatatataaatgcacagatattttgatgtttaacattccaggatctttcttttaaatgagttcttaattgtgtatcccagatccaagctcttctcctgacaagcctctggcatagcagtgaggtttgctctgtaagctgtggaagcctcagctggacactgtacccaagcttgctaggtatccactgtttcagcagtgctgagaaagaaaagaccccaagccctcaaggaggtcttttcataacatagcacagtctgctttttgcataattaaatcatttcttaacttaccaattgacagaaaatcactaccaataccattctattcaacttacatattccaccaaaccagacatggttgaacatcaacagggagccacccagagcgatttgagaaaaaagccaaaaccaaatccaaaagatctttacactatttaattgtaactgtgctgagttaaattattagaataagaaattttataagtttattttaaaatttttatttatttatttattgag

SEQ ID NO: 616067 - DNA, 631 bp, Homo sapiens
aggtgctgcctatctgtaagtaacaaatccacgtacgtgacttttgtgtgtttgtgttccatctcagcagactcagccaagttggtaaccagtgtcatactaagtatgtactgtatatataaatgcacagatattttgatgtttaacattccaggatctttcttttaaatgagttcttaattgtgtatcccagatccaagctcttctcctgacaagcctctggcatagcagtgaggtttgctctgtaagctgtggaagcctcagctggacactgtacccaagcttgctaggtatccactgtttcagcagtgctgagaaagaaaagaccccaagccctcaaggaggtcttttcataacatagcacagtctgctttttgcataattaaatcatttcttaacttaccaattgacagaaaatcactaccaataccattctattcaacttacatattccaccaaaccagacatggttgaacatcaacagggagccacccagagygatttgagaaaaaagccaaaaccaaatccaaaagatctttacactatttaattgtaactgtgctgagttaaattattagaataagaaattttataagtttattttaaaatttttatttatttatttattgag

SEQ ID NO: 616068 - DNA, 556 bp, Homo sapiens
gatctttcaaattctggacctgggatgtgaaatggccatggccttagttattttaactggctaactcatagaatcccttttctgtgttccacaaatgtgccacattttgtgctattcatattcctgtatctagtatatcctctttcattaatctattttagtgcagtaatagttatattttcagatctaagaactaattgcttgactttgttaatggataaaacaaactgtaatatattttaaagaggtttattctgaaccaatatgagtgactgaggcctggagaaaacacgcaaccaagaaggcttgagtaagtggttccgaggtggccgggttggtttggttttatacatttcagggaggcaggagttacaggcaaaracatcaacacatggaaggtatacactggttcggttcaaaaagggggattatcttcaggagaggtcttataggttgtaggtggacttggggattctctggtttgtgattggttaaaggagtaaggccctgtctacagcttagagttgacagaaaggaaggtaagaatgctctgtca

SEQ ID NO: 616069 - DNA, 572 bp, Homo sapiens
ttatagcattaaatgcctacgtcaaaaagtctgaaagaacacaaatagaaaacctaatgtcatacctgaaggaactagagaaacaagaacaaactaaactgaaactcagcagaagaaaagaaataacaaagatggaagagaactaaatgaaattgaaacaaaaaatacaaaagataaatgaaatgaaaagctggttctttgaaatgataaacaaagttgatgaccattagggagattaaccaagaagagaaaagattcatataacctcaagtagaaatgaaactggagatagtacaaccaataccacagaaatacacaagatcrttcaaggatgttataaacacctttacatgcacagactagaaagtctagaggagatgaataaactgctggaaatatacaaccctcctagactaaatcaggaagaaatagaaaccttgaacagaccaataacaagcagcaagattgatcagtgattaaaaaaacaaaacaaaacactgccaacaaaaaaagaatcgagaaccagatggattaacagttgaaatctatcagacattcaaagaagaactggt

SEQ ID NO: 616070 - DNA, 572 bp, Homo sapiens
ttatagcattaaatgcctacgtcaaaaagtctgaaagaacacaaatagaaaacctaatgtcatacctgaaggaactagagaaacaagaacaaactaaactgaaactcagcagaagaaaagaaataacaaagatggaagagaactaaatgaaattgaaacaaaaaatacaaaagataaatgaaatgaaaagctggttctttgaaatgataaacaaagttgatgaccattagggagattaaccaagaagagaaaagattcatataacctcaagtagaaatgaaactggagatagtacaaccaataccacagaaatacacaagatcattcaaggatrttataaacacctttacatgcacagactagaaagtctagaggagatgaataaactgctggaaatatacaaccctcctagactaaatcaggaagaaatagaaaccttgaacagaccaataacaagcagcaagattgatcagtgattaaaaaaacaaaacaaaacactgccaacaaaaaaagaatcgagaaccagatggattaacagttgaaatctatcagacattcaaagaagaactggt

SEQ ID NO: 616071 - DNA, 572 bp, Homo sapiens
ttatagcattaaatgcctacgtcaaaaagtctgaaagaacacaaatagaaaacctaatgtcatacctgaaggaactagagaaacaagaacaaactaaactgaaactcagcagaagaaaagaaataacaaagatggaagagaactaaatgaaattgaaacaaaaaatacaaaagataaatgaaatgaaaagctggttctttgaaatgataaacaaagttgatgaccattagggagattaaccaagaagagaaaagattcatataacctcaagtagaaatgaaactggagatagtacaaccaataccacagaaatacacaagatcattcaaggatgttataaacacctttacatgcacagactagaaagtctagaggagatgaataaactgctggaaatatacaaccctcctagactaaatcaggaagaaatagaaaccytgaacagaccaataacaagcagcaagattgatcagtgattaaaaaaacaaaacaaaacactgccaacaaaaaaagaatcgagaaccagatggattaacagttgaaatctatcagacattcaaagaagaactggt

SEQ ID NO: 616072 - DNA, 572 bp, Homo sapiens
ttatagcattaaatgcctacgtcaaaaagtctgaaagaacacaaatagaaaacctaatgtcatacctgaaggaactagagaaacaagaacaaactaaactgaaactcagcagaagaaaagaaataacaaagatggaagagaactaaatgaaattgaaacaaaaaatacaaaagataaatgaaatgaaaagctggttctttgaaatgataaacaaagttgatgaccattagggagattaaccaagaagagaaaagattcatataacctcaagtagaaatgaaactggagatagtacaaccaataccacagaaatacacaagatcattcaaggatgttataaacacctttacatgcacagactagaaagtctagaggagatgaataaactgctggaaatatacaaccctcctagactaaatcaggaagaaatagaaaccttgaacagaccaataacaagmagcaagattgatcagtgattaaaaaaacaaaacaaaacactgccaacaaaaaaagaatcgagaaccagatggattaacagttgaaatctatcagacattcaaagaagaactggt

SEQ ID NO: 616073 - DNA, 607 bp, Homo sapiens
tttacatttattgaaacttgttttatggcctaccctgacacatgatccacgtgctttgtgtattttgcaattgtttggtggagtattttctyttttttttctttttgagacgtagtcttgctctgtcgcccaggctggagtgcagtgccgcagatctcggctcactgcaagctccgcctcccgggttcacgccattctcctgcctcagactccaaagtagctgggactacaggtgcccgccaccacacctggctaatttttttcttgtattctttagtagagacggggtttcaccgtgttagccaggatggtcttgatgtcctgacctcgtgatcagcccgcctcggccttccaaagtgctgggattacaggcatgagccaccgcgcctggcctcggtggagtattttctatatgtctgttaggtcttgttgatttacagtgtttttcaagtcctctatttctttattgatcttctgtctagatgttctatctgttattgaaagtgactgtttgagtccatttagtgttgctgtaacagactacctgtgactgggtaatttataaagagaagaggtttacttggcccatgattctggtgacttgaag

SEQ ID NO: 616074 - DNA, 493 bp, Homo sapiens
tttttgtatactgattttgtatcctgcaactttgctgaatttgtcaatcagctctaataattttttggtggagtccttaggtttttctaaattataagattatatcatctgygaacaagaataatttgacttttcctgtcccaatctggatgccatttatttctttctcttgtctaattgttctgtctaggacttccagtgctatgatgaataatagaagtgaaagtgggcatccttatgttcttctagatcttagaggaaaagctttcagttttttcccattcagaatgttactagctgtaagactgttgtatatggctttattatgtttacatacattccttccttaccaatctttttgggagttttttttatcatgaagggtgtagatttttattgaatttttttcagaattatttgaaattatcatatggtttttgttgatatgatgtatcattctgttgatatgttgtatcacactgattgatttgca

SEQ ID NO: 616075 - DNA, 601 bp, Homo sapiens
cccggtgcttcttaatttgccattccagaattctctctctctttctttatttgttatatctgttaaaatttatatttgttaatcactttggtttcttctttttagtcagtttagataatttgtgtgttttaagaaatttatgcayttattttaggttatttgtttggcatacaattgctcacagtactcttaattctttatttctataacatcactagtattgtccccattctcatgtctaatttttgtcatttgcatgttttcccttttcttcttagtctttctaggtaagtttgtcaattttgttgatctttgcaaaaaaccaacttttgattttattgatttttctctattgtttttctagtccccgttttgtttttctgtgctctaatctttattgtttatttccttctagttttgagtttaatttgttctttatatcctcattctttaaggtggaaagttaagttactgatttggaatgtccttttcaatatagttatttatagctatacatttccctgtgagcacagctttcagtgcatcccacaagttttggtatgttgtgttttcattttcattcatctctgttttctaattt

SEQ ID NO: 616076 - DNA, 601 bp, Homo sapiens
cccggtgcttcttaatttgccattccagaattctctctctctttctttatttgttatatctgttaaaatttatatttgttaatcactttggtttcttctttttagtcagtttagataatttgtgtgttttaagaaatttatgcacttattttaggttatttgtttggcatacaattgctcacagtactcttaattctttatttctataacatcactagtattgtccccattctcatgtctaatttttgtcatttgcatgttttcccttttcttcttagtctttctaggtaagtttgtcaattttgttgatctttrcaaaaaaccaacttttgattttattgatttttctctattgtttttctagtccccgttttgtttttctgtgctctaatctttattgtttatttccttctagttttgagtttaatttgttctttatatcctcattctttaaggtggaaagttaagttactgatttggaatgtccttttcaatatagttatttatagctatacatttccctgtgagcacagctttcagtgcatcccacaagttttggtatgttgtgttttcattttcattcatctctgttttctaattt

SEQ ID NO: 616077 - DNA, 601 bp, Homo sapiens
cccggtgcttcttaatttgccattccagaattctctctctctttctttatttgttatatctgttaaaatttatatttgttaatcactttggtttcttctttttagtcagtttagataatttgtgtgttttaagaaatttatgcacttattttaggttatttgtttggcatacaattgctcacagtactcttaattctttatttctataacatcactagtattgtccccattctcatgtctaatttttgtcatttgcatgttttcccttttcttcttagtctttctaggtaagtttgtcaattttgttgatctttgcaaaaaaccaacttttgattttattgatttttctctattgtttttctagtccccrttttgtttttctgtgctctaatctttattgtttatttccttctagttttgagtttaatttgttctttatatcctcattctttaaggtggaaagttaagttactgatttggaatgtccttttcaatatagttatttatagctatacatttccctgtgagcacagctttcagtgcatcccacaagttttggtatgttgtgttttcattttcattcatctctgttttctaattt

SEQ ID NO: 616078 - DNA, 576 bp, Homo sapiens
attcctgaagaatatttgtgctggatatagaattctagactgatagttattttcttacagcactccagaaatgagattgacacttacactggctatgtagccattttgggtttttagcttgtggacgaaaatttctctctttgaacttttcaccttggacaggtccagtactactacattttcctcgtaatagcatccctaatttcataaaataccttatwtcttagtttgttttccattttttgcttaataaaaggagtactgatggatacagatttttatctgtgtcaactttagttgtttctcattttgtattatatagtgtggatcagtccaagatgaatttaaagaaagatatgatgatgtattcttaataatttttaaaaagttaggtgatatacaaacttatgcagaagaaacttatagtaaataatcttataaaaggtattttggaactactttcaaagcgtattttagtggactgattagtagaatgctctctcttaagtttataaagccctggaaattcttctggtatgagaaatgaaaactcaactaagttttacagatcttcat

SEQ ID NO: 616079 - DNA, 576 bp, Homo sapiens
attcctgaagaatatttgtgctggatatagaattctagactgatagttattttcttacagcactccagaaatgagattgacacttacactggctatgtagccattttgggtttttagcttgtggacgaaaatttctctctttgaacttttcaccttggacaggtccagtactactacattttcctcgtaatagcatccctaatttcataaaataccttatatcttagtttgttttccattttttgcttaataaaaggagtactgakggatacagatttttatctgtgtcaactttagttgtttctcattttgtattatatagtgtggatcagtccaagatgaatttaaagaaagatatgatgatgtattcttaataatttttaaaaagttaggtgatatacaaacttatgcagaagaaacttatagtaaataatcttataaaaggtattttggaactactttcaaagcgtattttagtggactgattagtagaatgctctctcttaagtttataaagccctggaaattcttctggtatgagaaatgaaaactcaactaagttttacagatcttcat

SEQ ID NO: 616080 - DNA, 576 bp, Homo sapiens
attcctgaagaatatttgtgctggatatagaattctagactgatagttattttcttacagcactccagaaatgagattgacacttacactggctatgtagccattttgggtttttagcttgtggacgaaaatttctctctttgaacttttcaccttggacaggtccagtactactacattttcctcgtaatagcatccctaatttcataaaataccttatatcttagtttgttttccattttttgcttaataaaaggagtactgatggatacagatttttatctgtgtcaactttagttgtttctcattttgtattatatagtgtggatcagtccaagatgaatttaaagaargatatgatgatgtattcttaataatttttaaaaagttaggtgatatacaaacttatgcagaagaaacttatagtaaataatcttataaaaggtattttggaactactttcaaagcgtattttagtggactgattagtagaatgctctctcttaagtttataaagccctggaaattcttctggtatgagaaatgaaaactcaactaagttttacagatcttcat

SEQ ID NO: 616081 - DNA, 618 bp, Homo sapiens
ttttagaaatgagagtgtttaaggtagattgaattaccatttcttttggtggcagtagaagcttgccatttaattgagaaactatatcttaaatcacaagtaaagaaatttgtggcttccactctagagaaaaactccagagaagagcataaattatgagctaaaagctggtatcgtttagagaaggctccaaagatgttttatggtaacaccaatctgaggaaggaagctctactcttgcctgtgataatttacttttgtctgatttcatgaatcatctcttatggaatgtgattggaaaatatatttacattactatatttgaaaaatgtgagtctacaaacttagttctctctaaccagtttcttcattgttgccaaagaccccgtgcagagcaatcacacagaaaaaggctgyttggattcaccagtgcagccgctgtggaggggcctttcattggcactgaaaatgcttgtttggtgatgaataacctttgttattattatactgcatgttattaaaatttttaacataattccctctaaactaatagtaattcagacaatgcagccactggcagacagcttcattagtcaatcttctttcttataaatggga

SEQ ID NO: 616082 - DNA, 553 bp, Homo sapiens
ttttgaggcctctaaggtactttctgtgacttcacaaagactattattgaattcactttaaacaaagcattaaaaaataataatgtttgctctttctccaaagggagacaaagataatttttatggaggaacccttttccccattggattactagactatatcctcagtaaaaaaatgaaaagtgtccccacctggttgatggttaaacaaatgaagattaagagagaactaaaatgtctagaagcatttaacactgtgaaattctatgatagatgcttggatatttggagaatggaaacattatataaaatatgtgtataggttgggcgtggtggcttacacctgtaatcccagcactttgagaggctgaggcaggaggatcacttgaacccaggagtttgagaccagcctgggcagcatagcaagacccccatatccacaaaaactaaaaaaaaaaaaaaaaawaactggatgtggttgtgcatgcctgtagttccagctctgtgggaggctgaggtgggaggatcacttgagcctggaaggttgaggttg

SEQ ID NO: 616083 - DNA, 565 bp, Homo sapiens
aaacaaatgaagattaagagagaactaaaatgtctagaagcatttaacactgtgaaattctatgatagatgcttggatatttggagaatggaaacattatataaaatatgtgtataggttgggcgtggtggcttacacctgtaatcccagcactttgagaggctgaggcaggaggatcacttgaacccaggagtttgagaccagcctgggcagcatagcaagacccccatatccacaaaaactaaaaaaaaaaaaaaaaataactggatgtggttgtgcatgcctgtagttccagctctgtgggaggctgaggtgggaggatcacttgagcctggaaggttgaggttgctgtaagcagtgatcacactactgtacttcaggctgggggacagtgtgagaccctgtctygaacaaaaaaaaaagtttgctcaagaaatattcagcaaccctctgtttcccaaagggaagaaactccttagagctgtgtttactgagtgtggtacatggtatacttttcttaggatacagatttctggcttgtcccggaaaaccagagtgtggtgac

SEQ ID NO: 616084 - DNA, 565 bp, Homo sapiens
aaacaaatgaagattaagagagaactaaaatgtctagaagcatttaacactgtgaaattctatgatagatgcttggatatttggagaatggaaacattatataaaatatgtgtataggttgggcgtggtggcttacacctgtaatcccagcactttgagaggctgaggcaggaggatcacttgaacccaggagtttgagaccagcctgggcagcatagcaagacccccatatccacaaaaactaaaaaaaaaaaaaaaaataactggatgtggttgtgcatgcctgtagttccagctctgtgggaggctgaggtgggaggatcacttgagcctggaaggttgaggttgctgtaagcagtgatcacactactgtacttcaggctgggggacagtgtgagaccctgtcttgaacaaaaaaaaaagtttgctcaagaaatattcagcaaccctctgtttcccaaagggaagaaactccttagagctgtgtttactgagtgtggtacatggtayacttttcttaggatacagatttctggcttgtcccggaaaaccagagtgtggtgac

SEQ ID NO: 616085 - DNA, 654 bp, Homo sapiens
acacctatattcacaaacataaaatcttttattggttctgtttctcagttgaatcatgactgatacaatatgagaagcagtatattattatttataggtaaggtgtcattaattacagatgcatgggtcaggcatagtggctcatccctgtaatccaagcactttgagataccaaggtaggaggatcccttgaggccaggaatttgagaccagcctgggtaacaaagtgagactctgtctctacgaaaaacaattttttaaggtgcatattataaacctagggaaccactaaaatatttttaaaagaagcataaatgataaaaaaacaaaaaatggagattaaatggaatcattaaaaataattcaaaatcagttagaaaaagaacaaagaacaaatataacaaataraaacaagatatgagatagtacattaaaatccaactgtatcagtagctgtatttaatttaaatgacctaaacataccaactaaaacacagagatgatcaaattagataaaaaagcaagaatcaactataatctatctataataaattcacattaaatataaaagtatacaggttaaaagtaaaaggatgaaaaatataccatatatgccatgcaaacagttgctctattagtattagataacaggaa

SEQ ID NO: 616086 - DNA, 554 bp, Homo sapiens
tggaggttgcagtgagccgagatcacgccacagcactccaacttgggcgacagggagagactccatctcaaaacaaacaaacaaagaaacaaaattctgtgaggtgtcttttgtagcaactggaatgaaactagagttcattatcttaagtgaaacaagccaggggaagaaagtcaaatatcacatgttctcacccataaatgggagctaartaacctgtatagatggatgtagagagtgggatgacagataatggaggcttggaatgctgagggtggaatgagaggagtggatgatgagaaattagttgatgggtacaatgtacgttattttggttgatggataccctaaaagccctgacttgaccactacacaatctatgcaggtaacaaaattgcagatgtgccccataaatttgtacaacaaataaaaaaaaatctgtgagaatttgaaagtagcctatgatcatttccaaggagcagaaacaactacacgatgctgtggaaggactaatacatttgttcaaaaacaaaagcatctagtcagtcattaat

SEQ ID NO: 616087 - DNA, 554 bp, Homo sapiens
tggaggttgcagtgagccgagatcacgccacagcactccaacttgggcgacagggagagactccatctcaaaacaaacaaacaaagaaacaaaattctgtgaggtgtcttttgtagcaactggaatgaaactagagttcattatcttaagtgaaacaagccaggggaagaaagtcaaatatcacatgttctcacccataaatgggagctaagtaacctgtatagatggatgtagagagtgggatgacagayaatggaggcttggaatgctgagggtggaatgagaggagtggatgatgagaaattagttgatgggtacaatgtacgttattttggttgatggataccctaaaagccctgacttgaccactacacaatctatgcaggtaacaaaattgcagatgtgccccataaatttgtacaacaaataaaaaaaaatctgtgagaatttgaaagtagcctatgatcatttccaaggagcagaaacaactacacgatgctgtggaaggactaatacatttgttcaaaaacaaaagcatctagtcagtcattaat

SEQ ID NO: 616088 - DNA, 480 bp, Homo sapiens
atcttgctttatcccatgttcagaactgaactttgagttgaggtatgcctaaagcattctttctgagcatcagatgacttgatatggttacagcacaaattggcaccaaaggacacagcccagtaagtcacaggctgttgccttctaactcagtatcayagttatggagacttctgttggggttttagggttaatggaatggaacagatgtaggagagtctatcacctttgatagtattgctggatgaaagaatgaggttggaatgctaggttgtgatggttaattttatgtatcaacttggctgggccaacggatgaccagataaactagtaggacattatttttgggtgcatctatgagggtgttcctggaagatattcccccccaggtagactgagtcaagatcaccctcagcaatacgtgtgggcaccatccaatctgttgagatcctgaagagaacaaaaagatggaggaaggaa

SEQ ID NO: 616089 - DNA, 513 bp, Homo sapiens
tttactaaaaatacaaaaattagctgggtgtggtggtgtgtgcctgtaatcccagctactcaggtggctgaggtaggagaatcacttgaatcytaaaggtggaggttgcggtgagctgagattgcaccattgcactccagcctgggtgacagagtgagactccatctcaaaaaaaaaaaaaaaaagaaaaagaaaaagtatcttagatagtgataagtgctctgaaggacaataaggtagaaaaggataataaagaatattgggtaggtttaaaaatatgaatagaggcatcagaggcctcattaaggtgagtagtatgtcattttagctaactttgaaaagtaaaacaaccttgggtcaaataaaggaagataccgttaaatcaaaacttattcaataatactaggtaaatggtaaagtgaacacagtctttaaaagcctttcagtgggtcaaactgacaggcaatggttacattaaccattaatacgtcttaagattcattaaaaaatgaa

SEQ ID NO: 616090 - DNA, 516 bp, Homo sapiens
aggctagttttagcatatttgggaactatatatatggaattgtatatgctctatggtgtgtgttcttttgctcaaatraactatgttcatgaactcttttcatgcggtagcatgtaacaacagcttattttcattgctatatttaccctgttatacaagtatatcacaaagtatctattttattgttgatgaaatttgggctgcctcaaacaattctcccaccctgcaaaggacatgatcttatttctttttatggctgaataatattgcatgacgggcgtgtactatgttttctttatccagtttatcactgatgacatttgggttgattctatgtctttgttattgtgaatactgctgcataaacatatgtgtgcatgtgtctttataatagaatgatttatattcctttgggtatatacccagtaatgggattgctgggtcaaatggtatttctggttctagatccttcaggaattgccacactatcttccacaatggttgaactaatttgca

SEQ ID NO: 616091 - DNA, 516 bp, Homo sapiens
aggctagttttagcatatttgggaactatatatatggaattgtatatgctctatggtgtgtgttcttttgctcaaatgaactatgttcatgaactcttttcatgcggtagcatgtaacaacagcttattttcattgctatatttacccygttatacaagtatatcacaaagtatctattttattgttgatgaaatttgggctgcctcaaacaattctcccaccctgcaaaggacatgatcttatttctttttatggctgaataatattgcatgacgggcgtgtactatgttttctttatccagtttatcactgatgacatttgggttgattctatgtctttgttattgtgaatactgctgcataaacatatgtgtgcatgtgtctttataatagaatgatttatattcctttgggtatatacccagtaatgggattgctgggtcaaatggtatttctggttctagatccttcaggaattgccacactatcttccacaatggttgaactaatttgca

SEQ ID NO: 616092 - DNA, 516 bp, Homo sapiens
aggctagttttagcatatttgggaactatatatatggaattgtatatgctctatggtgtgtgttcttttgctcaaatgaactatgttcatgaactcttttcatgcggtagcatgtaacaacagcttattttcattgctatatttaccctgttatacaagtatatcacaaagtatctattttattgttgatgaaatttgggctgcctcaaacaattctcccaccctgcaaaggacatgatcttatttctttttatggctgaataatattgcatgaygggcgtgtactatgttttctttatccagtttatcactgatgacatttgggttgattctatgtctttgttattgtgaatactgctgcataaacatatgtgtgcatgtgtctttataatagaatgatttatattcctttgggtatatacccagtaatgggattgctgggtcaaatggtatttctggttctagatccttcaggaattgccacactatcttccacaatggttgaactaatttgca

SEQ ID NO: 616093 - DNA, 510 bp, Homo sapiens
aaatgctacaaatacttttctgtgccaggtaactctccgggtccagggaactcagaacaaagtcttgggctattagatattcctggtttgggtgaaaatgtgtcyggaattggtaggttcttggtctcattgacttcaagaatgaagctgcggccccttgtggtgagtgttacagttcttaaaggcggtgtgtctggagtttgttccttcagatgttcggatgtgttcggagtttcttccttctggtgggttcgtggtctcgctggcctcaggagtgaagctgcagaccttcgcagtgagtgttacagctcataaaggcattgcggacccaaagagtgagcagcagcaagatttactgcaaagagcgaaagaacaaagcttccacagagtggaagcggacccgagcaaattgccactgctggctcgggcaacatgtttttattccgttatctggccccacccacatcctgctgattggtccattttacagagagctgattggtctgtttt

SEQ ID NO: 616094 - DNA, 510 bp, Homo sapiens
aaatgctacaaatacttttctgtgccaggtaactctccgggtccagggaactcagaacaaagtcttgggctattagatattcctggtttgggtgaaaatgtgtctggaattggtaggttcttggtctcattgacttcaagaatgaagctgcggccccttgtggtgagtgttacagttcttaaaggcggtgtgtctggagtttgttccttcagatgttcggatgtgttcggagtttcttccttctggtgggttcrtggtctcgctggcctcaggagtgaagctgcagaccttcgcagtgagtgttacagctcataaaggcattgcggacccaaagagtgagcagcagcaagatttactgcaaagagcgaaagaacaaagcttccacagagtggaagcggacccgagcaaattgccactgctggctcgggcaacatgtttttattccgttatctggccccacccacatcctgctgattggtccattttacagagagctgattggtctgtttt

SEQ ID NO: 616095 - DNA, 510 bp, Homo sapiens
aaatgctacaaatacttttctgtgccaggtaactctccgggtccagggaactcagaacaaagtcttgggctattagatattcctggtttgggtgaaaatgtgtctggaattggtaggttcttggtctcattgacttcaagaatgaagctgcggccccttgtggtgagtgttacagttcttaaaggcggtgtgtctggagtttgttccttcagatgttcggatgtgttcggagtttcttccttctggtgggttcgtggtctcgctggcctcaggagtgaagctgcagaccttcgcagtgagtgttacagctcataaaggcattgcggacccaaagagtgagcagcagcaagatttactgcaaagagcgaaagaacaaagcttccacagagtggaagcggacccgagcaaattgccactgctggctcgggcaacatgtttttattccsttatctggccccacccacatcctgctgattggtccattttacagagagctgattggtctgtttt

SEQ ID NO: 616096 - DNA, 578 bp, Homo sapiens
tctacatcctgttgtaactgctgtactgttttctcttccagctgcttctctttgccttcaagagggactcgggtaagatggatgttttgcttgacttcttggatatcctggactttctgtagctctttatttttccttaatctgtttattatacatttagcttggcgtttctgtttgatctcttcaactctcttcattgcatcaatagttttattccataggtctygctggatttgataggttcatttctatgttattcaaattcaaatgaattatccactgtaagctctttaccagctgcttcccggaatgctttagtccacctaactttgcaaggattgtgctgctttttaacttttttatgccgtttagatttacaaaatctgaacaccttgcaatcattgcggatgaacgttatgccatggccagggtagatgggccccaaacagaaataatgcttcttgatacacgtgttgaacccgcgtgggtccccaccagccaaatgccaagcttgagaggaagtgaccaccttatgatgttttcaagaactaaatttcaagcagagagaatcttatttg

SEQ ID NO: 616097 - DNA, 579 bp, Homo sapiens
ctggaaagaggtaccaaaatgttaggctacgtcagatgagaatgggacaagattcaatagaggtcaatcaaggaagacttctcagaggagaggatgtttgtgatggagtacaagatgtctgtgtgtcccatacacataggtgatgaggaaaagaacctacccagtggaggaaacaacaagcacagggagaagaggtgtgcaaatagggaattctaaggggtaggctcagagagttctggcagacaggaaatggcaaatagtgggaataggagagagaaaatcagaaaggaagacgactctgaagtttgcagcagccgtgactggaagactaatgatgtcattattagacacagggatgtcaggaagaagagctagctttgcaagcgtgattaatagtagtggaagaggcacagtcagacatcaggaagaacttcctgaccctgaaggatgtgagacaatgaagaagactgtggtttcctagaaatcttccatagaggamaaggtgagacatacccagcccctggcccaccctggagcctggactgtagaagctgttggttaccctgcccaaagagagac

SEQ ID NO: 616098 - DNA, 361 bp, Homo sapiens
gcaggttgaaaggatgaaggagaaggaggggtagaaggttgactgaggtcaggtgatgcctgactgctgggcatgggattgacacaggtcactttggcctctgatcatcaaccgcttgacgcctgccatgtcactccctcagactctctaggtggcccttaattaagtgcagaaggtctgtggaggatgacraggtgtctcttgtaagggacggggacagcctgagaccctacctccccttctgcctctgcatgtacctgagtgtgcctgttcaagccagggcagggcatctcccactggcagtggggaaagagtcctggcctctagatttactagggtcatgtctgagagacagagaccc

SEQ ID NO: 616099 - DNA, 550 bp, Homo sapiens
ccacccccggagctccatccctggctacagccgttccctcaccactggacaggtagggagaggcccagtatgcctggaggaaagagtgaaaaagggattcagtcccatgctcagcttaggacttaaaatcagagggtctgcctgtggagagagctcaggcctggctctggggaaactgggaaacctgccttaggactcctggagctgactcaggctgggagtctcagagaatcacagccttaaaacccaccaagtgtcctcaaagtgatgagcttgtaagggcaacgccagtgccctggggctcttcacaggcctgattgctccctccttgcccccatgtaaaaggtaggattggcygggtgcagtggctctcgcctgtgatcccagcactttgggaggccgaggtggtcggatcacgaggtcaggagaccaagaccagcctggctaacacggtgaaaccccgtctctactaaaaatataaaaaattagccaggcatggtggcgggtgcctgtagtcccagctactcgggaggctgaggcaggagaatgg

SEQ ID NO: 616100 - DNA, 540 bp, Homo sapiens
cgcctgtagtcccagctattcgggaggctgaggcaggagaatggcgtgaacccgggaggcggagcttgcagtgagccgagatcgcaccactgcactccagcctgggagacagagcgagactccgtctcaaaaaaaaataaataaataaataaaacccaaagtgttaccttgtttatattcaggtaacttcccttctctatggaattttccctcactcctccttcctccccacaaaagcccaacaacttggtttgttcagataggttgaagattactttttcgcagtttataacaagagctgatgtttaatagaggtattgggttgcatatggctttattttggcgactatttgaatatattaaatagtagtaggatatcgttacttagtattacagcaaaataggwtgattctctggagaaagaaacttcgtaagcctggatagtaatacttaccatctatttagatgtgattgcctgatggtgtcacccaaactaattaataatgacatattagctaacatattgccgtcagcaggtgg

SEQ ID NO: 616101 - DNA, 444 bp, Homo sapiens
catgtacgtacaatatgggcataataatagtacctacctcacaggattgttattaagaataaataagataatccatacaaagtatttaacacattattgaaaaattaaatgatcaaaataaagcttgttgttattgttatcttttaataaatgcatctaaagtatttttaaatgtattcacttcagttatttaaagtttcatctgctgtatcacagagcacatatatgttcagaaacatttgttaagtatctatgtaccagataataaaggtggtattgaaaaaagaataggcattgtaacaggcagacaggagtataaagtccagccttgccacttatgagactcccatcttcaaattatggaacctttctgaatctccattttatacctataaaaaggggtagacattacrtctctacttgcttcttatcattaaattaaaa

SEQ ID NO: 616102 - DNA, 563 bp, Homo sapiens
atcccctagagcttcttgccagggaagcttggttactaagtagatacctacactctcaactgttggtataaagcgctgagaaattggttttatttacactgtaagagtaatttttttttttaaaaaaaggaaaagcatggcttatatctaaggaaacactgttgtttggagaggtaatgaatggcaattagcaggaatcgtcatgtctcccattttgctttttagtattcctcctatgttgaacgctgacagtctctttggaatagaaaatcaaatgaagtcaagtattgcatattagatggctgataatgtgattcatatctcttataacctattacttctattactaacagcaaaaagaaagtgagaggataatactgccagtgtagtttcctccctgcttattaagccaagatatgtgtactgcctgtactctgaacttgcctctgctgagrtagcatctattgtcatgggaaccattattttattggaagcatgagagatttcagggaaaagctgatgctttctgttaccatgatattgggttagacttgggatttaga

SEQ ID NO: 616103 - DNA, 461 bp, Homo sapiens
atatgaattaggagaataattctgaagaaatagatgacacagcaaaggactctacatataggttaggaccatattcttgttgggaagatggccaaaaaagaattttgaggatattttttcaattatttaacaaatattgaaaatctattatgttccacttggaaaagaaagaattggtgggtaggagccaactaaratccaataaacttttgtctgtgacttaactcttctgaagttgtcagaacgttatgttccccagagttagttgttttggttgacagaaatctatgatatgccaaataaagactttctagttactattaactttgccttgcatgtagaaagaaaatattactcatcagaacttatcataaatcttaggatgcagtcatatccctacatatattttgattatttcaaaatcaaatatatactttaaaaaaggcttactatgttttgaa

SEQ ID NO: 616104 - DNA, 680 bp, Homo sapiens
tgatattttctgcaaatactatgtttgaacaaatgtcacctagtacctactaggcaccaggtggaacaaaccaaygcttagattaatgagtattataatgtatttcataaataaataattaataacaattaattgtgttagcctattaactgatttcattttttctactgtttcaccagatttgtacttgataattatgtaatcaatatttctcacctttgaattctaattcaagtttaaagtgaaggaaaagattctaaattgaaagaattctgtatttataaatgacagttaataacaaatccataaataatccagaagcattgttgccgaccatatggttgattttactaaacactggtaacagctaatataattgttttcttctatttccccaattaaattatatttgggccatttgagcagtgagattggaaactgagtgtcaaatcttgctttcactcactcctaaagtgaatgaatggaagtaatattcctaatttacatggcaaacagataataccaaatgtgtgtatccgtgtgtgtgcatgtgtatatatgtgtataaagacatatacacacattcatattacaaaatgtacatgaaactaattatataaattaccaaatgtgtgtatccatgtgtgtgcctgtgtatataggtgtataaagacatatac

SEQ ID NO: 616105 - DNA, 608 bp, Homo sapiens
aatgcttagattaatgagtattataatgtatttcataaataaataattaataacaattaattgtgttagcctattaactgatttcatttkttctactgtttcaccagatttgtacttgataattatgtaatcaatatttctcacctttgaattctaattcaagtttaaagtgaaggaaaagattctaaattgaaagaattctgtatttataaatgacagttaataacaaatccataaataatccagaagcattgttgccgaccatatggttgattttactaaacactggtaacagctaatataattgttttcttctatttccccaattaaattatatttgggccatttgagcagtgagattggaaactgagtgtcaaatcttgctttcactcactcctaaagtgaatgaatggaagtaatattcctaatttacatggcaaacagataataccaaatgtgtgtatccgtgtgtgtgcatgtgtatatatgtgtataaagacatatacacacattcatattacaaaatgtacatgaaactaattatataaattaccaaatgtgtgtatccatgtgtgtgcctgtgtatataggtgtataaagacatatac

SEQ ID NO: 616106 - DNA, 608 bp, Homo sapiens
aatgcttagattaatgagtattataatgtatttcataaataaataattaataacaattaattgtgttagcctattaactgatttcattttttctactgtttcaccagatttgtrcttgataattatgtaatcaatatttctcacctttgaattctaattcaagtttaaagtgaaggaaaagattctaaattgaaagaattctgtatttataaatgacagttaataacaaatccataaataatccagaagcattgttgccgaccatatggttgattttactaaacactggtaacagctaatataattgttttcttctatttccccaattaaattatatttgggccatttgagcagtgagattggaaactgagtgtcaaatcttgctttcactcactcctaaagtgaatgaatggaagtaatattcctaatttacatggcaaacagataataccaaatgtgtgtatccgtgtgtgtgcatgtgtatatatgtgtataaagacatatacacacattcatattacaaaatgtacatgaaactaattatataaattaccaaatgtgtgtatccatgtgtgtgcctgtgtatataggtgtataaagacatatac

SEQ ID NO: 616107 - DNA, 602 bp, Homo sapiens
tttcaaaaggaaatagtgactcataccattgcaygagcaactgaagaacaaaaaacccttttcactggttttacgaggcccctttgcccctagtttagtattgtgaggtattttttgaagggctaagaaagaagcaccaagaaaggtatccatcttttccattgatcttgaaattctactatctgtgtttctcttgtctgtgttgtacattgcattggtattagcatatgtcaagcacatataatcttgctgtatttgtctattttcccacatttcactcttagtttaagcagggtggcctagttagggagtgggttttggagcctatttagggtgtgggttcaaatgatcgttctgcctcttatagtgtgatcctgggcttggacttcagcttaatcataagcaaattgaggtattaatacctactttactgtgtttgagaattaagtgagataaagtatgtgaagcatctgtcacatgaaaaatactcaaataccatttttccccattagaagaatttatacatttttagctttaaaaacttcctgctagattctagaatagtagttctatacacttaacctagagagagttaagtggtt

SEQ ID NO: 616108 - DNA, 545 bp, Homo sapiens
ctttgtccacttatttattgatggacaattaggttgcttctaaatcttggctgttgtgaatagtgctgcagtaaatgtgggagtgcagatatctttttgatatactgattttctttcttttgggtatatacctagcagtggtactgctggattataaggtagcttattttcagttttctgaggaacctccaaactgtttgttatagtggttgtattaatttacattcccaacaatagtgtacaggggttctctttttttcatatccttgccagcattcattattgcttgacttttgaatctatacaattttaactgaggtgaaatgttatctcattgtagttttgatttgcatttctctgatgatcaatgacattgatcaccttttcacaaacctgtttgccatttttatgtcttcttttgagaaatgcctattcakatcctgtgccaattttttaattgaattatgaaatttttttcttatagagttgtatgagctccttacatactctggttattaatcccttgtcagatgagtagtttgcaa

SEQ ID NO: 616109 - DNA, 553 bp, Homo sapiens
gtcagctttcagatttgtaaaggacaacatgaagagactaaccatacctgtctattaatccttcctactatccaactatccatctatgtttctctccctcccttctttcaacaagtgtttattgagcacttcatatctgcacacagcagatatgtccttacggaacttatactcttgtgtaagtaaatagtaaatagaaaatttaaatccagattggtaatggctgtaactgggaagaatagggaactgtggaatggttggattgggtggcgtggtggttagagaagactttccacaaaaagtggtatctagactgacagctgatcctttcattgccatgggaaattgtaggaaatatttcaggtcttatgggatatatgggtaataggaaggcaacaagaggtgctagaatattcaaagtaaatggaacattgcgtccaaaggccctsaggcaagagttagtgtagttcaacaaatatctcaaggtagatgctctgctaggtcagaaatcttcactcaaattgcttatggacaatgtagtagctagtttcat

SEQ ID NO: 616110 - DNA, 563 bp, Homo sapiens
gactctgcactgtgaagttatgaggcaccagcctgctgttttgctctgtcatctccaggatgttgcttctctctctgtggcccaatatggatcactcctatgtcccaattccaacctgacagaagggaaaaagaaggggatggatgygtctttcccttttaagtcaggacttctgaccatcagactattgttattttggaccagacaattctttgttgtggggagatgtcctgtgcattataggatgtttagaagcatacctggcctctactcgataggtgccaggaatgtcacctccctgtccccagttgtgacaatgaaaaatgactccagacattgcctagtgtcccctggcaggcatattttacttctgcttgtattctttagctagatctgagtcacatggcatacatagctgcaaaggagactgggaaatgcagtccttttatttttatttttaaatgtttaaatttttattttaggtttggggtacatgtgtaggtttgttatataggcaaactcaatgtcactggagtttgttttacaaattatttcattattga

SEQ ID NO: 616111 - DNA, 522 bp, Homo sapiens
aataggagtggtgagagagggcatccttgtcttgtgccagtttttaaggggaatgcttccagcatttccccatttagtatgatgttggctgtgggtatgctatatatggcttttactcttttgaggtatgttccttcagtaccttttcaaattatttattgaggtgggtttttttttttctcactctgtcatcctggctggagtgcagtggtgtgatcttggctcactgcaacatctgcctcccaggttcaagtgattcttgtgcctcagcctcccgagtaactgggattatgagcwtgtgccaccatacccagctaatttttgtattctagtagagatgggggttcaccctgttggccaggctggtcttaaactcctgacctcaagtgatcacccctctttggcctcccaaaatgctgggatcacaggcgtgagcctctctgcctggcctattgagagtttttaacatgaaggaatgctgaattttattgaaagccttttctgcctttattgagataatca

SEQ ID NO: 616112 - DNA, 558 bp, Homo sapiens
tcatcaacatttggttacctgaaaaggatctcacttctttgcttaggaaagttagtttggctggatacaaaattcttggtggaagatttttttttycttcaagaatgttgaatataggcccccaatctcttctggcttatagagtttctgctaaaagggctgctgttagcctggtggggttccctttgtagatgacttgccctttctctctacctgcctttaatattctttctttcattttggccttggaaaatgggatgattacgtgtcttggggatgatcttcttgtgtagaatcttgcaggagttctctgtatttgaccgttggcctctctagcaaagtaggggaagttttcatgagcaatatcttaaaatatgctttccaagttgtttgttttctcctcatccctttcagggatgccagtaattcatagatttggcctctttacataatcctatatttcttggaggttttgttcattcctttttattattttttcttattgtctgactgtcttatttcagagagtcagtcttccggttctgagattcctcagct

SEQ ID NO: 616113 - DNA, 498 bp, Homo sapiens
ttttggcagcccccctccctcactctctctctctctcctgctgccttgcaagaaggtacttacttctcctccttctgccatgattgtaagtttcctgaggcctcccagccatgtggaactttgagtcagttaaaccttttttttttttttttttttttaataaaccacccagtgttgggtagttatttatagcagggkggaaacagacaaatacagaaaattggtactgggagtggggcactgctataaatatggaagcaactttgaacttagtaatgggcagaggttggaacagtttggagggttcagaagaaggtaggaagatgtgggaaagtttggaatttcctagagacttgttgaatggttttgaccaaaatgctcatagtgatattaacaatgaagtctaggctgaggtggtctcagatgggaaagaggaacttactgggaactggagtaaaggtcacccttgctattctttagcaaaggactggcaacatt

SEQ ID NO: 616114 - DNA, 451 bp, Homo sapiens
cactgcaccatatttgttaaatgaataaataaagtgagtaatacaaagtcacataaaaaagctaaactaagamgtctagattcctcgttaagtagttctactacaccaagtgtatgaggcagcagattgataatattgatgatgtgaagttttaagaatttataattatttctcagtagaaactgaatgaaatagtaggcaatgaatttttatcattttatgaaagaagaaagatataaaatttaagaataatgttgatttcatagaatgggaaaatatgtttacaacataataaaacagctatttaaataaatagctacaaagatatagagtataggtatttatatggtctagatgaatttttagttttaacatgagtttttgaaagaacttggaaattgaaattgtggattaaacattagggcagccatgtgagttttgtttttcaaag

SEQ ID NO: 616115 - DNA, 556 bp, Homo sapiens
attaataggagaactttctttgatgtttggttaagactggttgaaagagcacaaaagtctctttttgctgaaaggagacaagcttggctttgttaacttacttgcagctcttccttccctttcagctttcagattgaataacagtgcctggcacacagtagggccctataaggactgattttctttccagctgcacaataatttttyataaatgttcaacaactgctagatgctgggcactgtgctatgtgctgggaacataaaaatgagaaatgccaactctcagcctgcagagagtttacagactggtggggaggttatccaatctgtagatgcaaataatctcaggtaatgcagcagaaatagcaacaggggtctctacaagatgctgtgggagtacctagaaggaaattgatctggtttggctgtgtccccacccaaatctcaacttgcattgtatctcccagaattcccacatgttgtgggagggacacacggggaggtaattgaatcatgggggctggtctttcccattctgttctcatgatagtgaata

SEQ ID NO: 616116 - DNA, 556 bp, Homo sapiens
attaataggagaactttctttgatgtttggttaagactggttgaaagagcacaaaagtctctttttgctgaaaggagacaagcttggctttgttaacttacttgcagctcttccttccctttcagctttcagattgaataacagtgcctggcacacagtagggccctataaggactgattttctttccagctgcacaataatttttcataaatgttcaacaactgctagatgctgggcactgtgctatgtgctgggaacataaaaatgagaaatgccaactctcagcctgcagagagtttacagactggtggggaggttatccaatctgtagatgcaaataatctcaggtaatgcagcagaaatagcaacaggggtctctacaagatgctgtgggagtacctagaaggaaattgatctggtttggctgtgtccccacccaaatctcaacttgcattgtatctcccagaattcccacatgttgtgggarggacacacggggaggtaattgaatcatgggggctggtctttcccattctgttctcatgatagtgaata

SEQ ID NO: 616117 - DNA, 622 bp, Homo sapiens
tttcttactccatcctcagaataacctgagtaagaggcagagctgatagtagtgaagctcagagctcagtgacctgctcagcctgtcacagttagctcataacagtgagaccagatggatgagtaagggaagggaggaagatgcagattaatgttaaacgccctcaagatcttctgcgtactaggcccacactttccataccactcgtgggcctttttcttcaatgaaaaccttccataattatcaaatggcttgtatctgatcccagtagaagctgtgctttgtgctaggatcttgatatttgctatattttaaatagcccagatctcagcctcagcattgaacagtttaagctcagctgcaaactgtttttaatcacttcaggaacagtatagcacctccctacgcctcatttttgtctaaggaaatgaggattttttttttttaccgcatgacttctgaagtctatgtaagtttctagtctttgattctgcgagaagcccaatggcagagacgacctataaacctttgttaaatgatgcccactccctgtccccatctgatgctcctaagggagggagcctggcytgatactttcacaattagagcaggttcccatggg

SEQ ID NO: 616118 - DNA, 461 bp, Homo sapiens
tacatagaagtaggttacagccggctctaagagtaacaggctctgaatttccaagatgagcctgaatttagaatattttgtyccattagaacactcacttctcttgaacacgtggcctgtgagggctggagaggggctcagggtatgggtgtgtcaacctttccttcctctgctggacaattccatttcttcccatatccgccatccaaggcccacccatccttcaggtctggctcaaacggctcctctcctggagacctaccctggttacggcccaaagaattcatcttctttccctcactccctttatctgcactcttttgttattctaagcatattcttctctgtactatatgtatttctgtttattcaataatatatattatatatatttctgtttatataagccttgatatataaatatcaaggctggagttaggcaggatctgggtttgagtctt

SEQ ID NO: 616119 - DNA, 395 bp, Homo sapiens
atagtgcctgtagcatagggttattctaaggtgaaaatgaaataacrcccatgaagtactgagtttatagcaaggagtcaatagatgtaaatgattgctgtaataatggttactgtgtgcctcacgaaagattgtttactctccttcattaggctgagggtttgagagcaggaactgtgtatcatcaacatttatatctggattatctggcccagttcctggaatataagtaatgttcactaaatacgttgagtgaatcaacgaattgtttttaatagatgtaaccactgcaacattatagaatttcagagctgaaaggaaccttgttgtcactgaatgaatttaccttcttaatgtaaacaaaaggaaactgaggccaacagatgttaaagagt

SEQ ID NO: 616120 - DNA, 590 bp, Homo sapiens
tgaccttgtgtggggaccaggggagcatgacagcagtagttgccacctccacaccttctccatctccataggggcaatagagcaagccagagatttcatggcagaatgcaggaggctacacagagcagcaaggcttctcatggcctgcctaagcagaggctgatgatggcaggcatcagcttgtgggaggttaagcacttatccactctccccccacttttctgatttctcatttcttccatgcattaactaccactttgaaagtttcagtgggttaattaaattcttctagtgttgatgctaagaaagctgaaacattttcaactgagattgacactactcaagacataggcttcactgatgtttgttcagtaacactccaatatgtcacaggattgccgagagaacatctgagagctataatgagctaaaagtcaagtacaggggaaaatgtgttccagactgctgcagatgttctcaaatcaaatcttatttctgtgaaatgccatatagaatattcagctgttgaaagatgcaacacgaaaggacagttcaattgatttgyactgtatttaaaaattttatgtagc

SEQ ID NO: 616121 - DNA, 461 bp, Homo sapiens
gagttcccctgcacaagttctctctctttgcctgctgccattcatgtaagttgtgacttgctcctctttgccttctgtcatgattgtgaggcttccccagccatgtggaactgtaagtccattaaacctccttcttttgtaaattgtccaatcttgggtatgtctttatcagcaatatgaaaacagactaatacagaggggtaggtatttttattttygccgtttttttttttcagatgggaaaacaaatctagagtggctgagtaatctaaccaggggaaactggtaagtggtggcaccaggattttaccccaagcagttagcgccagagtccacgttccttatccctatgctaggttgctgactttcagcagcagaacagcagactatctcatgctctagaagtcatgtgggcttgagaagtcaagttcatcatttcattttcgggcagggctagccca

SEQ ID NO: 616122 - DNA, 413 bp, Homo sapiens
caagttcatcatttcattttcrggcagggctagcccaaatgggtgacaatttctctcctttataaacaagatctcctagatgaaaagaattaatgctatttctataagaaattagtattgactgatgactgatgatagttgattatgacagctttcagttttgcctattttaagactttatgttcctaccaaaagttgaaggcctatggttgaagtgggaacgtctgacagtgactgaattatttccctccaggatgtcttttattgcccgctaataaaagcgctagtaaaacatttccattgttaagcatacccaataatagcagtctttatattctgaaacaatgctgtatagctcccaagcttctctctccctcccttcctcatccttccttctctctttcttttatatt

SEQ ID NO: 616123 - DNA, 658 bp, Homo sapiens
taacagactttagttgtttttttttttaattcacagaaatactctaaatttctacaacaatgctaagaatatatagtagggtctcaatacatatttattaaaaaatgaatgaatgaattattctctgtgatgcatataaagcaataaagaaggtatgcgctatcacacttatrcaacttatgaaaaaaattagctttccattcttgaaatgtcattactcttcttaatgtcagtcatatggcttaatttacaaacatagattcatttggaacagattttgaaattactaatttgagtgtaaatctttattttagcagtgaactcacttaattacataagattttgaaattactaatttgagtgtaaatcttaattttagtagggcactcacttatctacatagtctatacacatgatgaatagtgtatgagaaaaatcagaatcaaaatatttatttatattactatttctacacccattacaggacttctatttctatactctagtgtatcagcaccataacctagataaataaatcaatttcatttgtctggttatacctgctataaagaattcattttagttggtacacatttcacttgtgaatagaaatcattagaaaggtggatttaataaatattgtaaaaccagagaacag

SEQ ID NO: 616124 - DNA, 618 bp, Homo sapiens
aataatacattctcattgcaaataattcaaacagtagggacatatttctttttcaggtgctggagagtggttgaaggattttatgctagagcctcatgtaataggattagcctttggaaagatctttctggccgccatgtggaggctggcccagagctgcacggtacaggaagcaggaagtctcgtctcagagaccagcaagcgggccatggtgtgatttcagtcagaggtggggagggcctgaactaggaccgaagatgctaatgtggatttgagagctcactgggtggraaagtacgtgttgggttactgaacaatagggaaaataatacaactttgacttaagaattgggctttgctaaacaaatctttttacaaactggtctcctagaaagggctctgaaggcacagctaaccaaacaactatccctcccaggcaagagtttccccaccaggtgaatggtttgccatgtttccaattccaggaactagctggaataacacttatgcaatgggaatgcacgaggcccacctccaggagcctggctggtggagaacttggcaagactggagtcctctgcggagtggaaactcctgcggttctgcttcaagtgaact

SEQ ID NO: 616125 - DNA, 618 bp, Homo sapiens
aataatacattctcattgcaaataattcaaacagtagggacatatttctttttcaggtgctggagagtggttgaaggattttatgctagagcctcatgtaataggattagcctttggaaagatctttctggccgccatgtggaggctggcccagagctgcacggtacaggaagcaggaagtctcgtctcagagaccagcaagcgggccatggtgtgatttcagtcagaggtggggagggcctgaactaggaccgaagatgctaatgtggatttgagagctcactgggtgggaaagtacgtgttgggttactgaacaatagggaaaataatacaactttgacttaagaattgggctttgctaaacaaatctttttacaaactggtctcctagaaagggctctgaaggcacagctaaccaaacaactatccctcccaggcaagagtttccccaccaggtgaatggtttgccatgtttccaattccaggaactagctggaataacacttatgcaatgggaatgcacgaggcccrcctccaggagcctggctggtggagaacttggcaagactggagtcctctgcggagtggaaactcctgcggttctgcttcaagtgaact

SEQ ID NO: 616126 - DNA, 577 bp, Homo sapiens
agtactcaccttctaggtcattgcaaggataagctataacgaatgaaaacttctagtactttgctcagcaccttctagaaagtcaataagtggtagttactgattgaagagtcataactttctaacaaatacagctcccagatggttggggaggtggaaggaaggcagaaggccaactatcaaataaaaggacaaacaaagaatacacttataacgatagamccatgctcaattgatgcatctagggatatagggtgaatagagcttctgaatatttccaaaccaaatcattctcaaaacttcgaggaggtctcttattcacaggtatcccagtgtgagtctttttgtaaaattgatgctgctactgattatcatacagtgctaccaaatcgccaggggctcttaaaggaaagagattatttgtgtatcttcagaaactctttggcactctttttttttattaagtagaattgttttttgaatcccatattggtgtagttctttacagattaccttggacttttgagtatattatctcatttgttctttgagcaatctagaattgcagattaaggtt

SEQ ID NO: 616127 - DNA, 534 bp, Homo sapiens
tacttgctgtttgaatatttcctcttagaaattttctctggggttcctggctcagggagaccacctctatgttttgtgtcttctaggattaggcagttggtttggtttagaaaacaagagtttgctgttacctgctttaaaagcaacctagcagtcaacaaaagtcccctgggagaaatcaggttgctagtgagggcacagctccactcacaaatacttcgtttgctagtctacccacctgtagaactgtttgttaaggattcattcattcattcatccacagactaatgcattcattcattcattcactcactgtccattgttcccatgccaggcactgtgttggtrctatggttacagagatacaagaggtagagtgatggtcctgttccttgtgggtgaggaagcacagacagaccaataatgcagtgggatcagtgttctggttgggggtgtgtgggcaaagtcatgtggcagcagaaggaggttaaggaagcatacagaggctctttatgctgacttctgatacatgat

SEQ ID NO: 616128 - DNA, 568 bp, Homo sapiens
attcagatgcctgttggtgctcctggaattgcatccagatgccctaccttagtattaaagtctcactcaactctaagrtcaatgagtggggagggtgagggctagattttcattgaccctggtgttgccagcccctgctggacatcaatctggcacaaagcagacaatgttaatttttttttccttgaaggagtaaacccaggtctctctccagtgtcttatcagcctcccaaaggcggggaatcccactggggtccctgatcaccttccagagccacctctctgcaatcagctgcattttgctagaatcggccttgctgtccaccttccccatcagcgtcctcatggagaccaccatgagggaggggccagcgggtctgaacttgaggctatgtctagcagtgtgtctgagctccaggtacccaggagggggccatggccgagtgatgcccagggcacaggatggtgcaagcaagatgtaaacaagatgcaaacaagatggtgcaaggagatgcaaacaagatgtttgcaaggagatgtttgcaacaagatgtttgcaaagagatgt

SEQ ID NO: 616129 - DNA, 377 bp, Homo sapiens
tccaagttttctcccaagaatgagaaaatcctctgctgtccggcaaagccagtgtcttttactgcactcagcaggctttaaytgaagagttctctcaatggttcactgctctgtgaagctggtagctgctttcttaccatagatcctccttacgtctccaaggctcaaaatagcccagaaggggatgcatgaagcaaacatcagccaagtagacacttgtcaacctggtgacatttctgccaacttgtgactctttacagggggaaacctctctggcaggcagttggaatggggatgctagggaaaggctatatatgtgctagaaagagcaaggactacaaagccaggaggcctagggttaggttcttgcaactggt

SEQ ID NO: 616130 - DNA, 377 bp, Homo sapiens
tccaagttttctcccaagaatgagaaaatcctctgctgtccggcaaagccagtgtcttttactgcactcagcaggctttaattgaagagttctctcaatggttcactgctctgtgaagctggtagctgctttcttaccatagatcctccttacgtctccaaggctcaaaatagcccagaargggatgcatgaagcaaacatcagccaagtagacacttgtcaacctggtgacatttctgccaacttgtgactctttacagggggaaacctctctggcaggcagttggaatggggatgctagggaaaggctatatatgtgctagaaagagcaaggactacaaagccaggaggcctagggttaggttcttgcaactggt

SEQ ID NO: 616131 - DNA, 654 bp, Homo sapiens
ttttaaaattcttgatgtgactttctgatggtgaggttttcttttctcttttcttcataagatttgacactttgaatccctttttgtcaatgtgttaaccaccagcaggcaatcttaagggtcataatttgctgaatgagtgaaggaaaagatcctttacagtgtaagtatatccagaaaatttccttgaggtattcatatttctgtttttacattaaaccaacctcattaaatctgtattagtgagaagacaactttagaggattaaaaatttaggttgcttttgtgttctatgatcattaagatttaacattgtccaagggcaaacatatctaaatatatatgttaattccatcttgtttttagaagattaacagcaagaatgacttagctatataatctatctaattttaggcaagaatctctattttttagagacctctagttcccttccattattcaatactagaaagcactttattctgtttattttattttttattatactgtaagttctrgggtacatgtgcacaacgtgcagatttgttacatatgtatacatgtgccatgttggtgtgctgcacccgttaactcgtcatttatattaggtatatctcctaatgctatccctcctccttccgcccaccccaagac

SEQ ID NO: 616132 - DNA, 595 bp, Homo sapiens
tgtctaaaaaaaaaaaaagaaagaaagaaaagaaaaatacattttctcaaagggaaagtaaagctgattcctgctgtacattagcttaggtaggtacccaaagaccctggtgtaataatgatgttgttctcctgaaataacatttaaaaaaaactacatattttactcttaagcagatgggattgtcttctcttccaactaaaaacagtatgctgatattgaggattagtatttatcatttatcactgataaatggtgtattggttgggataacactagctacagtaacaaatagatgcaaaatatataatgatcaagcagaatagaaatttacttcttgttcatgtaatakgtcctggtattcctggtcagcaggcagctctcttccatgcactcattcagggattcagaccccttcccttttgtggcttcactatcctctaaggcattcttgttacgtgaatcctattggtagaaaagaaaagggcagggggatgcgtacccatttcttaattgctttggcccagaaatagcccatgtcttgccttctcacaacccactgtctacaactcagtcagatggctgtacctaaatg

SEQ ID NO: 616133 - DNA, 595 bp, Homo sapiens
tgtctaaaaaaaaaaaaagaaagaaagaaaagaaaaatacattttctcaaagggaaagtaaagctgattcctgctgtacattagcttaggtaggtacccaaagaccctggtgtaataatgatgttgttctcctgaaataacatttaaaaaaaactacatattttactcttaagcagatgggattgtcttctcttccaactaaaaacagtatgctgatattgaggattagtatttatcatttatcactgataaatggtgtattggttgggataacactagctacagtaacaaatagatgcaaaatatataatgatcaagcagaatagaaatttacttcttgttcatgtaataggtcctggtattcctggtcagcaggcagctctcttccatgcactcattcagggattcagaycccttcccttttgtggcttcactatcctctaaggcattcttgttacgtgaatcctattggtagaaaagaaaagggcagggggatgcgtacccatttcttaattgctttggcccagaaatagcccatgtcttgccttctcacaacccactgtctacaactcagtcagatggctgtacctaaatg

SEQ ID NO: 616134 - DNA, 595 bp, Homo sapiens
tgtctaaaaaaaaaaaaagaaagaaagaaaagaaaaatacattttctcaaagggaaagtaaagctgattcctgctgtacattagcttaggtaggtacccaaagaccctggtgtaataatgatgttgttctcctgaaataacatttaaaaaaaactacatattttactcttaagcagatgggattgtcttctcttccaactaaaaacagtatgctgatattgaggattagtatttatcatttatcactgataaatggtgtattggttgggataacactagctacagtaacaaatagatgcaaaatatataatgatcaagcagaatagaaatttacttcttgttcatgtaataggtcctggtattcctggtcagcaggcagctctcttccatgcactcattcagggattcagaccycttcccttttgtggcttcactatcctctaaggcattcttgttacgtgaatcctattggtagaaaagaaaagggcagggggatgcgtacccatttcttaattgctttggcccagaaatagcccatgtcttgccttctcacaacccactgtctacaactcagtcagatggctgtacctaaatg

SEQ ID NO: 616135 - DNA, 583 bp, Homo sapiens
tggtctcattctgtactatttctcctgctaattgcttttattgctcaatattatgtttatgagagttacctaaatgagtacatggagctgtattttatttattgtcattactgtataaaaagcaactacatattatattgcatatataatacattctttatacagacagaacacaatttattttttcattttcctgtgcagtaggcagattctaagctgtcccccatgatatctccgcacgagtgtccataccctgcatcatcccctacccttcgatactggtaggatttgtgaatatgatgggctgtcattsctgtgaataggttgctaagcatttaatgttgagtcagtcataaatagagattgtcatgtgtgggcctgtcctaatcagaggtactggccttttcttagatttaaagcaagaaagggtcttctgttggcttgcattaggagatatacctaatgtaaatgatgagttaacgggtgcagcacaccaacgtggcacatgtatacatatgtaacaaacctgcacgttgtgcacatgtaccctagaacttaaagtataataaattaataaataaat

SEQ ID NO: 616136 - DNA, 583 bp, Homo sapiens
tggtctcattctgtactatttctcctgctaattgcttttattgctcaatattatgtttatgagagttacctaaatgagtacatggagctgtattttatttattgtcattactgtataaaaagcaactacatattatattgcatatataatacattctttatacagacagaacacaatttattttttcattttcctgtgcagtaggcagattctaagctgtcccccatgatatctccgcacgagtgtccataccctgcatcatcccctacccttcgatactggtaggatttgtgaatatgatgggctgtcattcctgtgaataggttgctaagcatttaatgttgagtcagtcataaatagagattgtcatgtgtgggcctgtcctaatcagaggtactggccttttcttagatttaaagcaagaaagggtcttctgttggcttgcattaggagatatacctaatgtaaatgaygagttaacgggtgcagcacaccaacgtggcacatgtatacatatgtaacaaacctgcacgttgtgcacatgtaccctagaacttaaagtataataaattaataaataaat

SEQ ID NO: 616137 - DNA, 640 bp, Homo sapiens
tattggtgaattatcaataattgtagtgctttcttgaaaagttccctggggtggatttccttagttgcatataattctagcctcttcagcctactaaggataaaagggacatgaagtacacatatctgggaattaattacatttttctgctcaagagccaagtcattttcagaaattgatgtcaaataggtcttccatagctgaaagtgctaggtgtctcttcacatagttaagatttccccctattcagaaatattagtttctgatgacaatggaaaattccaaatgcagcagcttcactgtgttctaataatgttcatgcttagggatcctgaaaccacttgcagtatgcctggtctagccacagcagggagccggcgcccatgccagttcccagagctgaccaccccacckcagccagcgtgtctggctgtgcaccatggccagactccatgctcactcactcatgcaccccgcactgctccccacctggctcaaccttggtgggcatgggatccaggctggtagtgaaagtcaaatgctgcctgccaggccgggtgggcagaacgagcccagcgggtgagaaaaacttgggcaaacgtgccactggctacagaggtttccggctggtgaagtgaca

SEQ ID NO: 616138 - DNA, 634 bp, Homo sapiens
agatacttaggatccttacattgtatgtaaggaaagtcacctagtcctcacatcaaccccaggtgtgacatgttattaacttattctaatggtacagatgttgagatgcagagaacagaagcagctcttaggggacagagacagggctcagtgatgattatattcacctgtcatggggtagagctacaatagtgagtattctgtggatggtcctatccagataaaagaaggaattggtttcaggacatagtctgcatcttactaggtggggaatgttggacaagttacttaacctcttctgccctgtaaaatagggataaaaatggtacatatcacagagtrtcataggaagactaaagtagactattctcatcctcacacctaatgagttctcaatatttaactgattataattatctttactagatacataattaagtaaataaattaaggaattatagagcaaatagtcatagggtcacacagatagaaagtgggaaaaataggagacaaacctatgtctatattcattccatggcattagatttagattgcctccttttagtctggcaaaacactcatgattatacaatgtaatttaaaaatatacagtactttgctgggtgtggtggtg

SEQ ID NO: 616139 - DNA, 634 bp, Homo sapiens
agatacttaggatccttacattgtatgtaaggaaagtcacctagtcctcacatcaaccccaggtgtgacatgttattaacttattctaatggtacagatgttgagatgcagagaacagaagcagctcttaggggacagagacagggctcagtgatgattatattcacctgtcatggggtagagctacaatagtgagtattctgtggatggtcctatccagataaaagaaggaattggtttcaggacatagtctgcatcttactaggtggggaatgttggacaagttacttaacctcttctgccctgtaaaatagggataaaaatggtacatatcacagagtgtcataggaagactaaagtagactattctcatcctcacacctaatgagttctcaatatttaactgattataattatctttactagatacataattaagtaaataaattaaggaattatagagcaaatagtcatagggtcacacagatagaaagtgggaaaaataggagacaaacctatgtctatattcattccatggcattagatttagattrcctccttttagtctggcaaaacactcatgattatacaatgtaatttaaaaatatacagtactttgctgggtgtggtggtg

SEQ ID NO: 616140 - DNA, 508 bp, Homo sapiens
ttatttaacgtaggagagactcaaagattagttcaaggctctgaggagggagaagtgggaagatcgatgagacagaagaatgatacaagagtaatagcatcagtaggtaaagatttgctggcaaaaatgccaggaaacaaaagcagaaatgaccacaagagattacagttatgyttatctctctgggaggaggaatctgcatctgctcctgagggaatcttgacattagagattacagtaacattgcttttgtgatctagcacagggtgggcaggtggtcacactaaatcagtcctggagcataagtgaataggccctccacactggcaacagcagggaagggaattctttagtaaattttacctaactttttcatgtacagaattgatcctttcctaatgtgtttatgtatggtagatgatttatcctcataccttaagaaattccaacaaaatgtcaaataattgaatgttgtagagttgactggttactatttaagtgtattgta

SEQ ID NO: 616141 - DNA, 607 bp, Homo sapiens
gctatacttctgattacatttttattaaagcaaaaaggttgcaaatcagagccagccaaaagaagagatgcagagagaaaggtctggagagtcctacatgtgaaacttgctgtttcctcttttcatggagtgaggacatatcaccctctcagcacatggatgtgaaacaatattcagagcgctgagaaccagggaagctcacctgagctttgtgctgaggcttctgattgggatttccttaggtaggcatgatcgctggaatcactggccatgcacacaaggttggagtttctgacatggccagtgctcatgaatgatctcattgccataaactaccagggtcaccataaataacaaagatacctatcaattggcaaattccaaggatgtagaggctacttcccaggaacttgaggcaaaagccagtaaaattctttatttttcattcaaagaaccagcttttagtttggttgayactaacagtttctaatgtacctgaaattattggttcgttcccaatattttgaactattaagtccctttatttctttgttttttaaatttctcctctcacctttattattttctctttttcatttatctcttt

SEQ ID NO: 616142 - DNA, 609 bp, Homo sapiens
aataagtcataacgcgaatttaaccataaaattataattgtgatgagttttttataacttagaaatatgactgttttatttaaacgataaacagcataaattatattatatacataactacatatatgtatgtatatatttattatatacatatgtaaaatacctataaaatggraaaaaatgactagaaagaaaccaatttattacaaattattaatcatctctagtttcctactcttgtcatcatgtctgattttcctactagtctgtttttttacaaaatatctaatattagcctgcaaggctgtaaccattttatagatagacagatgatagatagatagataggtagatgatagatagatagatagtagatagatagatagtagatagatagtcaaatcacagtgaagtttgcaatttcagttttgtctttgattttggattattctgtaattggttctgtttaatttatgttaatgattaggtgattttcatttgtatctctctatacatggccatgcttctctttttctaatgtattaataatgaataaaaatgatctcagttaatttgtggctagaaagtaaatctcttgagaaacttagg

SEQ ID NO: 616143 - DNA, 520 bp, Homo sapiens
tgtctatggagaggtgtgtggtctgaagagctctgtggtggggagagctctgcgtctatraagagctctgtgtctgtggagagtcctgtgtctgtggggagttttgtatctgtggagagttctatgtctgtggagaacccagtggtgtggagagccctgtgtctgtgaactctgcgctgtggggatctctgtttctgtggagagttctgtggtgtggcaagctctgtgtctgtggagatctctgttgtatggagagttgtgtgtctggagagctctgtgttggtggagaggtctgtgaatgtggcaagctctgtagtgcagagagctatgtggtgtgggtagctctgtgactgaggagagttctgtggtgtggagatttctgtgactgttgagagttaagtggtgtggagagctctgtgtctgtaaagagctacgttgtgtggagaactctgtctgtggagagctctctggtgtggagagttctgtgtctttggagagctctgtagcgtggagagctctg

SEQ ID NO: 616144 - DNA, 520 bp, Homo sapiens
tgtctatggagaggtgtgtggtctgaagagctctgtggtggggagagctctgcgtctatgaagagctctgtgtctgtggagagtcctgtgtctgtggggagttttgtatctgtggagagttctatgtctgtggagaacccagtggtgtggagasccctgtgtctgtgaactctgcgctgtggggatctctgtttctgtggagagttctgtggtgtggcaagctctgtgtctgtggagatctctgttgtatggagagttgtgtgtctggagagctctgtgttggtggagaggtctgtgaatgtggcaagctctgtagtgcagagagctatgtggtgtgggtagctctgtgactgaggagagttctgtggtgtggagatttctgtgactgttgagagttaagtggtgtggagagctctgtgtctgtaaagagctacgttgtgtggagaactctgtctgtggagagctctctggtgtggagagttctgtgtctttggagagctctgtagcgtggagagctctg

SEQ ID NO: 616145 - DNA, 463 bp, Homo sapiens
tagaacaataattacaattttgattgtttattatcttcaagatgatgtcccttcattttcaaaatactgtaattatgaagtcatattattatttgtattttaaagatgaggtacctaggtcagagaaattaaagaatttgcctgagatgaaacacgtggtaagtcctaaagctggaaatgaagttcatgtctgacttgacttcaaagcaggtgttcttttttctcttatgcttttacccaattaccaaacatcagacccagcagggagttgtttggttccagtccttttattttataaatgaagatagtatcaagaaggatgctttggaaattaggcctagagtttgctctttttrgattcagtttctcctacagtctcagttctggtctggtcaatagcttcaaaccaaagaacaaaaattccttctgaaccctttgcagagaaaaattgttacagagcaaa

SEQ ID NO: 616146 - DNA, 669 bp, Homo sapiens
attgtaattaaaaaattaaaaatgagaattatttcatttctttgtaaaatattatcagtagctaggacattgcttccttttacctcatgttgtttaattttcaacagtgtgcttctatgccttggcaaattgtcattctccgttctracactgaatcagctccgaacattttatcctttgtgctttcaatgttgtaaaatgcctctgagagttcctttaatatgaagtacttttgcccatgttacttccttcaggacatcttcactctttttgtcacaaccattttattcatgcatattaataactatctcctttaattccatttactttatgattctaatttcattttcagagttatttcttttcatttatttgctgtaccttcatccttcttgttcaattccctctttcacttatctatttttataaagtgtcacaggggtttatctctgggagacaaggaggagacccaactatatgctttgctgtctgtgtgggaactgaataacaggtgcacagtgaccagtcaaggacagaatttggaagtagtggtgggaatggccactgatcttcatgcacatctattatttatgtagttttttagtgtcctgaggagctagcagagaagattctactttgagcaagtaccacagttaatataatgtcata

SEQ ID NO: 616147 - DNA, 582 bp, Homo sapiens
gcaagggatctaacttcccatggcaaagctttaaattgcattgctcagaagttaaatatctcattttccttcacattttatagatccaatcaagtaacatgaccgagcctttcttgatggccagggaagaataatcctttcccagagagaagcaggaaatgtatgccattaataaaataatctaccaaagaggactgttgatcttattttctgtttgtagatgtttattacttgttctcttacctgtatcctttcctgttttctatgagtgtggagtcattcttagttaccctctggaaagaactaaccattcttctcccagggttgtgttaggacagtttcttagctgcttagggtatggatcatgactcatgtccatatgttctctgaagttcttaggctcaatctcaagactacttggggtaccagaaattatttcctgagtttaaatatacaaacaatgacaatgagaaactaaaatatataccagtgaatgaattaagtcagatttattgtcaaatatatatatatatatatatatatwtattttattttcattacaaattgaaggtggcataatga

SEQ ID NO: 616148 - DNA, 604 bp, Homo sapiens
acctttctgctcaggctgcagtgatacacactacaaaaagagagcaataagaccaaaggcacaccttttatgagattttaacataatttagaaggcatgaatgagaaaaaaaggagagaatacaaagaaagaccgcagagaaaatatagacaaaagaaagttgaagtaaaaccaactaatggtcttaggttttacactaraaattcttagaaaatagcagatgggagagaagcagtttgcttcctgctttgacacagtggagttgttcattctgggaaaactttgtaaaccaggtagaaaattaaaaattatcaatttcccaaatatgtatcaagctactacttgtgctaggatctctgttaaaaaaaaactgatgtataattttgaatatatatttttgaatgtgtatttctgaatttgaatacatatattttaaagatagaagatggatagatagatgattgatagatgatggatagacagatggcccttgactcatggcaattatagcctagtggtagagatgaatatgaattaagtcatcacagaaatacttataaaatcacaattaagtgaagtgctgtgaaggaggggcaggtgagta

SEQ ID NO: 616149 - DNA, 515 bp, Homo sapiens
tatgtaatcggaatgatattgattcattaaactaggtcatggcgtgacaattcaattgtctgtacattccttcccaacttctcaagtgtggagatgtttttaagagctgtagcacacatcgccattccagtgtggaaattagaagtgtttcaaaactgtagaagacataaaggtaggcacaccaagcactgcaggcaaaacaggaaaagtaatattgtgttagataaaatggggaaatacaagcaatgctttttgaaatcacattctaattaaaataagagaaagaaaaacaaaacgaagatgttcaatctattatctctgattttgcactggtaggataggagataagcctatatattaaaaggcatgattgtcagacatttctcaacgtgagaaacacgaagcaagattggggtaaaaagsaatgggaaaaaaacaggtggaaacaactacctttgagactaagcctaaaatgaaagctgatggttgttggtgcaaatgtaatcattaattgc

SEQ ID NO: 616150 - DNA, 620 bp, Homo sapiens
tcacaacacatggctcccacctaggtctgagccaccatcatctctcacctggattcctgttatgggctcctacctagtcttcctgtgaactcttctgtcctttcttgagtctcaacgtgggaaccagactgatcctgttaaagcataagtcagatcatatgcctcctcccctcaaaagcctgcaatagctccccattttcctccaagtaaaagccaaagtcttacaatgacatggaaggccacaggctaggtccctgctacttttctgactctctctgtgtctctctccccaccctccatatactctggcccccaagttaatggtcacatacaccatgtacactccttccttaggcctttgcaagagttgctccctctgatcagaacaatctagccctataaccaaatgtctcatctttcaaatatttgctcaaagctcaccttcacaatgagacctaccctgactactgtaattaaaattgcaactcagccccactcccaccccacccccactcctccttagcctgcttttactctttcatagcacttaccttttctratattccacataatttacagatctatgcatttttctacctccctccactagaatatgtgtt

SEQ ID NO: 616151 - DNA, 611 bp, Homo sapiens
ggtctgctaatttgagccaagctctgcccatctcactaggctcatgcatgtgcctgtagtcacctggcaggttggctggaggctggctggtctaggatgggtgacaatagcaactgaggcacacgtctcatgttattcaacaggtcagcccrcacttgtgcatatggcagtggcaggctgtaaacaaaagtattgaggttgttggttgtgcagcaagaaaacactgagactcatgctcatgtgttcaaccatgctaaagaaaacaaacaactttttctctcgtgtcaatacacttcttctttgctgccagagaatcttttgatttcagcaggcttaatggtcagataaagaaaagaggctcttctttgcatatctgcccttctcctccacttctcagtccatacagccatgcaacactgctttcttttgaaagccgctgagcctaggcttgagctgatacactgccctttctgctgcactcagaggtagggaaacaaaatgcacccattggccagcagaatgcaaaatcatattgtaaagggcgtgcatacagggggtgggtggagcgtctgcccatttttgtgaacaatctatctgtattaagagcacaa

SEQ ID NO: 616152 - DNA, 611 bp, Homo sapiens
ggtctgctaatttgagccaagctctgcccatctcactaggctcatgcatgtgcctgtagtcacctggcaggttggctggaggctggctggtctaggatgggtgacaatagcaactgaggcacacgtctcatgttattcaacaggtcagcccgcacttgtgcatatggcagtggcaggctgtaaacaaaagtattgaggttgttggttgtgcagcaagaaaacactgagactcatgctcatgtgttcaaccatgctaaagaaaacaaacaactttttctctcgtgtcaatacacttcttctttgctgccagagaatcttttgatttcagcaggcttaatggtcagataaagaaaagaggctcttctttgcatatctgcccttctcctccacttctcagtccatacagccatgcaacactgctttcttttgaaagccgctgagcctaggcttgagctgatacactgccctttctgctgcactcagaggtagggaaayaaaatgcacccattggccagcagaatgcaaaatcatattgtaaagggcgtgcatacagggggtgggtggagcgtctgcccatttttgtgaacaatctatctgtattaagagcacaa

SEQ ID NO: 616153 - DNA, 635 bp, Homo sapiens
cagcttcctctctcctcgttattttaaaagaaaatgtaaacaaaacaaaatgtgtagttgcacagaaattccaatgaataaaatgggattttaccatcaacagtgctttttttctgcccaaattggaggtgacaatgccaccctcatttcctgttggtgccatcttcaatcagtatgggcctttgcagggcagtctgatattacacagaaagggttgtaatgtgttcctgttctgtgaaccagtaaacacactctcaggaatgtgctcagcaattcaatggaagacaaaaaaatgtcacacacatgccgatatcctttgtagcatcatctataacaacaaaaagtaagaaaccatgtaagtatccaataatactctcatgcattagcaaacaaattaacacaatgggttactatgtgtccattaaaaataattagcataaaaactatgtggaagcatgaaaagttctgtacttttttatataaagagagcagaacacaaaatcctattacctgctcatacaattatgtgaatctagattgggagagaatrcacaaaaataggactcgttcctctctcttacattagagtggtgaaaatacagacttatcttcaaaaaatcttttaacactattat

SEQ ID NO: 616154 - DNA, 581 bp, Homo sapiens
tacctttgggcatggcgattttggggggacatcacgaaggaggcctcttgggtgctgtcaacattgtatatctctatttgggtggtgattaaatgggtatgttgccctttcaaaaatgtattgagctgtgcactcaagatctgtgtgtctttatatatgaatgctgcccttcaataaaaaattgtagagtccatcaacaaaaataaccattgctccagtgaacgtcttttatatacaagagattctgctaagatttatgaaaaatgaaagatgtttggaatgggaggagtaaatagcctgattggggagagtgcacacatgtgaaaatacaggttagaacacaggcacaggtatgcgaagtgagcagatctctgcccttaggggtctaagcatggaggtcacagggcctgcatgaatttagaaactgtggagggagaattgccatacagcttaccsttaagttcctgaaagaggagttagcctctcagtcagtttggggtctttgtttccatatgtcagtcaagacagattttaaacacacctattgaaaagcaatggtgacgaggagactggagtcagaa

SEQ ID NO: 616155 - DNA, 534 bp, Homo sapiens
aacttgcatttagtcactgggcttttagttgtgactgataatacatcaattatatgtaaaatatcctaaagcttctgatgtgcgagcagaaataggtctaaaacactggaaagagacaaaactttctggaaaaaaagatgttcagatattcttgagaactactttgaggcttaaaaaaaatgacaacatattcagaaagataaagcaggaactacatcattttaccaagataaagtgaaatagaccaatggatttgatcccactatattagtagtgcaatgtgaggacaagagaaattcactgtcatctacctgtcccagaagacaccagcaaatgcatacttagaatcttacactatttcagggagtccagttaatcaacccttccagttaatcaacccttccagcccataggagtatgtgtgtgtgtatgtgtgtgtgtgtgtgtatatatrtatgtgtgtgtgtgtgtgtgtgtgtgtgtgtgtgtgtgtgtcttgtgtttttagattatctttcttttaaactttgtgca

SEQ ID NO: 616156 - DNA, 534 bp, Homo sapiens
aacttgcatttagtcactgggcttttagttgtgactgataatacatcaattatatgtaaaatatcctaaagcttctgatgtgcgagcagaaataggtctaaaacactggaaagagacaaaactttctggaaaaaaagatgttcagatattcttgagaactactttgaggcttaaaaaaaatgacaacatattcagaaagataaagcaggaactacatcattttaccaagataaagtgaaatagaccaatggatttgatcccactatattagtagtgcaatgtgaggacaagagaaattcactgtcatctacctgtcccagaagacaccagcaaatgcatacttagaatcttacactatttcagggagtccagttaatcaacccttccagttaatcaacccttccagcccataggagtatgtgtgtgtgtatgtgtgtgtgtgtgtgtatatatatrtgtgtgtgtgtgtgtgtgtgtgtgtgtgtgtgtgtgtgtcttgtgtttttagattatctttcttttaaactttgtgca

SEQ ID NO: 616157 - DNA, 625 bp, Homo sapiens
gatgaggagccagaagggagagatggagtgggaaggtgatcttcccctggtgttgggtcatccagtggctgaattcctctccagccacccctggccaaactcctctcagcattcaggcattccttctcttctctctgtctctgctgtgttgttcgactgtttgtctgcttgtctcatctccttgtctgctggtctcctctggagcctggggtttggggttgatataggtacaggatagggggcatggtgggccaaaaggcaatgatttgggcctgaaaacaggaatgcctgttctcatttagggccatgggtatccaggcttgaggggggggcctttgccagggaaccaccctcttctacccagtatttccctgtctyctgtttgtatcactttgaaggggacaaaccatgtgttggatactggctgtgacactggcgtgctgtccctgaagctctttcattccttcatatatactaagctctccagaaaatgtcgagtcacagaagatgccaaaaaattgtcctgcaaggtccttaccaagcttttctttatcctatcttcgtgactccaatcacatcaacctctctctcccgaaaccctcaaatgactttggacctgagatat

SEQ ID NO: 616158 - DNA, 502 bp, Homo sapiens
ttgtggctattatatgctagatgacgtcaaataataactgagtgtacaatcttctggtaatgttcccatttcacagatgagaagactggattatagagaaattcagaaacttgcctaacatcttatagctaatcaatggtagaactggggcttaagtctaagtctgtttgatataaatatctttgctttgaactattatgctaygtaggtagctgaatttgttcttttccttgctgttttcctctgagataggtagcagagttgcaaccatctgctaaatattttccacctccttcttaatacacttcttctcatttcttcccaagcacccaaaagatgcttttcatggtggaagtccttttcatgatggaagccctcttttctcctggcttaagcaagaacctgtctttgatcttccatagctttgaaatgattgaatctagatgttgtccagctctcttgttcattcattaattggagagggcaggtttgtactaaatgt

SEQ ID NO: 616159 - DNA, 630 bp, Homo sapiens
tgctcaattagttaccatgagagtgggttgttatcaagtgaggccaccccttttgatttgcccttttcacaagtgtccacttccycttcttcttccccaccatattacaaggcagcatgaggccttcaccagaggctggccagatgcgggctcccaatctcggacttctcagcctacagaaccatgagcctaagtgaacctcttttctgtagaaattacccagtctcaggtactctgttctagtaacagagaatggactaaggcaccttctgaagggcttcttggttgcatcaaagttatggcagttatgtataaagctgctataagtatccaagcgcagatttctgtgtggacctaggttttcagcacctttgggtaaataccaaggatcgtatttgctggatcatgtggtacgattatgtttagttttgtaagaaaccaccaactgtcttccaaagtagctgtatcattttacattctcaccagcactgaatgagagtttctgttggtccgcactctggccagcatttggtgtcagtgatctggattctagccattctaataagtgtatctgctatcttactttaatttaaaattccctaatactatatgatgtggagcatcttttta

SEQ ID NO: 616160 - DNA, 624 bp, Homo sapiens
aatcacacagtatgtggcattttcatattggcttcttttagttagtaatatgcatttgagattcctccatgtcttcccatggcttaatagctcacttaatttttttgtgctaaataatattcaattgtgtgtacgtaccatagtttatttatcttttcacctattgctatgggttgagtgtgcccccagaacgcatgtttggaaatttggtccccaatggagtcgtgttgggagatctttaaaaggggattagatcgttaacaggaatgaatgctactctcttggggtggcatttattgtcacgggagtgagtgagttctggctcttgaggtgctcaattagttaccatgagagtgggttgttatcaagtgaggccaccccttttgatttgcccttttcacaagtgtccacttcctcttcttcttccccaccatattacaaggcagcatgaggccttcaccagaggctggccagatgcgggctcccaatctcggacttctcagcctayagaaccatgagcctaagtgaacctcttttctgtagaaattacccagtctcaggtactctgttctagtaacagagaatggactaaggcaccttctgaagggcttcttggttgcatca

SEQ ID NO: 616161 - DNA, 630 bp, Homo sapiens
tgctcaattagttaccatgagagtgggttgttatcaagtgaggccaccccttttgatttgcccttttcacaagtgtccacttcctcttcttcttccccaccatattacaaggcagcatgaggccttcaccagaggctggccagatgcgggctcccaatctcggacttctcagcctacagaaccatgagcctaagtgaacctcttttctgtagaaattacccagtctcaggtactctgttctagtaacagagaatggactaaggcaccttctgaagggcttcttggttgcatcaaagttatggcagttatgtataaagctgctataagtatccaagcgcagatttctgtgtggacctaggttttcagcacctttgggtaaataccaaggatcgtatttgctggatcatgtggtacgattatgtttagttttgtaagaaaccacyaactgtcttccaaagtagctgtatcattttacattctcaccagcactgaatgagagtttctgttggtccgcactctggccagcatttggtgtcagtgatctggattctagccattctaataagtgtatctgctatcttactttaatttaaaattccctaatactatatgatgtggagcatcttttta

SEQ ID NO: 616162 - DNA, 630 bp, Homo sapiens
tgctcaattagttaccatgagagtgggttgttatcaagtgaggccaccccttttgatttgcccttttcacaagtgtccacttcctcttcttcttccccaccatattacaaggcagcatgaggccttcaccagaggctggccagatgcgggctcccaatctcggacttctcagcctacagaaccatgagcctaagtgaacctcttttctgtagaaattacccagtctcaggtactctgttctagtaacagagaatggactaaggcaccttctgaagggcttcttggttgcatcaaagttatggcagttatgtataaagctgctataagtatccaagcgcagatttctgtgtggacctaggttttcagcacctttgggtaaataccaaggatcgtatttgctggatcatgtggtacgattatgtttagttttgtaagaaaccaccaactgtcttccaaagtagctgtatcattttacattctcaccagcactgaatgagagtttctgttggtccgcactctggccagcatttggtgtcagtgatctggattctagccattctaataagtgtatctgctatcttaytttaatttaaaattccctaatactatatgatgtggagcatcttttta

SEQ ID NO: 616163 - DNA, 570 bp, Homo sapiens
acttgacaagggtatcacaagcccgcctatggtacccaaactgcttagcagaagcacccggctctctgaagcctcctggggggatcatgtgttaaagaatctgggattcctttgttggccattttcctcaaggatttctttcttaaggaagaagtgaaattatgcaatgagaartcttgaaaccctgtaactgtggttacctcttgtcttagtcagttcaggctggtataagagaataccataggctcagtggcttaaacaacagaagtttctttctcagttctgtagggtggaactcttagataagggtgctggcatactaggtatatggtgagggccgtcttcctaatttatggatagcatcttctcattgtatcctcatgtggtgggatcatgtctctcgtgtctcttcttataggggcactaatcccattcatgagaacactctcttgaccttagcatctctcccagaggatgcacatccaaataccatcacatctcaacttatgaattttaagaggacacaaatgttcagtctatagcaccatagatttccttatctatgatata

SEQ ID NO: 616164 - DNA, 564 bp, Homo sapiens
aggggcccaggaggggatgccttgaggaaggaagagatagtgttactgacaaagccagtcctccaaaagatggggtctttctttgtttggtgtcatgaagccaatatgtgaaaccaaaagtgattgtcaggcaatgcaggcttcatttgatggccgtggaactgagaagcaggagcgtggctcacaaatcaacttctcagttcatgagagctaggaagccacagatatggggcaccttaaatgtaggtgttgggtattaaaagcaaggataggaatattcatgtcttttccagaaataggcagacaatttctcaggaccagagtgctgccttcctttttgtccttttatggtttcttccagtcattgtcatggtgattgtcaatagtcatgggctggagggaaggtcatttarcatggaaattagattataatgaagttagaggttctgcagaggtcaagtgagctgccgtcttggatccttccagtttcagccaatttggtcgccaggggaaacttctaattgcaagcatcctgtttcttaaagataagcagaattaaggtgg

SEQ ID NO: 616165 - DNA, 478 bp, Homo sapiens
gcctcaaaaaaaaaaaatagccaggcatggtggcatgcgcccatagtcccagctattcaggaggttgaggtgggaggatcacctgaggccaggaattcaagaccagcctgaccaatatggcaaaatcctgtctctactaacaatacaaaaattagcggggcatggtggtgcacatctgtagttccagctacttgggaggctgaggcacaagaaccacttgagcccaggaggcagaggttgcagtgagccaagattgagccactgcactrcaatgtttaaaataaaatagaatttaaaaggagacaggaaaaagaaattaaggacaactataacactctgaaatgagtgcccaaaggtttagcacaacagctagaagttgattgcaaatttagtctaagtgtcctcaagctaaggtaaagaggcaaacacaatcagagcaagattcacattatttgcacaattaaaagagaccagttac

SEQ ID NO: 616166 - DNA, 525 bp, Homo sapiens
aaaaacaacgtaagcctaatgacttctttggtgggagattttaaattacaaattcaatttctttaatgtttataggaatattcaaattatctgttttacctaaaatatctactgagttttagttatttctggcttttggggaattggtccaattggtgcaatttgttttcagttgtcaaatttatgagctaaaagttgattatggtatttccttattatacttttaattgctgcaggatctgtagaaatatctcctgttttattcctgatgccgattatttgtttcatctttctttttatgtttgtcagccttcctagaagttaatttttttttcaaaaagtcagctttctgtttctttttttttctattttctattattttcttgttcttagttttattgattccactctttactatttctttccttcttctcacattgggtttatttttctcatctttttctattttttttgargtaggaactttgttagtttgagaggttttctattttctagtgtaagcat

SEQ ID NO: 616167 - DNA, 479 bp, Homo sapiens
gactaggaagaggaagaatgaagagtgactgcttaatgggtacagagtttcctttgggggtgatgaaagtgtgctagaactaggttgtggtaatggttgcacaatactgtgaatgcactaattgataayaatggtaaattttatgttatttgtattttgccacaacaaaaaaattggagagatcaaagggagctaagcagaagcaaggtttctatccttcacttttaagtggttaaacattgatactagcagataaggtacatattcctttgtacatattactaaggtacaaaactaccttgtcttctttctgtttatactaattcctttatcaaagggttgcttggccacactctttttttgttctttgtatggctaggctgcaaactttacgttctggtttcctttaaattataaattccatctttaagcattactctcctttctcattttatcataagcagttaaaagaagccaca

SEQ ID NO: 616168 - DNA, 479 bp, Homo sapiens
gactaggaagaggaagaatgaagagtgactgcttaatgggtacagagtttcctttgggggtgatgaaagtgtgctagaactaggttgtggtaatggttgcacaatactgtgaatgcactaattgataacaatggtaaattktatgttatttgtattttgccacaacaaaaaaattggagagatcaaagggagctaagcagaagcaaggtttctatccttcacttttaagtggttaaacattgatactagcagataaggtacatattcctttgtacatattactaaggtacaaaactaccttgtcttctttctgtttatactaattcctttatcaaagggttgcttggccacactctttttttgttctttgtatggctaggctgcaaactttacgttctggtttcctttaaattataaattccatctttaagcattactctcctttctcattttatcataagcagttaaaagaagccaca

SEQ ID NO: 616169 - DNA, 479 bp, Homo sapiens
gactaggaagaggaagaatgaagagtgactgcttaatgggtacagagtttcctttgggggtgatgaaagtgtgctagaactaggttgtggtaatggttgcacaatactgtgaatgcactaattgataacaatggtaaattttatgttatttgtattttgccacaacaaaaaaattggagagatcaaagggagctaagcagaagcaaggtttctakccttcacttttaagtggttaaacattgatactagcagataaggtacatattcctttgtacatattactaaggtacaaaactaccttgtcttctttctgtttatactaattcctttatcaaagggttgcttggccacactctttttttgttctttgtatggctaggctgcaaactttacgttctggtttcctttaaattataaattccatctttaagcattactctcctttctcattttatcataagcagttaaaagaagccaca

SEQ ID NO: 616170 - DNA, 479 bp, Homo sapiens
gactaggaagaggaagaatgaagagtgactgcttaatgggtacagagtttcctttgggggtgatgaaagtgtgctagaactaggttgtggtaatggttgcacaatactgtgaatgcactaattgataacaatggtaaattttatgttatttgtattttgccacaacaaaaaaattggagagatcaaagggagctaagcagaagcaaggtttctatccttcacttttaagtggttaaacattgatactagcagataaggtacatattcctttgtacatattactaaggtacaaaactaccttgtcttctttctgtttatactaattcctttatcaaagggttgcttggccacactctttttttgttctttgtwtggctaggctgcaaactttacgttctggtttcctttaaattataaattccatctttaagcattactctcctttctcattttatcataagcagttaaaagaagccaca

SEQ ID NO: 616171 - DNA, 547 bp, Homo sapiens
tgtcaggctttctatttatgtgtggttgatttttaggttttggcttaagtgtttattcactctacatgccttagtggagcttttagcaatcaaacttcagcctgttcttcccaaactttacctggcccatcggatactggcactaaattagtggttaatttctaattaatttgcctgctttgagggatagatgtattagcatcaagttttgacaattcccaaaaataattaaatatccctagagaaaaaggaagggaagattcaggacccgtagttcctaaaaggatttgaacaccacttacaatagagcaaatttccagatagctccaggagcttaatctttggaagcaggagtttctttgtttacaaacaagcaggcgtttgttagccagtgcaacaataaacctctgctctctggtcagccattttcattaaattattcttaaagaccaccaataaaaggtgccartcattctacttaactatgtggctaaccatctattattaaccagagcacatacttctggaataacaaatggggtcgcaa

SEQ ID NO: 616172 - DNA, 609 bp, Homo sapiens
ccagtcaaggccactgaaataaaatacatgtcagccttaggtaagctttatctttccaaagccactgataactacttttgctaagagccatcagcagagtgtctgctttcttgccaggaggagaaacaaagactttgatctgatctatgatagaacacattcctttctgttttgactcttcatttgcaggaggcccaggacagggatgctgtttgctcagatctcatggtaagttccctcccactggggcagatggggtttacgctggggagaagaggtctgagagctatgtctaccttaaagctttctccctgtacagcaggtcctaatcaggtgctgggggaggaggaaggaggaatcccaaggcatgggagatggcagatggatgccctgagtatcagctattggccagtcattcgtcaggagctttattaatgatactgctcactgttcaatggaacacaggccagaaactgttacaccatttaacttccacacaagaaatgacattatcgtgcctatttacagacaaaggatctaagatttgaaaaggaaraaaacttacccgaggtctcatcgctagctgagatttgtacctatgtcattatg

SEQ ID NO: 616173 - DNA, 558 bp, Homo sapiens
ggcacagcaacatctgtgacccctctctttatgagcagagagagaaaaacaaggcacgtagaaggaaaacagtycctgttctctctgtgggaaagagctctggaaagctagtttaaaagaaggattcttctggatggttttttctagaatacatcttctgccccaatcctactctgtttcctccactgtctaaagacatcttgttttcaaagtgtgaaataaaatactcttgggacatttccctttcaacgctagcatgtaagtttgacagaattgagaagaccagggggtctatcacagcctcccagtgaaactcagcagaagtcttggtggttgagtcaggacatgagtggcggtgcagcaggtccctaggcagggaaccaacaggacttagagggcctcccactagcttaatttctgaatccacgtttttcagagttctttgtcttgtcttcattggaatgactgtcatcttttgagcaacgttcaaacttctctgctaccttcttgcaagttttataagctgctcaaatatacataacaaatgagagtgcctgt

SEQ ID NO: 616174 - DNA, 558 bp, Homo sapiens
ggcacagcaacatctgtgacccctctctttatgagcagagagagaaaaacaaggcacgtagaaggaaaacagtccctgttctctctgtgggaaagagctctggaaagctagtttaaaagaaggattcttctggatggttttttctagaatacatcttctgccccaatcctactctgtttcctccactgtctaaagacatcttgttttcaaagtgtgaaataaaatactcttgggacatttccctttcaacgctagcatgtaagtttgacagaattgagaagwccagggggtctatcacagcctcccagtgaaactcagcagaagtcttggtggttgagtcaggacatgagtggcggtgcagcaggtccctaggcagggaaccaacaggacttagagggcctcccactagcttaatttctgaatccacgtttttcagagttctttgtcttgtcttcattggaatgactgtcatcttttgagcaacgttcaaacttctctgctaccttcttgcaagttttataagctgctcaaatatacataacaaatgagagtgcctgt

SEQ ID NO: 616175 - DNA, 631 bp, Homo sapiens
tacacagatttatgataagcaattggcttatgcagctatggaagctgagaagtccgaagatctgcagtaggccagctagagatccaggaaccaggagagccagaagtatagttccagtccaagtcttaaggcttaagacccaggacagccaattgtgtagttccagcccaagtcctaaggcctgagacccaggagagccaatggtgtagttctagtctgaaagccagcaggttcaaaacccaagaatagtcagtatttcaattcaaatctgaaggcaggaaaaaatatgatgtcccagctcaaggtagtcaggcaggaggagttctgccttaattgcaagagggacagccgttttgttctcttcagccttcccgcttgtttttgtcagttctcacactgctatcaagaactgcctgagactgagtaatttaaaaggaaagaattggrgtgtgggatatcacttccaagtttaggttgtaagaagactggtttccatactgggtgtgtgctctctcttatcttttcatggatgggccttccagaataggctgagactgagtaatttaaaaggaaagaggtttaattgactcacagttccacagggctgaggaggcctcaggaaacttacaat

SEQ ID NO: 616176 - DNA, 564 bp, Homo sapiens
cacggtcagcttcttgatttccctcacttacattctgtgcaaaccctccacctaccaagctgcttctaaccctttgggggtgggaagggtgaaggtgggaagaggatggggagaagtaaagagaggaaaattctgatgtcactgactgatcttgtggcagcattttctggctgtgggaattaccctcacatagggtgctttgttggtttggggatamtcattcactggactcccctacccataggtctctgtcaggatgacatcatgttttcactgccagtcacctccacactacctctcactctggggttcccactgcttaatgggagcttccactctactaacacagtgatatggtttggctctgtgtccctacccaaatctcatttgtaactcccataattcccacatgttgtgggagggacctggtgggggatcattgaatcatggaggtgggtctttcctatgctgttcttgtgatagtgaatgggtctcatgagatctgacagttttaaaaatgggagtttcccacacaagctctctttttgcctgctgccatccatg

SEQ ID NO: 616177 - DNA, 564 bp, Homo sapiens
cacggtcagcttcttgatttccctcacttacattctgtgcaaaccctccacctaccaagctgcttctaaccctttgggggtgggaagggtgaaggtgggaagaggatggggagaagtaaagagaggaaaattctgatgtcactgactgatcttgtggcagcattttctggctgtgggaattaccctcacatagggtgctttgttggtttggggataatcattcactggactcccctacccataggtctctgtcaggatgacatcatgttttcactgccagtcacctccacactacctctcactctggggttcccactgcttaatgggagcttccactctactaacacagtgatrtggtttggctctgtgtccctacccaaatctcatttgtaactcccataattcccacatgttgtgggagggacctggtgggggatcattgaatcatggaggtgggtctttcctatgctgttcttgtgatagtgaatgggtctcatgagatctgacagttttaaaaatgggagtttcccacacaagctctctttttgcctgctgccatccatg

SEQ ID NO: 616178 - DNA, 608 bp, Homo sapiens
tattttaaaaacacacacattgtctctactaaaaccataaaaataaaattagctgggcgtggtggcgggcacctgtagtcctagctactctggaggctgaggtgggagaatggcctgaacycgggaggcggagcttgcagtgagcccaaatcgtgccactgcgcttcagcctgggcgacagagtgagactctgtcttaaaaaaaaaaaaactaaaaaaactaaaaaaacacgcatatatatgtttagtatttaccatcttccaagcactatttaaatgctttatatgtattgcatgtatcaatttttttttaatcctttctctgcaaacttttcggaaatttgtctgcgtcccaaatcatcaatttcatgatggtgtatcctagttcaagaccgttttcattcattgtgtatgttcctaataatgccctttctacttttcatattcttcagtttgaagattttttaaaaaaaaatttaaattattttcttatctttttttgtttcctattatttggagtctagacttcatgaattgaaggttataagattatgttacacttttcagaattctagcagttgagtcagcaaagaggactgaaagagttcc

SEQ ID NO: 616179 - DNA, 608 bp, Homo sapiens
tattttaaaaacacacacattgtctctactaaaaccataaaaataaaattagctgggcgtggtggcgggcacctgtagtcctagctactctggaggctgaggtgggagaatggcctgaactcgggaggcggagcttgcagtgagcccaaatcgtgccactgcgcttcagcctgggcgacagagtgagactctgtcttaaaaaaaaaaaaactaaaaaaactaaaaaaacacgcatatatatgtttagtatttaccatcttccaagcactatttaaatgctttatatgtattgcatgtatcaatttttttttaatcctttctctgcaaacttttcggaaatttgtctgcgtccsaaatcatcaatttcatgatggtgtatcctagttcaagaccgttttcattcattgtgtatgttcctaataatgccctttctacttttcatattcttcagtttgaagattttttaaaaaaaaatttaaattattttcttatctttttttgtttcctattatttggagtctagacttcatgaattgaaggttataagattatgttacacttttcagaattctagcagttgagtcagcaaagaggactgaaagagttcc

SEQ ID NO: 616180 - DNA, 529 bp, Homo sapiens
aatggcttttctcaaaaaaaaaaaaaaaaaaaaggatggcagcaagtatatggagaaaggggaatgctcatacactgttggtgggaatttaaattagttcagccactatggaaaacagtatggaagtttctaagaaaattaaaaatagaacaaccatatgatccagcaatgccactgctgccaatatattcaaaagaaatgaaattaatacatccaagagatatttgcactcccatgtttattgcagctctactcatggtagycaagatatgagatcaacctaagtgtccattaatggatgaatagataaagaaaatgtagtatatatacacaatggaatattattcagccataaaaagaatgaagtcctgtcatttgcaacagcatcaatggaactggaggacgttacattatgttaagtgaaataagccaaacacagaaagacaaacattgcatgttctccttcatatactggcattgcaaatttgatctcatggaggtaaaaagtagagtgatggttaccagaggc

SEQ ID NO: 616181 - DNA, 437 bp, Homo sapiens
tgcctcggcctcccaaagtgctgggattacaggtgtgattcaccgtgcccgacctatacaactcttatgtacccataatttttttwaaaaaagttaaaatttaaccacaatagaacaactggtcttttttcgtcatggtgaaccctgaaaatttgagcatagatgaattatgtagttattctttttacttgcttgccctatccatttttgctctcatcacctcaggtgtcacccccttttgttattgtccctagggacccgatgctggctggtttatgattaggtttaacacagggaaagcaccaacatgagactggagggcaggagtgaagattctccattctcctttgctttgaggatgctcttttttttttttttgtctgcaactgcttttctccacaactacttgggtagccctttcgctggtagttcaagtt

SEQ ID NO: 616182 - DNA, 628 bp, Homo sapiens
ctgaaataaattcctaaccaaaaaatgtgttaagtaatcagatttaatacatgttttattatttttaaatataatttaattaaattaattaatttatttatttttgagatggactcttgctctgtggctcaggctggagtgcagtggcatgatctcaggtcactgcaacctctgcctcccaggttcaagtgattctcctgcctcagcctcctgagtagctgggattacaggcataatccaccacgcctagctaatttctgtatttttagtagcaatggggtttcaccatgttggccaggctggtctcaaactcctgacctcaagtgatccacccacctcagcctcccaaagkgctgagattacagatgtgagccactgcacccggccagatttagtacgtatgtcttagtataaggacaattcataaaactagtgttttttgttgctgaccacatattatctgctaatttaatataggcacaaagtataaagtgtgcccatttattaagaatgcatttatgtttcttctctttaattctaggaatttcactcaggtaactgtagttaatacttttattagtgataagacaattaaatcacctcattttctttataggaaaaaggagat

SEQ ID NO: 616183 - DNA, 371 bp, Homo sapiens
aacccggagagtgacaaaactgtttgtcagcagtataagattttagaattgttcataaaattaactttattggtttaagtagcttggttagaagggactgtaaatcagaagcctcacctggaatcattcaggctggaaggagagagaacattgcagctttaacctgtagctcttatcttttgaagttgactgaaagaaaagaaatttatacagaaaacaaagcacagagtttaggtgatcatttaaagcaggaagcatatcactttaaccctatgttctgagcatcatcgtcattctgctccagawagcaaaaagtattaagcaattgaaaaagttttggaaatgtttttaaatatttagccaaaaacaaa

SEQ ID NO: 616184 - DNA, 631 bp, Homo sapiens
ataagtatgagtttatttctgtaaactcaatcgcattcttttgatcagtatstttattctcatgccagtattgctttgccttgatttctataatttctcataagttttgtataatttttatcccttcaatttatgaaggcttattttgtggtccagcatatggtctgtcctggagaatgattttatacacttaagaaggatgtgtattttgctgttgtagggtgtagtattctatacatgtctgtcaagtctaggggtttctaatgttgctcaagtcttccatttccttgttgatcttctgcctagttacctcatctgttattgaaagtgggttgctgaaatattcaactattattgttgaatgttttattctcatcccccactgtgcagcagagctgagttctctgagttaaatacaaaacatcaccacagtctgagattagagattttgtagtaatctccaagttcaaacaaaatattgtctgtgctctgggagtgatgctttgaagggaactccagaagaggttaaatctcattgtctgcagtacttctgtatttttgctactgtgccattgatctggggtaaaaaggagtgatacgagtagaaccacagatcttgctgtcatactta

SEQ ID NO: 616185 - DNA, 631 bp, Homo sapiens
ataagtatgagtttatttctgtaaactcaatcgcattcttttgatcagtatgtttattctcatgccagtattgctttgccttgatttctataatttctcataagttttgtataatttttatcccttcaatttatgaaggcttattttgtggtccagcatatggtctgtcctggagaatgattttatacacttaagaaggatgtgtattttgctgttgtagggtgtagtattctatacatgtctgtcaagtctaggggtttctaatgttgctcaagtcttccatttccttgttgatcttctgcctagttacctcatctgttattgaaagtgggttgytgaaatattcaactattattgttgaatgttttattctcatcccccactgtgcagcagagctgagttctctgagttaaatacaaaacatcaccacagtctgagattagagattttgtagtaatctccaagttcaaacaaaatattgtctgtgctctgggagtgatgctttgaagggaactccagaagaggttaaatctcattgtctgcagtacttctgtatttttgctactgtgccattgatctggggtaaaaaggagtgatacgagtagaaccacagatcttgctgtcatactta

SEQ ID NO: 616186 - DNA, 494 bp, Homo sapiens
gaggggcatatgtaaaaattatcagaggaatctcctggtaagaggcccttctcaccttgccwaatacataaaggagattcaaaaagtatttgttgaataaatcaatgaatgcatgaaatataacactaagaaagtgaagaggattagggagatggaagaaataagatatttacagccctctcctggatagtgctatggtcaaatgatagggagagtaatggcacaagtacaataaacattattagagtttttttccctttttttcctgtatttcccccattttctcccaaaatagtctattaaagacagaaaaataagacataatcaaacaaatgttctacttcagaccaagatgtttactactgtatcaatcaactaaaaaaaagtaaaaatacatgaaacaacggttttcaagacactaaacatcagccaacaatggacagtgagccctgaaagaccagaactcaacaaagtaaatcctacaattgttccag

SEQ ID NO: 616187 - DNA, 494 bp, Homo sapiens
gaggggcatatgtaaaaattatcagaggaatctcctggtaagaggcccttctcaccttgccaaatacataaaggagattcaaaaagtatttgttgaataaatcaatgaatgcatgaaatataacactaagaaagtgaagaggatyagggagatggaagaaataagatatttacagccctctcctggatagtgctatggtcaaatgatagggagagtaatggcacaagtacaataaacattattagagtttttttccctttttttcctgtatttcccccattttctcccaaaatagtctattaaagacagaaaaataagacataatcaaacaaatgttctacttcagaccaagatgtttactactgtatcaatcaactaaaaaaaagtaaaaatacatgaaacaacggttttcaagacactaaacatcagccaacaatggacagtgagccctgaaagaccagaactcaacaaagtaaatcctacaattgttccag

SEQ ID NO: 616188 - DNA, 494 bp, Homo sapiens
gaggggcatatgtaaaaattatcagaggaatctcctggtaagaggcccttctcaccttgccaaatacataaaggagattcaaaaagtatttgttgaataaatcaatgaatgcatgaaatataacactaagaaagtgaagaggattagggagatggaagaaataagatatttacagccctctcctggatagtgctatggtcaaatgatagggagagtaatggcacaagtacaataaacattattrgagtttttttccctttttttcctgtatttcccccattttctcccaaaatagtctattaaagacagaaaaataagacataatcaaacaaatgttctacttcagaccaagatgtttactactgtatcaatcaactaaaaaaaagtaaaaatacatgaaacaacggttttcaagacactaaacatcagccaacaatggacagtgagccctgaaagaccagaactcaacaaagtaaatcctacaattgttccag

SEQ ID NO: 616189 - DNA, 494 bp, Homo sapiens
gaggggcatatgtaaaaattatcagaggaatctcctggtaagaggcccttctcaccttgccaaatacataaaggagattcaaaaagtatttgttgaataaatcaatgaatgcatgaaatataacactaagaaagtgaagaggattagggagatggaagaaataagatatttacagccctctcctggatagtgctatggtcaaatgatagggagagtaatggcacaagtacaataaacattattagagtttttttccctttttttcctgtatttcccccattttctcccaaaatagtctattaragacagaaaaataagacataatcaaacaaatgttctacttcagaccaagatgtttactactgtatcaatcaactaaaaaaaagtaaaaatacatgaaacaacggttttcaagacactaaacatcagccaacaatggacagtgagccctgaaagaccagaactcaacaaagtaaatcctacaattgttccag

SEQ ID NO: 616190 - DNA, 571 bp, Homo sapiens
caataaacattattagagtttttttccctttttttcctgtatttcccccattttctcccaaaatagtctattaaagacagaaaaataagacataatcaaacaaatgttctacttcagaccaagatgtttactactgtatcaatcaactaaaaaaaagtaaaaatacatgaaacaacggttttcaagacactaaacatcagccaacaatggacagtgagccctgaaagaccagaactcaacaaagtaaatcctacaattgttccagctgctagtcytgagatttttttacaccataacaggaagcaagtaactaggccaagcctggcagactccctgaactgagcaggcaaagttggtcagagttaccaaggtggctagagttcatgaaacagatatgtagataagacagctgcacagggagaaggcgggagtctgaggtgtcctcttccagcatccagcagtgctggtcagagtatgcaaatgaggaagcagtgaagacataccccggaggcttttaacgtctttactattaacttccttctgaccacaaagaaaacttttcttggcacaa

SEQ ID NO: 616191 - DNA, 614 bp, Homo sapiens
tagtaagtaaatagttctttagcagtactttcttcctggaatcaacttaagattttaacatttggttgataaaatctacaagtgtggtawtgaaagatatttgttccatattttgcttcttacaaatgctcatagctcttatcatattctcataaataccacaaaagtccagttattttcttgcacaagataaagatttatgctttccaaagactgtgaatatatcatgtcatttttttcatcagtctcatattactaaaaactacatctaagacatctaattaaatgcaaatgaatacaatttaacataaaatgctatttcattgatagtacattttaagatttcaacctcaatttttagctatattaaagtatctcagagatatcttctatgtaaatacacaaaataaaatggattgtaatgaaaacatttattgctatacatacaatagtattttaacaattacaaaagtattatttcttctattgctttctatttaatcaaatagaaaatatgacataacactcctgtgaagtactttggataaattatgtataaaaaatgtaaaatatatagaaatacaaaatattatactcaaatttgaattttttta

SEQ ID NO: 616192 - DNA, 614 bp, Homo sapiens
tagtaagtaaatagttctttagcagtactttcttcctggaatcaacttaagattttaacatttggttgataaaatctacaagtgtggtaaygaaagatatttgttccatattttgcttcttacaaatgctcatagctcttatcatattctcataaataccacaaaagtccagttattttcttgcacaagataaagatttatgctttccaaagactgtgaatatatcatgtcatttttttcatcagtctcatattactaaaaactacatctaagacatctaattaaatgcaaatgaatacaatttaacataaaatgctatttcattgatagtacattttaagatttcaacctcaatttttagctatattaaagtatctcagagatatcttctatgtaaatacacaaaataaaatggattgtaatgaaaacatttattgctatacatacaatagtattttaacaattacaaaagtattatttcttctattgctttctatttaatcaaatagaaaatatgacataacactcctgtgaagtactttggataaattatgtataaaaaatgtaaaatatatagaaatacaaaatattatactcaaatttgaattttttta

SEQ ID NO: 616193 - DNA, 499 bp, Homo sapiens
ggactttgttcaagatgtccatccgtctctactactagtaagtaaatagttctttagcagtactttcttcctggaatcaacttaagattttaacatttggttgataaaatctacaagtgtggtaatgaaagatatttgttccatattttgcttcttacaaatgctcatagctcttatcatawtctcataaataccacaaaagtccagttattttcttgcacaagataaagatttatgctttccaaagactgtgaatatatcatgtcatttttttcatcagtctcatattactaaaaactacatctaagacatctaattaaatgcaaatgaatacaatttaacataaaatgctatttcattgatagtacattttaagatttcaacctcaatttttagctatattaaagtatctcagagatatcttctatgtaaatacacaaaataaaatggattgtaatgaaaacatttattgctatacatacaatagtattttaacaat

SEQ ID NO: 616194 - DNA, 614 bp, Homo sapiens
tagtaagtaaatagttctttagcagtactttcttcctggaatcaacttaagattttaacatttggttgataaaatctacaagtgtggtaatgaaagatatttgttccatattttgcttcttacaaatgctcatagctcttatcatattctcataaataccacaaaagtccagttattttcttgcacaagataaagatttatgctttccaaagactgtgaatatatcatgtcatttttttcatcagtctcatattactaaaaactacatctaagacatctaattaaatgcaaatgaatacaatttaacataaaatgctatttcattgatagtacatwttaagatttcaacctcaatttttagctatattaaagtatctcagagatatcttctatgtaaatacacaaaataaaatggattgtaatgaaaacatttattgctatacatacaatagtattttaacaattacaaaagtattatttcttctattgctttctatttaatcaaatagaaaatatgacataacactcctgtgaagtactttggataaattatgtataaaaaatgtaaaatatatagaaatacaaaatattatactcaaatttgaattttttta

SEQ ID NO: 616195 - DNA, 499 bp, Homo sapiens
ggactttgttcaagatgtccatccgtctctactactagtaagtaaatagttctttagcagtactttcttcctggaatcaacttaagattttaacatttggttgataaaatctacaagtgtggtaatgaaagatatttgttccatattttgcttcttacaaatgctcatagctcttatcatattctcataaataccacaaaagtccagttattttcttgcacaagataaagatttatgctttccaaagactgtgaatatatcatgtcatttttttcatcagtctcatattactaaaaactacatctaagacatctaattaaatgcaaatgaatacaatttaacataaaatgctatttcattgatagtacattttaagatttcaacctcaatttttagytatattaaagtatctcagagatatcttctatgtaaatacacaaaataaaatggattgtaatgaaaacatttattgctatacatacaatagtattttaacaat

SEQ ID NO: 616196 - DNA, 499 bp, Homo sapiens
ggactttgttcaagatgtccatccgtctctactactagtaagtaaatagttctttagcagtactttcttcctggaatcaacttaagattttaacatttggttgataaaatctacaagtgtggtaatgaaagatatttgttccatattttgcttcttacaaatgctcatagctcttatcatattctcataaataccacaaaagtccagttattttcttgcacaagataaagatttatgctttccaaagactgtgaatatatcatgtcatttttttcatcagtctcatattactaaaaactacatctaagacatctaattaaatgcaaatgaatacaatttaacataaaatgctatttcattgatagtacattttaagatttcaacctcaatttttagctatattaaagtatctcagagatatmttctatgtaaatacacaaaataaaatggattgtaatgaaaacatttattgctatacatacaatagtattttaacaat

SEQ ID NO: 616197 - DNA, 609 bp, Homo sapiens
gatatcatggagttagtacctaatgcgctcaactgggtatttctggtgactcattgtcttcagagaaaagtcaccaagacatcaggggattgttaactcctgagggagagctattctggagtttgatgtggtayaattgtgctcaataaatgaaaaagtaatttacaaataaagccatggttggaaacatgaaaattcagaactatctgaaaacattgttatctacaagcagaaataagattattacagagagcctaatatataggaaaaaagaggttaaggtactgatcagaaagaaaaacgacacaacaaagagaaaaataaatggagaatagctacctaacaacaagaaatggaacaaaaaaatacagtgaacataaaccaccctgaaagggagcactgttggcagtgattaaaaaaaaataaaagaaaactgtacggttttcttgaaggactgcctttgactttacctcgtattcagcttcctttgctccccatacacaacatgcttgcaagcctctaataaccattgactagcaacgtgaagcccaagaaatacagtgaatttctgtgtacagaaagaactgcttttattagctgccagacaca

SEQ ID NO: 616198 - DNA, 609 bp, Homo sapiens
gatatcatggagttagtacctaatgcgctcaactgggtatttctggtgactcattgtcttcagagaaaagtcaccaagacatcaggggattgttaactcctgagggagagctattctggagtttgatgtggtacaattgtgctcaataaatgaaaaagtaatttacaaataaagccatggttggaaacatgaaaattcagaactatctgaaaacattgttatctacaagcagaaataagattattacagagagcctaatatataggaaaaaagaggttaaggtactgatcagaaagaaaaacgacrcaacaaagagaaaaataaatggagaatagctacctaacaacaagaaatggaacaaaaaaatacagtgaacataaaccaccctgaaagggagcactgttggcagtgattaaaaaaaaataaaagaaaactgtacggttttcttgaaggactgcctttgactttacctcgtattcagcttcctttgctccccatacacaacatgcttgcaagcctctaataaccattgactagcaacgtgaagcccaagaaatacagtgaatttctgtgtacagaaagaactgcttttattagctgccagacaca

SEQ ID NO: 616199 - DNA, 435 bp, Homo sapiens
ctcaccagtgattacctgctcttctctttcctgtcactaacggtgtccaaaatagtaattactgctttaagggtgtccagataactctgctccaaccagtgagatataagttgacttcacagaatgaggcttctaagaacccataaagggaaacataggctgtgaaaacattttgtcctttgttcttctctgacctggagtgcactaagtgatgttgaagatgaagcaggcaatgaaaaccttttcaccttaatgtccccactaattattaagaaaactatcactcttacctcctaaaacaagccagtagattsaccaactattattttttttttttttagagagactataaattgaacctgtaacagaagcatttaaaaatctgttcagacagaagaactgggtattcacaaccgccaacctgataaactgtct

SEQ ID NO: 616200 - DNA, 470 bp, Homo sapiens
accattattgctccaattgttgcatgtctttccaggtactttctatgtgggtgtatgtgaaaatctgacattatgataatgaattagttatagggcaggagggtgccataacctccaccatagtagattgtatccaaatatgctctgctgaacttaargagtggcctttgttgtctaagtttctttgtaggtgaaagagaggttatatttgaaaggagttatgataaatgatctctggggaccatatgggtactgtgtgcactttaaaccttattcaatagggaggcaattcataagaaatgaaagatctctcattatcaaaaacaaaacagaggttttctttctatttagaaacattatttagtattttcccactgtaaacttgcatattaacttgagcccaattttgtatctttttctagcctgttagtattcaatatagaagcacatgaaacagggagtagtaattt

SEQ ID NO: 616201 - DNA, 508 bp, Homo sapiens
tgaatgatgatgcatttgcttcaggtatctgtaggtctttttgtttcaaacagacacagacaatcaaccaagacatattgttccaaagaagaaataagctaaaccatcttcttaccaaggccagagatagactgttctgatctatttccactctgtaactacttaaagcaattcactttcatttcccacaagaggagatttggaagtgcatcaaagacaaacttgaaattgggttaacccctttgttctcagtttttgccacttggcatcaactagctctctaaagaaaggagaaacttggagtgccacttatgatctgatttcaaaggctataactgaaactctttgggaaataagtggtcatttttgttcaattatttcttgtatttttttctaattaaattagtggaaaccgtttttgcttctaggcactagttaaggtcttgttaaaccagwtcattggaatcgtattttaatttatatactttttaacttcaaaaggagcagt

SEQ ID NO: 616202 - DNA, 508 bp, Homo sapiens
tgaatgatgatgcatttgcttcaggtatctgtaggtctttttgtttcaaacagacacagacaatcaaccaagacatattgttccaaagaagaaataagctaaaccatcttcttaccaaggccagagatagactgttctgatctatttccactctgtaactacttaaagcaattcactttcatttcccacaagaggagatttggaagtgcatcaaagacaaacttgaaattgggttaacccctttgttctcagtttttgccacttggcatcaactagctctctaaagaaaggagaaacttggagtgccacttatgatctgatttcaaaggctataactgaaactctttgggaaataagtggtcatttttgttcaattatttcttgtatttttttctaattaaattagtggaaaccgtttttgcttctaggcactagttaaggtcttgttaaaccagatcattggaatsgtattttaatttatatactttttaacttcaaaaggagcagt

SEQ ID NO: 616203 - DNA, 588 bp, Homo sapiens
aaagacagagggtgcaataagagtttatgaatactatgatgtttgaaataaaaaaataaataagtgattatattttcttaggaagcagggcaggcatgcagcatgtgtaggaatgatatagcaaaagaaattaacttcacgatcagctttaaataaccttggttatttaaccttggcgaaatcaaatacatgatataatgaagataatatatctcatgacttctcattgtattgtgaagattaatgttcaaattactatgcaaatatacatttgtattactcaaattaaggattacatttaataacactctagcaacacacaaattcaatgcttgccttttaagcacagattggaaggtcagaaagtgaaattctcctctctgatccttggaggtttctttcccttccattttaggccggcgttaattgctgataaatggtggcaatttgttagaagcagacagtattgtatctaaccagtggagcagagtaaagcattgttaagmaaaacccctcagatttgatggagatctgtaaaaaacagtataaaggcagcactgaggttagtctccattagaaaaaggaaga

SEQ ID NO: 616204 - DNA, 608 bp, Homo sapiens
taatttatttaaaagacatttgcatgtttgagacaaaaagtgtaccgtggggtttaaaatatacatagaggcagggtgcagtggctcacgcctgtaatctcagcattttgggaggccgaggcgggtggatcctctgaggtcaggagtttgagaccagcctggccaacatggtgaaacccagtctctactaaaaatayaaaaaaatagctggacgtggtggcgggtgtctgtagtcccagctactagggaggctgaggcaggagaatcacttgaacctgggaggcagaggttgcagtgggccgagatggagccattgcactccagcgtgggcaacaagagtgaaactctgtttcaaacaaacaaattaattaattaattaaatatacatagaagtaaaatctacaaattcatagcaaaataggcagtgatatttagaattacatcattgaagggttttctttatatttcatgtaagttgtcatgacattaattctaaattatttgtgtcaatattttctaaattctcacaaagttgatacttagctaataccattttagttacataggactttagttcattgtatatggtgacagtcttaaaccttgag

SEQ ID NO: 616205 - DNA, 510 bp, Homo sapiens
tgggtgttaggattttaacacatgacttttraaaggatacaaatattcaatccattgcagaaataactaataggtcacaagagaaaaacatatcataccaatatattaattttcatttctcaaagaaaaaaatctaatgaaagaaaaacagtcacactattaagatgattatataaaacctaaaggcaaagttatacataaaagcattcacactgaatttaagaacaagagaacaccaactaaaaaaaatcacttttagcactattctgtaattatagcttatgtgattatgaaataaataatatataacagatgtaataaaaattgtagagaatgtactgttgaaaataaagtattttctctgtaggttgcacgcagggttctatatatttttgttatataaaggtcactaatcctctcattcaaattttctgtatccttaagaattttttgtgctggattaatttgtttctgtttgataggtatttaaaaatatccaaaatggtggta

SEQ ID NO: 616206 - DNA, 689 bp, Homo sapiens
ttctgccattgcaaaagaaatcaagctctcttttgggctgctatgatcctgagcacttactcctctattataacactcacaatactgcctgttttattgctatttgggttttttaagtcagcctctaccataagactgtgagctccttaataatctagctgcttgtgttattcgtttctgtataactcctaacatttagaatgtagtacatataatggctaagcacacagctctagggccagactgcctaggtttgaatcctggttacaacactctctagctgtgtgacccaaaggcagttacttaactatttctggccctcaggtttttaatctgagaaatgaagatgacagtgatgtctacttcttktagggttgttttgaggcctaaatgagataatatatttagtgtattaagtatgtaagtgtgtacagaacttagaaaaatgcctggcaaacaataagtacttaataaataagtattaccaagtattgttccgtgctcaacaaatgtttgttaaatgaataaattctaattttctcctggtaaagggagaaaaaacagttataaattgtatctttgttgttttccattgacaaaattattatccaataaaggtttccatcttgaattccttagtgaactgggctgtctgcagtagtcctatcctgtgtttcctaacagaggtc

SEQ ID NO: 616207 - DNA, 615 bp, Homo sapiens
aaagaatgtaactctcaccttttcctcacatcagtttcatacttgtctttctaactacataaaaactaatttcagagtttaaaaaaaaatacttatctccaaattttaaaatggaaaagggtctctttgtaaaggacttttcttctttttctacttggtcacttagcacagccaaaaatatgcagatacaaaagtatgcaggtctcttatgctccaacgcaaaagaaaaaaawaaaaacactaaatacctccagccccaaactcagctcacattccacactgaaagggccttacactttgtgggtctcaactagagtggatcatatcctgataatctcaaactggccagggagatcagttctgaaatcaacttaaggatttcagttcattcaagggatttccctcgaatttggtttgaaaaagagtactattcagggagtgtcttttttttttgtttgtttgtttttcagacggagtctcaggctggaatgcagtggcgcaatctcagcctggatgaatctcagcctggagaatcacttgaacctctgcctcctgggttcaagtgattctcctgcctcagcctcctgagtagccaggattacaggttcacaccac

SEQ ID NO: 616208 - DNA, 605 bp, Homo sapiens
attcaacaatttcatcatttcttctctattacaacaccatgctacattaaacatccttcaagtacagaatcagtactaccatttctttcttttctttttttctttttttttgaaacagagtctggctcttttgcccaggcttgagtgcagtggcacaatctcggctcactgcaacctccgcctcctgggttcargcaattctcctgtctcagcctcctgagtagctgggacaggcgcatgccaccatgcccagctaatttttgtattttcagtagagtcagggtttcgccatgttggtcaggctggtcgtgaacttctgacctcaggtgattcacccacctcggcctcgcaaagtgctgggattactccccgtgagccaccacacccggcccatttctttctttctttagcaacaatagacattgttctacttcctggattccacgatctaaagctaaaagataaggagaatctggcttcctcccaaagcagctatgatgaactcctatcaacactgttttggacagctggaccctgaagggtacactcaggaaaacaggaatatttgtggtcatttccaaacccaatgcatcagggccgacttt

SEQ ID NO: 616209 - DNA, 484 bp, Homo sapiens
cacataggtgcaatgttttgtgctgaatgtaacatgtctatgtcactataaggcaactaagcagaaagaatgagggctggctttgcaattatatagtatcaggcactatatcagtatatagtgactcagatacttactgactctgtgaccttaggcaaagtacttatctctgtaaaatgaggaaatgtcagctattccgtagaatagctaggaagataaaatgatatagcatatgttaaatgacaagtccagagcttggagaggtaattctgcataatttttgcctttcatgttgaggattttgactggactgataagtacattctgttcaaactgtggactgatgtgatctcaggttagaatggcaatggcaatggccatgmtaacaagtgcgaggtaatatctcaatgtagttttgaattgcatttccccaaagatgcggagaaaaggaacccttatatgttgtaggtgggaatgtaaattg

SEQ ID NO: 616210 - DNA, 498 bp, Homo sapiens
gctactgaagcttgtgcatgcatcacgtagttttcagctccatcaggtcatttaaggtcctctctatgctgtttattctagttagccattcttttttcaaggtttttagcttctttgcgatgggttcaaacattctcctttagctcagagaagtttgttactatgaatcatctgaagccttcttctctcaactcatcaaagtcattctccgtcatgctttgtyccattgctggcaaggagctgtgttcctttggagaagaggtgctctgatttttagaattttcagcttttctgctctggtttctccccatctttgtggttttatctacctttggtctttgatgatggtgatgtacggatggggtcttggtgtggatgtcctttctctttgttagttttcattctagtcaggaccttcagctgcaggtctgctggagtttgctggagctccactccagacccttttgcctgggtatcaccagtggaggctgcataaca

SEQ ID NO: 616211 - DNA, 592 bp, Homo sapiens
caaagctacatccagatcattaaacagagtcctggaaggtgctataacaacatcctctattctgtcaccatctcctcaaactcactgtaatggggaaaaaaaaggcctctagggaatagtgcaggtaatagcttagcttatgacttggttatgtgtcaatgtattccctatcacctttgcttgcatttccttatacagcatctttagaatatggttatagycttacctgggcatgtaaaaatgtttattgtgacaagattactaatcccccgttaaaaacaggtaagcagggttttcttctccttaatttttgtatatgtaagaatgaatttcatgttttcttctttcttcatcttttgcaaatacatacctggtaatatctacaataacgatggcctaaacaaacaaattgaaatagaccagaaagcaaaagttgttccacagtttgtgagttcctaggatctatgaaatatctagagttaagagaaacattactagtaaaagcaatgaacaaactcaagttgcattcgatgcaaaagaactgagggtctttattaacatataactaatatccagaaggaaactgtgtgga

SEQ ID NO: 616212 - DNA, 592 bp, Homo sapiens
caaagctacatccagatcattaaacagagtcctggaaggtgctataacaacatcctctattctgtcaccatctcctcaaactcactgtaatggggaaaaaaaaggcctctagggaatagtgcaggtaatagcttagcttatgacttggttatgtgtcaatgtattccctatcacctttgcttgcatttccttatacagcatctttagaatatggttatagtcttacctgggcatgtaaaaatgtttattgtgacaagattactaatcccccgttaaaaacaggtaagcagggttttcttctccttaatttttgtatatgtaakaatgaatttcatgttttcttctttcttcatcttttgcaaatacatacctggtaatatctacaataacgatggcctaaacaaacaaattgaaatagaccagaaagcaaaagttgttccacagtttgtgagttcctaggatctatgaaatatctagagttaagagaaacattactagtaaaagcaatgaacaaactcaagttgcattcgatgcaaaagaactgagggtctttattaacatataactaatatccagaaggaaactgtgtgga

SEQ ID NO: 616213 - DNA, 340 bp, Homo sapiens
caagtcatttttctagtattgcctgtgaagatcttccagtaattcttattctcaaaagagcaagcattctgggccaccttcccttggcagaaggaagcagaagacacttttgtgggcattgcagacagcagtggaggaagtgggcacatgatgtgcagacttgccttccaaaccatgctgatgtgatggaggtcgatctgccaggcagcaattacacattcacgggggaatcgatgcagctaaatttacattgacctcagcraaatagttaggagtggagtaaatcccttcaggctcttttccggggaaatgcaaatagatgtagacatgtatgttcctc

SEQ ID NO: 616214 - DNA, 439 bp, Homo sapiens
gatccactctccttggcctcccaaagtgctgggattacaggcatgagccaccacgcccagccagcatcatatattctatgatcccatttaactgatatgtccagaatagccaaatctgtagagatagaagtagattagtagttgtcaggaaagaaagggtggctgttgggagaaaatggggaggaaatgacaatggatatgaagtttctttttggagtgatgaaaacttccaaaattggttatggtaatgattgcataactctgtgaaaatactaaaatcattatattgtatatttkgggtaaattttatggtctgtgaattttaaagttgttaaaagataatagcaggtctgtagggcaacagcaatgaaagtgaaatttataaaaagatactatttacaatattactgaaaatgaattagaagtaagtccagcaaag

SEQ ID NO: 616215 - DNA, 561 bp, Homo sapiens
tgtagtgcacagctttagatttcacattgacctttggattatgtaagatcactttgggtttttccctgctttgggtcatatggaagagtgctctttctctgtgcacatgagagggaaagggggatttgatggggttggagtggtaggcaggagtgtgatcacgcctttgatatggtttggctgtgtccccacccaaatctcagcttgaattgtaataatctccatgtgtcaagggtggggcaaggtggagataattgaatcatagggrtagtttcctccatactgttctcatggtagtgaataagtctcaggagatctgatggttttataaacaggagttcccctgcataagctctcttgcctgctgccatgtaagatgtgcctttgcttctcccttgccttctgccatgattgcaaggccttcccagcatgtggaattgtgagtccattaaacctcttccctttacaaattacccagtctcagctatgtctttcttagcagtgtgggaacagattaatacagccttgtaggtaggtaagctaggtaaggaatttagatgc

SEQ ID NO: 616216 - DNA, 546 bp, Homo sapiens
cttggggtggcaagccctgactatgaagggcatagtgttccagggctcagagcttagacatggttctgagatgaaggatggtttaatcyggggagtaccatttgacagataactcttgtagcataactccgctggagtggaggaagaccatatccaaaggtagccattaggagtgcgattgcagcgcttcaggggatgaagaagggagactagagtgagaagagcttaaaggaaggagtgacaggactcaagactcactgaagaatggggtaaggaatctcaagagtttgcctttcaaattcttagtttgattaactgtctagaagttgatgctgttaagtgagtaataaaagggaagaggtttggtgggggaaagaaggtgagttccacatgagataagctggaatttggacatctataagagactctgcagacagtaggaaataagtgcctggagctcaagagaattttggagacttgagatatgcctatggctgttatagatggaagcatgaggtgaacagagcaccatgggcagaggaaata

SEQ ID NO: 616217 - DNA, 546 bp, Homo sapiens
cttggggtggcaagccctgactatgaagggcatagtgttccagggctcagagcttagacatggttctgagatgaaggatggtttaatctggggagtaccatttgacagataactcttgtagcataactccgctggagtggaggaagaccatatccaaaggtagccattaggagtgcgattgcagcgcttcaggggatgaagaagggagactagagtgagaagagcttaaaggaaggagtgacaggactcaagactcactgaagaatggggtaaggaatctcaagagtttgcctttcaaattcttagtttgattaactgtctagaagttgatgctgttaagtgagtaataaaagggaagaggtttggtgggggaaagaaggtgagttccacatgagataagytggaatttggacatctataagagactctgcagacagtaggaaataagtgcctggagctcaagagaattttggagacttgagatatgcctatggctgttatagatggaagcatgaggtgaacagagcaccatgggcagaggaaata

SEQ ID NO: 616218 - DNA, 530 bp, Homo sapiens
gtatgggaacggtgtcacatatgtccttggagatttttgtccagtcttctcttacaaattaatacaaccaaagttctctaagttgctaattagatgaatgttggctgcctgattgggaaagtgagatgggaaggattccttttcattcttgaagaaagagagacttcaacaaaattaaactgggctttgaattgccctcaagtgattgttaggggccttaacagcagagaaagaacatggaggaatcagttttccaagacttatctatggttgacactgctgtctggtgtcaaaagagaaccttctaattccccatgtgggctatgttttagaaccttcactttgacttttattccattttgatcaagtttgctaattacattcacatgaacagatgatcctaatctaygatgccattgtcccaaatcactcaggtggggcagcctttcagaggcatctgctcttcttggattcttcagagggtgctgtcaatcaagatgaaatgcaccaagctcttttgtaaagtgaga

SEQ ID NO: 616219 - DNA, 557 bp, Homo sapiens
caaagatagtcagtttgaggtttcttagggacatttagtgctaactggtcatgaaataatagggcttgttagatggaggcttattagccagctgcctttagccaagaggtagcaactgttggaagatgtacaaatttcactggatcgtgggaaagtagatgaccggtggaaagcaagactttcagatgatctttgagaaaatggacttgaatccttgagtcttcctgaaattactatgtacttgttatggyagcttctaggaagatgacatttctgttaaacacagtcagctataatttaggaagatatgcttggaggtaaccagtgagatgaggcaggctgggggagcccaagaactagagacaaatgaccagccatgcagaaggatgtgagcccctctggtatgctcaaccttcctcctgggaagacaaaggtggggtccacctggtggggagggagtagcccctttctactcatttcttctacattctcttcctcactctctccactcagctacacgggcctccttgattttcctctatcactccaagcacagt

SEQ ID NO: 616220 - DNA, 564 bp, Homo sapiens
ctttagtgctgggtattcttgggcaagttcctaaacctgctgagccttagttttttcttttgaaaagtagttataatcatagcaatctgtctctggggattgtttcaaggattrtatgcaaccctaatagctaacatttattgcatgtttgctctgtgtcggttgctcttctgagtattttcatgcattagttcatttaatcctcactataacctctgaggtaggtatttttgttatcaccattttattacagattttattaccatttatattacagaggggtaaactgaagctcagagaagttaagtaacttgtccaacatcacattgctagagtggcaaagccaggatgtaaattcagtatctggcttcctggtctgctcccgtatgcactatactttgagtcttatgtaaaggctgtagcaaagtaccttgcacgcataattcatcggacagtgatttctcacctattgttagaaatagtaacagtgaattccggtgactgaaattgactacagctaagttccctggaatattcataagtcagaatatccatcagtctttc

SEQ ID NO: 616221 - DNA, 568 bp, Homo sapiens
ttcatacatagtagagccttgatccatatggggatcttttcaccacagtgacttttttgtgtgccactgtactccattaccttctcttggagttattctattttttgttttcttccctacccaaatgactcaactgtttttgagttagccacttggactgtggtcaacgtttttgccagtgttctctgtaaagctttgcagttcagttgcatagcagacaacwtttttaaaaattgaagtttataaatatacatatggatgtcaagaacaggtttccccaagtgattcaggagcatattaactatgaaggagaaaagcttgccgactttcagcaatttgtgtgaacaatgacatagagccagaagaatgtggcctgagaaagaaccacagttgtacctacccccttgctggctcccagtggaagggaatggagctgagccagacctgaggcagaacatgattgctcattgtgtaggtgaacagccgggattcattagggctggagacttccatgaaggggccagttacagcaggctccagtggaagggccctttgtcttttccacaat

SEQ ID NO: 616222 - DNA, 642 bp, Homo sapiens
atctggtacatcagacttttatcagtgtctaacatattttaatctgtatatttcatggagcataatcttacctctctctgtgacctccaactctttagtaaaatgttttactttcatgaatgcccttgagcataagctttcagtggaaactgaagacagggctgggtgttatatctgggtcaataacctgtgaacaaagcaccttagacatgggagcccagaagcagaggtgacctagagcscgtaagtccctcaggaatatgcagaagtcttggggagggctttagaatgccattggcatggacaatggatttgacttaatcttatccacatctgggttatactggctagacagaaatggccaacataatggtgcctgggacctaatgacaggtcttagatctgaaaattatttccatctgccccactggggtggccaatcctgatgcaaaagaaaacttctctacctgcctcccctgagaccagctctagaagctgcagttgatttggggtgtaagcaaatggggaaaagtgccatttccatgataaatgagggaatattgtgccccattcccccctcattggggaggagctgtcatcctcactttgtggatatttgaaagtcacaagagcccagcctcc

SEQ ID NO: 616223 - DNA, 604 bp, Homo sapiens
atgacaggtcttagatctgaaaattatttccatctgccccactggggtggccaatcctgatgcaaaagaaaacttctctacctgcctcccctgagaccagctctagaagctgcagttgatttggggtgtaagcaaatggggaaaagtgccatttccatgataaatgagggaakattgtgccccattcccccctcattggggaggagctgtcatcctcactttgtggatatttgaaagtcacaagagcccagcctccctcctcttttattttaaaggggagggaaatgcaatgtttacattttccagttcctaaattccagggcagagaacccagaggccagctggaaaactgaaagcaccagatcagtggcagaaactctattagattccaagcctggtctatgtttaaggaattctgtttgtcagtcatctcaacacctgggcgagagctttagattaaaatgaagagaaagaagtaaaaaattcaggacacaccagatctcatacctgtaaacagaactgctcaaggaaggcagagaattggagttggctggagatattaatctctgaatcagtgtgactgctacctcctactcaactctac

SEQ ID NO: 616224 - DNA, 604 bp, Homo sapiens
atgacaggtcttagatctgaaaattatttccatctgccccactggggtggccaatcctgatgcaaaagaaaacttctctacctgcctcccctgagaccagctctagaagctgcagttgatttggggtgtaagcaaatggggaaaagtgccatttccatgataaatgagggaatattgtgccccattcccccctcattggggaggagctgtcatcctcactttgtggatatttgaaagtcacaagagcccagcctccctcctcttttattttaaaggggagggaaatgcaatgtttacattttccagttcctaaattccagggcagagaacccagaggccagctggaaaactgaaagcaccagatcagtggcagaaactctattagattccaagcctggtctatgtttaaggaattctgtttgtcagtcatctcaacacctgggcgagagctttagattaaaatgaagagaaagaagtaaaaaattcaggacacaccagatctcatacctgtaaacagaactgctcaaggaaggcagagaattggagttggctggagataytaatctctgaatcagtgtgactgctacctcctactcaactctac

SEQ ID NO: 616225 - DNA, 542 bp, Homo sapiens
ccagatctcatacctgtaaacagaactgctcaaggaaggcagagaattggagttggctggagatattaatctctgaatcagtgtgactgctacctcctactcaactctaccccttttacttggttgcagttgtctatgagacagactcagggcccacgtgggttgagagtggagtaagtaggggttgcacatcaaggcatctttacccttgatgatasaatcatcaatggtggaaacacctttgaagaggcttccattctagcatacctaaggaaatgaatcccaagtttggctatccaaataatttattgagtttgtggtaaacactaggcactcccgtatatgctttatatatatttacttaatcctcaccacaaacctaggaggtaagtactattgttgtttgcccccacttcatacacaaaagagcttaggcaaagggtttcagtacctgcccaggtcatatagctggatatccatgtttttgaatccagtctgactccataaggcatgccctgaaatgtgacacaccaccaccacag

SEQ ID NO: 616226 - DNA, 546 bp, Homo sapiens
ctgctcaaggaaggcagagaattggagttggctggagatattaatctctgaatcagtgtgactgctacctcctactcaactctaccccttttacttggttgcagttgtctatgagacagactcagggcccacgtgggttgagagtggagtaagtaggggttgcacatcaaggcatctttacccttgatgatacaatcatcaatggtggaaacacctttgaagaggcttccattctagcatacctaaggaaatgaatcccaagtttggctatccaaataatttattgagtttgtggtaaacactaggcactcccgtatatgctttatatatatttacttaatcctcaccacaaacctaggaggtaagtactattgttgtttgcccccacttcatacacaaaagagcttaggcaaagggtttcagtacctgcccaggtcatatagctggatatccrtgtttttgaatccagtctgactccataaggcatgccctgaaatgtgacacaccaccaccacagtaagcagtaggtccaacggtggcagatct

SEQ ID NO: 616227 - DNA, 561 bp, Homo sapiens
tgtgaatctcatttgttagcacgcctgatgatgtggcagtctgggggagtgagaagagctgtgacttgacttctcagctagatgtatcatgtcagatacaattatcrtcagtctacagagaatatttgagcatccttctaatccctgggacattaagtctagggtctaatcactcccttctcccacctcttttttccccttcccccctctcacagaggcttctctaatcccttgcgattatttgtttgagctgccccctgcattgtcactgtttctacctgactgatatttcattagatcatcatcgactaccaaacatttgactataatgtaaagtaagaattgtggtccaatttgtggtcaaaattctcttgtgtttgtcagttctggtagagcccagtcactgtgaccttgatttgcacaacctgaaagtggtctgtctgtttacactggggctgtatcccatagagacagcacatgggtttgcgctgttcattgaccccttgtttgttgtttgtgggacctactttattcctgccttcgctaaatattgttcttgtt

SEQ ID NO: 616228 - DNA, 567 bp, Homo sapiens
caggtgggatagtttgtagaattcttgggtcttgggaaaacgagattggatttttagggtatagcttatatttcattgtttttaatgtmgtcattctagtgctttgattgatataatatttgttgaattgtatagccaagttttatttatttctttttgagactggatcttggtctgtcacccaggttgaagtgcagtggcacaatcatggtttgctgcagtcttgacctgctgggctcgagtgatcctcccacctcagcttcctgagtagctgggaccacagttgtgtaccaccatgcccagctaatttttaaattttttgtagaaaccagggggtgtggtgcgggggtgggtttgctatgttgcccaggctggtctcaaactcctgacctcaagccattccccaccacggcctcccaaagctctaggattacaggcatgagccatcacacctggccgccaaatatttttagatgcattattcaattattttattcagtaaccaatgctaataaaaataagacctattcagctcatattccaacatttgaaataacccagaagcag

SEQ ID NO: 616229 - DNA, 567 bp, Homo sapiens
caggtgggatagtttgtagaattcttgggtcttgggaaaacgagattggatttttagggtatagcttatatttcattgtttttaatgtcgtcattctagtgctttgattgatataatatttgttgaattgtatagccaagttttatttatttctttttgagactggatcttggtctgtcacccaggttgaagtgcagtggcacaatcatggtttgctgcagtcttgacctgctgggctcragtgatcctcccacctcagcttcctgagtagctgggaccacagttgtgtaccaccatgcccagctaatttttaaattttttgtagaaaccagggggtgtggtgcgggggtgggtttgctatgttgcccaggctggtctcaaactcctgacctcaagccattccccaccacggcctcccaaagctctaggattacaggcatgagccatcacacctggccgccaaatatttttagatgcattattcaattattttattcagtaaccaatgctaataaaaataagacctattcagctcatattccaacatttgaaataacccagaagcag

SEQ ID NO: 616230 - DNA, 558 bp, Homo sapiens
acccctggcaacagcaagagacaagccagagaaagaaaggactaccatccacagccctggaaattctgctctttaacgcagcaaaaagaaacaccaaatcagagtggtgattcagtggcactakgctgcaggaggtacatccacaagttccccaggcatgaactcctagccagcctttcaaaactattgggatattccttttgggaattccccaatttggaacaggcagttttctgtttgtttactagagccaaggcaaatctgggcttaagacaccatctactgcccaaaaagaagtagcaactcagcaggaaaaaaaaaaaaaagatttcaataggtaaattacaaagaatttctaagcaaacatacccagtaaaaaataaaacaagccatacagagacgactaaaataaataatccttcaatgcaaaaacaaagatgtgcacaaaaaacaacagcaaacagggaaccatgacttccccaaatggacaaaacaagggagagtgactgaccctaatgagatggcaatatgtgagctctgaccaagaatttaaaatag

SEQ ID NO: 616231 - DNA, 558 bp, Homo sapiens
acccctggcaacagcaagagacaagccagagaaagaaaggactaccatccacagccctggaaattctgctctttaacgcagcaaaaagaaacaccaaatcagagtggtgattcagtggcactatgctgcaggaggtacatccacaagttccccaggcatgaactcctagccagcctttcaaaactattgggatattccttttgggaattccccaatttggaacaggcagttttctrtttgtttactagagccaaggcaaatctgggcttaagacaccatctactgcccaaaaagaagtagcaactcagcaggaaaaaaaaaaaaaagatttcaataggtaaattacaaagaatttctaagcaaacatacccagtaaaaaataaaacaagccatacagagacgactaaaataaataatccttcaatgcaaaaacaaagatgtgcacaaaaaacaacagcaaacagggaaccatgacttccccaaatggacaaaacaagggagagtgactgaccctaatgagatggcaatatgtgagctctgaccaagaatttaaaatag

SEQ ID NO: 616232 - DNA, 618 bp, Homo sapiens
ataaaattagaaatgaaaaaagacataaccaagaccacagaaacacagagaattattagagactattatgaacaactataatccaacaaattggaaaacctagaagaaatggataaattcctgggcacttgmaacctaccaaggttgaaccaggaagaaatagagaaccccaacaatccaataatgagtaacaaggttgaagctgtaataaaaagtctcccatcaaagaaaagcccaggaccatctgatggcttcactgctgaattctaccaaacatttaaagaaaaattaataccaattttccttaaactctaccaaaaaaattgaagagggaatatttccaaactcattctatgaggctagcattgccctattatcaaaaccagacgaggatagaacaacagcaaaaaagataactagaggcgaatatcactgatgagcccagatgcaaataacttcaacaaaatgctagcgaactgaattcaacaacacattagaaggatcattcaccatgatcaagtgggattcatcccaaggatgcaaggttgattcaaataatatgcaaataaacagacatgatacatgcatcaaaaaaatcaagaacaaaaaccatgtgat

SEQ ID NO: 616233 - DNA, 618 bp, Homo sapiens
ataaaattagaaatgaaaaaagacataaccaagaccacagaaacacagagaattattagagactattatgaacaactataatccaacaaattggaaaacctagaagaaatggataaattcctgggcacttgcaacctaccaaggttgaaccaggaagaaatagagaaccccaacaatccaataatgagtaacaaggttgaagctgtaataaaaagtctcccatcaaagaaaagcccaggaccatctgatggcttcactgctgaattctaccaaacatttaaagaaaaattaataccaattttccttaaactctaccaaaaaaattgaagagggaatatttccaaactcattctatgaggctagcattgccctattatcaaaaccagacgaggatagaacaacagcaaaaaagataastagaggcgaatatcactgatgagcccagatgcaaataacttcaacaaaatgctagcgaactgaattcaacaacacattagaaggatcattcaccatgatcaagtgggattcatcccaaggatgcaaggttgattcaaataatatgcaaataaacagacatgatacatgcatcaaaaaaatcaagaacaaaaaccatgtgat

SEQ ID NO: 616234 - DNA, 618 bp, Homo sapiens
ataaaattagaaatgaaaaaagacataaccaagaccacagaaacacagagaattattagagactattatgaacaactataatccaacaaattggaaaacctagaagaaatggataaattcctgggcacttgcaacctaccaaggttgaaccaggaagaaatagagaaccccaacaatccaataatgagtaacaaggttgaagctgtaataaaaagtctcccatcaaagaaaagcccaggaccatctgatggcttcactgctgaattctaccaaacatttaaagaaaaattaataccaattttccttaaactctaccaaaaaaattgaagagggaatatttccaaactcattctatgaggctagcattgccctattatcaaaaccagacgaggatagaacaacagcaaaaaagataactagaggcgaatatcactgatgagcccagatgcaaatawcttcaacaaaatgctagcgaactgaattcaacaacacattagaaggatcattcaccatgatcaagtgggattcatcccaaggatgcaaggttgattcaaataatatgcaaataaacagacatgatacatgcatcaaaaaaatcaagaacaaaaaccatgtgat

SEQ ID NO: 616235 - DNA, 618 bp, Homo sapiens
ataaaattagaaatgaaaaaagacataaccaagaccacagaaacacagagaattattagagactattatgaacaactataatccaacaaattggaaaacctagaagaaatggataaattcctgggcacttgcaacctaccaaggttgaaccaggaagaaatagagaaccccaacaatccaataatgagtaacaaggttgaagctgtaataaaaagtctcccatcaaagaaaagcccaggaccatctgatggcttcactgctgaattctaccaaacatttaaagaaaaattaataccaattttccttaaactctaccaaaaaaattgaagagggaatatttccaaactcattctatgaggctagcattgccctattatcaaaaccagacgaggatagaacaacagcaaaaaagataactagaggcgaatatcactgatgagcccagatgcaaataacttcaacaaaatgctagcgaactgaattcaacaacacattagaaggatcattcaccatgatcaagtgggattcatcccaaggatgcaaggwtgattcaaataatatgcaaataaacagacatgatacatgcatcaaaaaaatcaagaacaaaaaccatgtgat

SEQ ID NO: 616236 - DNA, 508 bp, Homo sapiens
tgaattcaacaacacattagaaggatcattcaccatgatcaagtgggattcatcccaaggatgcaaggttgattcaaataatatgcaaataaacagacatgatacatgcatcaaaaaaatcaagaacaaaaaccatgtgatcatttcaatagatgctgaaaaagcatttgataaaattcaacatcccctcatgataaaaaccctgaaaaaactaggcatagaaagaacatagtccaaaatartaaaggccatatgtgacaaaccaacagccaatatcatatttaatggggaaaaaaatggaaaggtttccctctaagattgggaacaaggcaaggatgcccactttcaccacttttattattcattataatactgggagtcttggccagagcaattagacaagagaaagaaatcaaggacatccaatgtggaaaggaagaagtcaaattagccttgcttgcagaccaaataatcttatatttaaaaaaaatctaaagactctaccaaa

SEQ ID NO: 616237 - DNA, 508 bp, Homo sapiens
tgaattcaacaacacattagaaggatcattcaccatgatcaagtgggattcatcccaaggatgcaaggttgattcaaataatatgcaaataaacagacatgatacatgcatcaaaaaaatcaagaacaaaaaccatgtgatcatttcaatagatgctgaaaaagcatttgataaaattcaacatcccctcatgataaaaaccctgaaaaaactaggcatagaaagaacatagtccaaaataataaaggccatatgtgacaaaccaacagccaatatcatatttaatggggaaaaaaatggaaaggtttccctctaagattgggaacaaggcaaggatgcccactktcaccacttttattattcattataatactgggagtcttggccagagcaattagacaagagaaagaaatcaaggacatccaatgtggaaaggaagaagtcaaattagccttgcttgcagaccaaataatcttatatttaaaaaaaatctaaagactctaccaaa

SEQ ID NO: 616238 - DNA, 508 bp, Homo sapiens
tgaattcaacaacacattagaaggatcattcaccatgatcaagtgggattcatcccaaggatgcaaggttgattcaaataatatgcaaataaacagacatgatacatgcatcaaaaaaatcaagaacaaaaaccatgtgatcatttcaatagatgctgaaaaagcatttgataaaattcaacatcccctcatgataaaaaccctgaaaaaactaggcatagaaagaacatagtccaaaataataaaggccatatgtgacaaaccaacagccaatatcatatttaatggggaaaaaaatggaaaggtttccctctaagattgggaacaaggcaaggatgcccactttcaccacttttrttattcattataatactgggagtcttggccagagcaattagacaagagaaagaaatcaaggacatccaatgtggaaaggaagaagtcaaattagccttgcttgcagaccaaataatcttatatttaaaaaaaatctaaagactctaccaaa

SEQ ID NO: 616239 - DNA, 508 bp, Homo sapiens
tgaattcaacaacacattagaaggatcattcaccatgatcaagtgggattcatcccaaggatgcaaggttgattcaaataatatgcaaataaacagacatgatacatgcatcaaaaaaatcaagaacaaaaaccatgtgatcatttcaatagatgctgaaaaagcatttgataaaattcaacatcccctcatgataaaaaccctgaaaaaactaggcatagaaagaacatagtccaaaataataaaggccatatgtgacaaaccaacagccaatatcatatttaatggggaaaaaaatggaaaggtttccctctaagattgggaacaaggcaaggatgcccactttcaccacttttattattcattataatactgggagtcttggccagagcaattagacaagagaaagaaatcaaggacatccaatktggaaaggaagaagtcaaattagccttgcttgcagaccaaataatcttatatttaaaaaaaatctaaagactctaccaaa

SEQ ID NO: 616240 - DNA, 545 bp, Homo sapiens
aaaaaatggaaaggtttccctctaagattgggaacaaggcaaggatgcccactttcaccacttttattattcattataatactgggagtcttggccagagcaattagacaagagaaagaaatcaaggacatccaatgtggaaaggaagaagtcaaattagccttgcttgcagaccaaataatcttatatttaaaaaaaatctaaagactctaccaaaaaactgttagaactgataaatgaattcagtaaagtcataaaatacaaatcaacctataagaatcagtagcatttatatacaccaacataatctgaaaaacaaatcaagaaagtaacccacttacaatagctacaaagaatataaaatacctaggagtcaatttaaccagagcaatgaaagagctatacawggaaaactatgaaacactgatgaaagaaattaaagaggtcacaaaaaatggaaagatattgcatgcttatggattgggagaattaataccattaaaatgacaatactactcaaagcaatttatactcaaagcaatact

SEQ ID NO: 616241 - DNA, 541 bp, Homo sapiens
ctattttttttctattgtattccagcgccccatctcttgcctaggatgtagtcaacactcaataaatacttgaaaaacaaaagaatgagttcatcgattcacccttgctcttggcattgtgctcagtggagaaaatgaggaacagagtgattcaaagacttgctgtgggctaacctttctttcaagaagtcccagtatgttagtcccctactgatactgtaacaaattaccacaactttagggctttaaaacagcacacatgtattaccttccagccgtgaaggtcagaagtctaaaatgaatcttacaagactaaaatcaaagggttggcagggctgcattccttctggatgctccacaggagaagctgtttatttgccttttcagacttctagaggttgcctgcctgcctccttgggttgtggttctacagtccatcttcaaagtacatcactccaacctccatttctgtcggcacacctcctttctgactctgaccatcctgcctccctcttacrgggggccttgtgattacattggt

SEQ ID NO: 616242 - DNA, 604 bp, Homo sapiens
aaagtagatctgtaagccacaaaaaaaatacggagcaagtatagcatattgagatgaaacacaaggaaaggacagggagccaataggcacgattctataaagcacacatttagtcctgtacaccatccccagtggaatcttttgttcaaatgaaagcttacatgagctacactagttgacaaggaaaggaatatgaatgttgcctctttttccacagtcacctcggaggagtacatgatttgccagccacctacacttgagtgtgctgcttaaccagtctgcttgctaaaaacacaagactacagcatttttaactgattaaaaaaaataggtctataaatatataatcatacttagwttagatcaagttgaaagtttataagggcaataatggatgaaatgggaagtactcaccccatagtctataattagagctaaatttaatacatgatttaatgtgcaattgatataatccttaaaaaactgcaacaaaccctcaaattacatatagtgaggttctagtatttcctcccagtctacctttatctgacaagtttcaatgagaaagttagaaggcaatctagatattcaaattaggaataat

SEQ ID NO: 616243 - DNA, 604 bp, Homo sapiens
aaagtagatctgtaagccacaaaaaaaatacggagcaagtatagcatattgagatgaaacacaaggaaaggacagggagccaataggcacgattctataaagcacacatttagtcctgtacaccatccccagtggaatcttttgttcaaatgaaagcttacatgagctacactagttgacaaggaaaggaatatgaatgttgcctctttttccacagtcacctcggaggagtacatgatttgccagccacctacacttgagtgtgctgcttaaccagtctgcttgctaaaaacacaagactacagcatttttaactgattaaaaaaaataggtctataaatatataatcatacttagtttagatcaagttgaaagtttataagggcaataatggatgaaatgggaagtactcaccccatagtctataattagagctaaatttaatacatgatttaatgtgcaattgatataatccttaaaaaactgcaacaaaccctcaaattacatatagtgaggttctagtatttcctcccagtctasctttatctgacaagtttcaatgagaaagttagaaggcaatctagatattcaaattaggaataat

SEQ ID NO: 616244 - DNA, 603 bp, Homo sapiens
ttttaaatgactaaataatcttgagaagaaggtctgtttgtgtatgtctagttatatttggctaatcctaatgtagactaaaaatttgccttgccttctctttctcatccaaaataattgcatgcaaatagtaatctactctttatgcaataatgtgaaatgggaggaaacatggccaaatatttctggaagggatagccttcaaatgtgccaggtacagtgcctccaatttttttattgctaatcatagtaggtctcatcttctaatcaaagcttacatatgctacaccagggagtttggatgatatgctaactcaatctaattttacacaatataattcaaaagccaataaaatgtagccttgtyagacacaaaagttttagagggaagaatgtaatataggcaccaaatgttaagtatcctctctgcaggtggtttgtacatttcctgtgtttccaatttctcttttcttttcttaaccatgaaattaaatagatagctttgaacaactaaagaatagaaatgttttcaaagctgattcataatgccatcttttttcctgaaatagaatatcacatgggtgaatagaaagtcatttcaga

SEQ ID NO: 616245 - DNA, 524 bp, Homo sapiens
tttgtaaaaccttaaactagaaatctagcttaagattaattcatatgtaattataaacggaaatataaamcatttaagtctccatcttttttgtctttttcaactttgctttagttcatttcaaatttttatgtatagcttttaaactaacatttctgtcaccaattatggaactcagatattttaaaggcttattttcagtatgccaatatatttaaaagtgacattttacttttaaatattataattaatatttaaacaataagaacatgttcctacatattcaaaataatatcattacacttaacagaattactaccaattcctcaatattatctaatatctattttatattaaaatgtacccattgtcttccatatcacttatgtggatggtttttccaaatccagatacaatttgggacaacacgttgcatttggttaagcctctgcatgtagtcatttttttcttttttatgacagcaatctgttgaagagaccaggctaattgtcttgtcattagtt

SEQ ID NO: 616246 - DNA, 588 bp, Homo sapiens
aattttgaaaataggataatataataaaacctttttttkgggggggggacagagtcccactctgttgccaggctggagtgcagtggcgcgatcttggctcactgcaacgtccgcctcctgggtttaagcgattctcctgcctcagcctccctagtagctgggactacaggcatgcaccaccacgtccagctaatttttgtatttttagcagagaaggggtttcaccatgttggccaggatggtctcaatctcttgacctcgtgatctgcccacctcggcccctcaaagtgctgggattacaggcgtgagccatcgcgcccagcctaaaacattttttttaatgttaagatgctatcataatgaactggagagctattaatgtttattgtgctaagcttgaatactgacagactttattctagcatttaaaatttttgaggctatgaaaatggatggtaatgcagaaacaatacagagatttatatttgcaactcacctttctatgtatttaggactttaaaacacttagtctgtggttctctcaagtaaaaacatttaaagtattgctctctaatttaattcacgttt

SEQ ID NO: 616247 - DNA, 447 bp, Homo sapiens
aaagacagcttgtttaatacaatgctatgaatgacactttcatacaccttaaattattaatgtaattaattatcatgtatcatccttcaattgccagaaaatttggttaatctcctccctctaaattctaaaggttcctaaacactcattttctgaagattcagagaatgtgggtattaagacactgccctcaatgctcctaccctatggctggaatttaactctctatctaattgttcatgacccttctgattttatgactcaggaatattgaatcctgtctcttagaccctatcataatccwggaaacaaagtaatctgaatgactgagatgaaacaaaacacaaaagcagaaacaataaaatttggagtgatcttaaattaacatctttatcagagccaacagatttttctcatgtttgccttatgatagtatcatcatgtggc

SEQ ID NO: 616248 - DNA, 527 bp, Homo sapiens
tatcttctgaccctcttacgatgtgtttcatttctctcctctcttaacagatgtgagaatacagtacaaaggccctgaatattatttctccagtgcctttttatctctctaaaggcacactagtcytgctctgtatgtgtttcacctcttatagtcacacctacatttttaatttggcccaatatgaacggcccacaagtcatagaaggaaatctggaataaaaactctcccaggtggcatgaaagattgcagaatcaaactttctctatatatttatatagtcaatatatctatactctctatatgttttgtgtacatactaattgtcttcctaagcataattttcagtgcaggaagtattatgaaagctccgtggttttctgaagggcatttcagtatatttgcttaataatgtaattaaattcagttggtaataattccaaagttggaatttagtgttgaaaagagaaaagggcattaaagaagagtgatacttattcttatccaagaatactcttggaacgta

SEQ ID NO: 616249 - DNA, 527 bp, Homo sapiens
tatcttctgaccctcttacgatgtgtttcatttctctcctctcttaacagatgtgagaatacagtacaaaggccctgaatattatttctccagtgcctttttatctctctaaaggcacactagtcctgctctgtatgtgtttcacctcttatagtcacacctacatttttaatttggcccaatatgaacggcccacaagtcatagaaggaaatctggaataaaaactctcccaggtggcatgaaagattgcagaatcaaactttctctatatatttatatagtcaatatatctatactctctatatgttttgtgtacatactaattgtcttcctaagcataattttcagtgcaggaagtattatgaaagctccgtggttttctgaagggcatttcagtatatttgcttaataatgtaattaaatkcagttggtaataattccaaagttggaatttagtgttgaaaagagaaaagggcattaaagaagagtgatacttattcttatccaagaatactcttggaacgta

SEQ ID NO: 616250 - DNA, 402 bp, Homo sapiens
tattccatcgcctttcttctttccagccatctctcctactcttcctctctccagcaatgccacagttctccactactgtggttcctgagcaaatgtctctgaaaatgttgtgctctccatctgggatgtctttccataaaaggctccgattcatttttcaaatgtaggggcaaatattcctcatgtgaatgatggttttagcacyaactttctgaggtagaattgctcatcctttctttgttaccacagtaatgtgtgcacgatgctttcacatgtttcatcatacttacatgaaacttttagttcctcacagaccctggacttcaaagacagattctagggctgactcagctttgataccttgataccaagtgaagcattagcgcagaaacagctgtgcaa

SEQ ID NO: 616251 - DNA, 524 bp, Homo sapiens
atactcaaagaaaagttctttgtcttataccaaaagattgataatgagtgtttcagttaaaataaataaaatgctttttcaagcatctaaacatctactggctctgcttgtgtcacataaaagratgtttattctaaaggcagtatttagtcaaagctactcctaaaaactgagaaggcaaataggtatcatcttgagttccaactctcatgaactggtggtagtgacttgaagtactagatgaacaatggatctggggccccaaaagaaagagatctgtcattactcagactcctgttcacagaccctgcttcactgaagattatctagccaattttattgattgatagtaatgcataggtttgttgacataatcaatgcatatataaaccaagttatcaaaatgaagagaaaaaggtcataattacttggtgttggtaattaagttagccaatcctagtaagtattttgaaattttgtattctaagtcccctgcttttcctgtttatgaaatctgagataac

SEQ ID NO: 616252 - DNA, 534 bp, Homo sapiens
tctgtcctaagaaacaaagggctgataatatagtttataggcaggaaagtgaagatagaaaaccttgtattacttaaaggttgttgaaaatttccacagcagcctgtcttgatattctcaagttaccatactcttcatttcaagaaaccttaattttcattrtattcccatgatattcccaaatcttaatttgcatatttgcttcatcaaaataaaactttatttacagaaatactactcataccactaattatcctacttgaaagcatagtgtgaggttcacctgaatactgaagtttatatgcttaatgctatgaagaatacattattatttttgccctattgaggtaggaagaacactttaaagaagtaaacattttggaaaaaaaatgaattacatctaaaaagtaatatcaataacagagagggaaaaataagaagaaaatactgggtggtcagtatcaaaattatgttcatctaagtgtacagttcatgctgtttcccatgtaagagatcaaaatacactgcccccag

SEQ ID NO: 616253 - DNA, 621 bp, Homo sapiens
cattctctctctccatgatctagagcacattaaagttatttaactctgaaactcttcttccccacttgtaaaatggaaaatattagtccttacaacctagagtttttataataattacatgagctgaaacatgtaaagtgcttagcacagtgtctgacatatacaataaaaagctttatatgtgttacttatgctattatttgagatgtttgcattttgcttccttggggacataatcccacagccccataattctcaactgactttgtccttagtaacacagagctgtgagaccatcagatgacatctcctgcccaggaaagagtttttccaaaaggaactttcccggaacaagggagagaccacttctataggacactgctaggccaagtacatatcatgccttgtaagagtctatacaaataaactagctgtccttttatatttgaccacgccattaactaattgaaaatgccacccattcccttttctgtaactactctaytttcctagtgctactttttttctgtatatattcttatggtcaaaccaggaaaaatctatctggcactctggactgtgcttcacagggaacaactcccttcctccacatccctagta

SEQ ID NO: 616254 - DNA, 530 bp, Homo sapiens
tacctacattttatatgtgacactacattgattgaaatctgtgagtgacttatttttcctactcttccatcatagtaatggcctattctattgtaacatttttttccctaaggtgtattttttggataaaaccctgtgcccatgacagaatartaccataacccattattctatgagtgtttcctcactggcacacttataaaaatgtttgttggtttctttgtgtaaaaatacttttaatcttggcttgtaacagaacataaagtacccttgccttcatattaatcaatttcatttaagccttttttttttctttttcagtttcctggtttagccaatacataattagactcacatgtgatattaaatatacaatttcaactttctgcctcaggagaatgataagaataaactccacctgaatttaattcattcaggaatgtttttgctcatatttcccaagcagtctgtagccagatcatgcagtcacaaacgtaacccagtgacaacatctataggtcacaaaagag

SEQ ID NO: 616255 - DNA, 634 bp, Homo sapiens
tagatgtatatgtacatttctaactagatcaggaatttattaagattaaaaatttaatcttctatgtctttgcttctttctcagtacttttagaataacatataaaaaaggactcaataaatacctactgaacacatgtattttactttgagatgaagggaaaaagaataaatgcaaactgtttttgtttgaaatttgtaagttaatttcatttgtctcaaataatatcaagatagtttcagtagacagtcaactatattgtattatattaagcttgatttttaatatttataataaatcagcatgttctaccatactataaaaatttattaatggttagcgtttcaccaggagcagtgatctaaaagaatcctttttaaagttcaccgtttaattcctttatcctttatattatttmtttccttgttcttcagaagtttgagatagcagcccatggggaaaaatggcacccaatttgcaagcacagcaaaataaaattagaaatccttattaaagtatatatgagaaggaatatggaatatgatacattgggttggaggggcacaggttgaagaagtgatagagagtaacatctctgagaaaaaaaaagtcagtaaagctgttacaatatttt

SEQ ID NO: 616256 - DNA, 373 bp, Homo sapiens
tgagtacagtatggttttgtttttgaagttccttatatagtagaagataaatgaagaaaacatgaagtttaaaagattatggtacccatcaatcatcataaaaccacgtcattaaaaccacaatgagaaaccatcttacaccagtcagaatgattattattaaaaagtgaaaaaataacagatggagagaaagcagagaaaaagtaatgcttatacactgttggtaggaatgtaaattagyatagcctttatatatacttggaaaacagtatgagattcctcaaacaactaaaaatagaattacctttcaacccaaaaggctaatctcttggtatctacccaaaggaaaacaatttttttatatcaaaaagat

SEQ ID NO: 616257 - DNA, 650 bp, Homo sapiens
tctttgtcaggcaatggaacgatattatgaaactaaaactctggctgattaacagatcatttaaattgagactgatagatcttaaaattacttctcagggggaaaaagttacaatgctagagtgtacctagaaaacagaaacttgagtagacatggtaatgaccagaaaaggctatctttatacatttcttttgctacgcttcaaattcatgtcacctaaaagttgtgaagtgcacaaaacaaatctacttaactgaaaaktattttcaatgaatgggatgtttagaactctgtgagggtttttaaggtcttttcgaatagcaaattctaatgaggcttttttaagttggcaatttaaactcatacaagaaataaaaactcaccagtgtggctgggcagaatatatatattttctcaaatattgtttgtttgttttttccctgcactgtatccatggtcccatgatgaaactgttatattgctgatatatttattggaatatgtgggccaacttcctttccactcaacatatggattggtagtttaaaataattcctttctattaagcaaatgtgtggctaaggcacatttaaatagcccattaaaccaatgagatgacaatgtgttaccctcagagaaagcttaatttt

SEQ ID NO: 616258 - DNA, 666 bp, Homo sapiens
cctatagaccagggtttctcaatgttgccctctcactattctggctagataattctctattgtggtggctgccttgtgtattgtaggatgtttttctgtatccctggcctccacacactagatatcagtagcactcctcctttagtgtaaaaaccaaaaatgtttctaaatattgacaaaatatccataacagagcaaaattgtccccccccaaaaaaaaatcaatcacaaagcatagaccttactagacttgtatttaaacagtttaaaatatgagaagtagtgcaaaactgaacactgactattgggtgatattaggtaattgcaaatattttagatgtgataatggtatcatcaatgttttctaaaagtgctcttatcactttagaaaattaatacacactgtaatatttgcaaatgaaatgttattatgtctggaatttgcttcagatatttrgagggcagatgagagagtggagctacagacagtatagaggcaacacagttgaccattagttaataattgttgaaactgggtaatataattcattacactgttctctcttcttttatatatgtttgacatctagaataccatcttctcacaagtgtggaatgcataataagatagtgccctgtaacttagtcaaattgctgagaaggaga

SEQ ID NO: 616259 - DNA, 528 bp, Homo sapiens
ttcatcctggcccctggcccaatcgcaactaaaaaagcattttagcacaaagcggatgagataatggcaatcataccgcactttaaaaaattcaatgctagccttttggtacaaaattaggtttacaccaaaataatcacattatccttgttttttgttgttgttggtggtggtggtgttttttgttttttgtttgtttgtttgttttttgtctttttgagacaaggtctctgttgcccaggctggagtgcagtggtgtgtgcgtcaccatgcttggctaatttttaaatacatttgtagagacagagtcttgctatgttgcccaggttggtcttgatctccasgcctcaagtgatcttccatctctataaaaatacaagaaaacgcaagatggcagccaccacgggctcgggagtaaaagtccctcgcaatttccgactgttggaaaaactcgaagaaggccagaaaggagtaggagatggcacagttagctgggatctagaagatgacgaagacatgacacttaca

SEQ ID NO: 616260 - DNA, 360 bp, Homo sapiens
tgacacttacaagatggacagggatgataattgggcctccaagaacaatttatgaaaaccgaatatacagccttaaaatagaatgtggacctaaatacccagaagcacccccctttttaagatttgtaacaaaaattaatatgaatggagtaaatagttctaatggagtggtggacccaagagcatatcagtgctagcaaaatggcagaattcatatagcatcaaagttgtcctgcaagagcttcggcgcctaacgatgtctaaagaaaatatgaaactccctcagycgcccgaaggacagtgttacagcaactaatcaaaaaaaaaaaaaaaaaaaaaaaaaaaccacaggcccttccc

SEQ ID NO: 616261 - DNA, 562 bp, Homo sapiens
catactgggtaatgagctacaataattaaggggagaaaatgtaccctactctttagatattgacagtttagtaaataatctttttctttctacattggtctggtaagtaagaggaagatttgtgatgaagtcaaagaattacagttatcccatataaaagtttatctttctttggcctgtagtaattttagttgtatttaaaggtgcaaaagagtattttcagaaaacttaatacagatatatatatatatatatatatatatatatatatatayacacacatacacacgcacacacacacgtgtgtgtgtgcgtacactttttccttaactctgtaaataatctgttgccttgttgcctcatagggtgatatttatattcttaacattctagaataagtttctatgtatagtttttatcttttgacaatctgatcttgcctaacactagtgagaccactaactctaggaacatcaatattatttagtaagagaggaaagcctttgcaatgtggtgattattaactcagttttcaacacaatgatccttttatatttttaaa

SEQ ID NO: 616262 - DNA, 636 bp, Homo sapiens
tctttaagtctactgggtaacgccaaattgctagaatagttgactgtcaatgcctaaaaagactagaatagcctgttgataaggcagagcttactgcacctacttcgcaaaggaagaacactatcttgactgaatttagtattgtagtatctcagtaggtgctatcctggatttatataggatttgggtaactgagctgaagttttaagatggatgttttaagtcagaaaaatgattgtcagtgagaaaaaatcattacaatcacttagaattggtgaacatggtgaagggaggattgtttgataaagaagctccttgtccaggtgagaagaacaaactatttttctggatacattgattaacagaaatttcttgaagcaaacagtgacgttatttatcaacttaaagccttaccttcacaaccaagaatctcctggaatagttacatacacaggcggcctctaatgctgatagataakctaagtggatgcttatatttttaattcttgtaatcatatgtgtggcaattttccttgatatgatcctctgccaaacttgatttcatttcgttttgttctttgattttttccagtctgatatgtgtaagaggtgccttggtgtggtttaagttatatg

SEQ ID NO: 616263 - DNA, 444 bp, Homo sapiens
agctacaaaaatctattgaatagcatcaaatctcaaagaaataacggccaagagagtttttatttttcattgtaactgagaaagattataaaatattaattttcacctagccttgaagataatggctttgtgcatcaaaatgacttagatatccccaagggaaccaaatatcagaattccatcatatgtaggacagttctttcttttggcagccaaattttgcaactaacatccagcaaagatcaaagagcatttttggactcctgacatccttgtgaagtatttgtccatttttctgtgcattacagtaatcttggagtgctatgtcttgttccaacgaactgcrgggtaacgaatgtgccagagatgttctttggcagaatggagaagactgaattatccaagtaaatctgaccagcacaaggacctgttgtaacattgttt

SEQ ID NO: 616264 - DNA, 475 bp, Homo sapiens
ttattggaataaaatattatgattagactacatggaggaccaccccaaatgccaccccaaaatattccatttgacgtaagtattattttgagctacaggcaaatgagatcaacagattcagaaagaagtgttcttggagcttctcttctctaaaagcagaaactggccaggcacgstggctcatgcctgtaatcttagcactttgggagggcaaggtgggaggatttcttgagctcaggagttagagaccagcctggacaactgtctgtacaaaacaatagagaaagtagccaggcatagtggcacaggcctgtagtcccagctgttggggaggctggggtgaaagaatcacctgagcccaggaggtcgaggatgctgtgagctgagatcgtgccactgcactccagcctgggagacagaacaagaacctgtctcaaaaaagcaaaaacaaaaataaaacaaaacaataacaaca

SEQ ID NO: 616265 - DNA, 592 bp, Homo sapiens
atatgaccttggttattggaataaaatattatgattagactacatggaggaccaccccaaatgccaccccaaaatattccatttgacgtaagtattattttgagctacaggcaaatgagatcaacagattcagaaagaagtgttcttggagcttctcttctctaaaagcagaaactggccaggcacggtggctcatgcctgtaatcttagcactttgggagggcaaggtgggaggatttcttgagctcaggagttagagaccagcctggacaactgtctgtacaaaacaatagagaaagtagccaggcatagtggcacaggcctgtagtcccagctgttggggaggctggggtgaaagaatcacctgagcccaggaggtcgaggatgctgtgagctgagatcgtgccactgcactccagcctgggagacagaacaagaacctgtctcaaaaaagcaaaaayaaaaataaaacaaaacaataacaacaaaaagcaactcctaagaaataagagcaatctcctctcctgtggaagttttacagctatgaagaagatggaaagttggcaccaagatggacctgcacaaccttacc

SEQ ID NO: 616266 - DNA, 589 bp, Homo sapiens
ttcattataattttatgcttctcttcctttctctactaagacctagtcagagcagatggcctttttgcagctctgtagccagggtagttggcttttctggtataattttgcatcttttcctttcttcacagttccctcttaaggtagctagcttaattggggttagaaatgtactcatcatgtgcaacattacttaaatataaaatttcactgtagcatygatgaaaactttttaggctcaaaaatgtcatcaacaaagagtctggtgcttctttaattatccgatttccaaagctatagtacataattccttgtttaatcagagcttaaattctgaagaaactcatatggatgacatttcctctcaattttgaatggggattattttaagaggatacagaacttagaaatatttcaatggagctgatatttaaagcatatttagtggcatttatgttttaatctgcttattgactaggcattaaagggagctgttagcattttagcagtgattaaaagaaccagaaattttttgatataatgagcaaggcagtatttccagaatgtggtgctaataattttttttaac

SEQ ID NO: 616267 - DNA, 506 bp, Homo sapiens
tcagaatcaacagccacaaaagtaattatgaaagcaataataacaattgttacccagggtcaatatgaggctctgtacaagatatcagacatgctarggtagaaaaaaacaattcttctctcaaggaacttccataccaaattgtcattctgtagtacaatacctggcatatctagatagtcaataatacttactgaataaatgaatgagtgaatgattcggccccaatcaccaaggcaatttattgaatgattactgacttcacaatcagctattacaatctactccatttaggctttgtttgcataatggcaaaacacccatcagatcagtaactttagagaaacaaatagatttttttttttttgagacggggtctccctctgtagcctctgtcatccaggctgcaggctgcaggctgcagtgcagtagctccatatcagctcactgcagcaatgacctccccatcttaggtgatcctcccacctcagccttcagagtacctg

SEQ ID NO: 616268 - DNA, 602 bp, Homo sapiens
gctgattataaagctagtttatgaccttactcttatgaaataaggaaatagagctataaaatgttagctaaagttaaccaagttgactggcttgtgttgaattgcaatgcagccatactttttattccttcttgaacacatgtaaaataagaatggcaatgtaagagttattccattcaccaaaattagaaaacatattagatacattttttattttccttagagacaggttcttgctctctcacccaggttggtgtgcaggagtgcaatggccactcacagctcactatatcagtmcagctcactatatcagtccagctcactgtatcctccaggctcaagggattcttctgcctcagcctcttgagcagctaggaccccataagtgcaccaccaaacatggataatgtttaaaatggcagttgggtctttatttttggagctagagtatctcacaatcttgcccaggctggtcttgaactattgggtgatttttccgcatctgcctctcaaagtactggggtgacagggtgagccaccacacctggcctagatacgttttaattagacttttttgggactgtgtctatttaaaagaacaa

SEQ ID NO: 616269 - DNA, 401 bp, Homo sapiens
catttttataaattatattttcaagtaacttgttcatttcttttttttttttctcattaaacttttttaatgggtctcaaaattctgtgacaaatttttggtcaagttgtttccatttaaaaagtactgattttaaaaactaataacttaaaactgctgcatgcgaaaaaraaaaccaaagtggtccacaaaacattctcctttccttctgaaggttttatgttgcattattatcattaaccagtcttttactactaaacttaaatggccaattgaaacaaacagttctgagaccgttcttccaccactgattaagagtggggtggcaggtattagggataatattcatttagccttctgagctttctgggcagacttggtgaccttgccagctccagcag

SEQ ID NO: 616270 - DNA, 641 bp, Homo sapiens
gcccttcagacacctgaggcgactctagccacacccccctcaacttctctaggacccataataatgagtaagtcaagtggagatcgcaactttgagggtaaacagccaaacacccctcagcacctactgatgcctgtgttatcgccctgaaggatttcttcaggttttgaagagcgaygtgagagagttttcttgcattgattctagcccctgagttgttggaagggacacttctcagtatggcaaagtatttcattccctgaagctaaggcttagcagatgtctcctgatgaaagccactaagcaaaggcttgaaaaatcacctaaaactatagaaacaccgggaaggtgctaattgaagcaggagagcctgggcttctagtgaaattctcagaaataaaaaaaacaagaatgtgattagagaagtctcactggatgccatgggataaataacatgtatataatatatgagatgtgtatatatatttatatatttatacacatcatgcatagtatatgtatctatatccttttatttaaaaaatgatggtacactatacactgttatgtacactgtttagccacttaatgctaaatctgggggactgtttcatagctctccttatagaaaagtcttgtta

SEQ ID NO: 616271 - DNA, 529 bp, Homo sapiens
tacaatgtttgggtttccattcctggagttacttcacttagagtagtagtctccaatcccaacaaggttgctgtgaatgccactaattcattcatttttatgactcagtagaatttcatcatatatatttaccacagtttctttatccacttgttgattgatgggcattttggttggttccacagttttgcaattgcaaattgtgctgctataaacatacatgcacaactgtctttcatatgatgactctttttcctctgggagatactcagtagtgggattgctggatcaaatggtagttctacttacagttctttaaggaatcatcacactgttttccgtagtggttgtactggtttacattcctaccagcagtgyagaaatgttcccttttcaatgcatccatgacaatattcattatttttttatttttggattatggccattcttgtaggagtaagttggtagtgcattgtggttttaatttgcatttccctgatcattagtgatattgagcattttttatgtg

SEQ ID NO: 616272 - DNA, 529 bp, Homo sapiens
tacaatgtttgggtttccattcctggagttacttcacttagagtagtagtctccaatcccaacaaggttgctgtgaatgccactaattcattcatttttatgactcagtagaatttcatcatatatatttaccacagtttctttatccacttgttgattgatgggcattttggttggttccacagttttgcaattgcaaattgtgctgctataaacatacatgcacaactgtctttcatatgatgactctttttcctctgggagatactcagtagtgggattgctggatcaaatggtagttctacttacagttctttaaggaatcatcacactgttttccgtagtggttgtactggtttacattcctaccagcagtgtagaaatgttcccttttcaatgcatccatgacaatattcattatttttttatttttggattatggccattcttgtaggagtaagttggtagtgcaytgtggttttaatttgcatttccctgatcattagtgatattgagcattttttatgtg

SEQ ID NO: 616273 - DNA, 424 bp, Homo sapiens
ttagtcctttgttggatgtatagattgtgaagatttcttcgactctgtgggttgtctgtttactcagctgactgttccttttgccgtgcaaaagctcttcagttaaattaagtcccagctagtcccatctatttatccttgtttttattgcatttgcttatgggttcttggtcataaaatccttgcctaagccaggctctagaagggtttttccaatgtcatcttctagaattgttatagtttcacatcttagatttaagtccttaatccatctyaagttgatttttatataaggtgagagatgaggatccagtttcattctcctacacgtggcttgccaattatactagcaccattggttgaatagggtgttctttccccactttatgtttttgtttgctttgtcaaagatcagttggctgta

SEQ ID NO: 616274 - DNA, 658 bp, Homo sapiens
gctatatggtatcttagtgcaaactagcaaaaggtttggaccagcacagttcctcaggaaggagtgtggtgggtgaaactaggctggacttctgtttcctctcatccgctcggatargctttcttgggttgcaactccagtgatgttttgtctttcccttctaggaacacctctgagtgggaatgtttctatcttaatggtagtttgaggttgtacaagcaatacaattcttatccaactacacttaacctacctgtagctcatttcttcatttgcaaaatgaacaaagatatgatctctggtgacctccaactttgaacactattatctatgattgaacatgataaacctcttcatcattttaatgggagaaataatgagtttctgcatttggtgggagaaagagaatactatgaaaaaaaaagtaggcttaaaagaaaagcaatgtgggcaatttcaaatattacagtttggattctgggctttcaataggattaagtataagtaatatgctttcttaataaaggaagttactaagaagaatgtaggtgtgttgcacatctgcaagatgcaaatactggcaaatatcagtgggttgattattaagctgaaactgaatatgtaacatttgaaagacattagtaaaatgtatatttta

SEQ ID NO: 616275 - DNA, 444 bp, Homo sapiens
  misc_feature 65, 66, 67, 68, 69, 70, 71, 72, 73, 74, 75, 76, 77, 78, 79,80, 81, 82, 83, 84, 85, 86, 87, 88, 89, 90, 91, 92, 93,94, 95, 96, 97, 98, 99, 100, 101, 102, 103, 104, 105, 106,107, 108, 109, 110, 111, 112, 113, 114, 115, 116, 117, 118: n = A,T,C or G
  misc_feature 119, 120, 121, 122, 123, 124, 125, 126, 127, 128, 129, 130,131, 132, 133, 134, 135, 136, 137, 138, 139, 140, 141, 142,143, 144, 145, 146, 147, 148, 149, 150, 151, 152, 153, 154,155, 156, 157, 158, 159, 160, 161, 162, 163, 164: n = A,T,C or G
aaatatgttagcagcagtttataaccactaaaattaagtcactcaaaccgaaaccaactatactnnnnnnnnnnnnnnnnnnnnnnnnnnnnnnnnnnnnnnnnnnnnnnnnnnnnnnnnnnnnnnnnnnnnnnnnnnnnnnnnnnnnnnnnnnnnnnnnnnnnctaattcccaaccttcrtgcaaggcctaattcaaagggcatctcttccataaagggttccttgacctcttcagctggttatagtctttccctcatcagaagacccaaaacagtctatgtgtacctctcatgacacttggtttatgttttttttttttcagacactggttttgtgggagcaggatttatatctgattcttccttgcatactctatggcaccttgaacactgctttgctcaaagtactaaaaaactgtttaagatttgttatctgaactttg

SEQ ID NO: 616276 - DNA, 432 bp, Homo sapiens
  misc_feature 65, 66, 67, 68, 69, 70, 71, 72, 73, 74, 75, 76, 77, 78, 79,80, 81, 82, 83, 84, 85, 86, 87, 88, 89, 90, 91, 92, 93,94, 95, 96, 97, 98, 99, 100, 101, 102, 103, 104, 105, 106,107, 108, 109, 110, 111, 112, 113, 114, 115, 116, 117, 118: n = A,T,C or G
  misc_feature 119, 120, 121, 122, 123, 124, 125, 126, 127, 128, 129, 130,131, 132, 133, 134, 135, 136, 137, 138, 139, 140, 141, 142,143, 144, 145, 146, 147, 148, 149, 150, 151, 152, 153, 154,155, 156, 157, 158, 159, 160, 161, 162, 163, 164: n = A,T,C or G
aaatatgttagcagcagtttataaccactaaaattaagtcactcaaaccgaaaccaactatactnnnnnnnnnnnnnnnnnnnnnnnnnnnnnnnnnnnnnnnnnnnnnnnnnnnnnnnnnnnnnnnnnnnnnnnnnnnnnnnnnnnnnnnnnnnnnnnnnnnnctaattcccaaccttcgtgcaaggcctaattcaaagggcatctcttccataaagggttccttgacctcttcagctggttatagtctttccctcatcagaagacccaaracagtctatgtgtacctctcatgacacttggtttatgttttttttttttcagacactggttttgtgggagcaggatttatatctgattcttccttgcatactctatggcaccttgaacactgctttgctcaaagtactaaaaaactgtttaagatttgtt

SEQ ID NO: 616277 - DNA, 205 bp, Homo sapiens
ctcccatttataagtgacaatatgtggtatttggttttctgttcctgtgttaattcacttaggataatggcctccagctgcatccacattgctgcamagaacatgatttcattttttatggctgcatggtattccatggtatatatgtatgacatttttttttttgtccaatccactgtggatgggcatctaggttgattccatg

SEQ ID NO: 616278 - DNA, 412 bp, Homo sapiens
aaatacaaattctcacatatctgtcgtcatactaaacagttatcagtcttttccatattttatttatttatttatcccttattattmtttgtgttttagctatttttgaagcaagtttcagactgtcatatgctgctctctctatataaagagattttttatgaggaaatggcttatgtgattatgaagcctgagaagttctatgatctgctgtcagcaagctggagactcgggaaagccagtggtgtagttcaacctgagtccaaaggcctgagaactgggggagccagtaggtcccagtccaaggataggagaagactgatgtctcagctcatgtggtcaggcagacaggagaattctcccttcaccttttgttctattcaggctctcaacaaattgggtgctgccctcc

SEQ ID NO: 616279 - DNA, 412 bp, Homo sapiens
aaatacaaattctcacatatctgtcgtcatactaaacagttatcagtcttttccatattttatttatttatttatcccttattattatttgtgttttagctatttttgaagcaagtttcagactgtcatatgctgctctctctatataaagakattttttatgaggaaatggcttatgtgattatgaagcctgagaagttctatgatctgctgtcagcaagctggagactcgggaaagccagtggtgtagttcaacctgagtccaaaggcctgagaactgggggagccagtaggtcccagtccaaggataggagaagactgatgtctcagctcatgtggtcaggcagacaggagaattctcccttcaccttttgttctattcaggctctcaacaaattgggtgctgccctcc

SEQ ID NO: 616280 - DNA, 412 bp, Homo sapiens
aaatacaaattctcacatatctgtcgtcatactaaacagttatcagtcttttccatattttatttatttatttatcccttattattatttgtgttttagctatttttgaagcaagtttcagactgtcatatgctgctctctctatataaagagattttttatgaggaaatggcttatgtgattatgaagcctgagaagttctatgatctgctgtcagcaagctggagactcgggaaagccagtggtgtagttcaacctgagtccaaaggcctgagaactgggggagccagtargtcccagtccaaggataggagaagactgatgtctcagctcatgtggtcaggcagacaggagaattctcccttcaccttttgttctattcaggctctcaacaaattgggtgctgccctcc

SEQ ID NO: 616281 - DNA, 502 bp, Homo sapiens
gtggtaacagtcaatttcaactggaatttttctgtactattgtttcccaaatgatcataatgtctgatttctttctcttaatatttgtgtcctcattgtgacttatttgggatacattgctatgtgagtctgagcaaatattttgggtacttagccagtacttttgagtcagcagagactggtataatatctccagcaattttgagctctaactctgcagctacaactacctttcctagatatactgcctggaaccaaatatttctttaccctaacttcgaacgcagctctgttcttgaattgactgcctgattggtatctgtctcttcctcccatctttacttacttgtgcttgttgcaggcatttttttttaacactttgcttttaaaactaatgttatacttaatgttggaggggaatgtgttgtctgtattctaaaataatttacacctgtrttagtgtttgtaactgtcatccaaagtataaatattaaagtattgt

SEQ ID NO: 616282 - DNA, 259 bp, Homo sapiens
ccaccacaccctgccactttgcttaactttattagttattcttgcccattattttcttgtggatgtgaaaatgaattgtatgtgcatcagaaaccatatttttagttcgttaactcatggcagctgctgagccatggtgagatctttaagaaaggtaatagaaacacttgtctaagaaaatggtaggaatctaagttaactgatgtgaaagagctgtgtatacrtctctttattgtgctgttttatataggtttataat

SEQ ID NO: 616283 - DNA, 493 bp, Homo sapiens
ttctgtgaagaaaaggcagcttctctctagattagctctgatcagctaattgtgcagtctctgaatgcagtattggatgatgttttcagttttcttgtttctgtggagtgaaaagaccatttattcaagctgagccaactatctgggactagcaaattctacatcactcrgcgtactcctgtggttttctggtgatacttgttttatgttggctccttttctgctactgaggtagagactaaattgaccaccttttaaggattactaaatctagtcttttaggctagaagtatgtgattagtaaatgttttacttcctaagtgaagggttgtctgtggtttctatctcaaattttggcaaattatatttggaagtttaataaattttcattgctgttacatcagtggcattcatatcaatgaataaagcagatttttctaaaacaagggtgaaaattttatcattaatatatcgttaatagtaggcatacctg

SEQ ID NO: 616284 - DNA, 493 bp, Homo sapiens
ttctgtgaagaaaaggcagcttctctctagattagctctgatcagctaattgtgcagtctctgaatgcagtattggatgatgttttcagttttcttgtttctgtggagtgaaaagaccatttattcaagctgagccaactatctgggactagcaaattctacatcactcggcgtactcctgtggttttctggtgatacttgttttatgttggctccttttctgctactgaggtagagactaaattgaccaccttttaaggattactaaatctagtcttttaggctagaagtatgtgattagtaaatgttttacttcctragtgaagggttgtctgtggtttctatctcaaattttggcaaattatatttggaagtttaataaattttcattgctgttacatcagtggcattcatatcaatgaataaagcagatttttctaaaacaagggtgaaaattttatcattaatatatcgttaatagtaggcatacctg

SEQ ID NO: 616285 - DNA, 525 bp, Homo sapiens
gctgcctagaagaaccaaggcttttgccatcttccatgcagaaaatctgatccttgtacttgtggctgccacctgatstaactgtaatccacttcccaagtctcatacttatctgcatggcaaaacctagattgcatgtggacccctaactgtacacgagtcagggaaatgtgtttggtttttatcttgccagcttccttagtacaaaaaagcctgcttgattattagagtaagagtggaaagacccagtctggcacagaatggattttgaagtgtgtaaagccaatgtcacaaactcagaggcctacagagattgggcatatagcccaaaaaagtgaagctgcctgagattagtaccacagagtatggcagaattatggtgcactaaacatgtttgccctattagaggcattcacattgacaaattgtgaggccctctgcaggccaacaaaacacatctccaagtccaattcaatcctctggaccctagtttgcatccactgatcctgagcctgaatttctaac

SEQ ID NO: 616286 - DNA, 449 bp, Homo sapiens
ggttacactacttataggggatagaacttagatttaaattcaagctgtctaactcatctaaagcttgtgagcataactatgactgtactgtcctatgatatttggtactaaatwtgtgataatgacagcagaggtaattggcattttcctgtttatcttcatagcatggtaaacaggtagggactctaacttgccttacatgctgtaattgattaatggaagatctggagctagagccccagtctgttgtgggtcctgtcctcattcttctatacctaacttttgaaagtattattctcatttaaaagctttttttaaaacaaaactcaaggagtaaacatcaagaaaatagcaacaacaaaatctcattaattttatcacactaggaatctcgccagataagccatgtttggcaacaccaggtttatatgactcactctctcggagac

SEQ ID NO: 616287 - DNA, 449 bp, Homo sapiens
ggttacactacttataggggatagaacttagatttaaattcaagctgtctaactcatctaaagcttgtgagcataactatgactgtactgtcctatgatatttggtactaaatatgtgataatgacagcagaggtaattggcattttcctgtttatcttcatagcatggtaaacaggtagggactctaacttgccttacatgctgtaattgattaatggaagatctggagctagagccccagtctgttgtgggtcctgtcctcattcttctatacctaacttttgaaagtattattctyatttaaaagctttttttaaaacaaaactcaaggagtaaacatcaagaaaatagcaacaacaaaatctcattaattttatcacactaggaatctcgccagataagccatgtttggcaacaccaggtttatatgactcactctctcggagac

SEQ ID NO: 616288 - DNA, 449 bp, Homo sapiens
ggttacactacttataggggatagaacttagatttaaattcaagctgtctaactcatctaaagcttgtgagcataactatgactgtactgtcctatgatatttggtactaaatatgtgataatgacagcagaggtaattggcattttcctgtttatcttcatagcatggtaaacaggtagggactctaacttgccttacatgctgtaattgattaatggaagatctggagctagagccccagtctgttgtgggtcctgtcctcattcttctatacctaacttttgaaagtattattctcatttaaaagctttttttaaaacaaaactcaaggagtaaacatcaagaaaatagcaacaacaaaatctcattarttttatcacactaggaatctcgccagataagccatgtttggcaacaccaggtttatatgactcactctctcggagac

SEQ ID NO: 616289 - DNA, 619 bp, Homo sapiens
gtttttcaatcctctctctcctactctccaccctcaagtaggccctgctgtctgtcgttcttttctttgtgtccatatgtactcaatgcttatgtctaacttataagtgagaacatgcagtatttggtgttctgtttctgcattagtttgcttaggataaaggcctccagctctatccatgttattgcaaaggacattatttcactcctttttatggctgcaggacattccatggtgtatctataccagtttctttaccagtatacaattgatgggcatttaggttgattccatgtcttctctattgtgaatagtgctgtgataaacatatgtgggcatgcatgtgtctttatggtagaacaatttatattcctttcagcatatacccagcaatgygattgctgggttgaatggtaaatctgttttgagttcgctgagaaatcaccacactgttttctacaacggctgaactttttttctacaacctcactagcatctattactttttgactttttaataatagccattctgactggcatgagatggtagcttattgtggctttgatttgcatttctctaatgattagtgatgttgaccattttttcatacgcttgttg

SEQ ID NO: 616290 - DNA, 572 bp, Homo sapiens
cttttcttttttgctgaacagcctattttgggaactgatgcatatctgcatatatagtgctccgttccttctcatggccacacagtacaccattgcttaaaggccataatttatttacccagtcccttattttttctttttctttttctttctttcttttttttttttttgagtagctgggactacaggcacccaccacatgcccggctaattttttgtgtttttaatagagacacggtttcatcatgtgggccaggctggtctggaactcctggcctcaagtgatccgcccgccttggcctcccaaagtgctgggattacaggtgtgagccactgcacccagccgcccagtccctttttgatggttacttttttttttgagacagagtctcactctgttgcccagcttggagggcagtggtgcgatcttggctcactgcaagcaattcactgcgacaacctcttcctcccgggctcaagtgattctcctacctagcctcctgagtagctgtgactacaggcrcgtgcctccatgcctggctaattttcgtatttttagtagagacgggatt

SEQ ID NO: 616291 - DNA, 583 bp, Homo sapiens
tatctgaaaaagatggaaaaggctacatactgtatgattttgtttatatgaaatgtccagaataggtaaatccatacaggtagaaagttcattagtggttgtcaggagatggaggaggggggaaaggagtgactatctagaatattatcaccatctagaatataatacattactcaaattgatgggaagtatgcttattttaccacagaatttaattccattagctgtggactaaacccacataccaaaacatctggataacttacctaacatctatgttccttaatttctttgcatgtaaaatgaggataataagagtactcagataattggcttaatgttaaaactgatttagttcctttgtataaagtattgagaatgttgtctatgtttggtaagtactaactgttaaaagttattattagtaaggttartatcattttcaccgccactgttgccattactaaacaatataacattcatttagcttggagattgtttaaagaaaaatactttctaaagttacaccacctcatttcccattagaaaatattcaagcttaataataatatgcaaataacag

SEQ ID NO: 616292 - DNA, 533 bp, Homo sapiens
gataattggcttaatgttaaaactgatttagttcctttgtataaagtattgagaatgttgtctatgtttggtaagtactaactgttaaaagttattattagtaaggttagtatcattttcaccgccactgttgccattactaaacaatataacattcatttagcttggagattgtttaaagaaaaatactttctaaagttacaccacctcatttcccattagaaaatattcaagcttaataataatatgcaaataacagatgtcttgaaagagagaatggggacaaattagtcattaaaaaagtttcatgttacttcgtgtatgtctccaagttcaacaaaaattctaaatcctattgaatcattaatgttattctattttgagattaaacaaaattatttttcaacaaacataaattaagactaggaaayatggagaacacatattatgagatgtaataattggaaacttcgtgtgtagatatacagtcagctctccgtatctgtgggttcctcatctgtgggattcaacca

SEQ ID NO: 616293 - DNA, 595 bp, Homo sapiens
agacaagaatgttcattcctgctgcttatattgaatattttaatggcagttctaggtagtaaagctaggttagaaaggaaaagtcatccagtttgtaaaggaagaaataaaattatttctctttgcagttgtcatgattttgttggtagaaaaatctcaaagaaaatagtaaaatactgacaactaagaaatgagtcatacaagatacaaaatcaatataaaaataaaatttatttctatacataagcaatgaatagttttaaaatgaaattaacaaaataacttatttgtaataasagcaaaaacaataaaatgcttaggaatgcattttaaagaagaaatgtaagatgtgcacactgtaaactacaaaaaatttgccagaagtaggagaaataattgagtaaaaagatctcagtcaatgaattgaaagtctagttattgttaggttagcaataattttcaaattgatctacagattatacataatctatgtcaaaatctctactgcatttttgcagaaattaacagctgatacaaaattatttatgaaaattcaaattgccagaatagtcaaaacaatcttccaccaagaata

SEQ ID NO: 616294 - DNA, 610 bp, Homo sapiens
tcaagtggatagggggaaccgttctgtggacagcactcagcctctttccccagccacccctgtcatcacccagtgggcccatgaacaaagtagccatggtggcagggatggaggttacacattggctcagcaacatggacttccactcaccaaggctgacctggctatggacactgctgagcgcccaatttgtgagcagcagaaaccaacactgagccctcgatacggcaccattccttgggggttatcagccagccacctggttgcaggtttattatattgcacctcttcyatcatggaaagggcagaggtttgtcctcactgaaacagacacttactctggatatgggtttgcctatcctgcatgccatgctcctaccaagactaccatctatggactcacagaatgccttatccaccatcatggtattccacacagcattgtctctgaccaaggcactcactttatggctaaagaagtgtggcagtggcctcgtgcttatggaattcactggtcttaccatgttccccatcatcctgagcagctggattgaaagaatgatgggatggccttttgaagtcacaattacaacgccaactaggtgacaat

SEQ ID NO: 616295 - DNA, 593 bp, Homo sapiens
ttttacatgttttgctgtgtttaaacctaagcatttcaagttttataactgaaattttattaaattttaattactattgtttatcaatactatatcaaattataatcatttcttatatattgaccttatatttgagagatggctaaattcatattaacttttgttgtttagatgttttgagattgcttttgtagacatttgatttgtatatagaaatagtattatttctatattttcctaaaaaaattttctattttttttacaaaaacattacttttttcttgcctgtgtagatcatcaagtatgattttgaataggaatgatgaaaacagacactatgttgttatttccaattttaatatgaaagcattaagttctccccaataagcgtaatgttagctgtggatttttatttttgttttttagtgaatgtcttcattaggataactgtattccctttccttctagctttatgcrtttttttaaccattaatggattttaaattgcatcaaatgctatttctacctccaacaagaggaatgaaaggctttatctctttgttttaacattgtgaaaatggaagtcattgaca

SEQ ID NO: 616296 - DNA, 548 bp, Homo sapiens
tcattgacatttgattgtgaaaacagctttgcattcctaagtataaatcttgtgtgatcatgacatattgtcatttgcatatattgtcagatttgattttcaaatatttcactgacaaatttttcatctttgtccatgattattattgctctctctgtggtttctttttttttttttaaaaaaataactttattttaagttctggggtacatgtgcaggatgtgcaggtttgttacataggtaaacrtgtgccattgttgtttgctgcacagacgaactcatcccctaggttttaagcccaccaaccgttagctattcttcctgattgtctccctcccaccgccctgctccacaggtcccagtgtgtgttgttcccgaccatgtgttcatgtattctcatcgttcagctcccacttataaatgaaaacaagtggtgtttggttttctgttcctgtgttactttgctgaggataatggcttccagctgcacccatgtccctgcaaaaggcatgacctcattcagttttatggctgcatagtattccatg

SEQ ID NO: 616297 - DNA, 548 bp, Homo sapiens
tcattgacatttgattgtgaaaacagctttgcattcctaagtataaatcttgtgtgatcatgacatattgtcatttgcatatattgtcagatttgattttcaaatatttcactgacaaatttttcatctttgtccatgattattattgctctctctgtggtttctttttttttttttaaaaaaataactttattttaagttctggggtacatgtgcaggatgtgcaggtttgttacataggtaaacgtgtgccattgttgtttgctgcacagacgaactcatccccyaggttttaagcccaccaaccgttagctattcttcctgattgtctccctcccaccgccctgctccacaggtcccagtgtgtgttgttcccgaccatgtgttcatgtattctcatcgttcagctcccacttataaatgaaaacaagtggtgtttggttttctgttcctgtgttactttgctgaggataatggcttccagctgcacccatgtccctgcaaaaggcatgacctcattcagttttatggctgcatagtattccatg

SEQ ID NO: 616298 - DNA, 562 bp, Homo sapiens
ttaattatttaaaattgtgaaaaatcttatttatgccctagaatatagcctatcttggtgaatgttacatgtgtacttaagacatatagattttcctcctggttttgcgcattttgtggtattaatttcatctatgtatagttcatctaaaattgttttcaagtcttttgttgttagttccacacacatatagcattcttatttcttcttggagaattgatccctcattctttgtgctatattcttctttatccttcatatttttaataaagtctacttttggatagtaatgtagctattccagttttcatttggttgtgttggtatgataattctttctccctccttttctttttttttaaactatctatgtttatacattaaaaattgggttttaaccaaaagcattgaaaaagaagaaaaaattggatgtcttacactttctgaattcaaattgtactacaaaagtatacagtaaycataacagcgtggtattgggataaagacagacatacagatctatgggatataatagacatcacaaaataaaccctcacatatg

SEQ ID NO: 616299 - DNA, 634 bp, Homo sapiens
taggtaacgtgatgcctccagctttcttcttttggcccaaaattgctttggctattctgggtcaattgtgttttcatatgtattttagaatttttttttctatttctgtgaaaatgtcattgacattttgatatggagtacactgactctgtagaacaatttgggtactatggacagtttaaccatatcgatcctttcaattcatgaaagagaatatctttccattttttatatccttttcaatttcttatataagtgttttatagattttattgtagaaatactttactcctttgcttatgtttattgtgaggtattttatttacctgtagctatcataaattagattactttattggtttctttctcagattgttcactgttggtatataaaatggtatggattttcatatgttgattttgtatcttacaacttgactgactttatcggttctactggctgttttggtggagtctttaygttttcctaaatataagatcattgcaataaggataatttgatgtcttctttcccaatttgaattcctttcatttctttctcttgtctaattgctctggttctgacttctagtacaacgttgaataaaagtggtgaaagtggacattcttgtct

SEQ ID NO: 616300 - DNA, 517 bp, Homo sapiens
aacatctcactgttagcattagacagatcatagaggcagaaaactgactaagaaatttggttattaaacttgacacgtgaccaattagacctagtagacatctacagaattctccagccatcagccacagaatatacattcgtcttatctgcacatggaacatattccaagattgaccacattcttggccataaagcaagtctccattaattaaaaaaatcaaaataataccagccatactcttagactaaagtggaataaaaatagaaatcaatagtaagaagatctctcaaaatcaygcaattacatggaaattaaacaacttgctccagaatgacttttggataaagaagaagattatggcaaaaatgaaaaattatttgaaataaaggaaatcatagacacaacttaccaaaatcctttgggatgtaataaaaacagtgctaagaggaaagtttacaacataaatcacctacctcaaaaagttaaaaaaatctcaaattaacaatttaacgtc

SEQ ID NO: 616301 - DNA, 585 bp, Homo sapiens
ttccgttcatcattatatcactaagaaatggacagcttaatatagaatcctgcaaatcaagcaaactaattcctccatcaagactgatttttaacttgacctcagttcaatttactctattagatataattctcaytttccactctcttttggcacttcctaatgaacaatttgggaaaatattgttgcactatagaaaaggcatttgatgagacctgcagacagaaaatcagtccccaatactatccatcattatcttgtttgtattacttcaaatatattacttaacctcttctagtttctatgctctcatatctaaaattatgcacctaaataatttctgggatcattccaggatgaaaattctatgatctatgaaaatggagagatttttctcaacaataagaattttcttttaaatccgtagacactccaaaattctacagtaatgtcaaagtcaaaattatatgaaaatatttaccatatttttgttagagacccagatgactgttagcaaatttatccactttttcattagaaaggtgcagccattttgctaagtcagaaaataaaatcttagtcaat

SEQ ID NO: 616302 - DNA, 585 bp, Homo sapiens
ttccgttcatcattatatcactaagaaatggacagcttaatatagaatcctgcaaatcaagcaaactaattcctccatcaagactgatttttaacttgacctcagttcaatttactctattagatataattctcactttccactctcttttggcacttcctaatgaacaatttgggaaaatattgttgcactatagaaaaggcatttgatgagacctgcagrcagaaaatcagtccccaatactatccatcattatcttgtttgtattacttcaaatatattacttaacctcttctagtttctatgctctcatatctaaaattatgcacctaaataatttctgggatcattccaggatgaaaattctatgatctatgaaaatggagagatttttctcaacaataagaattttcttttaaatccgtagacactccaaaattctacagtaatgtcaaagtcaaaattatatgaaaatatttaccatatttttgttagagacccagatgactgttagcaaatttatccactttttcattagaaaggtgcagccattttgctaagtcagaaaataaaatcttagtcaat

SEQ ID NO: 616303 - DNA, 608 bp, Homo sapiens
ttcctaatgaacaatttgggaaaatattgttgcactatagaaaaggcatttgatgagacctgcagacagaaaatcagtccccaatactatccatcattatcttgtttgtattacttcaaatatattacttaacctcttctagtttctatgctctcatatctaaaattatgcacctaaataatttctgggatcattccaggatgaaaattctatgatctatgaaaatggagagatttttctcaacaataagaattttcttttaaatccgtagacactccaaaattctacagtaatgtcaaagtcaaaattatatgaaaatatttaccatatttttgttagagacccagatgactgttagcaaatttatccactttttcattagaaaggtgcagccattttgctaagtcagaaaataaaatcttagtcaatggtatgaatagttttgtattttattaagaaaggtgacactttcattatgatttttcctcttttaaacttactctttattcattgccccaaaggcagttatacaagatatkacatatactctgcaaaagtttattaatattaccattcattctgttacactattcattaagcttgaacta

SEQ ID NO: 616304 - DNA, 649 bp, Homo sapiens
gctcttaattaattaataatataatatagtgtgcacaagagaagctaccacccaacataaatgttgaaattggacactcatagggtcttacagttttattttagtttttaacttttaaaatatggtttgctaatacatgtactattggggacttatttttcttcttaatagtatactcctaaaatttatctattacttggctgcaattcattatgaatttggtaaaatatttcatgtttaacattctttctctaacttccctttttatagacatttcrgttttttcatgtttttgctgatattaaaaagtgatgtcagttatatatttataaaaagttcttggtgggcatgtgtaacagtttctctatagtttatacctaaaagataaatctttacattgtatagtatatacaatattataagaaaatgtcaaagtggtttcaaagttattttgaaccgtttttattcctattggtaacgtttagtagacactgtggatctactttctccatgtaagttggtgttgcaagattttaaaatttgtccactgaattgatataaaataatatttacttttaatcttcatttgcatttacatgttcactaataagattgaaattgacttcatacgattgtttgtcatattaat

SEQ ID NO: 616305 - DNA, 649 bp, Homo sapiens
gctcttaattaattaataatataatatagtgtgcacaagagaagctaccacccaacataaatgttgaaattggacactcatagggtcttacagttttattttagtttttaacttttaaaatatggtttgctaatacatgtactattggggacttatttttcttcttaatagtatactcctaaaatttatctattacttggctgcaattcattatgaatttggtaaaatatttcatgtttaacattctttctctaacttccctttttatagacatttcagttttttcatgtttttgctgatattaaaaagtgatgtcagttatatatttataaaaagttcttggtgggcatgtgtaacagtttctctatagtttatacctaaaagataaatctttacattgtatagtatatacaatattataagaaaatgtcaaagtggtttcaaagttattttgaaccgtttttattcctattggtaacgtttartagacactgtggatctactttctccatgtaagttggtgttgcaagattttaaaatttgtccactgaattgatataaaataatatttacttttaatcttcatttgcatttacatgttcactaataagattgaaattgacttcatacgattgtttgtcatattaat

SEQ ID NO: 616306 - DNA, 610 bp, Homo sapiens
cttaatttggtagcttagatgcttatggattttatatttgtacatactgtgaaatagaggtatatttttattctcttccaatgtcccttaataaatcacattatgcattgaaaaactgcttatattgtatagtratttcatttatgttttctttaagtgatttttatagatttttaaatattctgctgacttattgtagaaaagaatcagcagaaccagttttgatctatcaacaattcacctccatgagcacagacagtgttaggctcatatttcctccttcccagtccttcccacgtataaaaaatcagccaatcaaggatagaatcactctaataagaacatttttgagtgacaatgcttcagtaaaactgaccttcaagtaaccttacttctgtagataatatcaatccacttacatctctgatagtcttcgaaaaatcctatataacaatgctattcaagagaacttttcacaatagtggaaaataagtgtattttaacattcaatgtgttagctgccagccatgtgtgggtattaatcatttgacatgtgactagtgtggtcacaaaactaaattttaaatgtatttaattttcatttttattt

SEQ ID NO: 616307 - DNA, 553 bp, Homo sapiens
gaacataacacttcaactccaactatctgtcaacaaaaagagtcaaactctgcaaaattttttaagagttttattctgagccaaatatgagtgaccatggcccatgacacaaccctcaggaggtcctgaaaacatgcacccaaattggtcggsgtacagcttggttttatatattttagagagccatgcgacatcaatcaaatacatttaataatacatggatttgattcagaaaggtgggacaactcaaagcgcagggggtggggggacttccaggctataggtaaatttaaacattttctggtttatagttggttgagtttatctgaagacctgggatagctagaaaggaaatgttcaggttaagataaaagattgtagagaccaatgatcttttgaggtattatagtggctgcccttagacacaatagatgacaagtgtttcctattcagatctttaaaaggtgctagacttctagttaatctcttcaggattgggagggcctggaagaaaaagatctagctgtgttaatagagattctttacagatgca

SEQ ID NO: 616308 - DNA, 597 bp, Homo sapiens
tatgagttcagttttttaaaattttagaaatcagcaaatttttattctcttatgcaactgattgccttccttcctatttgttactatcaatttctctgctttaaacttttctgaagaatattcacagtgacatagaaaaacaataaacaggcatatagtttgagtaaacccaaaaatctaacatgagtatactgtatgtattctcaatttaaaaatttattacatcatgattttcattggttatactaaaaaasaggctgtgctaaactaaagaagctaaactaaaaagagagacctcttttaaactaaaaaagaatatatttgtttaaaaatatatttattggaggctgaggcaggagaatggcatgaaccccgggaggaggagcttgcagtgagccgagatcgcgccactgaactacagcctgggcgacagagtgacactccgtctcaaaaaaacaaaacaaacaaacaaacaaatatatatatatatgttttgtctaatatgtaagattttatcctatcttacatgttttaatttcttgctaattctacacattcagtttttcaaaaaatgacacatttcaggtcttgtcttgc

SEQ ID NO: 616309 - DNA, 597 bp, Homo sapiens
tatgagttcagttttttaaaattttagaaatcagcaaatttttattctcttatgcaactgattgccttccttcctatttgttactatcaatttctctgctttaaacttttctgaagaatattcacagtgacatagaaaaacaataaacaggcatatagtttgagtaaacccaaaaatctaacatgagtatactgtatgtattctcaatttaaaaatttattacatcatgattttcattggttatactaaaaaagaggctgtgckaaactaaagaagctaaactaaaaagagagacctcttttaaactaaaaaagaatatatttgtttaaaaatatatttattggaggctgaggcaggagaatggcatgaaccccgggaggaggagcttgcagtgagccgagatcgcgccactgaactacagcctgggcgacagagtgacactccgtctcaaaaaaacaaaacaaacaaacaaacaaatatatatatatatgttttgtctaatatgtaagattttatcctatcttacatgttttaatttcttgctaattctacacattcagtttttcaaaaaatgacacatttcaggtcttgtcttgc

SEQ ID NO: 616310 - DNA, 374 bp, Homo sapiens
tttatatatactacaaatctttgtttgacttttccagcagagctcacaatgagttcttccaatagttctataaattatacctagtagatgattttattaggggggaacaaacagaaattaaccattagtttttattttcctagtgtatttatacatttatactatcaattagattttagtgacaaacartgcatttataaagtataccgaaacctgaaataaataagtgaaataaatacattttagctagctcagaaaaatcagctgtatattattaaatatttattgagatataaacacattgtattaactatgaatttgtatatttcaatcattcatattaggatctaaaactcatacactgttgagtcata

SEQ ID NO: 616311 - DNA, 614 bp, Homo sapiens
taacattattgcctttcattttatgggtcaggaaaatgagtctctgaaagagtcagtcatttgtctgagttatatgattaataagtattacacatggacatcacaaccagcgtaactctggagtctggcctctttacaatggagaaaacagaattataagagcaacagacatagaatagatgaattttgtaggtatacaaagtattaactctgttatttatgttagttatggaaaggtagttatgaaagaagccaatgccagtctgagtagacctatatacaacacagaaatgaatggaatagcctgcagtgaaaccttaaaagcacacagtaataaggacttgataaagaarttctgatattgctctttcttagcaaaccacaagaactgttttgttcttccgagtgctagtgtcatcttctaccacaggacattttcacgcatgattcttctgcctagaaggctctttcctttctctgcctggtaatcccaattactcttttatatactggctcaatactaaccctattaaagaaccctccagggaaaccaaaattaggtcacacccccaattggcacctgcacgtttctcattttaccctctcccatgctt

SEQ ID NO: 616312 - DNA, 635 bp, Homo sapiens
tcttcctctcttcttgatgaatatataaattgaattagtgtatctcctatgcatctaagatggtggaatgcaccaatcttaggagaattgagaggagagctacatattttcttttttaaaaggcttaattctcttgcataaatctcggtgaagaatttgttatccagctcaaaaaacgtggttattcaatcagcagaatttttgtcaccaaaggataggaaatcagaatctcaggccctaacccagatccactgaatgagaatctgcattttaacaagattcccaggggatttatatgaccataaaattttgaatagcactgacattttcattaaaatattaaattgttttcattaaaatttttaattaaattttaaaatttaaacatacctcaacaaactaggttctttgtgacagaaattacaaaaccggtacagcaagattatctttttgtttcacaatacctggaacaaaatcttctaatagtgactttaattgcatatgtrgaagtaaatgctggcatcacctgagaaagagttttattttaaacccaacataacctggttttcttatatttaaaaattcattcttttgctgatctttcctcctttcagattatcaacagattttctctc

SEQ ID NO: 616313 - DNA, 567 bp, Homo sapiens
tttaaaaatattttaaaaacatgaaattattttaatgattaagtaaaatgttagacattcaaaacaatcttaacaatgagttgaggtcagtaagctttaacctgatgagtgttatactcacaaaactataaagaaagtaaagaaaaataatatayatttatcacaaatgtgagaatggaataaaaatcagaacggagaactccagtggaaagaaaacaaattatgaaaggaaggatgttcactctctttagggagtagaaccaaatacaattttctttgttgttttttgtaaattgttgtcttgtaaattcaagacaaactgaaaataaaagaaataatgtgaactgaactctttatggagagagagaattgtcactttaaagtcaattataatcttttaacacaaccatgagaagatacaggaaactgaacaaatagagttcaagttatcagtcaaggctgcactgcatactctctattccagtcaatttagacagaaacttcatattaatgcatttgtgttctatttactacttacaaaaatgagcaaaataattcaatgtagat

SEQ ID NO: 616314 - DNA, 567 bp, Homo sapiens
tttaaaaatattttaaaaacatgaaattattttaatgattaagtaaaatgttagacattcaaaacaatcttaacaatgagttgaggtcagtaagctttaacctgatgagtgttatactcacaaaactataaagaaagtaaagaaaaataatatatatttatcacaaatgtgagaatggaataaaaatcagaacggagaactccagtggaaagaaaacaaattatgaaaggaaggatgttcactctctttagggagtagaaccaaatacaattttctttgttgttttytgtaaattgttgtcttgtaaattcaagacaaactgaaaataaaagaaataatgtgaactgaactctttatggagagagagaattgtcactttaaagtcaattataatcttttaacacaaccatgagaagatacaggaaactgaacaaatagagttcaagttatcagtcaaggctgcactgcatactctctattccagtcaatttagacagaaacttcatattaatgcatttgtgttctatttactacttacaaaaatgagcaaaataattcaatgtagat

SEQ ID NO: 616315 - DNA, 567 bp, Homo sapiens
tttaaaaatattttaaaaacatgaaattattttaatgattaagtaaaatgttagacattcaaaacaatcttaacaatgagttgaggtcagtaagctttaacctgatgagtgttatactcacaaaactataaagaaagtaaagaaaaataatatatatttatcacaaatgtgagaatggaataaaaatcagaacggagaactccagtggaaagaaaacaaattatgaaaggaaggatgttcactctctttagggagtagaaccaaatacaattttctttgttgttttttgtaaattgttgtcttgtaaattcaagacaaactgaaaataaaagaaataatgtgaactgaactctttatggagagagagaattgtcactttaaagtcaattataatcttttaacacaaccatgagaagatacaggaaactgaacaaatagagttcaagttatcagtcaaggctgcactgcatactctctattccartcaatttagacagaaacttcatattaatgcatttgtgttctatttactacttacaaaaatgagcaaaataattcaatgtagat

SEQ ID NO: 616316 - DNA, 590 bp, Homo sapiens
aatgagcaatttggatttttataattacaataataaaaaagtgtcagttttcagtagctatgttatggtttgaatttatgtgtctgtccaaaactaaatttaaaacctaattttcaaggtgatggtaatggcagcagtgcactgtctgtagcgccactaccatcatgccagctgcttaagggagggtgcagggaggaggcggacagaccaccaaagcccacygccctgggagctgctgtgatggggccagggcaggttggccaccagcagaaaagagcgagcttgggcagacagagtccctgaggtggagctgggcccagggcagtgctgcgcttgcacacgaagtgtgggtgctatgcccagggcaggaagtgggagtggcatcttctttagggacccagccaatgatgcagccactacacccaccccgctgagggtgccaggttccagtgcctctgaaggaggctctgtgtgaggccatttggggtcacttccccagggtccaccccacattggagtgactcctgagcctgacacttctgttgactacctgggtctcatcatccaccccaccctgggctgccccgagc

SEQ ID NO: 616317 - DNA, 577 bp, Homo sapiens
tggggggaagtttgtggtgatatcccccctgccccagacattggagtgggcccaacaaggacctgaaggctgggacccgggcttcccatcctgtgaaccagagtggggacttgtggtgccttttccaggccygccaatggctgcccatgggtcctccaaggcccataaaagccccacgttcagttagagctcagcagatgttaggacgaccaactgcagagaggagctacccactccagggactcttcactgctgagagctgggaagatgagggggtgaccttcctgcagtaagttcccacttcatggtctcctgtctgctaggagctgaacaatcataaggataccctggctgcagaaaggagctacccagtgcggctctcctctgagctgttctatcacttaatgaaactccttgaagtcttgctcaccctccacttgtctgcgtaactcattcttcctgggtgcaggacaagaagttgggacccactgaatagggctaaaagagctgtaacaaaagacttgggagcttctaaagccagggctttgattcccttttggggcttgcagttcctggc

SEQ ID NO: 616318 - DNA, 610 bp, Homo sapiens
gggacccactgaatagggctaaaagagctgtaacaaaagacttgggagcttctaaagccagggctttgattcccttttggggcttgcagttcctggcatctccaagtttccaggtacccaccatgtttcctggtgccagctgcagaagctgcttgcagtgcacctggtccagctgcagcctcatgcagagccagtgctcatgctggcacctggagattcctaccccattgcagcagtcagaatgtctgactgcacagtagacagaccccacactcactcacacacccctcaccattccatttagtctccctcagcaggtgtgggatcccggccagtgttgtgagccgagcacagcctgccaggttgagtgggcagaatgagcccagagggcccaagaaaaacttggggaaaggcaccactggccacagaagtgtccagccagaaaagtgacaacctgaagatcctgtaacaatggttttaaaaggtggggactctgsaaggtgattattcatgagggctccactcttgtaaatgggactgatgctcttataaaaggggcttcagacagcttcctctcatttctgctgtgaggacacagcaataataccac

SEQ ID NO: 616319 - DNA, 630 bp, Homo sapiens
tgttttataatctgaaggttaaaaaatgtcaacaaagacacagataacagaaaaaaagtgcattacacatattacacaaaatttttgacattaatgtaatggcaaatgatataatgtatcagttccaaaataaaaaaaataatataaattaatctatttttgctaagcatgcagattaatttcaacatgatcctcagaaattagatggatgatgtttacaattttagctttgacatttggtatgaatttaaatgtawccttaatggtctgatatgaagttattaatacatcttgaaataaatatatggcctttataataaatggtaaaatattccacccagattaccaaataatcacattttaaatggtgtctctcaagagtccttagaagtaatgttttatttttttcttttactttgctaagttccaataattttttctttaagtcttgatcttttgtggaaactagtagtgccatattattcatgcatgacattgattttgttgataagacattaacactttattgatgcaatgttattctcatggatgagataaagctatacctgttttccctgtttctcaaatttgatgtgtgatgttattagttaatgcacaaggaaaactaca

SEQ ID NO: 616320 - DNA, 632 bp, Homo sapiens
gcatgacattgattttgttgataagacattaacactttattgatgcaatgttattctcatggatgagataaagctatacctgttttccctgtttctcaaatttgatgtrtgatgttattagttaatgcacaaggaaaactacacataacataaaagactttatggaaaattgggacaaaatggccaactagtcacagccaggaagaatgtcttcagctgagacaagccagaataacgagtagatcagcataatccaaacagtccacctgtgagaactcattatgagtggatagagagatgattcagatgtcagggatgaatggggaggaagataggaaccctttgcagggttgttgagaaccaggatgtgttccacccctgaatgacttctaaagaatggatgaatggagttaacgcagagtggcctactctcaccatagacctctgagatcgtatctgcaagaaaacttacaagctccaaggacatttacatgggcagggggaactgtccagagagtaggcagagaaagaacttgaatctgcagggaccccaggtggtctggcatgggtattctgcagttgtatttggccataggtgcctattctccagggctctctgtaaccctctaggc

SEQ ID NO: 616321 - DNA, 547 bp, Homo sapiens
tcttttctttataaattacccagcctcagatatatctttataacaatgcaaaaacaggctaatacacctcaggtccttgattgccaaccatgtcatccccacttctgstgtacacagtctttacttcaaagtccaaaactaatgccaatacctgtgcaaaacctgctgtgttaggccattcttgccttgcaataaggaaatacttgtagttgggtaattaataaagaaaagaggtttaattggctcagagttctgcaagttgaacaggaagcatagcaccagcatctgcttttgggaaagcctcaggaagcctacaatcatggcagaaggcaaagggggagcaggcatgtcacatggtggaaacaggagcaagagacacagtagaggggaggggctgccacacattttaaacaaccagctctcatgagaattcactcactatcacaaggacagccccaagccatgagggatctgcatcactaccatgatcaggcacccctctttgtcacacattaggctctttgagggtggggctctggcatcttca

SEQ ID NO: 616322 - DNA, 570 bp, Homo sapiens
catattttcctactttctctaataaatctgtctttctttacctgcaactgtcttggtaaattcctttaccaccctctacacaggtcccagctagttgcacccacgacatcccctgtagggctcctgccaggattaagtgggacaatgcaataatgagtctagtgcagtgtgggggtacaaagtaaatccatgataaattcatacccacaccctgtacgatggacaagggagcaaaaatgagagcccgtcatctcaaattaaatttcttatttagaaaaaaatataaaagggccattattcctttctcagaacatagttctaaaggccctgatgwcttcctgctgtgtatcaggagataacagctgggacaggtcatctgaccactcggagactgctagaaattagctcctcagcgacagtgaccaaggtactggagttatttaatagacattgttttggtgctgaaaggagggagaccagaggggaggcccattgagctatttgctttcaatatccatccaagtccttctgtacatttaagcccttaattcatcctctatttaggcctct

SEQ ID NO: 616323 - DNA, 587 bp, Homo sapiens
gattctcccctagagcttctaggaggattgcagcctggcccatgccttgattttagccaatacaatctatatcagacctctgacctccagaattttaagataatatatttgtcttgttttaagtcactaagtttgtcctaatatttttacagtagccattaktaactaatacgccaccattctctcttgcctagagaacttcagctaactccagactggtctctctcttcccactctgcccaccccaacctacgaaatctattctccatacagcagccagaggaatcatttaaaattgaaacttgctaatgtcccttttgtgctgaagatcctcaacagcctcctgtcacacttaggataaaaggcagaccccttatcatggcctcattttcccacctaaggcttgaaggttaataaacttgcccagtcactcctgggaggttagggggagagctgagcctagaactctaagatctggactaagttcctctatttggggatatgtaagcactttctttgatctggactaggttcctacgagcaaggaagttatgagattttccccaaaaatgtcagcacaattgcca

SEQ ID NO: 616324 - DNA, 548 bp, Homo sapiens
aataatttatattcctccccaaactaaaaaaagagcccagatttttaattttttgataaaatctcattattttggaaaaattattaaatatagactcattgaatttacctttgttgttggtttattgacaataattagagggaaaataagtcttattaagttataatttacatgcaatcaaattcatgctttgtaagtgacaaatgatttttagtacatttatagaattgtgcacccatctagttttagaacctcctaccatccccaaaatatccttcaaacacatttgtaaccattccttgttcctcagccccaggaaaccactgatttgcttaccacttttatagacttgctgttactggaaatttcagataagtgaaattatgcaatctgtagtctttatagtatgactccctctacttagcataacgtttttgaraatcatccatgttatagcatttataagtgtttctttcattttaattcatgaacttattgtgtggtatcaatatatacattttgttgatacattcactactttatgggca

SEQ ID NO: 616325 - DNA, 548 bp, Homo sapiens
aataatttatattcctccccaaactaaaaaaagagcccagatttttaattttttgataaaatctcattattttggaaaaattattaaatatagactcattgaatttacctttgttgttggtttattgacaataattagagggaaaataagtcttattaagttataatttacatgcaatcaaattcatgctttgtaagtgacaaatgatttttagtacatttatagaattgtgcacccatctagttttagaacctcctaccatccccaaaatatccttcaaacacatttgtaaccattccttgttcctcagccccaggaaaccactgatttgcttaccacttttatagacttgctgttactggaaatttcagataagtgaaattatgcaatctgtagtctttatagtatgactccctctacttagcataacgtttttgaaaatcatccatgttatagcatttataagtgtttctttcattttaattcatgaacktattgtgtggtatcaatatatacattttgttgatacattcactactttatgggca

SEQ ID NO: 616326 - DNA, 536 bp, Homo sapiens
ctcaaacagccctctgaaataggaaagcttttatccttcatagttttataaatatgaaatttgatgcacagattgcctatggaacttacccaaggtcatctggcctgtgtgtcagtagcccaactatgaatccaggtaggtttacttcagagcccagctcttaattccagtactgtaccactgttatataacagaaagattttctgagttacagatgcaattttaaatattcttgtagtcacacttaaaaaaggaaaaaagaaatgggtgcaattaattttaataatatatttttatagaaccaactatgtctaaagtatgaccatttcaatatgtaatcaatataaacattttaatgagatattttgtattttttcatacttcacttttaaatccaatgtgtactaaatgcttctgcagatctcaatctggacttgccacatttaaatgcttcatagccacacagggctggtggctgccccacagaaagcacagcttcaccayctgtgcagctaaagtcacttgacattctattt

SEQ ID NO: 616327 - DNA, 490 bp, Homo sapiens
ttagttaaacggcaccaatttccacccagtagctgaagccaacgtctgagagttattcttgattccctcatcttttcattccatgtgtcaataagatgtgtcaaacccaccttaaaacatcccaaacctgtcctcttctcgccatcattccaacctcttacctgggctgctgcagtgcatttctcctgggtccatttccttccacacttgccccctcttaattcattctccacacttcagttagggtgaactttttacaacttaataaaatcatatccctctggtgctcaaaatcctctagtgttttcccatttagaataaatcccaaactccttaccctagcttataaagccttctatgatctggacctgcctattcttcaaaagrcttctattacttgccccttcaaccaccatactctactgtggactatgagctgttcttcaaatattccaagctcattcatgtggtagggtactctgtacaagtt

SEQ ID NO: 616328 - DNA, 476 bp, Homo sapiens
taacagcttttggtggagttgttaagagttttctatatataaaatcatgtaatctgcaaacagagacaatttgacttcttcttttmccatttatttatttatcctgcctagttgctctggctaagacttccagtactatgttgaatagaagtggtgaaagtgattgtccttgttttattccaggtctcaaaggaaaagctctcagctttttctcattcagtaggatgttatctgtgagtctgtcatatatggcctttattgcattgggatacatactttctatacctcatttgttgagagttttttttttttatcatgaacagatgttgaattttgtcaatttttttcaccatctatggaaatgatcatagggtttttgtccttctttctgttaatgtgatgtatcacattattgaattgcatatgttgaacaagtgttgcatcccttggatgaatcccacttgatcatagtgaat

SEQ ID NO: 616329 - DNA, 554 bp, Homo sapiens
ggctaagtggttctacaatagtgcaactgaatctaggctgccaagcaagtgccaactcagcatgatttctgaatagttggtaaatgaagcttcaacattctggggttttaaatgaaagcactctcttaacagaaattatctcagaattacatgtctgttacaataacaattttagaaaaaaatactttcatattgaaagagaaaaaaacaaatattgattaattgatgaaaaggtaataattggwtgttttcagtaaatgtaacattcgctatgttacctgctacgggaaatatagaagaagaatatactaaaagcagataccatagatcccctttccttaatggtattttaaaaaataaacaagacatggcgagaccaaatggcattgccaggaaagacaaggctaaatcgcatcattcttgttctcttgtggtgtcaggttctttcaggggaagctctaagatttctcctatctagaaaggaagggatctgatcaattcactcacagtaagaatttctctctgataatttttatttttaaaactaggagaaa

SEQ ID NO: 616330 - DNA, 513 bp, Homo sapiens
tcgcatcattcttgttctcttgtggtgtcaggttctttcaggggaagctctaagatttctcctatctagaaaggaagggatctgatcaattcactcacagtaagaatttctctctgataatttttatttttaaaactaggagaaatgattaaatcatgacaatgaatctctagtgataaaagccctagaactcaggaactcaggagtagagggtgtgtctgacctacgtgctttagtagctccaaccatcactctttcctagccatcagtggctagctgtggagagggcgttatcatggacagggagaaccagaagcagaacttctgctatcacaactttacatatggaagtcccaggaggggaaaaatgtaactgtctgaatcatgacagaaaataaaatataatttataaatacacagcgaatggtgaaataygcaatagaactgtcttttctgaaagtgtaaacatgcagatctttcatctagagagaaacccagaaaacgaggatcaac

SEQ ID NO: 616331 - DNA, 621 bp, Homo sapiens
gtaggcattacatctagtttgtcgacattataatttgtgcttctctgaacattcttgtccatgaactctgatgcatgtgagcaagtgtttcccatggcacatatctagacgtagaatttctggttattaggtgaatgaatatcaatcttacaaagtaatgttaacttgtttcccacagtggttgtttaaactcactcgtttactagccatgtcactattgatccataccttctaaagtagttgatattgtcaaagtttctatttattgctggtaaaaattaaactgaagcatgatacaattttaaagcatttatktgagcaaatggcaattcatgaatcagtgcagctgcaaaccagaagtgtttgggaggcttcactaaggaaacacaagggaaggctttcatagggcaaatgtggaattaaagtaaagaaaatattggatgagttacagttatacacttgtttcacttggtctatcctgctgtaagttcctagttatacaactataagttagtagcttctgatttgttaatcttgtttcatttttctttcatataggcattcatcagtaatagctcaagtttcacttacgtttgcaaattaagcaaggttaaggtcaat

SEQ ID NO: 616332 - DNA, 621 bp, Homo sapiens
gtaggcattacatctagtttgtcgacattataatttgtgcttctctgaacattcttgtccatgaactctgatgcatgtgagcaagtgtttcccatggcacatatctagacgtagaatttctggttattaggtgaatgaatatcaatcttacaaagtaatgttaacttgtttcccacagtggttgtttaaactcactcgtttactagccatgtcactattgatccataccttctaaagtagttgatattgtcaaagtttctatttattgctggtaaaaattaaactgaagcatgatacaattttaaagcatttatgtgagcaaatggcaattcatgaatcagtgcagctgcaaaccagaagtgtttgggaggcttcactaaggaaacacaagggaaggctttcmtagggcaaatgtggaattaaagtaaagaaaatattggatgagttacagttatacacttgtttcacttggtctatcctgctgtaagttcctagttatacaactataagttagtagcttctgatttgttaatcttgtttcatttttctttcatataggcattcatcagtaatagctcaagtttcacttacgtttgcaaattaagcaaggttaaggtcaat

SEQ ID NO: 616333 - DNA, 527 bp, Homo sapiens
atcaagaaagcaatcccatttacaataactgcaaaaatatgtaacatacctagcagtaaattcaacagcagaggtgaaagatctctacatgtaacactataaaatactgatgaaagaaattgaagaggacacaagtaaatggaaagatatgctcacagattggaataattaatattgttagaatgtcaataccatctaaagcaatctacaaattcaatgcaatccatatcaaaataacaatgatattcttcacagaaatagaaaaaaaaaaaccctaaaatctgtatagagccacagatgaccccgaatacataaaacaatactgagcaaaaagaacaaatctggaggcatcacactagctgacttcaaaatatgctacaaagccatagtaaacaaagagcatgrtactttcataaaaacagacacatggatcaattgaatagaataaagaattcagaaatgaaaatatgcatttatagccaactaattttcaacaaaggtgccaagatcacacattgaagaaagga

SEQ ID NO: 616334 - DNA, 476 bp, Homo sapiens
taacatagcaaattatctgacacctgacattctgttaattggaaccacacatctaaagttctgtagtcaatgaagttaacaatagcatctttaacatagtttaaatcgagggctttatgaatctaaactaaatccattaatgtaaaacactaaatggtaataatgccattatgcatattttactttattataatggaaatttgataatcttagaatgctttatggaaaaaatctatcaaattcatcttttcattatatagaatactatgatccatagrtaccacaaatctatgttgaataatagctagctagctgtacttgtgttttacttaacatgcaactttaattgtgatataatataaaaaccaagtaatggaaagctgttatatggggtctataagagaacaccagacatagtgatatttatcagggtatagcatagaacaaatattgggtattggccagtagacaaggcc

SEQ ID NO: 616335 - DNA, 651 bp, Homo sapiens
gccagtagacaaggcctcttgtgtctaaaaagcagataaagacttgcagtatggagtaaaacaaaactgattcaaaatatagattgcaatcagtctttggaggaacagacagcaaaacccgtctctacaaaaaatataaaaattagccaggcatgatggtgcatgtctgtagtcccagctacttgggaggctgaggtgggaggatggcttgagcccgggaggcagaggttgcagtgagctgagattgtgccactgcacttcagcctgggcacaagagccagaacctgtctcaaaaaaaaaaaaaaatgaattcataaaattctagatttacagattttctatatatttattagcatatttattgaagatgcatgggaaagatcgagcatttctctttgtaagaaatacacatgtgagaaccaaagaaattgcgaaccaaagaaattgtgatgatctctgagcwgtatttggacaccaggagaggttgctctgataagatttctcaacagcattctgaatacaatgaaggtatccatattacttttacagtagtttgtttctatgattgtagttcacttatttcttcagtaatttttgtatatatttgtaggactgatatatatgtattagagttagtgccactggatatat

SEQ ID NO: 616336 - DNA, 569 bp, Homo sapiens
ataaggttggatgaacaaattgaaggatggtaaatgtgggggattttatttctgatgaaagtggctaatagccagaaggagagctgacaaggagatggggtgagaaggtaatcttctcctgaattccagccatctccggctgggttcttctccgaagttacaccatcatgctggccctctgagatcaagctgcttctctctgacatccagccatagtctctgatgtcaagctacttctcctctctctgcctgctgagtatagggttttcatagccacaggatggggcggggtggggccagggccatgggtagttttggaaaaagcaatatttgggtgggaaaacagggaataagttcccatttcrggccatggtttcaggcttgagggtggggttttgccagggacccaccgctgtctgcctagaatttctctacctcctgtcctgatcataattgtctatgtggaaatctaatgaatgtgttaaaatgctactagaattagtaaatgaatttaacaaaattgtacaatataggatcaatatataaatgttaaatgtatttctacaaac

SEQ ID NO: 616337 - DNA, 595 bp, Homo sapiens
atctgataaaagacttgtaaccagggcatatgaagaactctcacaactaaaattwaaaaaaataaaataaaagggcgtattgtctaacgtccactttctaggcaactgaactccataagtttataaatttctggtatggtaataattagcaatctaggcaaaatgggaatattatgctaaaagccccatggatcagaaatttagctatttttcagatagtaaatgccattagaacatatacaaggctgtctgtccaaggcaaaattgacttaagacctgatttctcaatctttttgtcattactacccatctacagaaactttttatacattttttctaaacgtaacccatgaaatttttatgccgcaatttttattatcttgtatactatttgtactttatacataagaagtaagatttttttttgccctaagaatttatcccttccccagttgagaatctgatggtttgaatacctctgaggagatagtttcagacctcctgtgaaatctgtccttcccaggccatcctctgacctgcatccgtttctccttgcttcatgtttctcaggaatctctttttaaagtcttacaaa

SEQ ID NO: 616338 - DNA, 640 bp, Homo sapiens
tctcctcagggctctcttggttctatttctactttcccgaaagttattcagtctacattcacatttgatatggtcagaagggaaaagctagctctggcacacgaggcagccaagagcaatgtgcttcttataattcccaggcaactcctttagcagtgtgctgccatcttgattaactgacacacggtgcgcagatgctaaactgttcatgaacccatgctttgtgtaattcacaggcaatttagttctctggttatctgaaaaagaaccaagtagtaaatacagtcyataaatagtaaaatggtagctacaattaattagcagttctaattggctattggtcagttgagtcaccagggggcactgtattacatctttttcgaaattattcaggtggagtccaaacaagagctagtaaataagcatgaattttatttttcttctctgcagaaaacagatcaggtgatttctcccagcattggccattcatcaaaatataatctgacagaaatggctgagagtattattctcttgttccaagatgctcttgtgggaataatattatcacttcctttcctggagttttgattcatttgtgcctcctttctacttgccataatctttattgcttcccgttatt

SEQ ID NO: 616339 - DNA, 562 bp, Homo sapiens
ttgctttctgagccccaatgtaatctccctctgaagatgtcaagtccttcttgggaactccagtggtctgaatttggattctcccactgagatttaatataaattcctcatgttgtacctttcccattaatatattctaataccttagggtcttctggatgtattgcccaagggcagggctgcttgttctgcagcctggacttactgcagggacctttcctgctctagggtaaattgaaagccaacatctttttgtatcaytgggatatgagacagagccatcagaagttcaagaccagcctggtcaagatggtgaaaccctatctctactaaaaactacaaaaaaattagccgggtgtggtggcaggcacctgtaatcccagctactcaggaggctgaggcagaagaattgcttgaacctgggcggcagaggttgcagtgagctgagatcacaccactgcactccagcctgggtgacagagtgagactccatctcaaaaaaaaaaaaaaaaaaaaagaatatgttatccccaaaatgcaaagacacctgtagggtattgta

SEQ ID NO: 616340 - DNA, 562 bp, Homo sapiens
ttgctttctgagccccaatgtaatctccctctgaagatgtcaagtccttcttgggaactccagtggtctgaatttggattctcccactgagatttaatataaattcctcatgttgtacctttcccattaatatattctaataccttagggtcttctggatgtattgcccaagggcagggctgcttgttctgcagcctggacttactgcagggacctttcctgctctagggtaaattgaaagccaacatctttttgtatcattgggatatgagacagagcyatcagaagttcaagaccagcctggtcaagatggtgaaaccctatctctactaaaaactacaaaaaaattagccgggtgtggtggcaggcacctgtaatcccagctactcaggaggctgaggcagaagaattgcttgaacctgggcggcagaggttgcagtgagctgagatcacaccactgcactccagcctgggtgacagagtgagactccatctcaaaaaaaaaaaaaaaaaaaaagaatatgttatccccaaaatgcaaagacacctgtagggtattgta

SEQ ID NO: 616341 - DNA, 523 bp, Homo sapiens
ctggagaccatattactttgctccggtaagagcactctatctctcaaggtggctgaaatcggcactactatacctgtgagttcgtggtagtctactgtgactccgctgcatctgtctgatttcaggagccaggctggtgaattaaattgagatatgatgaagattactgcccttgtaccctttagaacagggtttggtaaactttttttgaaaagrcacatataacaaatagtttaagcatttcaggttatattatctctattgcaacaattcatctctgctgttgtcatgtgaaagcagctataacatataacacgtaaacagatggactccagtaaaactttacttacaaaaaacagatggtgagatggatttagcatatgggtcatagtttgccaactcttgttttagatccttaaaggtggtactattttccactatccactcaggatgcaatattgtttttgtcattctcttggcttattcgtataaagatgtttcagtgttatctgcttagccttct

SEQ ID NO: 616342 - DNA, 518 bp, Homo sapiens
catttattctggggatctacgtaaccaagtttcattagtcttctgcagaacttctccatgaagtagcctagctctttatttaatagacagcctaccctgtggatgtccctgacatctggccatggcccttgactcccactgtagtcttttttggtgatcaatgataataagcaaattactttgtagatgaatataatatctaaccaggtagccatagtaacatgaaaatgcttttcgggtaactagggaaaaaatggtttaatttctttctgttccacatttctagttaaccctttagagatttcattttcatcagtgatgccagtagtagcttagagttctctctctaatccacttagctaatttccctagggctatttccaccaatgccagttggtaagacttgtcccaagaatcttctacaaggctcttggcmcttcttctcaaggatttgttgggagccatcttgaccccaaattctcatgaaatgtttctttcccttctattttcataaatat

SEQ ID NO: 616343 - DNA, 655 bp, Homo sapiens
taccattgacgtacatgttatggctgctgccagggccctttggactccttgttcccacagaccagcaggtaagaagaggagttgccataccagcatgcaaaattgatgctgatccctaggaagaggtagggttgctcttacacagtggcgtcagggaagcatatgtatagaacccaggtgatccactgggcacctcttgctgctcccttggtccatcgtaactgtgaataaacatgtgcagcaaccctaatctaagaagtgtgtgattgtcaagagtttaacgccctttgaaatgaaggtttgggtcatatcaccatgtaagcaccattacctgccaatgtgagagccaatgacaaatgaggggggatttgaaacaaatagtggaagaaggagagataagaaacaatggcaacccccaaatgagctacagcaactgggactatataggtcatcctacaccctctgccttgcctatttgcaatttctctyagaaagagaggcccatgggatcgatagaggagtgtgtcttatatcagaataggggaggtggatgctgtggccatgaggctgtacctctcaggtctcggaccatgaggagcagaattctctgagacccccagttgctgtgatcggacattgttgccacatgttaatt

SEQ ID NO: 616344 - DNA, 655 bp, Homo sapiens
taccattgacgtacatgttatggctgctgccagggccctttggactccttgttcccacagaccagcaggtaagaagaggagttgccataccagcatgcaaaattgatgctgatccctaggaagaggtagggttgctcttacacagtggcgtcagggaagcatatgtatagaacccaggtgatccactgggcacctcttgctgctcccttggtccatcgtaactgtgaataaacatgtgcagcaaccctaatctaagaagtgtgtgattgtcaagagtttaacgccctttgaaatgaaggtttgggtcatatcaccatgtaagcaccattacctgccaatgtgagagccaatgacaaatgaggggggatttgaaacaaatagtggaagaaggagagataagaaacaatggcaacccccaaatgagctacagcaactgggactatataggtcatcctacaccctctgccttgcctatttgcaatttctcttagaaagagaggcccatgggatcgatagaggagtgtgtcttatatcagaayaggggaggtggatgctgtggccatgaggctgtacctctcaggtctcggaccatgaggagcagaattctctgagacccccagttgctgtgatcggacattgttgccacatgttaatt

SEQ ID NO: 616345 - DNA, 488 bp, Homo sapiens
ccagcactaagtttccaattctttgtctccaaattagagatactgttgtatccaggacgtactgttatgtcaaaagtgttttgtaaagaaaatacaggtttcggttttattaatcattatatttgttgtagctattatcctagcctctcattaacttaaaacctgatatttccgaatactacagcttagtaggtggtcttcctcaccccagcctcctccatttgaattggtcctctgttttctacttacttttccttaaatgctgctttgaacatataataaggaatttatcctggctgtacgttacttatcacataaaatttaaactcttttgctagatttcaaaactcttcatratgtcaaaaaatatcatttatagagtgctaagttctaagtgaccattctgagcattttaaatgcattaactactcaaattcttccaacagctctctgaagtaaatacattacagattaagaaattgaggcat

SEQ ID NO: 616346 - DNA, 459 bp, Homo sapiens
gtgctcttctgtattacagctacgtctattctgttagagaacttaattataattcagaatttctgtttcataagtgatggtgcaactctccaagacaccattgtatgtatggatgcatgcatgtactcaagagcatatgtacmtacacacatatgtgagcacataaaaacacaaaggaacctttagctttatcattctactttgaatagatagcttccctactggtatatttatgtttttctaaaattaagttcttgaggagtttgtattcatcacacaaaatgtcatacagacctagtgcatacatttgccataagaaagccctattatattacatgattagaagttaaatcacatttttcaaattttaaatcgaaaagagcataagaatgatctacacacccactcattctcacatttttatgctttcacacagtgaatcagcaaatgtattctttt

SEQ ID NO: 616347 - DNA, 559 bp, Homo sapiens
gatttagagaaatctgtcaagtcctgaattggctgcctctttaaaataacatcttgcaacttacaagtccagggaaaatgtattctcggtgtgtctataacagaagaaaacagaaacactgtggagggaacagaaatactccaatggtctcattgcaatatgactgttatcactgccatgaccagcctcattgattcacccaactcatcacataatcttttgattataattttgcttcccacatatcactgatatgatttgctttccatacagtctatctatatggaaaaatgtactgatcacatggaatctgttcacagcatcagtgaattctaatagcaattcaaaagaatagcttctatttgtgattgaatttcttatgtcattcmaaaaaaaggagctaattgtgtagtcattaattaattattagttgtatactaaattgtgcagtcatatgctgtgtggtaattcttcctttaaaacaatataaattctagtaatttatgtacatatatatgtttaagttatacatatgcacatatataatgaaacacacata

SEQ ID NO: 616348 - DNA, 559 bp, Homo sapiens
gatttagagaaatctgtcaagtcctgaattggctgcctctttaaaataacatcttgcaacttacaagtccagggaaaatgtattctcggtgtgtctataacagaagaaaacagaaacactgtggagggaacagaaatactccaatggtctcattgcaatatgactgttatcactgccatgaccagcctcattgattcacccaactcatcacataatcttttgattataattttgcttcccacatatcactgatatgatttgctttccatacagtctatctatatggaaaaatgtactgatcacatggaatctgttcacagcatcagtgaattctaatagcaattcaaaagaatagcttctatttgtgattgaatttcttatgtcattccaaaaaaakgagctaattgtgtagtcattaattaattattagttgtatactaaattgtgcagtcatatgctgtgtggtaattcttcctttaaaacaatataaattctagtaatttatgtacatatatatgtttaagttatacatatgcacatatataatgaaacacacata

SEQ ID NO: 616349 - DNA, 521 bp, Homo sapiens
atttccagcttgctcacagtgggccrtcttttaatcctatttcaattcagagctcagtgttcccagcttcatcagggtcctcccacatgtctctattccaagttgcagggtcccatacttttccaatcaatgccctcactttaacagtagacacctggcaaggctgtgcatgcagctttcattgcaagtcagccactcacatgataagtttgtgtctgtttttccacagttttagctctttctctccaggaggtaagactctcactcagggcagtcttagcagatttgaggctcagtatctgcttctgaagacaggagatagaatccctgaggtcatcattttctttcatcactttgtccgctgaacttaagagggaccaaccagcttcattgtgttccttggttcttgacatatggtcaatggtattatgtatagagtcgctaaactccttgcctcttatgagtgatgaatcaggagtgtcaaatgcatttattttgcataactctctaaacagttcctg

SEQ ID NO: 616350 - DNA, 519 bp, Homo sapiens
cttcctttccaagaaaaaaactgaggtagcatacggtagtcatgtctcagcaaactccccatctactccctagaatttacattgtactgattgctttattgatcacccactacgatgctttgcataagtgatgatctcaattatggttggtaaaaatctttgaacactaaagtaacataaaatcccaaagacattataaaaccactttgttttcaacttgaaaaactagtactatcaatataacttcccactgagttcaaaacatttctacatgcttaatatattctgttatgtttagagtagagaaaattgaagctaagcccttcgtttagcaataaccattttaatgtctgtttatcacagtaggtaaataatgcagagctcccaaatttagtcataataagcaatcatttttcaataaaaatgggtaattttyccatttcagcttcgtctaagtgcctaccgaattaaagtgttgacttaaaatacatttcaaatgttagtcttattatgataatt

SEQ ID NO: 616351 - DNA, 578 bp, Homo sapiens
tgattgtgaatactgtaaatgcatatattacatctacccaggcaagtagctgatagtgataggaaaacacttaataaaaatgttttacaaaggatgaggtagtcctttttgtaggatgtttacagaacgcctctcaaagaaaattaaagttcatctggaccttaaaatgtgatggtggtaatcatgagggatccagtaagaaaatgactcaaatagaggaaatagagagttcagaggtccagagaggacacagttaccaaatccaaagggcagaaagacagccagagtgaccagaaggtagtaaaagaaacctcgaagctggagacaatgagcccactgargtaggcaggacctagatagtgtaagatgaccttgtagcctgtgactaaacaaacaaaaaagactctattgaaaaagcagtaagaaaaacatattggaatattcaaagttaggaatgaatgcgatctgaatcaatcaagtttttaaattgtctttagctgttttgacttaaaggattgcagagaaagtagataaggctcaattgtagtggttcagacatgaaataattgtttgtttag

SEQ ID NO: 616352 - DNA, 578 bp, Homo sapiens
tgattgtgaatactgtaaatgcatatattacatctacccaggcaagtagctgatagtgataggaaaacacttaataaaaatgttttacaaaggatgaggtagtcctttttgtaggatgtttacagaacgcctctcaaagaaaattaaagttcatctggaccttaaaatgtgatggtggtaatcatgagggatccagtaagaaaatgactcaaatagaggaaatagagagttcagaggtccagagaggacacagttaccaaatccaaagggcagaaagacagccagagtgaccagaaggtagtaaaagaaacctcgaagctggagacaatgagcccactgaagtaggcaggacctagatagtgtaagatgaccttgtagcctgtgactaaacaaacaaaaaagactctattgaaaaagcagtaagaaaaacatattggaatattcaaagttaggaatgaaygcgatctgaatcaatcaagtttttaaattgtctttagctgttttgacttaaaggattgcagagaaagtagataaggctcaattgtagtggttcagacatgaaataattgtttgtttag

SEQ ID NO: 616353 - DNA, 499 bp, Homo sapiens
gccttaattcaaaagggacctctggctgtgagaagtagcagtttatgccagcaactcttatttttccacagtgtcctgaccccatggatttaaaayaaagctatctaaatgtaaataatttatttcttatattgctaaagatattccatgataattgactagatataagactatgaaacttagcatgcttcttagcatcaccagtgaaaccccagatgcagtgtaggcaaatgtagtcacagctacttgagagactgaggcatgaggatcacttgagcccaagagttcaagtccagcctggaaacataggaagccccctgtctccccaaaaatatagattaaattaaattaaaccaccagtgaagcctgaatgattcagtctcacatgtggataatttcagaattactctaaggacaaagttatcttttgtatacattattagatttttttttcctgtaattgaaatagtttaaaaattttaattctggatttattaaa

SEQ ID NO: 616354 - DNA, 452 bp, Homo sapiens
aattcttaattcctcaagtatgcccgatggaataccttgtctccactcctccacatacatgttacatattcatcgcatggatcgtaagacaactcaaccaggagaatcaagatttatgcttataactataktatagttataattcatgcatgaacaacagtgacctcatgtggctaatgctttatgcctgaaactattaaactaagaacaacaaaaaaatgtctatgctatacatcaagacatgtcagagtaaatgattggagctgcctgtgccacacaacatactttcttttttaaggtgactgctcaaatctgtgtatgtttgtaaggttagattggtcaaaggttaacattatggaataagatatctgagggccaagtatcaaatcttacctccttgtattacccaaagcattcagtgctactctttgctcattgaagaaactctccaa

SEQ ID NO: 616355 - DNA, 515 bp, Homo sapiens
agaaatatcatttgacccatcagtcccattaatggttatatacccaaaggaatataaattgttctattttaaagatacatgcatgtatatcttcattgcagcactacacaatagcaaagacgtggaaccaacttaaatgcccatcaatgatagactggatacagaaaatgttatacacatacacaatggaatagtatgcagccataaaaaggaatgagatcatgttctttgaggggacatatttagagctgggagccattatcctcagcagactaacacaggaacagaaaatcaaacaccacatgttccacttatawtgggagctgaacaatgagaaagcatggacaaagggaggggaacaacacacactggggcctgttgggggtgtagcaggggaagagcattaaggaaaatagttaatgcatacagggcttaatacctaggtgatgggttgataggtgcggcaaaccaccatggcacacatttacgtatgtaacctgcacgtcctgcacatg

SEQ ID NO: 616356 - DNA, 534 bp, Homo sapiens
cccatcagtcccattaatggttatatacccaaaggaatataaattgttctattttaaagatacatgcatgtatatcttcattgcagcactacacaatagcaaagacgtggaaccaacttaaatgcccatcaatgatagactggatacagaaaatgttatacacatacacaatggaatagtatgcagccataaaaaggaatgagatcatgttctttgaggggacatatttagagctgggagccattatcctcagcagactaacacaggaacagaaaatcaaacaccacatgttccacttatattgggagctgaacawtgagaaagcatggacaaagggaggggaacaacacacactggggcctgttgggggtgtagcaggggaagagcattaaggaaaatagttaatgcatacagggcttaatacctaggtgatgggttgataggtgcggcaaaccaccatggcacacatttacgtatgtaacctgcacgtcctgcacatgtatcccagaactttaaaaaaataaaaaaaaagat

SEQ ID NO: 616357 - DNA, 510 bp, Homo sapiens
agactaacacaggaacagaaaatcaaacaccacatgttccacttatattgggagctgaacaatgagaaagcatggacaaagggaggggaacaacacacactggggcctgttgggggtgtagcaggggaagagcattaaggaaaatagttaatgcatacagggcttaatacctaggtgatgggttgataggtgcggcaaaccaccatggcacacatttacgtatgtaacctgcaygtcctgcacatgtatcccagaactttaaaaaaataaaaaaaaagatctctgtgatttaagcacaacgttcttcccctatatattctcctgagaccagtatgacatgtaaagtgtccttattttaaaccaccacatgttcaatttcaagaacctctcaagaagtttgcctagttttcctgatattttctggaccgtagcatgtagtattctctctactcttgtgccttatataaaatttaaaataaaaagccttaggaatagaagtaaaatggagtt

SEQ ID NO: 616358 - DNA, 536 bp, Homo sapiens
tgagccaccccgcccgtccatgaactttttttttcttgctaagaatccaagagcaaaacaaaacaaaagcagaaggccatctataggctatcaagctaaagatgtccagtagcatagtaaatttatgagtttgacactcagaggagaaatccagctggagacagaggtttgggagccatcagagtatggacatcactgggttaagtggtaatagatgagttaacccaaagagtatatgagttggaggaagaataaagcatataggagaaagcrctgtggagacacaccagttgagtcagggtttctaaacctctgcactgttgacgttttagaatccataagtctttgtggtggggggtaggctggcctgcacattgtaggatgttaagcagcatccttggcttctacctagtagcaagccttccccactccccaaatttgtgacaattaaagctgtctctagccattgccaaatgtcccctgcagggcacaatccatcctggttgagaatccttgatttaagaaataggcaaaac

SEQ ID NO: 616359 - DNA, 536 bp, Homo sapiens
tgagccaccccgcccgtccatgaactttttttttcttgctaagaatccaagagcaaaacaaaacaaaagcagaaggccatctataggctatcaagctaaagatgtccagtagcatagtaaatttatgagtttgacactcagaggagaaatccagctggagacagaggtttgggagccatcagagtatggacatcactgggttaagtggtaatagatgagttaacccaaagagtatatgagttggaggaagaataaagcatataggagaaagcactgtggagacacaccagttgagtcagggtttctaaacctctgcactgttgacgttttagaatccataagtctttgtggtggggggtaggctggcctgcacattgtaggatgttaagcagcatccttggcttctacctagtagcaagccttccccactccccaaakttgtgacaattaaagctgtctctagccattgccaaatgtcccctgcagggcacaatccatcctggttgagaatccttgatttaagaaataggcaaaac

SEQ ID NO: 616360 - DNA, 598 bp, Homo sapiens
caaaccaccatggagcatgtttacccatgtaacaaacctgcacattctgcacatgtatcctagaacttaaaattaaaaaaagcaaagcaaacaaacaaacaaacaaacaaaaaaatgaaacattcttggatccctgggatgaatgaaactggatcgtggtgtactatctttttcatgtgctgttgaatttgatttgccagtattttgttgatgaatttattgatgaatttccctatgttcattgctaataytggcttgtagtttcctttatttgttgtctttgtctggttttggtatgagggtaatgctggcctcatagaatgtgtttgggagaattctctcctcttcagtttttcagaattgagaaaaatctgtgtttggtcttttttaaaagttcggtagaatttgtcagtaaatccatttgggctttttttgaggggagactttttattatggcttcaacctctttgttcatcattggtctgttaaggttttctagctcttcttggctcaattttggtaggttatatgtgccgagaaattcatccattttctctaggtgttccaatttgttggcatatagttgttcataatagtc

SEQ ID NO: 616361 - DNA, 597 bp, Homo sapiens
ccgacactattcaggcctcacagagcacacagtctgaatgtgtaaaataygcatttgcaacaactgcaggtgaatagtgtcatcgtttgccatatgaatgaaggtttttcggtgttttggggggaggaaacaggtgtgagaattgcacgatgcacggtggcagagcagcgctgaggctaaaggaaaagtgagtcagcacggtgattgtggcgttggttctgactcagtggcagtggagcagcttctgccccatcaaaagagtattatgtgatgggaagggggctttgtgctttttcctgttttaaatacaagatctgggaatttgatttgttcctgtggttgtataagtgctataagcgtaagaggtattgccttgtttttatatggtttgtttatttttatttatttaacaaacacgtttaaagcacatataacctgtcaggggctatactaggtgttttacaaatttcagctcattttatttacacatattttaggtaaaagcaaccaatacaaacttagaggttgcggagaatatatatatgtatatattttttacctttatgtactcactcaagtttaaaataccttgttgaa

SEQ ID NO: 616362 - DNA, 614 bp, Homo sapiens
taataccctatgtttgattgatggaattgtactgagctcttttttaaggttctaatttctccaaacatgtaaaaaaactagcagggggtctcacatatatgtgtaggcatatatatatacacacacatatacacacatgataactctattatgtatatagttatatatgtatatggtatatatatgtatatggctattgtgtgtgtatatgtgtgtgtgtgtgtttgtgtatatatatatggttattgtgtgtgtgtgtgtgtgtgtgtgtrtatatatatatatatatatatatatatatatatatatggttgtcctctctcttttgctaggcagacatatgtctgaagctgatattatatatttgtctattattataaataaccaacataatggtatccatgttattaggtttgcaaaatattttttgaacagaaaacaccaatttagaaggaatacaaacttatattctgaagttcaagtggggagacataagaatgcctgtcctctaatttttttttgaaaaattattaaagctagtccaatgccagtgttggactagtaacctggattttttaaattaatagactttattttttagagcagtttcaggt

SEQ ID NO: 616363 - DNA, 591 bp, Homo sapiens
tatggtaaaaatatggtgttataatcttctgggactacaatggtatatgtggtccgttgtttactgaaacattgttctgcaacacatgactatatataaagggcgaccttggagatatcacagattcagtttcagaccactgcaatgaagcaaatatctcagttcagagagtcacgtggtttttttgtttcccagtgcatataaattatatttatactatattatagtctaataaggtacaatagcattatgtctaaaaacaatgagcctaccataattaaaaatactgctaaaatatgctaacaatcatctgagccttcagtgagtcttagtctttttgctggtggagggtcttgctttgaggctgatggctgctgactgatcartgtggtggttgctgaaagctggtgtggctgtgatgatttcttaaaataagacaacaatgaaatttgctgcattgattgatttttcttttcatgaaagatttctctgtagcatgtgatgctgtttaataccatttgatgcacagtaaaacttctttcaaaattggagtcaatcttctcaaattgtgcccatgctttatcaattaag

SEQ ID NO: 616364 - DNA, 493 bp, Homo sapiens
ccatctgtggttgggtcttaaccctgtagcaatatagatgagctgagctggtagaagttgtaaaaattatatttcttttttatttcttactacaattctttttaaatataaaggsgcaggatcacgatttatttgcttgtcagtatggagtattctattccctttagaaagcataggaagttttggttttgcatgtctcagtctgctctactgtctgtgctatgcagtgtgccagttatatctcttttaatattagagtcccatgtattagatgataatattctaatcttataggtggagaatttgagtcacaagggttaagtgacttgctgaagataaaacacccagtagagtgaatttcaaaacctgagtgaggctgggcacggtggctcacgcctgtaatcccagcactttgggaggctgaggcaggcagatcacgaggtcaagagaccaagaccatcttggacaacatgatgaaaccccgtctctacta

SEQ ID NO: 616365 - DNA, 586 bp, Homo sapiens
ttgcccaggctggccttgaactcctgggctcaggcaatccttctgcctcagccttcccagtagctgggtcactgtgatgatttgaattgaattctgtgatgtgtaagaagagcagcctgcaaggcaagcacagatggggcagcttttgttctgagaaattcgtgcccttactgaacttgggtctggctatttttggaacatggccagcatcaagttctaacccacaacackgtctttttggagtagcatgaattcaggagaaatctggctgcatagtcaagccctcaccccttccatcctgtgcacgaactgtttcaagtaacagatgttccaggcagagccagccagagtgagctgttccttctctggagggtgatctggtatccctgaacgcctgttggcctcatctccaccaacccctgcagtctctgcccctgagtccccctccttccatccgcctccccttactagagcctcagccctccctcctcgcctggaagccttgcccccgcccccttgtgctggctggagctcaagcctcttcctttgtcgcagctccgcccagttgaacacacccgctggggaa

SEQ ID NO: 616366 - DNA, 387 bp, Homo sapiens
gagttgtgatcatcccatctaagctgcagcttcctgtcaacacttctcacatcttatgctaactgtagataaagtggtttgatggtgacttcctcgcctctcccaccccatgcattaaattttaaggtagaacctcacctgttactgaaagtggtttgaaagtgaataaacttcagcaccatggacagaagacaaatgcctgcgttggtgtgctttctttcttcttgggaagagaattcaggccgatattccttgtcgttttactctttgtcagaggaaagaatgctgagtttttcttcttcctttcatttcaccctccttttttggtrggtggttggggaggcctcaaattccactcctagtggggtttttgttgtttttaggggg

SEQ ID NO: 616367 - DNA, 619 bp, Homo sapiens
cagctcattccaaccttgatgtgttaaactatgtgcaaacaggagggagactggagccaccaagaaattgtcctgatgatctgtaagttaattatgttaacatatgtatcccccaaacaaaaacatgtgcacatacaatcttaggcctcttgatatagtttgttaaattgttaaaataagaactggaacttaaatattgtataccccacataaaatatcaattcattgtgtcaatttgtgaatatattatggcttctttttaattgtatatacacatgatatttcactgagaaacaaaattttggagagtaaaatacttctggttaagtaaaatacttctggttaagtgaattctaataaaagcactccgagtgtrtgtgtgtgtgtgtgagagagagagtatacacacacatatgccttttattttgggagatatgatttgactagtatcttaatctacatattaaaatattatactaaatgggaatatattgttaaaaagttggattccctttgttgatatagctgacattgactaataagaaatagtattactaaaaattatacaggttgtgacctgtttatgaacataacaaaaaatgactaagtattgtaactt

SEQ ID NO: 616368 - DNA, 619 bp, Homo sapiens
cagctcattccaaccttgatgtgttaaactatgtgcaaacaggagggagactggagccaccaagaaattgtcctgatgatctgtaagttaattatgttaacatatgtatcccccaaacaaaaacatgtgcacatacaatcttaggcctcttgatatagtttgttaaattgttaaaataagaactggaacttaaatattgtataccccacataaaatatcaattcattgtgtcaatttgtgaatatattatggcttctttttaattgtatatacacatgatatttcactgagaaacaaaattttggagagtaaaatacttctggttaagtaaaatacttctggttaagtgaattctaataaaagcactccgagtgtatgtgtgtgtgtgwgagagagagagtatacacacacatatgccttttattttgggagatatgatttgactagtatcttaatctacatattaaaatattatactaaatgggaatatattgttaaaaagttggattccctttgttgatatagctgacattgactaataagaaatagtattactaaaaattatacaggttgtgacctgtttatgaacataacaaaaaatgactaagtattgtaactt

SEQ ID NO: 616369 - DNA, 618 bp, Homo sapiens
agcccttttttgtgggagatatgttccaaggcccccagtggatgcctgaagccaagaataatacctgtattagttcrttctcacactactatcaggaactggtaacttataaagaagctgggtaatttataaagaacctgggtaatttataaagaaaagaggtttaattggctcatggttccacaggctctacaggaagcacggctcaggaggcctcaggaagcttacaatcatggcagagggtgaaggggaagcaggcacagtctttcccatggccagaacaggaggcaaagagggagcaagaggaagaaacaaggaggtgctacacttttaaacaaccagatctcataagaactcttatcaccaaagcagcaaggtggaaatctgcccccatgattcagtcacctcccaccaggcccctcctccaacactggtgatacaattctacatgagatttgggtggggacgcagggccaaatcgtatcaatacccaaccttatatacactatgttttcttgatctgacaacctagtcaactaatgggtaggtagcatatacagcatagatatgctggacaaagggatagtttcatgtctcagtttcatgtttcattacact

SEQ ID NO: 616370 - DNA, 555 bp, Homo sapiens
ggcaatagcccttttttgtgggagatatgttccaaggcccccagtggatgcctgaagccaagaataatacctgtattagttcattctcacactactatcaggaactggtaacttataaagaagctgggtaatttataaagaacctgggtaatttataaagaaaagaggtttaattggctcatggttccacaggctctacaggaagcasggctcaggaggcctcaggaagcttacaatcatggcagagggtgaaggggaagcaggcacagtctttcccatggccagaacaggaggcaaagagggagcaagaggaagaaacaaggaggtgctacacttttaaacaaccagatctcataagaactcttatcaccaaagcagcaaggtggaaatctgcccccatgattcagtcacctcccaccaggcccctcctccaacactggtgatacaattctacatgagatttgggtggggacgcagggccaaatcgtatcaatacccaaccttatatacactatgttttcttgatctgacaacctagtcaactaatgggtaggt

SEQ ID NO: 616371 - DNA, 558 bp, Homo sapiens
gtaaaaacctcctaactgaaatatgaccaaccttgagagattctctctatgccttggcaatatttttgaatcacagctttattttcaaaaataaaatgcttcactttttcctctcaactctgaggacaactgttagattaatcatcaaaactctactttattttttaaattctgtgatctgacatcgattataatatctcatttcaaaggctaatgatccttcattgacatctttgtatcatccccatttctaaatggcacaggttatagagaactatgtaaaagattagrttgtcttttggttatttctcagatatgattctaattttaaaaaatagagccaagcttggcactgtatacccattatgtaaattgcttgtaatacatgtgaagtcatcagatcaatacattgaaacagtccaatattggttttccttgataccatttattctgatatggtgtaccaactctgacctgaggtgcttgttaggaaacgaaataaatggaagtggagtttgtatgccatattataatggaatggagattgcattataattc

SEQ ID NO: 616372 - DNA, 615 bp, Homo sapiens
ttgccaataggggctgatgcctaggctggatcagataagtcactccttattgaattctggattagccactgagactatcaaagatatggagggcacagtggggttcaaaggattcttcaccatgcctctagaagtcacataagcctcgtactcaacatatatcctgacactaccttagamaggaaggcagagggagtggggatggcctgaaaataagagaggttgggttattatccagaaaagactgaatattacttaaaaagattgtttaaaatagtgggactaagttataaacaacattgtactaaatgaagtttcttttcttatgctaggtagggactctgaaaaagacctagttaattataaacaatataaaatacttacaatttttctgcttatatgagttgaggtgtgatgaattttgcctttctcttataattactatacatatcatctatgaggacaagagtcacatggccatgtccctagctcctgatatactgctggtataaaacaagtgtccaacatctttgctgagtgaatgaatgaatactacttaagagtgctgcacagatatttcttggacaaccattaaggaaaagataatgtttaatt

SEQ ID NO: 616373 - DNA, 541 bp, Homo sapiens
gtcttactacatattttgggtgactttggatccattatatgagcataaaactctgatcatgtaacttcttcaacacaaactgcyaagcgacagattggaaagggctgcacatgccttggccatgcgtcataaccctcattagagtaaaccttgttaatagtctcacattgtttctactcactatcatcctggacagagctgattcttagaatgccaatggcagaacacttgggaattataactggcacagcaactccatccttttggggggctctctatatatatacttgcctatgtgaagatcacataggattaggcaaacatacccttaagccattctaggtactattaaggccttgtcattttctaagcatttacttaatgagacatttctctgaataaaattttgataattaaaaaaattatttcaacacttactgatctgggggcaaggcatagtgtaagcacctgtatttaatgtcttccatttgtctgctttaaagaaaaacaagaggtgagagtatttctttctcttggaagc

SEQ ID NO: 616374 - DNA, 541 bp, Homo sapiens
gtcttactacatattttgggtgactttggatccattatatgagcataaaactctgatcatgtaacttcttcaacacaaactgccaagcgacagattggaaagggctgcacatgccttggccatgcgtcataaccctcattagagtaaaccttgttaatagtctcacattgtttctactcactatcatcctggacagagctgattcttagaatgccaatggcagaacacttgggaattataactggcacagcaactccatccttttggggggctctctatatatatacttgcctatgtgaagatcacayaggattaggcaaacatacccttaagccattctaggtactattaaggccttgtcattttctaagcatttacttaatgagacatttctctgaataaaattttgataattaaaaaaattatttcaacacttactgatctgggggcaaggcatagtgtaagcacctgtatttaatgtcttccatttgtctgctttaaagaaaaacaagaggtgagagtatttctttctcttggaagc

SEQ ID NO: 616375 - DNA, 557 bp, Homo sapiens
taatgagttatcagttgagacctagacagattatagaagttgggcaactgccttgaagttaatatcagacataagtgaggaccaaacttcttcttgaagcccttgaagtaatagtgaacatatgctaaaggaaaaaaacatttatttttagcattctcagtttctgccctatcccaaacccaccttttaccctcagaatagcttctatgaatgtaggatggatgttagggtgtccttgacttctctttgatactccttggtaaaargaagcctgtccaactttccttttggcagctggtcagggttacagggagcctgaatcagatgacctatcctgattctttcgggcttcttcacatacaaccagaagaattaaggggccgaaatatactccccaaacactactgtgaataatttaggatgtttccttccagttttttctccccaataggagcttattttcatggctggaatagttgtagttgtacctctcctagtttttttcacttaacattattacataagctttacctctaattattaaaaatattttggga

SEQ ID NO: 616376 - DNA, 205 bp, Homo sapiens
ctcactcactatcacgagaacagcattagggtaaccatycccatgactcaattacttcccaccaagtccctcccatgacacatggggattatgggaactacaattcaagatgagatctgggtgggggatacagccaaaccatatcaaagcatgtatccctagggcaaaataaatggacagccagtccttaacatccaaaatcagt

SEQ ID NO: 616377 - DNA, 575 bp, Homo sapiens
atatgggtatacacatatacctatacaggtttacatatacctatgtaacaaacctacacgttctgcacttatatctggaacttaaagtaaaataatttwaaaaaaagaaaatccaaatagatggaaacttccttaatttgattaagtgtagtcatcaacactctgcataaacatacataatggataaattttagaagctttcccactgaagactaaaacaagataaagatgtctactatagttacttctcacaaacattattttgttggtcctagccaatctaacaagacaaaaggggagaaaagggcacgagcatttgaaaggaagaagccaaatatacttatttgttagcggtatgattatatacttagaaaccttaaaagaatttgtagatatagtaataaaactactaacagagatcagcaagattgctagactcaagagatcaacttaaaaaattagtaaccttaatatacctaagtaataataaattagaaaatgtaataggaaaagatcctaatcaaatactacaatgtatgtagaaataaatataataaaatatgttcaagattatg

SEQ ID NO: 616378 - DNA, 512 bp, Homo sapiens
ttggtcttaatctgcaccatataccacatggacctaatagatatttataaaacatttcattcaatggctgcagaatacacattactctctttaatacgtggattattctccaggatagaccctatgttagccacaaaacaagtctttaaattttcaaaaacattgaaattatatcaagtatcttctctgactacartggaataaaactagaaattaataacaagaattttggaaattatacagacacatagaaattaaacagtttgcttctgaatgaccagtgggtcagtgaagaaattaagaaggaaaatttaaaaattcttgaagccaatgaaaatggaaactcaacataccaaaacctacgagatatagcacgatatcatttggatatttgttcccactcaaatctaatgttaaattgtaatccctagtgttggagataggacctggtggaaggtgtttgggtgatgaaggtgaatccctgatagcttagtgctgtctttgtgatagtg

SEQ ID NO: 616379 - DNA, 558 bp, Homo sapiens
agctataaggcatgcactggtgagaggttcaccagcattaaagataagtcaattatggcagtactttgtaggccaacatgaacagtagaagatgctgtatcagaatgatacartgaagacaataggatgccaaaatgatagaagccaggtggtagcacttagccatcagaaataaggtgagtgtagttattagaatgatcaacgagtgcagactggcagccagaggaggccaacatgcagagagatatgaagagggttaataaaacacagtgttcctagtcagaagatagttggacagccaacaagagtattgctctatttatacaacaaaaataaatcaagatggatgatcatgaggtagggaaactgccccaataaaatatcatgatcctttgcgttttttgtggccatggtccatgttacagactgggattccttagagtgaaggaaagggcaggtctccaggaaaaaagactgctacattacagcaagtggtttctcagtccttctttaaaggaatctatgaccatttacttacgtaactatacactgggcaaa

SEQ ID NO: 616380 - DNA, 539 bp, Homo sapiens
atggtctcattcaatatacctaattttgtgacagttaatctaaaaaagatcaagaattattattgttctttcttaactagtgtgctttgtgagtttttatggcatgtcatgcactctagggtttatgaattaaagttcactaggagttactctgagtgcctgcaaaactctgtccaagcttcagtgtctactccaaagctcttaattggtgtggaaagtaaaaacagcaaaaagattatcctcaaaataatgagatactgtttagtcatgtctttttactttatttggtttaagctagcaatggagtccttttttcttgcatatttttgagagagtggggaaaatgttttgttgtcagatattccatttttatacaaagagaaaaaggtttttaaaaagggtcacttaaaygtatggctcctgagggagggaaagtgaaaagatggcatttattggaagttggcaatagtttgaggacagatggctttttggctctttctgctttgccgtatttaaatgttgtttaaatgtttttctcc

SEQ ID NO: 616381 - DNA, 475 bp, Homo sapiens
tttttggctctttctgctttgccgtatttaaatgttgtttaaatgtttttctccattaattctactatttgttctctatggtctagtaaagtgaattctattgctttttaaacacacacacaaatgcacacacacacacacgtgtgtgaccaagcacagagctctgagaagctcatatcttctcagcataaatcaagttctgaaggatttgagaaaagcacaccaaatctcaaatgagagggatgttgttcataaaaggactgagattttccagatactccatttcagtagtcagtgagctggtgagtagaaagattataattataattataattttattccacacacaacatgcacatggatgtgacttccttcatggaaatgatggcatgacactccagacgaacttctcccgttctrtgtatttcaccttgaccccagttctggatcacagttgactggtgtcacttgagtt

SEQ ID NO: 616382 - DNA, 176 bp, Homo sapiens
aggtgtgaaccactgtgcctggcctatttttgtggttttgatttgtatttcccttatycctattaaccttttatacatcttcttttctctcttcaaatcttttggaaagtttgtctgattattccagataaaagtcctttgttgaaacctatatcgcaaatgtattctttaatccc

SEQ ID NO: 616383 - DNA, 472 bp, Homo sapiens
ttgggttctggaaagcctgactgccctgaaatatctctccctgccgtcttgccaggttctgtaattcctaccatgagagccatcctccagttaaggcatcatgtctccaggaggcccaggttatagagcagccacccacagccaacctcacacatttaacccgtaattgcccactagcctgcagcctggctgcagagaacagttaccagctgttggtaacccaacactgctttgctaagagaagctttttgacagcctcttcacataagtgggggaaatgggtgccacaaagctctggatcaggagcataatggcttccatgggagaggccaaatctctgcagtgatggtgcctccacttcctatcccagggcatgggaagattagactttggattccaggaggaatgtgaaaatgcaaatggaatcaaagatgtgtacctaarttcatggatgatggatccaatgtggaat

SEQ ID NO: 616384 - DNA, 482 bp, Homo sapiens
ataagggtgtccagaagacaaaatctttttcttgatggagttgacggtttaatggagtcatggcataagcttccgaaacagttgaaggatgagtaatacacagaaaattgtcaggagaaaattatgtggggtataaccattgcactagattgttttgtagaggagacagattggcactgaactttgtggctaatattttagaccatgagataggaaatgtattcaaaaggctgaaaattacatgggagagagtaaatatgatcagagatttracccataggctgttacctggagaatgcttgggtatacattgacttataactaagaaagatgaatttcaattttctgcttaggtatgctgaagaaaaattaaaagtgtaactccagagaagtaagttcagaaagttagcaaaaaaaaaaaaaaaaaaaaaaaaagcacaacactcaaattgtcttatccttttgaccaaacaacaagattg

SEQ ID NO: 616385 - DNA, 375 bp, Homo sapiens
cattttattcattccctactgagggctgtttctgttattttccactttttttcctgctgtaaacactgccgtagtgatcctctaacgtgyctcttctcttgaacatgtaggagtattcccttttttgtgcacttagaagtgaaatcgtgaaactgatgggtatgaacatttctaattttaataaatattgcccaactgctcttcagagttcctgtggcaattcaggttcagaggctggagctttaaatgtaatattttattaattatgtccagctttcaaatggtcagaatatatggcttatgtgatagagtcatgtggacataacgtatatattaatagttatattacattctccttgaattcctaagagatct

SEQ ID NO: 616386 - DNA, 533 bp, Homo sapiens
ttcctttaatcttttgaaattgctgtcttttggatgggtctttttgcttttatattctttgatgcccttgaggttttggatgtggcataaattaggtttaatcgattggcttcgtttctggatactttcaggggtccaaggctcagctcagcattcctgggctatgtgatctaatcctcaggggctgggacctgcggctttgctctctggctcctcaaggttaagcacctgctgtgctggaggggccgaggtgttcccagttcactggcagcaacatccccaacaaaggctgtcagcaaaagtgttccagtggggcagtggtgggaccccacgtacatgtacaccagcacatgagatccccagggaaggcagaggtcctcatgcacatggacactggtggggcagtggtgggtcctcctgcatgtgcttactggcaaggtggcagagtgaggttcgagtaggtgcattgttggtgggggtccagctgcaaaagcactccaatggttagaygggctctgctggtaaaagagcag

SEQ ID NO: 616387 - DNA, 587 bp, Homo sapiens
tattgtttctctgagttttaatagtgtgtatatattgcattataattaagttactgcatgtctgtcttatccttacccatttcccaggacacagtgtaaatattttcagaataggaccacttgttatttatttttacagtctttgtgcctaacacagaatctagtacatagtatttgcctaatggatatatactgaataatatgtaaaatttcattccacatatagtacaattgaaatctatttttgataaacattcatacttgctgtctgcacyggtgctgtctttatttatttatttacagatggagtctctctctgtcgcccaggctggagtgcagtggcgtgatctcggcttactgcaacctctgcctcctggattcagaggattctcctgcctcagcctcccacatatttgggattacaggcacacgccaccacaccccgctaatttttgtatttttagtagaggcagggtttctccatgttggccagcatcatctggaactcctgacctcacgtgattccacctgcctcagcctcccaaagtgctgggattacaggtgtgagccactgcacatggccgttt

SEQ ID NO: 616388 - DNA, 476 bp, Homo sapiens
gtaaaaatgttaaaaaaaacctaggcaatttcctgtttctttcttttatccttctattattaaaaattctgctgagtatatactttctagaaataagagtatatttgaactgcatttcttactatagcatatgtttattaacagcaagtgccaaaatatcttaacttttgatttatatctagcctctttttgaatgaccagtctcatctctaagtttttctgtctttaaataataaggctatttcaagcatttcagaatgaataattaattgctgaacctgaaatctstctggtatcaaagtattaatgcctgaattaattttcaacttataactgttttcatttacacctacttccttggtagttatttaaagcaattttatcttccccgtctgtggcttacatgttaatgtatttcattttaatgaacactctttaagctgtagaagtaggccagacactatcagaatgtgtca

SEQ ID NO: 616389 - DNA, 612 bp, Homo sapiens
tttacagtgttctctttttgatgaccatttacatgaactatggctacctctgctggaagcaggagactttttaagacctgtttgaccagttctccatgtatgaattcttttcccctcctatttattagaccctgctttgtccagatttttttaagtgtgyaccactccataggcacatttagaatcagtatatatagtatcatcttgaccttcaaggagctttagggcctggttaagaacacataacttacaggtttgggctgactagccattaggtaatttacctttcccacgtaaacagtgtttattttcatcaatgacagcataaccattatggttttttttgtttttgtttttgtttttgttttttatccatcactttggatgacccattcacaaacagccttatcccatcatgtagtggagcttccctaaggtctggtctaactttggttttgtattttatcatatctaagcagttatggtctgatgtctttcgttcccctctcctttccataggaaactggcaggattcaggcaagtattcattgttatgaccaaatgattttttttctattattatggctttgtattttagaatctgagaatatg

SEQ ID NO: 616390 - DNA, 574 bp, Homo sapiens
aataccatcatcaactattcatccctggagagttgatgacacattttcagtgcctagtaagtgctttaaaacatgttgatagaactgttgaactattttgttaatacagtggttccttaggaaaatgattgatgccttcttgccagtatcactaccatcctctctttcttatactttttcacagcattataatagtcttctctctccttcttttattgtcttctgatctcagaagttacaagattgctaaatatccatggtacccaaatccaaacctttgctggtacttatcgtaatgtcagcttaatatgttacctccagtgatctatgtctgtgacaaattttgtgatattcagtatacagttgacccttcaatgatgtaggggggtaggagcagcaattccttgtgtagtcaaaaatctgtgtataacttwtttttcttgttttctttttttttttttttccgagatggagtctcactctattgcccaggctggagtgcagtggtgcgatctcagctcactgcaacctctgcctcccaggttcaagtgattcccctccctcagcctcccaa

SEQ ID NO: 616391 - DNA, 562 bp, Homo sapiens
ggaccctgagcctggttcacgaaaccattttttcctccttgacctccaggcctgtgatgggaggggttgccataaagacctccaacatgccctggagacattttccccattgtcttggggattaacattctgctcctcattacatatgcaaatttctgcagccagcttgaatttctgctcagaaaatgggattttcttttctatcacattgtcaggctgcaaatattccacacttttatgttctgcttcccttataaaactcagccaggcacagtggctcacgcctgtaattccagcattgggaggctgaggagggtggatcacctgaagtcaggagtttgagaccagtctgaccaacatggagaaaccctatctctaccaaaaatacaaaattaatcaggcatggtggtgcacgcctgtaatcccagctactcgggaggctgaggcaggaggatcacttgaacctgggaggcagaggttgtggtgagccragatcatgtcattgcactccagcctgagcaacaagagtgaaattccatctcagaaaaaaaaaaactgtatg

SEQ ID NO: 616392 - DNA, 591 bp, Homo sapiens
ccattaacaagtaaatgcataaacaaattgtgatatgtttatacaatagaatactacttggaaacaaaaccaaaaaaactactggtatgtatagcaacatgaatgaatctcagaaaccatatgttgaacaaagggagccagaaacagaagagtatctgccatgctgttcattcattaaaaattcctrgataggcaaaactaatctacagtggtgaaaagcagtggttgcctggagctggaggttggaggattgagtgcaaagggacaggaaagggttttgggggataaaaatgttcaatatcttattgtgctgatagttacatgggtgtctatatctgtcaaaacattagcactttgagaggctgaggtgggcagatcatttgaggtcaggagttcaagaccagcctaatcaacatggtgaagcccatctctactaaaaatacaaaaaattagccaggtgtagtggcacacacctgtaatctcagctacatgggaggctaaaacacgagaattgcttgaactcaggaggtggaggttgcagtgagcccagatcataccactgcactccagcctgggcaacagagcagtgag

SEQ ID NO: 616393 - DNA, 618 bp, Homo sapiens
  misc_feature 614, 615, 616, 617, 618: n = A,T,C or G
ccattaacaagtaaatgcataaacaaattgtgatatgtttatacaatagaatactacttggaaacaaaaccaaaaaaactactggtatgtatagcaacatgaatgaatctcagaaaccatatgttgaacaaagggagccagaaacagaagagtatctgccatgctgttcattcattaaaaattcctggataggcaaaactaatctacagtggtgaaaagcagtggttgcctggagctggaggttggaggattgagtgcaaagggrcaggaaagggttttgggggataaaaatgttcaatatcttattgtgctgatagttacatgggtgtctatatctgtcaaaacattagcactttgagaggctgaggtgggcagatcatttgaggtcaggagttcaagaccagcctaatcaacatggtgaagcccatctctactaaaaatacaaaaaattagccaggtgtagtggcacacacctgtaatctcagctacatgggaggctaaaacacgagaattgcttgaactcaggaggtggaggttgcagtgagcccagatcataccactgcactccagcctgggcaacagagcagtgagactttgtctcaaaaaaaaaaaannnnn

SEQ ID NO: 616394 - DNA, 574 bp, Homo sapiens
catcaccaggctgtgggcagaaagatgagccaggcagacatcctgtttttaagacacttacagtctgaaagggcaggcagcaagtagacagacaattataataccatgtggcaaatgaagcccactaccaccattccatcttatatacatagtattaataaatgttaatgcttgtccttattcttaatgaggaaattttactgtctgccctccatgatgagaccaggaaaagatctaaggtgacgctctaaaagaaactgaagaaagacaatttactaaatggaccttagaggaacagggaagagggcattctcgaaagtgagaagatgttatgcaaagatctggatgattcgtttgcagtatagtgtgtttaggacacttcatagtagggggcctgratgaagtacttgtccaaggtcctgcagctgtttaaccgcaagtcttgtggtcaaggatggtttccagagcatccttctccccggctgtaagtggccagaccctccctaacacactgagcttcctgagtgtaatgctgcctgaccatttgccctccaaatgggtgctcacagcaaat

SEQ ID NO: 616395 - DNA, 511 bp, Homo sapiens
gaagaaaggagaattaggagatttggacgagacttgtaaggtgaggaagctctttgaaaaacaagctttggctcaaaatctgggcagaaattctagttggctctccccttttatttttaactggtttgtttatccctaacaaasagtagatgagcagttctgggaatcattattaaaaacattaaaaaaagataagcctgcatgtaaagaaatcctttgctgttgtatttgatgagatgacatgttttattcaaataccccattacctagtagaatctttggcacatagtaggtgctcaataaacagtgattagttgattgactgaatgtattaattgccttttaatggtatttatctttctcctctcataagaggacacagctgtacctcccaacattcttatgtggcttgtcaaaacaaaaacagactaggcttgaattggccaccctgattaatctggtcttgatattttttcagaagccatttttgtcatcagtgtagctggtgaaa

SEQ ID NO: 616396 - DNA, 537 bp, Homo sapiens
cttgtttttctagtttctttacgtgtgatgttaggttgttaatttgagatctttctaacttcttcttgtggacatttagtgctataagcttcctcttaacactgctttagctgtatctcagaaattctggtatgttttaattttgttttcattagcttcaaagaattttttttgtttctgccttaattttattttttttaatccaaaagtcattcaggagcaggttgtttaatttccatgtaattttatgattttgagagatcttggtagtgatttctatttttattgtgctgtggtccaagagtgtgtttggtatgatttcagcttttttgaatttgtttagaattgctttatggctgagcatgtggtcagttttagagtatgygctgtgtgcagatgagaaggatgtatattttttggggtgctgtattctgtagatgtcttttagttccgtttaggcaagtgtcaagtttagttgctgaatatcttcattagttttctaccttgatgctctaacactgtcaggtggggtgttga

SEQ ID NO: 616397 - DNA, 552 bp, Homo sapiens
aactaatcttcagggaaatgcacattaaaaccataatgagataccacttcacttcagttagaatggacgttatcaaaaagacaaaagaaaacaagtgttggtgaggatatggagaaaagctaactgcttacacaccgttggtgggaatagaaattggtacagccattgtggaaaacagtatggaggttcctcaaaaaataaaaaatagaaataccatatgatctaccatatgattccaatactgggtatatgtccaaaggaaatgaaatcagtatgttgaagcgatactagccctcccatgtwtattgcagcacttttcaaaaatagccaaggtatggaatcaacctaagtgtccaacaatgaatgaatggataaagaaaatgtgttatacatacataatggaataccattcacccataaaaaagaataaaatgtgatcatttgtaacatcatggatgaacctggagaacctgaaataagccagacacagaaagacaaataccatatatctcacttatacatggaacctaaaaaaagttgctatcacagaag

SEQ ID NO: 616398 - DNA, 596 bp, Homo sapiens
aagaatattacaaagtaccttcttaagggtgggggagaatatatgtatcagttaaggtagggcaggaacaaatcacaatggtggaatgtcatcagtcaaggctattttcacttcttttgtggatcttcagttgcttcaggccatctggatgtatacatgcaggtcacaggagatatgatggcttagcttgggctcagaggcttgacaatataattatttacagtgcaagtagagtaaaatcaaaagggcttgtctgcttctaatgatcaaacactcgttaatgcctttcagggtggcccaaacatctactatgagaaataatgttttcgaatgtatcaggttattttactaattatttagagcctttttgtttccaaagagaaagtgaaatatttggctcaggcagcattgctacaaaaatttaggtataaaattttaacaagaaattaatgaaaaagatagtggccaatcaaaagctgggaataatgtctgtttgtcctggctgaaakctgatacaatatctgaatatttttttttttaagagctctatggggctggacgcagtggctcacgtctgtaatcccagcactttggga

SEQ ID NO: 616399 - DNA, 290 bp, Homo sapiens
cagaattcatttttctatagtagcrgctgtatatgaggttataatatctatagtgtagcccacaaaagcctatttaacccacagtgcagctgaaatacagtagtaatttatccacataaaatcatgttcataataatgttgctttagggagtcaaatgcagagtttatttctaatggaaacattagaaaacatggctctcttgggactagagcccatgttccttttgtttttcattttagtgtgggtaaaactgctttaagaacgtttgtggtgccacaaaagcatgttt

SEQ ID NO: 616400 - DNA, 564 bp, Homo sapiens
gaattcatttttctatagtagcagctgtatatgaggttataatatctatagtgtagcccacaaaagcctatttaacccacagtgcagctgaaatacagtagtaatttatccacataaaatcatgttcataataatgttgctttagggagtcaaatgcagagtttatttctaatggaaacattagaaaacatggctctcttgggactagarcccatgttccttttgtttttcattttagtgtgggtaaaactgctttaagaacgtttgtggtgccacaaaagcatgttttgcttcaagcattcatggactggtctggcaatgcacggctttgctccttctgtgtctgttgtcctgggaagacgagaagaagtaggccaggcatctgaggacttggactgcatcctgttttagcccgatttcctcagtgccattggtcaagtcactaaatgttctgggaccaaatttccatattcgatggaatctatatattttttcacaatgtattcaaagtggttgttagtaaatataaagaaattggttaaatgttattatataatgtaagtt

SEQ ID NO: 616401 - DNA, 560 bp, Homo sapiens
ataatcatctctttgtgcaaaatttgaaaatttttccttctaaatcayatgcttatgtaagtttcctattaacaattcattcttctcaaagtccccctcctgccagcccagatatcttgacttgtgttctaacagttcaaaaaatttgatgattatttttctctcttgttctcctctcacctttaaaatttttcctgctacctttgagtttattgcctttttcttgaaaatatgcttattttagaatcattttctatcccctgattgttttgtataagcaataacatatattgatacttaaaatgatggcatattctaccacgtaagaaagaaaatgacacagacaatgtcaaaacaaccacctgccattgaaattgtagatggagaagaatattgctggtcttaacattttctacattgtaagcttttcatctcaacacattgttggtgaagtgtgaaaaatggtttaattggtgaagtttatcctccacctctgttatatacaattcacgttacacattacacacacatactatataaaatctactgaaggaagaaag

SEQ ID NO: 616402 - DNA, 560 bp, Homo sapiens
ataatcatctctttgtgcaaaatttgaaaatttttccttctaaatcatatgcttatgtaagtttcctattaacaattcattcttctcaaagtccccctcctgccagcccagatatcttgacttgtgttctaacagttcaaaaaatttgatgattatttttctctcttgttctcctctcacmtttaaaatttttcctgctacctttgagtttattgcctttttcttgaaaatatgcttattttagaatcattttctatcccctgattgttttgtataagcaataacatatattgatacttaaaatgatggcatattctaccacgtaagaaagaaaatgacacagacaatgtcaaaacaaccacctgccattgaaattgtagatggagaagaatattgctggtcttaacattttctacattgtaagcttttcatctcaacacattgttggtgaagtgtgaaaaatggtttaattggtgaagtttatcctccacctctgttatatacaattcacgttacacattacacacacatactatataaaatctactgaaggaagaaag

SEQ ID NO: 616403 - DNA, 560 bp, Homo sapiens
ataatcatctctttgtgcaaaatttgaaaatttttccttctaaatcatatgcttatgtaagtttcctattaacaattcattcttctcaaagtccccctcctgccagcccagatatcttgacttgtgttctaacagttcaaaaaatttgatgattatttttctctcttgttctcctctcacctttaaaatttttcctgctacctttgagtttattgcctttttcttgaaaatatgcttattttagaatcattttctatcccctgattgttttgtataagcaataacatatattgatacttaaaatgatggcatattctaccacgtaagaaagaaaatgacacagacaatgtcaaaacaaccacctgccattgaaattgtagatggagaagaatattgctggtcttaacattttctacattgtaagcttttcatctcaacacaktgttggtgaagtgtgaaaaatggtttaattggtgaagtttatcctccacctctgttatatacaattcacgttacacattacacacacatactatataaaatctactgaaggaagaaag

SEQ ID NO: 616404 - DNA, 486 bp, Homo sapiens
gtttaattggtgaagtttatcctccacctctgttatatacaattcacgttacacattacacacacatactatataaaatctactgaaggaagaaagaattttctgtacttttggaactttgcaagtgaagtatttcatgtaaacagataattaatgggtaaacagaagtattctataactcacctttgtttgtgaacaaggctgtccttcaaattgaagtacatttgtggaatgagaggagagtggtcataaaattaggagtcaagtaatttcttcatgatctttattttcttacatcttgggcctacatggatgcaataaggcctcgctagccagatcctttayatacatactactttccactttcaaatgattattctgagaacttctgagaaacatctgcttcctgctgaaatcacactaaaatatcagaaaagagataaaagtttatacaccataaaatcaaaaatggaataggagaaacag

SEQ ID NO: 616405 - DNA, 558 bp, Homo sapiens
cagaaaatagcctccaaggggtaaatctaagagttaytgaccttaaagagaaggtaggccaggcagggtggctcatgcctgtaatcctagcactttgggaagctgaggtaggtggattacctgagatcaggagttcaagaccagcctgatcaacatgaggaaaccccatctctactaaaaatacaaaaatattagctggccatggtgacaaatgtctgtaatcccagctactcaggaggctgaggcaggagagttgcttgaacctgggaggaggaggtggaagtgagccaaaatcacgccattgcactctagccagggcaacaagagcaaaactccatcaaaaaaaaaaaaaaaaaaaaaaaaagaaaagaaaaaagaaggtagagagagtgattggggtagaaagtttattcaaagggataataacagagaacttctcaaacctggagaaatatatcaatatccaagcacacgaaagttatagaacatcaagtggatttcacccaaagaagaccaccttgagacattcaataatcaaatttccaaaggtcaaggata

SEQ ID NO: 616406 - DNA, 441 bp, Homo sapiens
agatctacaagatccagaaaatagcctccaaggggtaaatctaagagttattgaccttaaagagaaggtaggccaggcagggtggctcatgcctgtaatcctagcactttgggaagctgaggtaggtggatyacctgagatcaggagttcaagaccagcctgatcaacatgaggaaaccccatctctactaaaaatacaaaaatattagctggccatggtgacaaatgtctgtaatcccagctactcaggaggctgaggcaggagagttgcttgaacctgggaggaggaggtggaagtgagccaaaatcacgccattgcactctagccagggcaacaagagcaaaactccatcaaaaaaaaaaaaaaaaaaaaaaaaagaaaagaaaaaagaaggtagagagagtgattggggtagaaagtttattcaaagggataataac

SEQ ID NO: 616407 - DNA, 559 bp, Homo sapiens
gggtaaatctaagagttattgaccttaaagagaaggtaggccaggcagggtggctcatgcctgtaatcctagcactttgggaagctgaggtaggtggattacctgagatcaggagttcaagaccagcctgatcaacatgaggaaaccccatctctactaaaaatacaaaaatattagctggccatggtgacaaatgtctgtaatcccagctactcaggaggctgaggcaggagagttgcttgaacctgggaggaggaggtkgaagtgagccaaaatcacgccattgcactctagccagggcaacaagagcaaaactccatcaaaaaaaaaaaaaaaaaaaaaaaaagaaaagaaaaaagaaggtagagagagtgattggggtagaaagtttattcaaagggataataacagagaacttctcaaacctggagaaatatatcaatatccaagcacacgaaagttatagaacatcaagtggatttcacccaaagaagaccaccttgagacattcaataatcaaatttccaaaggtcaaggataaagaaatgatcctaaaagc

SEQ ID NO: 616408 - DNA, 430 bp, Homo sapiens
tctctactaaaaatacaaaaatattagctggccatggtgacaaatgtctgtaatcccagctactcaggaggctgaggcaggagagttgcttgaacctgggaggaggaggtggaagtgagccaaaatcacgccattgcactctagccagggcaacaagagcaaaactccatcaaaaaaaaaaaaaaaaaaaaaaaaaraaaagaaaaaagaaggtagagagagtgattggggtagaaagtttattcaaagggataataacagagaacttctcaaacctggagaaatatatcaatatccaagcacacgaaagttatagaacatcaagtggatttcacccaaagaagaccaccttgagacattcaataatcaaatttccaaaggtcaaggataaagaaatgatcctaaaagcagcaaaataaaagaaacaagt

SEQ ID NO: 616409 - DNA, 653 bp, Homo sapiens
caattgtaaacatacatgtatccaatactggagcacccagatatagaaagcaaatgttgttagagctaaagcgagagatagacctcagtacaataagagctggagatttcaacatcctactttcagcattagagagtttatccagagagaaaattaacaaaaaatatcagacataatctgcactatagaccaaatggatctaatagatacagaacattttacccaacrgctacagaatacacattcttctcctcaacacatgcatcattctcagggatagaccatatataaggccacaaaacaagtcttaaaatattcaaaaaattaaaattatatcaagtatcttctctgaacacagagaagatacttattctggaataaaactggaaatcaataccaagatgaatattgaaactatacatagacaataaattaaatcatatgatcctgaatgaccagtgagttgatataaaaaaattaagaaaaaagttgaaaaatttctctaaaaaaaaaaaaaaaaagatgatggcataccaaaacctgttggatacagcataaggagtactaagaggaaagtttatagcaataagcacctaaatctaaaaggtagaaacacttcaaataagaaacctaatgatacatcataaaaacca

SEQ ID NO: 616410 - DNA, 653 bp, Homo sapiens
caattgtaaacatacatgtatccaatactggagcacccagatatagaaagcaaatgttgttagagctaaagcgagagatagacctcagtacaataagagctggagatttcaacatcctactttcagcattagagagtttatccagagagaaaattaacaaaaaatatcagacataatctgcactatagaccaaatggatctaatagatacagaacattttacccaacagctacagaatacacattcttctcctcaacacatgcatcattctcagggatagaccatatataaggccacaaaacaagtcttaaaatattcaaaaaattaaaattatatcaagtatcttctctgaacacagagaagatacttattctggaataaaactggaaatcaataccaagatgaatattgaaactatacatagacaataaattaaatcatatgatcctgaatgaccagtgagttgatataaaaaaattaagaaaaaagttgaaaaatttctctaaaaaaaaaaaaaaaaagatgatggcataccaaaacctgttggatacagcataagsagtactaagaggaaagtttatagcaataagcacctaaatctaaaaggtagaaacacttcaaataagaaacctaatgatacatcataaaaacca

SEQ ID NO: 616411 - DNA, 599 bp, Homo sapiens
tgccactgcactccagcctgggcracagaatgagattccatatcaaaaaaaaaagagagatcaatgtagaaataggagctccatagaatctggaatactctcatttagtcagaaattaaacctagtaggtgactgaatcattactgggctatgttttaatataatccccagataggtgatgtaatgtttgaatcatgtccaaagccaaaggctaagtcttttctgtctgtgggtgactgtatgtctgcatatgtaattccccaaaaagcatctgcttctttatgtcacaaccatggaaacagaagagaatggttcttcctccagcactgatctatggaagaacctgagtctttcccttctgttgtatcaggtgaggggtggagatcaattggccaaacgtatagggatcctgcacttattcagggcttatatttacagaattctaaccgcgtctttttatttattgtggggatatgtatctccgcattagaaaagaatcaaattgcagccaaatcatttcccacaactaacttaaaacttggacaaatcatccaaatgctcagctgcactgatgtggggcatttcatacaaagtatttt

SEQ ID NO: 616412 - DNA, 231 bp, Homo sapiens
agcatgcccggctaattaaaaaaaaawtttttttttatagagatggggtctcactatattccccagtgaggaactggtgttcaactcctggcctccagtgatccttcctcccgaagtgttgggattacaggccaccgtgcctggcccatattttcaactagtaccctgtaaagcatcctgtaaagcttctctatttatagaacctatgactgttttatcagacaagaattc

SEQ ID NO: 616413 - DNA, 580 bp, Homo sapiens
ccttcagactcagattaattataccaatgattttcctgagtctacagcttcatgccttggttccatgctgatgtagtcttaaaataaaagaatttcggaattagaagtgacctaaaacactagaccattcacttttatagatgagaaactgaggtaaaaaaaaaagtattaagtgacttgctcaagcagcttgmagatggaatatcatgagacttcttttcttccataaccatgtgagccaattcccatgataaatatcctcttagatatctacatatctatgtatctatatctatctatccatctatctatctatcatctcctattgattctgtttctctggagaaccctaatttatatacttttataagttaccataaagagtagaagaaatctttataaactcagtaagttatggcataaaaatggtaactgcattttaaagtattggtatgagatttggtttctaatccctattgaattccctattattcaattcaatacattcttattagttacttactttattactaagctctaataattattaccaaaagcaatggtaaaatatgagcaaaat

SEQ ID NO: 616414 - DNA, 540 bp, Homo sapiens
actcatcctcaacttctgcattcttttcagctgaacatagagggtgtaatgatcagcttcagggatgttttctcaaaatagatggcctttgaattgtgtattttaacaacggagggaagcatttgcagcagattcatcagcatttagaaggctcagaaaggtgaaatgagatagtattgaattcagggaactgcactggtggcatgaagatccaggcagagatgtctatacccaattggatgtggagaacacgagagasatcaaggctaaagatgaagatttggcagtcaatggtgtcattaaaatcaccagattatatacaatacccacagagaatgaaaacaaagaggtcaaagacagaatcccgagaaacactaacatacttgataaacaaagagaagccagcagacagatctacgaaaaatggtcatagcagtgtggtaggactttctccttcgtttggctaaaaacagggttctcgtcacacaaccaggaaagattaggctcacggacacatagaaaggtgggaaaaatggaatt

SEQ ID NO: 616415 - DNA, 409 bp, Homo sapiens
cctgaaggctttaaaaaaattattgaattcaygaaggtaaaaggtattgcacattactctttttaggtataattttcttaattatcctcagagataaccaggtttatacttagaaaaaaaaaagagaaatcaagttccagtgaaaacaatttttttttttaaaaaagaaaacacagcctactaaatgtattcaggtagaataggtatattaatttaagataaaccattttgattacaaatattgtcaatgtgaaaggaaattaaatcttgggaccccaagctcattaagccaaaggaaaaaattaagctgggaactgggtcatgaaaacctgcctcccacttttcagtgcctaaataagatgcctataagatgaaaagctatatgcctccccaatattttgcccaaaag

SEQ ID NO: 616416 - DNA, 590 bp, Homo sapiens
ctgctggttgtggtctgcacatcctcctgtttcagggtacttttaccattgtaattagcctacagttgagtagtttaaaatgaggttcttggccttttagctatttgtcagataaatgtatatatcttttttgctcatctttatctatcaggtatgaatacatacaagaatacatggtattcttgatattaaagagttgagaggrcttgtatcaatttggaaatattcatagtgaaatactgtgatgacagtagcccacaaaaaaaatgagacctcataaaaagaattacacattttctcattttctctttcttgcattggcaagggaattgaggaagctttatatttacagggggatgtctttgcctttatgaaccccagaaaaaggttccttttgtcagctgagcttgaaatattacagcatttgccctcatgtttccagtgggaattgtgaagtagtaaagaattttggaagtattttaatctccatgaaacaaacaatcctgtgtgtcttcattacattatcctgacatcacatgaaaactccaataattaatataggagttatggtgacatattacaggataatc

SEQ ID NO: 616417 - DNA, 421 bp, Homo sapiens
gagctcctctcctgtagaaacattaatttgaataaccattcatgcataaaaatatcttcacaataattgtaaaaaccaagtgacagattacagcacctggctattgcacagagatgaaaaaagatgcattgaaaagggtagaaaagatagttttacattacctatgtcatctctacctcaaccccaggcagaacagcatggagataaactctgcttaggggaaggacaaaaaacgggagtgctggacattaccttagactacaacactgggcctgtgacagtaaaactcagcactgggcagaccttctcaccagactataggccagtacctgcagactgagcctccaggcccaccccagcactaggttagatcttacagccctaaactctakgcctgcttggcagactttctgctgcacca

SEQ ID NO: 616418 - DNA, 572 bp, Homo sapiens
cttacagccctaaactctaggcctgcttggcagactttctgctgcaccattttaggctgattccagaggtcccaggctctagacgggtcctaatgccaggccaatcccacatatttagtcagtaggcctggcttaggctctggacccatgccagcaccaggccaacccctgcagccctagtcataagcaagccctgtggcccaggctccagatctgggttaggtcttagaccagcccagagccaggtgggcccacttagtctcaggcttcaggccttctccagtgccaggttggcaaccctggcttcagtcaccaggccagcacgcacaaacaggatccagaccttctcagtgccaagctattcctgccactctgccatccagatcagcccctacagcccctccctccagcagacctagagtccaggcctgctccagcaaacccagagttcacaccttctcagtagaccccatcactgggccagcctccacagacccaggccccaggaccamccctgaagctccaggccaacaccgacatacccagacagcgtgccagttcctgcagaccta

SEQ ID NO: 616419 - DNA, 643 bp, Homo sapiens
actctgtggcacaggctagagtacagtggcatgatctcagctcactgcagccttcgtcttctaggttcaagtgattcttgtgtcttagctgcccaagtagctaggattaaagayacacgccaccaaacccagctaatttttgtattttcagtaaagatggggtttcaccatgttggctaggctggtcttgaactcctggcctcaaatgatttgccctcctctgtctcccaaagtgttgcaattacaggcttctgccactgcacctggcctctactcttataaacccaagctctagaaccagctctgtggatccaatcaataggtccatcccagtggatcaaggctccaggcccattactgcaaacctaggtgccaggcctacctatctgctgacccagacaccaagtcagcctactcaaggactccagcagcaagcctgcctatagattacatcagacagcctgcctagaatttttagacaggcttactggtaaaggactttaccagtaaaacaaacaaagccagtctacaaagacttgaatacatctttaaatgtgcaaacactaacatctggccacaaggatcaagaacagtcagggaaacatgataccaccaaaggaacaatataaagcaccagtaacag

SEQ ID NO: 616420 - DNA, 643 bp, Homo sapiens
actctgtggcacaggctagagtacagtggcatgatctcagctcactgcagccttcgtcttctaggttcaagtgattcttgtgtcttagctgcccaagtagctaggattaaagatacacgccaccaaacccagctaatttttgtattttcagtaaagatggggtttcaccatgttggctaggctggtctygaactcctggcctcaaatgatttgccctcctctgtctcccaaagtgttgcaattacaggcttctgccactgcacctggcctctactcttataaacccaagctctagaaccagctctgtggatccaatcaataggtccatcccagtggatcaaggctccaggcccattactgcaaacctaggtgccaggcctacctatctgctgacccagacaccaagtcagcctactcaaggactccagcagcaagcctgcctatagattacatcagacagcctgcctagaatttttagacaggcttactggtaaaggactttaccagtaaaacaaacaaagccagtctacaaagacttgaatacatctttaaatgtgcaaacactaacatctggccacaaggatcaagaacagtcagggaaacatgataccaccaaaggaacaatataaagcaccagtaacag

SEQ ID NO: 616421 - DNA, 498 bp, Homo sapiens
caatcaataggtccatcccagtggatcaaggctccaggcccattactgcaaacctaggtgccaggcctacctatctgctgacccagacaccaagtcagcctactcaaggactccagcagcaagcctgcctatagattacatcagacagcctgcctagaatttttagacaggcttactggtaaaggactttaccagtaaaacaaacaaagccagtctacaaagacttgaatacatctttaaatgtgcaaacactaacatctggccacaaggatcaagaacagtcagggaaacatgataccaccaaaggaacaatataaagcaccagtaacagaccctaaagaaatggagatttgtgaattgcctgacaaaaarttttaaactaattgtcttaaggaagctcagtcaacttccagaaaatgcagaggaaaaatttggcaaaatcaggtaatcaataaacatctaaaattagaaatttaacatagaagtcataaaaaattg

SEQ ID NO: 616422 - DNA, 510 bp, Homo sapiens
accttttttctttgaattcagtgtccataatagaattgtggtaattaactgtggtcagcgtctcgaggtcatcattataaacatcactcttgactggagatacattgctgatgaggttaggacagctctgtatagcccaatagtatatataaacattgtagaaaattgcactatgtctccattcctagctccctcccttccttcctttttaaagagatctttgctatctacttattttctcaatatcttcatcaagtacatgagcaatgaartttctatttataattaatccgggttttcatgtacatttctataacgattttcttttagataaaaagatagcagatttaattttagatggaaactcaaagggaagatgaatataactttgttaatgtcactttatgtggcttcttcccatatagggaagtcagtagtgacattacaaaactttagttaacctcttcagttctccaaagttaagggatagagagctacaaagtacataaa

SEQ ID NO: 616423 - DNA, 553 bp, Homo sapiens
tgtcattcaagatgatgagtcaagagcagcctgggacaaatcgtggggaaggcaggtatgccttgaaaatgaggagkttgttcacacttggtatctgttctcggactcttttataagccattgctgcacttcaaaacctgacagctcctgggcaaactgtgtggatatttcaaagattccaggtagaactggcagaagggtaattgtatcctgtggagcttgtgggaggaggttgggaggattattagagtttattaaccatcctaaggaatttcctacacacctttctcgggaactttgaattatgccatttactcctcactgacccctttaaccttcagccttttcttccttccaattaatttttaaatgtttctacaagaaatcatattaccaaacttctactttgactaaaatattgaagtgacttctcaatacactgtagatttgaccctaggcatcttttttttccaaccaattttcattccttgctcgtaatttttactcctgtcaagtggacagggcatgcctttcctctgcatagctacttacc

SEQ ID NO: 616424 - DNA, 552 bp, Homo sapiens
aaggcgatgcttgaacagtgttgcaaaagatgaaaatgtatttttcataatgaaaagaacgggagaaataacaaaaaagcatgaaagcatgatttgtgaaatggcaaataatggtatagttagatagactgcagtgagaaatgaagcatggggaagtgaataagcaaaacacatttaggcacatttttgaatagaaattaattcagagattctctacaaragggtggaatgagctgatctataaagaaagtttccaattcaagctaaataaatgagcattaagaaaaaaaacacctttctgagctcaataacaataaatgaaatccttagtgttagggataaaatgggaccctcccagtggtgagtgggacttgaagccccataatgtatggaggtatctgatcttaagagttgaaattaggacctaagtcatttgtatgtcaaggaaacataaaatgagctccagtataaactcgggagaaattccatttgtcaattgtaaggtaaaacatgtaagtatttcatagaaggtgctatgtagtgttgttatag

SEQ ID NO: 616425 - DNA, 597 bp, Homo sapiens
ctgttagtattgtcatgagtcattgaagagaaattcaagttacctattaaatcagaggactgtttgggggaaaataggaattttatacctcattgaagagctgagttacaaaaatatcactttatgtttactccattgaactgccttaggaaatgtcacgagggcmcaagaattgggcaattcacggctttcacacaggatgaaattcctttcttcagcattatttctatactgtttcaagcaagcaaccaaatgtcaactgctgtcaccatctctatggaatgttttaattaacctctttattggtaaacgatcagtctttcacccaccttcctgggaagtgtttctctaataagtgatgaaattgaccattttgttcatccagctgtcagagaagcgtgctctgcacagagccgggttgattccatacgggtgtggtacagagctcatcagcaggctatgagacgtcatcctctttatttttgttgagaagcttgcccacctgcttccagatttcctgctgacatgccttcctatccaggtgccaaatttttattattgttctaagtcatatttgaataacacagccatcttagc

SEQ ID NO: 616426 - DNA, 505 bp, Homo sapiens
tgcagctggtgtgtcttattttcagatctccagaactaatgatcctacctttccagcttatgttcagcgtgacttactgttagtattgtcatgagtcattgaagagaaattcaagttacctattaaatcagaggactgtttgggggaaaataggaattttatacctcattgaagagctgagttacaaaaatatcactttatgtttactccattgaactgccttaggaaatgtcacgagggcccaagaattgggcaattcacrgctttcacacaggatgaaattcctttcttcagcattatttctatactgtttcaagcaagcaaccaaatgtcaactgctgtcaccatctctatggaatgttttaattaacctctttattggtaaacgatcagtctttcacccaccttcctgggaagtgtttctctaataagtgatgaaattgaccattttgttcatccagctgtcagagaagcgtgctctgcacagagccgggttgattccata

SEQ ID NO: 616427 - DNA, 610 bp, Homo sapiens
tgggcaacatagcaagatcccgtctctaaaaaaaaaaaaaaatagccaggcatggtggctcatgcctgtggtttccactacttagaaggctggtaggttgaagctgaagtgtgccatagtcacaccactgcattccagcctgggtgacacagcaggatcctttctattgcagaaaccaaaaccaaaaaacacatgatacctaaagtcatgtgtaatctacacagatttattttgaaataattttgggcttgtatcccatggcatatttaagactatcaccaggaatctctgggactatttgagataaagtcacttccacatcctgagccttcctctcgttgacaattctgtgcgttctcccagtctctacaaagaggctctgtagtctatgaaaacagagacttctctaagccatcataaggcctagttaagatagaacaaaaaaccattctgtggatttaagcagaaaattgcatattcaccaagcctctgcaaatccatacccyccaccccttgcagacagatatggatgatgttacctcaacagttccattggcactgaacttattcttgggtgcaatgaatctcatcaccctctacagttaagttt

SEQ ID NO: 616428 - DNA, 543 bp, Homo sapiens
tatttgcttaattgcttttaaattatttttgttttttgttttagacagtcttatttgatgtcatgttgagctatgttggttttctagaaatatatttatgtagacaactcaccatggtggcataaataagcccaaactctggatctttagatgtacacatatgtataatggacttatgtagaatcatatctcctgctagctgaatgagcactgtagtattttgctagatgaagggagactagagataattcgcttatgaataaaacaagtgagatctacctagctcttggtctaatctctgatctgcaatggatgttccccagttgcctttctcctttttccctgctactgtggccaatttgcataatggtaggtggtcagacactagatcctgagacactatggtaaaaacgaagcaaaacgaataaacaaagaaaatagaggatgactgaatrcccattgagtttgagaataatgttcttattatttctgatgataattttctgactgacagtgtactttgcccacttactcattcactca

SEQ ID NO: 616429 - DNA, 501 bp, Homo sapiens
taaattggaaggaactgataaattactttggaaaatacttgtcacagtttagtactaacaacaataatgataaagcatgcaaggagcacatcaaataccctgctatcctaggagcttggccctctatgctttaaccttgttactagggaggtttcaaagtttttctatcccctaaatgcaaagaacactctgccttcatcctccatcagcgttatcccatcttacatcattttgggttttggctgtccaatttcaaagtacgggcggggagctacctcacccactccacaaaagcatgatcccatctcctggctctgaaatccaatgccttcctcagtggatcctctcttgacctttgtaggtgtgttttccaaagcactttgtktctttcctgaattctattgctccagcttttgttctggctgttttctctacctgacataccttttcatgtaatgtttgccttcagtagttagctatatttaacgctcacttaaaatc

SEQ ID NO: 616430 - DNA, 581 bp, Homo sapiens
atttaataaaatggagataaagggtccaatgagagctaggtagtagttgtcctcacaaaaacctatgacaacgtgacatttttgtttttcatcacagattaaagtccacaggtttctctgcttaagaggatcatgaagtgcttttgctataaacttagggttccagccttaggccagaaagggcaataataggaaagggaatgggatacaagaggaataatttgtgtaaatttgagtgaagactctacaaatttggaccctgaaaaggatcaagctacaatttaggcaggaggtgtaagcagccaaaaatagtgtcattttctttgtgtacctttgaaagactgggacatacatgactagtgaaaaaagaaaacataatgtctttgaaatgtgcccatatgcatcaatcacctctgaagctcttaaacttcaagaccttccttggacatctttaaacaaattaactgtctggtccctagcctaatagcagcagtatttcagggcccactggaaaggctgagccttttctctcagtgaaaaaayggtgattgaagaacttttcagacagaggagagcaggaa

SEQ ID NO: 616431 - DNA, 254 bp, Homo sapiens
cagtatttcagggcccactggaaaggctgagccttttctctcagtgaaaaaacggtgattgaagaacttttcagacagaggagagcaggaagsgaatctgactcagaaatgaaacgcagtttagttaacatttcccttatccacatatgtgtatttaagatagcctctttaatctcatataaatgatcttttaagatttaatttcctttttcttgtttaaatatgtatcaaactctacaataggcttaccataa

SEQ ID NO: 616432 - DNA, 573 bp, Homo sapiens
tgccttttgattggttttctggtaattgttattgggtaatcagaagctttcagaacatcttttctctgtcaagtacaaaacaaaactgcagaataaaagcaaccattaaaagcagtttcaaattttttaaagtcacttataattaaagcgtttgtagctgctggtatcttgtttgggttaataccaacatgatcaattttgtgggtcccccttatagctcttcccgccaatcatcagaataaatgtttacctgtgatgcatataagtgatacgtcttcaggaaagaaaagtttatgaatcaagtgaaactgaatttttgttatactcagcatgaaaactgtccatyttcttatcaattttttctttaaacacatctgtccttggggcattcattgtcctatttcttccctctctatgatcaaccaacatcaaaagtatctttaattaaataagataattatataaaccttttttttttggttctagacatcattcaaattttctaacttataagccctcttatttgaaagtctcttgatgacactgtattctttgaatctagagatgatgcct

SEQ ID NO: 616433 - DNA, 592 bp, Homo sapiens
  misc_feature 1, 2, 3, 4, 5, 6, 7, 8, 9, 10, 11, 12, 13, 14, 15, 16, 17,18, 19, 20, 21, 22, 23, 24, 25, 26, 27, 28, 29, 30, 31,32, 33, 34, 35, 36, 37, 38, 39, 40, 41, 42, 43: n = A,T,C or G
nnnnnnnnnnnnnnnnnnnnnnnnnnnnnnnnnnnnnnnnnnntgcttagcaatgatgagcactttttcatatatctgttgaccatttgtatgtcttcttttgagaatatctatttaggttctctgcccattatttcattggattatttgttttatttgttattgagttgtttgagtctcttaaatttttggatattaaccacttatcagatatatagtttgcaaatattttctttcaatacatggattgtctcttcactctaatagttttttrttttgttttgtttttgtttgtttttttgctgtgcagaagccttttagtttgatgcaattccatgtttattttttacatttgttgactgtgcttttgaggttatattaagaaaatttttgcccagaacaatgttttggggcatttctcctatgttttcttctaatagttttacagttttaggtcttatgtttacatctttaattcactttttttaagttaatttttgcatatggtatgagaaaagggtcaaattttattcttctgcaggggaatctcctgtttttccaagaaagtttattgaagagactatcctttccc

SEQ ID NO: 616434 - DNA, 568 bp, Homo sapiens
aattaagaatcagggcttaccttttgtccttrgttcctcatcttatatgacaggcctcattctggattattagtggtagaaaaaaaaataaagaaatagtttctacgttaaccccctcctctactgatgcctctcccccaaagtgtattgcagaagtatcatatctgtgggagcaagaaaactaccttcccagtctcccaggtagcaaggggatgtagtcaagtgcttttcaactccatctgagggaattcagtgagaaggtctcacagaggcaacttgggaagtaaatgtctgtcaacacttctctgtaccatccttatgttcagtgtcccccttccccacaagccagggatcctttgtcaactgttccctcctgatctttcctccatacatctatcagtaatcgagagggaagaatgagagaagggaggaaggaagggaattagaaagagtaggaggaagaaaggaagaaaagaaaggagagaggaaggaagtcctgatagcatcatgaatcaatttgatggaagaaagattttccattcaaccaaagaccctaaaaggaacgttg

SEQ ID NO: 616435 - DNA, 481 bp, Homo sapiens
ggtatgttgggcatgattggtttcccacactctgcactgagcctacagcttttgagatattgtgttaatgtctagatcatttgaagaagtgaattgayaagaaggtgaaatgatgcctcctgaaaatgctattgtaataattaagcgacttctttttttttttttttttttttttttttttgcctctccaacgtttaggcacggttggccatgccttccttcacattctctcttttattggttcagggatcatacatttacttctgcaatagccacttattctttattcacttctgtctgctacccaccatatgcgaagaaattattgaattcagggctttatgaaaattacaaaatgatgttgagaatagcaaaactcatatcctcaaatcagaacttcatgccattttctgctgtcaagttaaattaggcataaattacacaactaaatgaaatgggtttgtggcgacgttctggtttc

SEQ ID NO: 616436 - DNA, 481 bp, Homo sapiens
ggtatgttgggcatgattggtttcccacactctgcactgagcctacagcttttgagatattgtgttaatgtctagatcatttgaagaagtgaattgataagaaggtgaaatgatgcctcctgaaaatgctattgtaataattaagcgacttctttttttttttttttttttttttttttttgcctctccaacgtttaggcacggttggccatgccttccttcacattctctcttttattggttcagggatcatacatttacttytgcaatagccacttattctttattcacttctgtctgctacccaccatatgcgaagaaattattgaattcagggctttatgaaaattacaaaatgatgttgagaatagcaaaactcatatcctcaaatcagaacttcatgccattttctgctgtcaagttaaattaggcataaattacacaactaaatgaaatgggtttgtggcgacgttctggtttc

SEQ ID NO: 616437 - DNA, 605 bp, Homo sapiens
ttaatttcctttgaagtcaggtgaagagaaatgtgctgtggaaagagtgatcttytcttttaaatgttgcttaataggtccagtaaatgaggaccagaattaaccacttgatgtaagaatgtagatgtcattggtgacaattataaaagcatgtttggtggagtggttgggtgattggggtgactttaaaatagaatggagaaagaaaatttagagacaagtatttacagttttgtaaatgaagtttgtttgtggagcagtagttaatgaaaggagtaaaggaatatttttctgtttgcttatttttaagatgggagagagaatgcgacataagtagcagaagaaataggataatgtagaagatcatagggagaattcctacagcattgtctttgagtaggtgacaatggatggaatctcatatatgagtgaaagtattagcttctgccaggggcatagatgttcatcaaagtgggaaggcaaattctggtaggtagaaagaaataatgggaatctcctgaacttctcttatgattgctttaattttttagtgaagtaagagtcaagagtcttcagttgagaataaagacagtggaggagacact

SEQ ID NO: 616438 - DNA, 605 bp, Homo sapiens
ttaatttcctttgaagtcaggtgaagagaaatgtgctgtggaaagagtgatcttttcttttaaatgttgcttaataggtccagtaaatgaggaccagaattaaccacttgatgtaagaatgtagatgtcattggtgacaattataaaagcatgtttggtggagtggttgggtgattggggtgactttaaaatagaatggagaaagaaaatttagagacaagtatttacagttttgtaaatgaaktttgtttgtggagcagtagttaatgaaaggagtaaaggaatatttttctgtttgcttatttttaagatgggagagagaatgcgacataagtagcagaagaaataggataatgtagaagatcatagggagaattcctacagcattgtctttgagtaggtgacaatggatggaatctcatatatgagtgaaagtattagcttctgccaggggcatagatgttcatcaaagtgggaaggcaaattctggtaggtagaaagaaataatgggaatctcctgaacttctcttatgattgctttaattttttagtgaagtaagagtcaagagtcttcagttgagaataaagacagtggaggagacact

SEQ ID NO: 616439 - DNA, 617 bp, Homo sapiens
ttttcttggtgcccttgtcaaaaattagatgactatatatgtgtgggtttatttctggggtctcrattctgttccatccatctatgtgtctgtttttatgcatgtatcacactgttttgtttagaaagcttgggatataatttgaaatcagcaagtgtgatgcctccagctctgttctttctcaaggttgctttggctatttgtggtgtttgtggtttcatgcatctatgttcttaaaagagattcatacagtttttctttcatgcaatgtcctgtgaagttttggtaacaaggttttgctgaccaaattagaaatcactttgggttgtggtccctctttttttattctctcttagaatagatgtaagatactattctgtgtttcttaaatgctggtggagtttatcaataaagccatatggaattttgtctgtgataaaatttttcaaaggactcaacttattttgtagataggattattcatttttttcattttttcttatgtcagctttgataatctatatgtttagagggagatctcttctagattccaaaatttatttacataaatttgctcataataccttccttttaaaatgtttgtaggggctatagaa

SEQ ID NO: 616440 - DNA, 617 bp, Homo sapiens
ttttcttggtgcccttgtcaaaaattagatgactatatatgtgtgggtttatttctggggtctcgattctgttccatccatctatgtgtctgtttttatgcatgtatcacactgttttgtttagaaagcttgggatataatttgaaatcagcaagtgtgatgcctccagctctgttctttctcaaggttgctttggctatttgtggtgtttgtggtttcatgcatctatgttcttaaaagagattcatacagtttttctttcatgcaatgtcctgtgaagttttggtaacaaggttttgctgamcaaattagaaatcactttgggttgtggtccctctttttttattctctcttagaatagatgtaagatactattctgtgtttcttaaatgctggtggagtttatcaataaagccatatggaattttgtctgtgataaaatttttcaaaggactcaacttattttgtagataggattattcatttttttcattttttcttatgtcagctttgataatctatatgtttagagggagatctcttctagattccaaaatttatttacataaatttgctcataataccttccttttaaaatgtttgtaggggctatagaa

SEQ ID NO: 616441 - DNA, 577 bp, Homo sapiens
gagctgatgcaggtctcataaatgactagtgggttaaaatacaggggaaaggagaaagacctcttcggctattcaaaaatcataaaaatggcattgagctataaaaataaagcagacaattggccttagaatacaatttcttttctttctccttttctttttgtgagtattccaataatattttcacaggctttcgcatgagtgagagaatcctgtttctgactckaagttacatttattcgctttatctattgaaaggagaagcagtggtgaggaatgtggctaggaacatgctacagattaattaaaatgctgtgaatagagagggcctaacgcaaatggaattttcaagacagaaaaagtaattaaacatgagtgaggaaaaagagagctgctgttcttggttcatcctaagctgaatatgtcagcaaaggccataaaatgtggcctttctttatcgaggcatatttctcctaaaacaacagcaataaccatggtagttttaataatggtaatgtgctttaagttattcgtgctttaaggacacaagagaatccaggtttgggggcatagagct

SEQ ID NO: 616442 - DNA, 407 bp, Homo sapiens
gcttttgaaagaagagaaatatggctctgttccacccggctcaccggcggtcagagtttaaggttatctctcttattccctgaacaattgctgttatcctgttcttttttcaaggtgcccagatttcatattgctcaaacacacatgccgtacaatttgtgcagttaatgcaattattacagggtcctgaggtgatatacatcctcctcagctgacaggattaagagattaaagtaaagacaggcataggaaatcacaagggtattgattggggaagtgataagtgtccatgaaatctycataatttatgtttagagattgcggtaaagacaggcataagaaattataaaagtattaatttggggtactaataaatatccatgaaatcttcacaatccacattcttc

SEQ ID NO: 616443 - DNA, 613 bp, Homo sapiens
taaggctaaaatgactacatttgtcaaatgttgatggtgggcagagttgataaactttgctccagatgtagactttttgtatgtctgtgagggtactttagttgaaagtaacacaagactggaatggatcctttgcactgaacctcgtaatttcccgtggtatgggcttccttcttgagacgattgccacttgcccacttgttaagttttgacaacttgggtgacaatcttcagcaagttcaaggttttgacttgtgtaaagagagtatctgaattcttggggaaagtgtgtaaggcsataactaatgtccaaatataaatacttcttaagtaaacagatttagaagcagttttcagagaccttgaaggttctgtaaacactctttttacctacccctgaatactggcttgaaagatttttttcagatttctcaactcatagttcacacagaagaagctgctaacaactgagcagcttgtgggcttgagttctcagttcatacttgggaactatgaagaaaactctttgagatgcttcttgtgtgctaacaactatgaactgagacctactctataaaggtaatagggaggcaatgaaaaggatgttactgat

SEQ ID NO: 616444 - DNA, 613 bp, Homo sapiens
taaggctaaaatgactacatttgtcaaatgttgatggtgggcagagttgataaactttgctccagatgtagactttttgtatgtctgtgagggtactttagttgaaagtaacacaagactggaatggatcctttgcactgaacctcgtaatttcccgtggtatgggcttccttcttgagacgattgccacttgcccacttgttaagttttgacaacttgggtgacaatcttcagcaagttcaaggttttgacttgtgtaaagagagtatctgaattcttggggaaagtgtgtaaggcgataactaatgtccaaatataaatacttcttaagtaaacagatttagaagcagttttcagagaccttgaaggttctgtaaacactctttttacctacccctgaatactggcttgaaagatttttttcagatttctcaaytcatagttcacacagaagaagctgctaacaactgagcagcttgtgggcttgagttctcagttcatacttgggaactatgaagaaaactctttgagatgcttcttgtgtgctaacaactatgaactgagacctactctataaaggtaatagggaggcaatgaaaaggatgttactgat

SEQ ID NO: 616445 - DNA, 641 bp, Homo sapiens
attagctcagtgacataaagttaaattcctggccttagcttccatacagcaagttcagaaatggctcattaacttttgctagttaaaaagaaaacaatctttcaagccagtgttcaggggtaggtaaaatgaatatttatagaaccttcgaagtctctgaaaacttcctctagacctgtttactttagaagtactacttacatttggacattagttatgacactacacactttccccaagaattcagacattctctttacactaaagtcaaaacctcaaacttgctaaagatttgtctctcaagttgttaaaacctaacaagtagggaagtgacagtcctcagaaagaagttcctcagttttatttctcagagatgtgaatattggttatacagtccttaaataaccactgcaatgacctaattattatcaacctcttctcgtttattcctccctcccccctcctttccttttttcttccattgttccctcacattttctctcttgtgttcattytctcacatgccttctctctctctttttctctcaggctatagttttctctctttctttctcttttctttcattctttgaattaacaagaagtaaatagttctttctgaaatgctttgcttagcacca

SEQ ID NO: 616446 - DNA, 615 bp, Homo sapiens
attctatttctgtcatttcagccaacacagcttggtcaagaagctttcttgtagaactagtgcagtcttttggaggctgtaaggctctgaagatttaacttgccagagttactgcattgtttctttctcatctctgtgtgtgggtgttcttttaactgctgggcggcctctgattaaagtggccaggtgggggcagggtggcgatgctggagtcccaggttgggccacccaaccaagtgaggagaagtgagaaccaggactgcatgaagaactgtccggttacttttctgcaaggtgggtgctctgtgctcgtagtccaaaccagcccctggtccccgtggactttccagagcctsgagaccgcatgggcaaggactgtgagacggcaaaggtggcaaccaacccccctactgggagctctgtctcaggcagttgcagagccactacttgcttgatagtccctgccgtgggtagttggaggcccagaccaggagaacccacccagtgaggagatatgggattggggacccatgtaataaacagtctggccacttttccatagggctgctgaagtttgctgggggtccactttagtccctggtcatcttggatttt

SEQ ID NO: 616447 - DNA, 615 bp, Homo sapiens
attctatttctgtcatttcagccaacacagcttggtcaagaagctttcttgtagaactagtgcagtcttttggaggctgtaaggctctgaagatttaacttgccagagttactgcattgtttctttctcatctctgtgtgtgggtgttcttttaactgctgggcggcctctgattaaagtggccaggtgggggcagggtggcgatgctggagtcccaggttgggccacccaaccaagtgaggagaagtgagaaccaggactgcatgaagaactgtccggttacttttctgcaaggtgggtgctctgtgctcgtagtccaaaccagcccctggtccccgtggactttccagagcctcgagacygcatgggcaaggactgtgagacggcaaaggtggcaaccaacccccctactgggagctctgtctcaggcagttgcagagccactacttgcttgatagtccctgccgtgggtagttggaggcccagaccaggagaacccacccagtgaggagatatgggattggggacccatgtaataaacagtctggccacttttccatagggctgctgaagtttgctgggggtccactttagtccctggtcatcttggatttt

SEQ ID NO: 616448 - DNA, 615 bp, Homo sapiens
attctatttctgtcatttcagccaacacagcttggtcaagaagctttcttgtagaactagtgcagtcttttggaggctgtaaggctctgaagatttaacttgccagagttactgcattgtttctttctcatctctgtgtgtgggtgttcttttaactgctgggcggcctctgattaaagtggccaggtgggggcagggtggcgatgctggagtcccaggttgggccacccaaccaagtgaggagaagtgagaaccaggactgcatgaagaactgtccggttacttttctgcaaggtgggtgctctgtgctcgtagtccaaaccagcccctggtccccgtggactttccagagcctcgagaccgcatgggcaaggactgtgagacggcaaaggtggcaaccaacccccctactgggagmtctgtctcaggcagttgcagagccactacttgcttgatagtccctgccgtgggtagttggaggcccagaccaggagaacccacccagtgaggagatatgggattggggacccatgtaataaacagtctggccacttttccatagggctgctgaagtttgctgggggtccactttagtccctggtcatcttggatttt

SEQ ID NO: 616449 - DNA, 595 bp, Homo sapiens
gtggcttgccctctgtctgggagctctgtcccaaggagatacgaacctgttgccagcaaaactgcctccacaccagtggaggtgattgtagacctcagctgggagattatgtccagtgaagagacacaggatccaggacccctgtaaaaaagcagtctactcacttcttgtagagctgctgtgctgtgctggtggactgtttcaatcactagttgcctcagactccttggagcccaaagacaacagtggstaagactgtgaaactggaatgatggcagaccatccctccccctgggatctccatcccaggaggcttggaaccactgccagctggaaaacaccagcaagagtggctggtggccccagtctggaggtccttcccagtgaagagaagcagggttagggactcataaaaaaaaagcaggcttgctgctcttccacagggcagctgcagtgaaggcaataatggctatgcctgcactaaagcaaagatggcagcctgcccctccctctcaaggctctacctcagggaggtgtaacaccgctaccagtggctggctggagctccaagctagtgtgtcttattttgtgaggt

SEQ ID NO: 616450 - DNA, 592 bp, Homo sapiens
tttcaccaaaatttggaacttcctccaatcattaagaagaaaccacaacatccatttaaaggtaaacaggaaaccacgtctaaggctgtttgtgggctagtgaaatattttcatttaaatggaaatttttccatatataggcaggttaacyaatttgagttcagacttaagtcagcaagtgatgtcactacctctttttacattttaagtgttttgtgtgtagttttgcatattaacctgaaagagagggcattaagattcaaagtagtaatctgctcccagtagactaataagccaagacttgtttgcatgtgatttgtatatttggaattcttttcattcatcttgtctaatttaatcttctcaaagttttcatgaattagagagattcctatttttcatttaatagatgaataaacaggttcagggactggctcaagttcacatggcttttaaatggtgaaatccaggtcttctaactccatagcacactaactctgtttcctacaccaacatgctgtctttcctggagaaaaatatgtcattttggacggttttgtctataaaaataagaaaaaaattattttgtttc

SEQ ID NO: 616451 - DNA, 592 bp, Homo sapiens
tttcaccaaaatttggaacttcctccaatcattaagaagaaaccacaacatccatttaaaggtaaacaggaaaccacgtctaaggctgtttgtgggctagtgaaatattttcatttaaatggaaatttttccatatataggcaggttaactaatttgagttcagacttaagtcagcaagtgatgtcactacctctttttacattttaagtgttttgtgtgtakttttgcatattaacctgaaagagagggcattaagattcaaagtagtaatctgctcccagtagactaataagccaagacttgtttgcatgtgatttgtatatttggaattcttttcattcatcttgtctaatttaatcttctcaaagttttcatgaattagagagattcctatttttcatttaatagatgaataaacaggttcagggactggctcaagttcacatggcttttaaatggtgaaatccaggtcttctaactccatagcacactaactctgtttcctacaccaacatgctgtctttcctggagaaaaatatgtcattttggacggttttgtctataaaaataagaaaaaaattattttgtttc

SEQ ID NO: 616452 - DNA, 456 bp, Homo sapiens
gcatttaaaccagccctagcgggaggggaatcactaatcccagaggtccacagttgagtgcccacaaacctcaccaccaagggccaaagtgctgtcagtatctaagtaaacttgaaaagcagtccaggccataaggactgcaactcttagacgagtcctaggacttaactagccccagagacactggactgtgagggcacgcaacatactaagacaccaaccggggttgccaatagagtattggcatcacttctcctctaaccccaggatgcatagcttgtggctctaaaaaaagccccttccttccacttgaggagaaaagaggaaagagtggggaggactatgtcttgcatcatggatacctgctcagccacaggaggatagggcacasgtaagagacttgaggtcccttgtttcaggccctagctccaagacgatatttctagacacaccctg

SEQ ID NO: 616453 - DNA, 626 bp, Homo sapiens
ttgatgcaaacagtgttaagttgttatcaggttaaaataatggattataaggtagtatttgcaagcctcatggtaacttcaaacacaaaacataaaaagcaagaaactaaatcatatcaccagagaaaatcaccttcactagaggaagacaggaagaaaggaaagaaagaagaaagagaataccagaaaacaaataacaaaatggcaagagtcagtctgtacttatcaataataacactaaatgtaaatggactaaactctctgatcaaaagacataccatggcagaatgattttaaaaaatacaagacccattaatctgttgtctgcaagaaacacactgcacctataaagacaaatatagactggaaataaatggatggagaaagatattccatgtaaatggtaaacaaaaagagcaggagttgctatgcttatagcagactaaatagattgctacacaaaaactagaaaagacaaagaaggtcactatgtaatgataaargggtcaaatcagcaaaaggatataacagtttaaaatatatatgcacctgccacttgaacacccagatatgtaaatgaaatattattaaagctaaaaagagagataggccccaatacaataata

SEQ ID NO: 616454 - DNA, 626 bp, Homo sapiens
ttgatgcaaacagtgttaagttgttatcaggttaaaataatggattataaggtagtatttgcaagcctcatggtaacttcaaacacaaaacataaaaagcaagaaactaaatcatatcaccagagaaaatcaccttcactagaggaagacaggaagaaaggaaagaaagaagaaagagaataccagaaaacaaataacaaaatggcaagagtcagtctgtacttatcaataataacactaaatgtaaatggactaaactctctgatcaaaagacataccatggcagaatgattttaaaaaatacaagacccattaatctgttgtctgcaagaaacacactgcacctataaagacaaatatagactggaaataaatggatggagaaagatattccatgtaaatggtaaacaaaaagagcaggagttgctatgcttatagcagactaaatagattgctacacaaaaactagaaaagacaaagaaggtcactatgtaatgataaaggggtcaaatcagcaaaaggawataacagtttaaaatatatatgcacctgccacttgaacacccagatatgtaaatgaaatattattaaagctaaaaagagagataggccccaatacaataata

SEQ ID NO: 616455 - DNA, 642 bp, Homo sapiens
tacctgacttcaaattatactaaagggctacaataaccaaaacagcatagtactggcataaaaacagacrcatagaccaaaggaacagaacagagaacccagaaacaagtccacacacctactgtgaattcattttttgacacaggtgccaagattatacgctggagaaaagacaatctcttcaatgaatggtgctgggaaaactggatatccataggcaaagacatgaaacttgactcctgtctctcatcatatatgaaaatcaaatcaaaatgaattaaacaattaaatctgagacctcaaactatgaaactactacaagaaaacattggggaaactctccaggacatagtctgtgcaaaaatttcctgagcaataccctacaagcacaggcaaccaaagcaaaaatagacaaatgggatcacatcaagtcaacaatcttctgcacagcaaaggatacaatcaacaaagtgaagatacaacccacagaaagtgagaaaagatttgcaaactacgcatctgagaaggtattaataatcagaatatataaggagttcaaacaactgtaaaaaaatggaacaatccaatcaaaaagtaggcaaaatatttgaatagacatttatcaagacctacgaatagcaa

SEQ ID NO: 616456 - DNA, 642 bp, Homo sapiens
tacctgacttcaaattatactaaagggctacaataaccaaaacagcatagtactggcataaaaacagacgcatagaccaaaggaacagaacagagaacccagaaacaagtccacacacctactgtgaaytcattttttgacacaggtgccaagattatacgctggagaaaagacaatctcttcaatgaatggtgctgggaaaactggatatccataggcaaagacatgaaacttgactcctgtctctcatcatatatgaaaatcaaatcaaaatgaattaaacaattaaatctgagacctcaaactatgaaactactacaagaaaacattggggaaactctccaggacatagtctgtgcaaaaatttcctgagcaataccctacaagcacaggcaaccaaagcaaaaatagacaaatgggatcacatcaagtcaacaatcttctgcacagcaaaggatacaatcaacaaagtgaagatacaacccacagaaagtgagaaaagatttgcaaactacgcatctgagaaggtattaataatcagaatatataaggagttcaaacaactgtaaaaaaatggaacaatccaatcaaaaagtaggcaaaatatttgaatagacatttatcaagacctacgaatagcaa

SEQ ID NO: 616457 - DNA, 549 bp, Homo sapiens
cttaacatacattaaatatacttgctaacttagacaaaagtcaaatagtaacttatgtttttccttttctgtcattcagcattgattcaaaccattcaatatcattttgtgtaagcagctgaaggaacttaacagcaatacaaaacaaactcttagctttcttcatgatgaaattatgaataaacaagtaattaaatgagttctgggatatactggtaatctgagaactcttagtctaacgaaaccagtttggttaacactcagtaaccacattttacaccagcataatayccctttaggtatacatggttactgttcacacaacacatggatgtaaacttaaaattcaagaatttctaagacaatcattctaaaatgtattacaaagaaaaataagattgccttccaactattcagaaacaaaagcccaaaagaagtgagagttattttagagagactacttaatcatgatgaaaaaaaatctaggctgggcacggtggcacacacctgtaatcccagcactttgggaggctgaagcaggtggatcac

SEQ ID NO: 616458 - DNA, 531 bp, Homo sapiens
gtttaaagtctgttttgtctgaaattaggattgtaaaacctgcttttttctgatttcaatttgcttggtagattttcctccattattttattttgagcctatgagtgtccctgtgtgtgagatgggtatcttgaakatcatatacaattgggtgttgcattttaatcaagtttgccactccgtgccctttaaatgggggcttttagcccatttacattcaaggttcatattgatatgtatagatttgacctgtcattgtggtgttagctagttattatgccagcttgtttgtgttttgctttatagtgtcattggtctttgtacttaagtatgtttttgtattggctggcaagggtctttcttttccatatttagcgctcctttcaggatctcttgtaaagcaggtctggtggtaacaaactccctaagcatttgcttatctgaagaggatattatttctcttttgctgagaaagcttagtttggatagatataaaatcattggttgaagatttctttctgtaggaatgtt

SEQ ID NO: 616459 - DNA, 520 bp, Homo sapiens
atgatcacctcaacagatgcagaaaaagcatttgaaaaaaatccaacatttatttgtgaagaaaagaaaggaaaagaaaattctcagcaaactaggaatagaaagaaacctcctcaacacaataaaggagatctgagaaaatctaaaactgacatcatacttcatggtaaagcttagatgatatccccttaagcttgctctgaccttttctattaaacatcrcactggagcaataaaattaaaaaaaaaaaactacagtaatacagattgaaaaagaaataaaactgtgtttatctgtgtggaaaacctgacaaaatatacataattactagacataataaatcaattaataagtttgcaggataaagaccaacatacaaaaaaactatttctacatatttgtaatgaataactaaaatattttaaaaataattacaatcatatcgaatattataaactattattttaacatcaaattaaaatatttttatctttgaaatacatacttaagaaaataaaa

SEQ ID NO: 616460 - DNA, 520 bp, Homo sapiens
atgatcacctcaacagatgcagaaaaagcatttgaaaaaaatccaacatttatttgtgaagaaaagaaaggaaaagaaaattctcagcaaactaggaatagaaagaaacctcctcaacacaataaaggagatctgagaaaatctaaaactgacatcatacttcatggtaaagcttagatgatatccccttaagcttgctctgaccttttctattaaacatcacactggagcaataaaattaaaaaaaaaaaactamagtaatacagattgaaaaagaaataaaactgtgtttatctgtgtggaaaacctgacaaaatatacataattactagacataataaatcaattaataagtttgcaggataaagaccaacatacaaaaaaactatttctacatatttgtaatgaataactaaaatattttaaaaataattacaatcatatcgaatattataaactattattttaacatcaaattaaaatatttttatctttgaaatacatacttaagaaaataaaa

SEQ ID NO: 616461 - DNA, 578 bp, Homo sapiens
agtaaaataaataaataaatagctttgctaccaaattgattccattggtagatatgtggatgccaacaaatsaatgttaaaaatatttgaaaagcatatgcagtgaacagtgaatacacagtaagtagcataataaacatttacaaaccagaggaatgtgtatgtttactctgctttaataatttggtgtcccaggagataacataaacaggatgcaacatgctaaatgcctatagtcaacagacaaaataattatcaatatttagaaagaaaaaatcaaactgccctaatttctcattaatatgacatactgaaagtcataaacattcttggtgatgtcataattatgagagatcaagaatgagtctgtactgaaataatcttcgttaacttttctatgatcaatcaaccctaaaaatttccagtattactgatgttttaaaaactctaaggaggacaacatcaccaacacggcaaaataagaagctcctgactcttcctccacccacaaatccatcacataaacatttatccatggatcaattctctctgagagagtcagagagcagtcaggagat

SEQ ID NO: 616462 - DNA, 578 bp, Homo sapiens
agtaaaataaataaataaatagctttgctaccaaattgattccattggtagatatgtggatgccaacaaatgaatgttaaaaatatttgaaaagcatatgcagtgaacagtgaatacacagtaagtagcataataaacatttacaaaccagaggaatgtgtatgtttactctgctttaataatttggtgtcccaggagataacataaacaggatgcaacatgctaaatgcctatagtcaacagacaaaataattatcaatatttagaaagaaaaaatcaaactgccctaatttctcattaatatgacatactgaaagtcataaacattcttggtgatgtcataattatgagagatcaagaatgagtctgtactgaaataatcttcgttaacttttctatgatcaatcaaccctaaaaatttccagtattactgatgttttaaaaactctaaggaggacaacatcaccaacacggcaaaatargaagctcctgactcttcctccacccacaaatccatcacataaacatttatccatggatcaattctctctgagagagtcagagagcagtcaggagat

SEQ ID NO: 616463 - DNA, 591 bp, Homo sapiens
aaggaaaagtcaaattgccgctactgaggaacctccgtaagactatcagcagatttcttagcagaaacctgagaagctcagaaggcagtcagatgatatattcaaagtattaaaagaaaaaggctgccaaccaagaaccctgtctttgtcagcaaccctgtctttcaaaaacaaaacaaaggagtgataaagactttctcagacaaatgaaagctgagaaactttatcaacactagaactgtattacaagaaaatgtgaaaggaagttcttcaagctgaaagaagatattaattagtaataaaaacatacaaaagtataaaactcatgagtaaaaggaattacatcatcaaattcaaaacactctaatacagtaatggtggtgggtaaatcaagtatatctctagtgtaacggtcaaaatgcaaaactattaaaacaatgaaaactataattgctaaggaatacatagtatttaaacatctaaagtgtgacatcaaaaacataaaatgcaggaggaggggcagtaaaaatgragagtttgtgtatgtactcaaaattaagctgttatcagcttaagttaatgtgttataag

SEQ ID NO: 616464 - DNA, 468 bp, Homo sapiens
actggtagtcctagctacttgggaggctgaggtgagacaatcacctgagctcaggaagttgaggcagcagtgagctgcratcataccactgtactccagcctgggcaacagagtgagactctgcctcaaaaaaaaaaaaaaaaaaaaaatatatatatatatacacacaatatataatatatattttatatataatatatacacaatatatattttatatataatattttttatataatatatatgtaatatatattttatatataatatatacatattttatatataatatatgtaataactgtgtacgtatatacatacgtctgtgtatatgtgtatacttgtgtatatgtatatacatataactgtgtgtatataacatacatatgtacacacagttattatatggatgaaaaagcaagatcaagctatatactgcttataagggacttatctcggctgtaagaa

SEQ ID NO: 616465 - DNA, 606 bp, Homo sapiens
ataaaatatagcagcaataataatgtaaaaatagttgcaaattgattttyttcataccagcactgtaccgagaacttgacaatttttagcattaatactcacaacaatcttttaagttgaggattgtcctcatttgcaagatagtaaactataaattggagaggtaagtaattatgcaacactgcatacttagtagctggtatagcttgaatttgaacacaagattttatgagcctaccccacaactcatgtccttttctcagaaatagtgtttgtgattcagcagagcacttatgactggagatataaaattggtcatcagtgatacattgtcaatacagtcatgtgttgcttaacaacaggtatagtttcttaaaaatgcattgctagatgatttcattttatgagcatcatagagtgtacttagacaaacctagatgctatagcttcctatatacctaggtaacatgatacagcctattgctcctggctgcaaacctgcacagcatgttactgttctgaatactgtagacaattgtaacagaatggtaagaaattgtatatctaaacataggaaaggcaatgcattacactatgattttatga

SEQ ID NO: 616466 - DNA, 600 bp, Homo sapiens
attaatactcacaacaatcttttaagttgaggattgtcctcatttgcaagatagtaaactataaattggagaggtaagtaattatgcaacactgcatacttagtagctggtatagcttgaatttgaacacaagattttatgagcctaccccacaactcatgtccttttctcagaaatagtgtttgtgattcagcagagcacttatgactggagatataaaattggtcatcagtgatacattgtcaatacagtcatgtgttgcttaacaacaggtatagtttcttaaaaatgcattgctagatgatttcattttatgagcatcatagagtgtacttagacaaacctagatgctatagcttcctatatacctaggtaacatgatacagcctattgctcctggctgcaaacctgcacagcatgttactgttctgaatactgtagacaattgtaacagaatggtaagaaattgtatatctaaacataggaaaggcaatgcattacactatgattttatgacattacaacagctacaacatcactaaacaataggaattttcagcttcattataattgtrtagaatcatcatcatataagcagtt

SEQ ID NO: 616467 - DNA, 617 bp, Homo sapiens
acaatgaattcttctttccaccagggaaagaaaagttaggtagctgagagaaagccacatagggcagtgtctctgtagaaatatttaatgccaaggctgaaacacaacaggctgcacacttccaattttgcaagtccagcacagtgttacaccgaaggaagagtgcacctaatgcatagcctgacctgggaagtggccttcaaaatgttttttgtaataaggcatcctattataacccagcgcaccattcmctgagacaggcggtggtattccggatcacaaccctgaaagtccgagtcttttcgccaggtgctttcaagccaggcaccttactgcccccgctctccctcttaagcactctctcttccaaagagcattctgtttgcttttcccaaagcactccctgccctctgctatggccacttagtgaggcaccacccacacacacagagctgctaaaggactgcataaagccagagcagcttccagcacagggcacgcctaataggagggtctgatctgttaattatctgtcagtttgtcacggctgggctgaggaggggagaatgatgaaaaggggggtgttagggggaggccctctactcggtggtgtgcta

SEQ ID NO: 616468 - DNA, 617 bp, Homo sapiens
acaatgaattcttctttccaccagggaaagaaaagttaggtagctgagagaaagccacatagggcagtgtctctgtagaaatatttaatgccaaggctgaaacacaacaggctgcacacttccaattttgcaagtccagcacagtgttacaccgaaggaagagtgcacctaatgcatagcctgacctgggaagtggccttcaaaatgttttttgtaataaggcatcctattataacccagcgcaccattcactgagacaggcggtggtattccggatcacaaccctgaaagtccgagtcttttcgccaggtgctttcaagccaggcaccttactgcccccgctctccctcttaagcactctctcttccaaaragcattctgtttgcttttcccaaagcactccctgccctctgctatggccacttagtgaggcaccacccacacacacagagctgctaaaggactgcataaagccagagcagcttccagcacagggcacgcctaataggagggtctgatctgttaattatctgtcagtttgtcacggctgggctgaggaggggagaatgatgaaaaggggggtgttagggggaggccctctactcggtggtgtgcta

SEQ ID NO: 616469 - DNA, 597 bp, Homo sapiens
catctcaccactccacagcttcttcttgattcaggccccatcacaacacactgggattactcaacagcctccatatgctcctaactgagccctggcttgacctccacatcatacacatttcttatctcaacactgtagccaaaggcagtgttattaaaatgtaagtgatatcacattattcctctgctcaaaaccttacagtgtcttcctatttcattcaaaataaatgccaaggtctttataatggatttcaaaattctatatgatttaacccctccccacctttgttggtctctgacctcatctgctcccactctttccctccctaattctgtttcaaccacactggccaccttgtgtttccctgaacacgtttgtgcctcagggcctttgcatttgctcttttctcaatctgaaatactcttcctccacatatccaaatggctttctacttgtttttcttcaggtatctgatttttaaaaaatctcacctaatctgtasgagccaccctagatatcttacatcaagttgtaacccaaggtctccaacacttgacacacaattcctttacattggggataaaacacatttcagag

SEQ ID NO: 616470 - DNA, 462 bp, Homo sapiens
aatcttctatgaacaacatgtacaggtttttgcataaacacaagttttcaatttatttaggtaaataccaacaagcatgattgctggatcatgtgatacgagtatatttaattttgtaagawactaccaaactgtcttctaaactgccagtgccattttgcattctcatgagcaatgaatgagagtccctgttgctccacatcctcgtcagcatttggtgttgtcagcattctggatttgggccattttaacaggtttgtagcagtatctcattgttgcttccataagacatatgatgttgagcatcttttcatatgcttatttgctatctgtaaatcttcttttgtgaagtgtctattcacgtcttttgcccatttttaatcaagctttttggtggcttatgttctaggaattgtttgtctaggttggataacagctctttatcagatatggtcttcagcc

SEQ ID NO: 616471 - DNA, 597 bp, Homo sapiens
catctcaccactccacagcttcttcttgattcaggccccatcacaacwcactgggattactcaacagcctccatatgctcctaactgagccctggcttgacctccacatcatacacatttcttatctcaacactgtagccaaaggcagtgttattaaaatgtaagtgatatcacattattcctctgctcaaaaccttacagtgtcttcctatttcattcaaaataaatgccaaggtctttataatggatttcaaaattctatatgatttaacccctccccacctttgttggtctctgacctcatctgctcccactctttccctccctaattctgtttcaaccacactggccaccttgtgtttccctgaacacgtttgtgcctcagggcctttgcatttgctcttttctcaatctgaaatactcttcctccacatatccaaatggctttctacttgtttttcttcaggtatctgatttttaaaaaatctcacctaatctgtaggagccaccctagatatcttacatcaagttgtaacccaaggtctccaacacttgacacacaattcctttacattggggataaaacacatttcagag

SEQ ID NO: 616472 - DNA, 597 bp, Homo sapiens
catctcaccactccacagcttcttcttgattcaggccccatcacaacacactgggattactcaacagcctccatatgctcctaactgagccctggcttgacctccacmtcatacacatttcttatctcaacactgtagccaaaggcagtgttattaaaatgtaagtgatatcacattattcctctgctcaaaaccttacagtgtcttcctatttcattcaaaataaatgccaaggtctttataatggatttcaaaattctatatgatttaacccctccccacctttgttggtctctgacctcatctgctcccactctttccctccctaattctgtttcaaccacactggccaccttgtgtttccctgaacacgtttgtgcctcagggcctttgcatttgctcttttctcaatctgaaatactcttcctccacatatccaaatggctttctacttgtttttcttcaggtatctgatttttaaaaaatctcacctaatctgtaggagccaccctagatatcttacatcaagttgtaacccaaggtctccaacacttgacacacaattcctttacattggggataaaacacatttcagag

SEQ ID NO: 616473 - DNA, 485 bp, Homo sapiens
gaaactaaccctcggagaagacgagtcagcagctgcctgagattcaagctctccaaggccttcttcargttctctctgctgcaggctctccctctcctttacggagcctcacccacatccccttggcactaagcaggtatctgtgattctgccctaaggactcctgaaagctctcagaggtcagagtttgtgggctcaggaaccgcccttggtgatggataagtgatctgtgttggtggataaatgccccagcttcttccctccccagaatggacagctctgagccttgctctgcaccatctcctgtctcccagaggtcccaagtgggcagggccccggttgcctgccagctgctcatgaacttgcctatactggcttccttccctgtctcacttcccacatccctcatggcttcctggaatcacctctcaaatgaactccttgccctcaaatcctagttctggtctgtttccagggacccccaa

SEQ ID NO: 616474 - DNA, 485 bp, Homo sapiens
gaaactaaccctcggagaagacgagtcagcagctgcctgagattcaagctctccaaggccttcttcaggttctctctgctgcaggctctccctctcctttacggagcctcacccacatccccttggcactaagcaggtatctgtgattctgccctaaggactcctgaaagctctcagaggtcagagtttgtgggctcaggaaccgcccttggtgatggataagtgatctgtgttggtggataaatgccccagcttcytccctccccagaatggacagctctgagccttgctctgcaccatctcctgtctcccagaggtcccaagtgggcagggccccggttgcctgccagctgctcatgaacttgcctatactggcttccttccctgtctcacttcccacatccctcatggcttcctggaatcacctctcaaatgaactccttgccctcaaatcctagttctggtctgtttccagggacccccaa

SEQ ID NO: 616475 - DNA, 508 bp, Homo sapiens
cagggtttctacagaggatgaaatactatatctgtccaagatatattgaatttactgggagttatctcattgcatagcctactagccaattctcaggaattttgaacttgagatagtttgaaaagtattgtcacaggtgcytttccctaattatttaaacataagtgaatttcaaataaaatgtagcactttcaattcttaccaatttttacttttcttcgaacaaatatgcatggtatatgtcactaaaatgctagaagaagttttatctgaaaaatatatggcctccatgcaagcacacaacacatacctccatgtattttgtcaaaaagcaaatattttatgagttccaaatgaagcttagtcccacagctcaaattcagagtttcaaatgtttattttttcttgttattgtgaaaattatttagctcatttgtagattacctttccttaaaacttcttttgttagggatcaggaatgcctacgttctctggtcactgggctttt

SEQ ID NO: 616476 - DNA, 508 bp, Homo sapiens
cagggtttctacagaggatgaaatactatatctgtccaagatatattgaatttactgggagttatctcattgcatagcctactagccaattctcaggaattttgaacttgagatagtttgaaaagtattgtcacaggtgcctttccctaattatttaaacataagtgaatttcaaataaaatgtagcactttcaattcttaccaatttttacttttcttcgaacaaatatgcatggtatatgtcactaaaatgctagaagaagttttatctgaaaaatatatggcctccatgcaagcacacaacacatacctccatgtattttgtcaaaaagcaaatattttatgagttccaaatgaagcttagtcccacagctcaaattcagagtttcaaatgtttattttttcttgttattgtgaaaattatttagctcatttgtwgattacctttccttaaaacttcttttgttagggatcaggaatgcctacgttctctggtcactgggctttt

SEQ ID NO: 616477 - DNA, 508 bp, Homo sapiens
cagggtttctacagaggatgaaatactatatctgtccaagatatattgaatttactgggagttatctcattgcatagcctactagccaattctcaggaattttgaacttgagatagtttgaaaagtattgtcacaggtgcctttccctaattatttaaacataagtgaatttcaaataaaatgtagcactttcaattcttaccaatttttacttttcttcgaacaaatatgcatggtatatgtcactaaaatgctagaagaagttttatctgaaaaatatatggcctccatgcaagcacacaacacatacctccatgtattttgtcaaaaagcaaatattttatgagttccaaatgaagcttagtcccacagctcaaattcagagtttcaaatgtttattttttcttgttattgtgaaaattatttagctcatttgtagattacctttccttaaaayttcttttgttagggatcaggaatgcctacgttctctggtcactgggctttt

SEQ ID NO: 616478 - DNA, 552 bp, Homo sapiens
gtttatgattaaactcagccaccctcagaaacacaacgtctatcctaggtgtgaaagtactagagaaagaagtcctaatagatcaaagtgtaattacacggaaatgacctaaaaktgcacaagggactccaaaaagcattctagaaaaggcagtgctcacccggaaagatgagtgagagagaggcaactgttggaaattgcacagtaaaggggaaaatgagccaaaagggtaaattgaggatactgtaagacacataattttttaaaaaactggaagacacatactccctcccctcctatcactatgctccaaaggagccatccattaaataaactatatttcacttcactgacaagagtgggtagctcttgaactagaaatctcacaactcacatcaaaactgccagccctatacaaggaagtacaagaacaatcaaaagtactttatgggccaggcacggtgactcacgcttgtaatcctagcactttgggaggcgggcagatcacccgaggtcaggaggttgagaccatcctggccaaaatggtgaaac

SEQ ID NO: 616479 - DNA, 552 bp, Homo sapiens
gtttatgattaaactcagccaccctcagaaacacaacgtctatcctaggtgtgaaagtactagagaaagaagtcctaatagatcaaagtgtaattacacggaaatgacctaaaattgcacaagggactccaaaaagcattctagaaaaggcagtgctcaccsggaaagatgagtgagagagaggcaactgttggaaattgcacagtaaaggggaaaatgagccaaaagggtaaattgaggatactgtaagacacataattttttaaaaaactggaagacacatactccctcccctcctatcactatgctccaaaggagccatccattaaataaactatatttcacttcactgacaagagtgggtagctcttgaactagaaatctcacaactcacatcaaaactgccagccctatacaaggaagtacaagaacaatcaaaagtactttatgggccaggcacggtgactcacgcttgtaatcctagcactttgggaggcgggcagatcacccgaggtcaggaggttgagaccatcctggccaaaatggtgaaac

SEQ ID NO: 616480 - DNA, 194 bp, Homo sapiens
gaattctgcagccctaagtgtatataaagaccaatttgtttgtctgagtagtgctgattgttaataattttagtatttggttaccagttagatggcttattcaagtaatacctcaaaagtttttttctgaagattggtctgaaattgtacactgatcatttggtaarctggccatctgctaattaattttaatt

SEQ ID NO: 616481 - DNA, 428 bp, Homo sapiens
ccaatactgtcagaagtactaagaagtgtttattaggcagagagaaaatgatcccagataaaagtttgaagctgcaaaagggaataaaaagcaatggaatggataaatatgtggagtaatctaaatcaatatgtatggtttaaatcactgacaattaygtatagtaaggatacccctcagagaagacttgtgtaaaacacaaaattgacagtggtgagaagaaattacagaaagaatcaaagaggaaagataattagaaatcaatttgtaaaactgtatatacaaagccaaatacatcattaactgtatcaaacaaaaaaaccctataatttaaaatgttttaagattgtttaagtataaactactaaaaagaaacacgcctaaaagctatatatgtgtctttaattggaaaaaaatacacaagagac

SEQ ID NO: 616482 - DNA, 428 bp, Homo sapiens
ccaatactgtcagaagtactaagaagtgtttattaggcagagagaaaatgatcccagataaaagtttgaagctgcaaaagggaataaaaagcaatggaatggataaatatgtggagtaatctaaatcaatatgtatggtttaaatcactgacaattacgtrtagtaaggatacccctcagagaagacttgtgtaaaacacaaaattgacagtggtgagaagaaattacagaaagaatcaaagaggaaagataattagaaatcaatttgtaaaactgtatatacaaagccaaatacatcattaactgtatcaaacaaaaaaaccctataatttaaaatgttttaagattgtttaagtataaactactaaaaagaaacacgcctaaaagctatatatgtgtctttaattggaaaaaaatacacaagagac

SEQ ID NO: 616483 - DNA, 494 bp, Homo sapiens
caacagagctagccttatagatatccattccactcccctatgtgtttcagagatatcccaaatgtatttttatagtgcattttggtttgctattacagagattgttgtaaatcctggtaaattatgcttactctcttaagattaaaaacccatataatttttgttagcaactagtcatatgaacttcaatattaaagtggtactgaaaatggaaaatacatgctttttcaacacattagcccacccaaagatgaacagtttaggtcattttctaaaaggtttttattaccaacatcattttaaattaaactgaaaccttaacaatcatacatatrgtcgcaacatttattatgtaatcacatttttcctttttaactttttagtataaaacatagcaaatacaaccaattattaaaatacactcttaagcaaggcacagaaagacaaacaccacatgatctcactgatatgtggaatctaaaaacgtcaaactc

SEQ ID NO: 616484 - DNA, 400 bp, Homo sapiens
taaaaacccatataatttttgttagcaactagtcatatgaacttcaatattaaagtggtactgaaaatggaaaatacatgctttttcaacacattagcccacccaaagatgaacagtttaggtcattttctaaaaggtttttattaccaacatcattttaaattaaactgaaaccttaacaatcatacatatagtcgcaacatttattatgtaatcacatttttcctttttaactttttagtayaaaacatagcaaatacaaccaattattaaaatacactcttaagcaaggcacagaaagacaaacaccacatgatctcactgatatgtggaatctaaaaacgtcaaactcaaaaatgtatagcggagaacgatggttatcagagggtgagggtgaggg

SEQ ID NO: 616485 - DNA, 611 bp, Homo sapiens
  misc_feature 367, 371, 396: n = A,T,C or G
aataggattttcagccatgcccagtggcttatgcctgtaatcccagtgctctgggaggccgagacggaagattgcttgaagccaggagtttgagaccagcctggggaacattgcaagaccccacctctacaaaatatttaaaaattagccagatgtggtggcacacacctgtagtcctacctactcaagaggctgaggtgtgaggatcacttgagtgcaggggtttgaggcttcagggagctatgattgtgccagcctgggtgagagggcaagaccctgtctccaatcaaataaataaataaataaataaaaactaaaaataggattttttttttttctacctcatactttattgggtgagggacanaaanaatttcagtcaaatttttaagttanttggggggggggataaaaaaaatagtgaagtcagccgcttcaccgtttctgaaagacatttggttcatttcttccttcaaaatcctgatcagacaattcctactactagaattcccaccctgcttccccaccaccttycataatccccaaatccttcagggcctctgtcagtaaccaccacctccatgatgctgtcacctattacaaaataggtg

SEQ ID NO: 616486 - DNA, 622 bp, Homo sapiens
tgaagtagtcatgcgattaaatgatttcaagcaggggactaaaaaatgaggtagttattttttgaaaggtagcatgctcatcactttcccaagccaaattcagtatattttgataattaatcccttaaattgacataaaaaatgcctcaacagtacttagagaaacacttaataaaataatggtttaaaacacagcttgaaaaaataaaagagacatgtgaaaggaaaatagaggagacacatgagttactgttaccttgctgagcttgagggatcccctccwgatgccttctccacctggagctagcacagatatagatgactgtccgtatgtattctagcccacagagtctcacagactccttgctccgcacttctgagatggcaaataggacagagaataaaaacagagtgaaaatggagcccttcattttgctgaggactgaatgtgaatctgatatggtaaatatagtcaaatcaaattctggagtgactgtcactctcttgaccaatttatactaactttcctgacatttcattggtcagaacctcatttttacaatatttgctaagcacatagggttacacagtaaagttttgaaaatgcggttttatgagtatt

SEQ ID NO: 616487 - DNA, 578 bp, Homo sapiens
accaatacccccatgggaagtgactataaactagagtgtttatttgcagttccttttgtctttaatcttatagcctctactcattttcaatattatttaggtatataccctttcctcccactccttctggagggttatattatacatttgtaaggcagtttgattcttttgttacagtctgtattccattgtaggatcctcgtatttcttaattgtgattttaaaaaacctcccayattttaagtctcactttttgtgttgtaatattctttgggttttagtaaaggcatggtgctatgtatccaccattatagtatctatacagaatagttttaccatcctaaaaatattcattatgcttcacctattcaactctcccttctcttcaaggccctgctaccgaccattgatttgttttctgtttctatagttttgcctttctctagactgtcatataagtagaatcagacaggatatagtcttttcagactggtttatttgacttagcaataagtatttaagattcatcaatcttgttgcatggattcatagctcatttttttattgctgaataatat

SEQ ID NO: 616488 - DNA, 551 bp, Homo sapiens
gagtaaccacagtttcttttttgcacctctcacaggagcacttaatccctttcatttggagatggacgtgatttttcttcctcattctggtctgtaactcagtttactatctatgtggcaattattatgtgtcttatttcaggtttccttcggatagctctaacaaaataccagagactgggtagcttataacaacagaaatttatttctcacggttctggagcctgggaagtccaagatgaaggtgacagcatggtccggattctaggacctctctctgtgtcctttcacagaagatggggcaagctggctctctggggtctstaaggtcatcaatcccattcatgagggtcctgccttcatgacctattcacctcccaaagaccccatctcctaatttcatcaccttgggggttaggatttcaacataggagacacaatatgtaattttccgctctgagttttaatttctccatctatgaggagataataatctgtgttttataatgttattgtgaagcaaaatgagttaacacaagtacagcacctag

SEQ ID NO: 616489 - DNA, 532 bp, Homo sapiens
aatagcctagtaaatgttctatggatttgagggtggatttgacattgtacaaaatcctaaacaaacaagaaaaaaaagcctaaatattgtgtgaaggaacaaatgaggtcatcaacatagtctgcaggaggagtggagccttggcaaagactcagtcaaccacaaagggcaaagaggttctcagaccaggacatggggatgtggttctggaataatcagaatgagagctgccgtttttgagtgcctaycatgtaccaggcattttgctagtgcttttacatcagagataaattgttccccaaatggctggcaggaacacagccttacaaagtagcagcaatactcgctctttaaaagaaagggatcataggttagtttttgtcttaaagggaaaaactgattttatattgctgtagaaccaaagacaactacgactgtgttaaccaactttccaggctgattttatgttttatatgttttccacacttaaaatgttttcttttccttctgtgatggtcaagatattttgtta

SEQ ID NO: 616490 - DNA, 579 bp, Homo sapiens
gatcttactcatccagtatgggggaatgatacctcacgtcttcctctttacccacaggaatcaaaacgctgagactgagaattttagggaaaaaaaagtccrctgtttagatccagaaggagagttttaatcattgtttatatcatttgagaatgaaaaaataagcttcataaatgaaattctattcacattactgtgtaataaatttccttttggatgattaggattcattgtataaaactgtaaatctttgccattcttggagaagcaaaaggagagttatcaaaaatgtatgtcgtttcatcgttgcaaggtataataaaaactgtaattattcaatctggccctgccatatgaacatttagaaagacaaacttcttcgggagtctcagttgtaaaaccttccctcattaatatctgaaaatgttagtcttcctttaagtcatagaacttatttaaacataaaccaatttctattacaggttatgctattaaatagctgtaattattaagttattatttttataattagttgttaaatttcattttacacccactcaaatttaacaaagaatcttt

SEQ ID NO: 616491 - DNA, 602 bp, Homo sapiens
agctgtgttcttctctacacccacagccaaaatggaaattcactgtatggtatttgggaatatatttcacctgtaaaagaaagaatgtccacaattcaaacggttttgagttaatagataggaatccctcagtcaaactacagaattttttttgttttatatattcttagtcagcagagtgtttgagctataattacaagtatttccacttctaaatcttcttttagaaaagcagataactataataccttggctctgccactgactcctgccrtatgatattggacaaatcactgcccttttcagtttctcatctttagaatggggagttgggattgccagtggttttcaagcttttcttaacagcagggctttttttctaataaaattgcacatggaatcctggtaggcaaaacagctcaaagcaatgcaggagtttctccaacagtttaaattggggctccccagagcatggtttaaataccataacagtacacaatgatctatcatgtgtcttccaactctgaagttccacagttgtaatttactcagataaaccacttttgaggctttataagcaaacttgtaaaaacacagtaatt

SEQ ID NO: 616492 - DNA, 602 bp, Homo sapiens
agctgtgttcttctctacacccacagccaaaatggaaattcactgtatggtatttgggaatatatttcacctgtaaaagaaagaatgtccacaattcaaacggttttgagttaatagataggaatccctcagtcaaactacagaattttttttgttttatatattcttagtcagcagagtgtttgagctataattacaagtatttccacttctaaatcttcttttagaaaagcagataactataataccttggctctgccactgactcctgccgtatgatattggacaaatcactgcccttttcagtttctcatctttagaatggggagttgggattgccagtggttttcaagcttttcttaacagcagggctttttttctaataaaattgcacatggaatcctggtaggcaaaacagctcaaagcaatgcaggagtttctccaacagtttaaatyggggctccccagagcatggtttaaataccataacagtacacaatgatctatcatgtgtcttccaactctgaagttccacagttgtaatttactcagataaaccacttttgaggctttataagcaaacttgtaaaaacacagtaatt

SEQ ID NO: 616493 - DNA, 600 bp, Homo sapiens
gactcagtttcttgatctataatatgtagtaatgcctatctggacacatggttgtagtcataattaaatgatgcattatgtgtaaagcataaaagacagtacctagctcatagcaagtactcaataatattgttcctccccttttgaggtttgccctttttcctctgtattctcactcagcaggtcaattggtgctacttacctcaggacaggagaagccaaggcagcacttaacagaagcttcttgacttttttaagcttcagtttgtcagctgtaaaatggggataacaatacatctttcttaaaagtgtgaggatttaataagggaatgcrtgtggaacacttagcacagtccccagaattcagaaagtatatgttcttttagttctcatcgtagcattattattaattagattaggtgatagtataagactatcaaaacactcaagaaaacattacatagagatacatttttatatgcagcatgcacacacacaatttacacacatataagatatattttatataatattttatataatctaagccaactacaatcataatattccaagatttagagaaaagggaaaaaattaaaa

SEQ ID NO: 616494 - DNA, 543 bp, Homo sapiens
tccttttcttcaatgtcttaaaagacttgaagtagaagggaagttgcaagctgttatttattcaaatacaaaatcctaatcaatgtttccttctttgcaagggacattcagatctctaacttgtgagttgaacctatttattttgtaagcttttgactttacaaacatgtggtagcctcattctaaaagagttgcacgaatattttttctcaaaataaccacaggctgtaaattaaattgaacaatacagtaraatatgcagatacatactaaacagatgagtgtgtgtgtatgtgtctgtgtttaagcttttccttttccaaaagattatacatttgagcaaaatcccattcagtctaaatgtactcattttgccacatggttttctgatcagcaatttttttaaaaaatggaagtgttacattatatttaataatatcaaaacaagagtgatctctaaatatagctttgaaagttaatataatatgatgtgtccatgcaatgagtcaaattagattgttgatataaatgaacaaatcaatc

SEQ ID NO: 616495 - DNA, 631 bp, Homo sapiens
attaaaaacactttggggaaagctaagagcagtgcactgtttagcacagattttgtgagattctatactcttttaatgagcatttcatagggttttttttttgctgtttttttttctttttttgctttgctttactttgccaatcagttacttttataccaaattaacgaagtttctttaaaaacttcctggttaaattgtctgttatcatatagaaaagaatcaaactgaatcactttacatttctctaaagatagttcagtttttaatccatccagagtttgtgaatcagcctgatagatcataagccatttataatttttaaacgttccattgaatgagtatatcatacaaatgttaattccatctcgctcattcagttttacattacttttatgamttttttttctcgcaaagtaaatgcttgatgttattcattcaccatcactctaaggtattttaaatcatacaacaagtaactatcacaagaaccactgtcccaagatccaaagtcagatttttttcccttttcaagttgctagaatgataattcatatagctgtgttgatttttcaggtcagaatttagttcttgctttgttaaatggacatacatgaaagagattggctcc

SEQ ID NO: 616496 - DNA, 503 bp, Homo sapiens
tttgctgtcagcctcttaaaattttacccgcatttctggaaaacttcattccatgtttagggtagggatggtgggccaaaggtctgtcaaaggtcaagggttaagagttagacaaatttcagctctgtgatttaaatatcgacttgagcatgttactcaacgattctacatttccttatcttaaaaaaaaatagagtaatgtcccctatgtcatagtcactgaacaaattcaatgagataatgtttattcatcacctagcagttcctatctagtccatagtagatattcaatcaacaatcctttcctgttcttatctttctgtgagtagagattgggatgggcaaaaatatctatttctcttcttccaacactatcctaacactgtgctccaccggaatcccaatgtattactgtcagctaatgctaattscagcaggacactcatcaagagccatgcccttggctagatgcttggaggcatcttgtttctgcttccaatgat

SEQ ID NO: 616497 - DNA, 533 bp, Homo sapiens
ctatttgtactttttttcttaaatagcaaatgatcagcttccaagtccccttgcaatgcagactatttaggaggctcccccaccccatgctaacttgtattaatacttgctttccattggcttcctcactgtctggaattagacagtacaagttattctccttcatgaatgaggcttcaactagtagaaaaattctgaaagcttagtgactatcaaatacaggcattgttttgaaattgcagtgttttatggaaaaacatataactttcatttgaaaattactttaaaacaattttgaaaatataaatttcaataatgtaaaacattctgaagtttattaaggactgaatacattatctcactgaatctcccccgcattaatcctactaggtaggcatcatttctaccactttactatgaaataactaaagtttacaggtcaagtaayttgacttaatgattaggatacagtcccaaatcctgactatgagatacaaagtccacagacccctatctacttccatagcaccatc

SEQ ID NO: 616498 - DNA, 555 bp, Homo sapiens
aaaatgtgggaatctattaacaaagctaagagaagaaagcacaggcccatatctttatgttctaggagtaaggaaagatttctgaaagaagatcccaaaatgaaaactcacaccatagagcaaaataatttttggataaatataaccacaataaaatctagggcttctgctcaacaaaggatacaatagacataattaataggctggctgaagatacatacacgtttttttaaaccctgtacattaacaacttatgctaggaaaacaatttttaaaatagtcaaagaagacagcaattttcagaaacaaagcccaaatagctaatcagaatatgaagaggtgctaaaactcactttcaagcagaaaaaatataaattaaaacaarataccattttgcacccatccaaatggcaaaacagaagaaaagagaataataccaaatgttggcaaggcatgtgagagtaaaacctgatatcgccatttggcaaagaaagttaatggtttttagaaaatacaggggtgtgtctgctttatcagagtaagagcttacagaat

SEQ ID NO: 616499 - DNA, 596 bp, Homo sapiens
tcttgaatcaaagccaaacctaaatcttgggtggtgtgtaaagctattaacataattttatcagaaaaatatacccttcccaaaaatatcaacacaaactatttttattcattccaagaactcaattattaatgtagcttaaactttgttaataaaatatcctttcacaactttagtttatgacagcttagaatcttaatcaaacctttctatcattatgtactatgaaattttagtatccatttaaagtaccttaattgttaaatgatttctctgttattgactatcctcaaataacaagaacatagaacatcctatatcatcatatttaatcctcccaatgyctgtaaaaggtactatcttcattatacaacatgatgaagctgaaactcagagaggtcagataatttttcagggtcacagggtaagggtaaaacccagattcaaaattaattcaatctctttccaacattctttccctttgtcactgcattatgtataacatattctataaattactgtagaattgggtctcatttatcttttcctaattctaactaatataatcagcttttaaagaaaaagctagtctaatt

SEQ ID NO: 616500 - DNA, 575 bp, Homo sapiens
aagtgtataaactgccccatttataaaagtgtttattgtaaaagatacaacattttaatgattattttctcttcactaaggcagcttctttgagtgccatcaaatacagacattgtggtcttcaagcacatttctatttttacaaaccccagggctgcacttcatcaaggtttcctctactttctttttgataacaaactctttaataaacattaatgattagttatattacaggagactccagatgtatrgtttcttaattagacatgaacaagacagtgtaactccaatgccaacattctttgacatgaagccatcttaacataaattttcaaagaatgtaatttattaaattctgtgttctggattataattatttcatgtatcttagaaaaggttgatttattgctggtgttaaaattttgttcctgaatgttctatctcaaggggaccatgcttgaagggaatcatacttacggttctaaaacaatcactgaaagtatctacaatgcatcatgctattaaattaaatcccttatatttataacaaaggttaatgcttttgagtttcaatg

SEQ ID NO: 616501 - DNA, 582 bp, Homo sapiens
cctcatcttttaaagatgtcagatgtcatactgctgttaagaatttaaattatttttagtctcaggctgtctacatgtgtacatctgtgtgaccttgcttggtaatgagagtcacagaaaaccgcctttcagaaaacacacagtcacacactggtgactctctgtgccctcttccattcctcagaaccccctcaaagtgtgcatgtcaattgcttcccagtactctggagatgcttttttgtcggaggtcmacagactaatggcagcaactcatccttctagggggtatcacaaacacgttatcaggttcctaagataactctctcctgacttctatgctccttgagcaaggtagggaggagggtggcatccagagtcagtcagtgcttggtttgcatcacagttctgttttgattgtttacttgccaggtgacaatggcaaggctattgaatttcttgaaacctccattttctcatctgtaaaacaagggcaagaatgctacttaccttatagcactcataaacttaccttattaccaggattaataattaatataagtaaagtcctttgaatagtggttg

SEQ ID NO: 616502 - DNA, 272 bp, Homo sapiens
tagctagaggatatgttgttgttgggggggygtgggggaggtgggtaaggagaaatgggtcttgatcatgccacagatggccttgtgtatcattacactgaacagtgtggtctctgacttgtggttgtgtgttccaattgccatctgcgagctttaaaacaaagcacacaagcaaacaaaaagcactacgaccatcatttctagtgatgtgtcttactcatcctttgatatagcccaagctaggcaagatgtttagaactcaacaatagaaa

SEQ ID NO: 616503 - DNA, 493 bp, Homo sapiens
ttgctctgaaaagtattcttagatttgtattagattatcaaaaaggaattatgattttaatgactataaagacaaattttcctaaatatttatataaaactcttcatgacctaattgctaactccccaagcctcatttgcttccacacgtcacccttcaatacccaccacactcacatacacacacaaataccacacttcccgtggtttcttaaaatgtgyctgctcagttccacacgtacatagaaggtggacctccttccttctacacttagtaagattatcttcatcctcagacctcagctccaatatcttcttaatgaaactttccctgacctatacaagcatcattaagtgctttcatagagctttgctcattctttgaaagaatttatcaaatcactgtatttgaatgtagatttatctatcctcctcaccaaacaccaagtttcaatcacatagtggcaatgaccctgatagagtggcaacagtcc

SEQ ID NO: 616504 - DNA, 490 bp, Homo sapiens
gctaagatctgataaagtcattagtgataagctagttgatgactcaggctctgtggmgactgtgctatcctggaacattgttcttagtcccttgatggcttttcagagatcgtggattaccagttttgcatttgtgggtataagctaaggatgtgcaggagcggtttggtcagatatctccttgactatggaaattctaattccctcccagtccagctagcatacaacattagccctttgtttataaagttaacgtggacagtgagatcaccaccctgggtgaattagaaaccaaagtattcagctttccttgtatttgttcccagccctttggagtaattttgctctgtggagtgtgaccacctttcccaggggctgccatggtgggagagatagattcatgtgtctctgccctgctgcccacgtgattctggtattgtcactgtttggggataagtagggggtgttgatgttggaaggaaagcaagag

SEQ ID NO: 616505 - DNA, 573 bp, Homo sapiens
tcaacatgcatagcaagtggggagctatcagccacaaagtccccttgaaataattataaactcaaaaccaagagggagccacatgacattacaaacactcccctccccaaaacagtccagggagttgcataataacaacaaaaagcccaaaggaaaatgtataatttaacgcccccaaacaaaacccaaccccactcctctaccttcaggctgctcctccaaaattactcaccgtcaaacttggcaagcttactgatgtctcccaattctgaggtgactggaatcgcctgacgtactttcatgttggtctcgctggaaggacagtatctctgagtccccgctccctcctcatcctctaaatgttttttttcacagatggggtctcgctctgctgcycaggctggagtgcagtcgcacaatcatagctcactaaagcctcgaactcctgggctcaaacaatcctcccgcctcagcctcccaagtggctgggattataggcattaaaaccaccatacccagctaagttttaaactttttaaattttttgtttgtttgttttatagagatgaagtc

SEQ ID NO: 616506 - DNA, 419 bp, Homo sapiens
tagtactattgcttccattctacagatgaggctagtgggccttagaactccccaagatcatacaattttttgtttctggtttttgttttttttttcagacagtcttgctctgtcgcccaggcaagagtgcagtggcaccatcttagctcactacaacctccacctcccaggttcaagcgattctcctgcctcagcctcccaagtagctgggactactggtrtgcaccagcatgcccagctaatttttatattttttagtaaaaatggggtttcaccatgttggcccgtctggtctcaaactcctgacctctagtgatccaccttccttggcctcccaaagtactgggattacaagcgtgagccaccatgtctggcccaagatcacacaactatttcatggctgagtgaattcaaatcca

SEQ ID NO: 616507 - DNA, 423 bp, Homo sapiens
ttggtcctgaagtcagctctgcaaaatagtactattgcttccattctacagatgaggctagtgggccttagaactccccaagatcatacaattttttgtttctggtttttgttttttttttcagacagtcttgctctgtcgcccaggcaagagtgcagtggcaccatcttagctcactacaacctccacctcccaggttcaagcgattctcctgcctcagcctcccaagtagctgggactactggtgtgcaccagcatgcccagctaatttttatattttttagtaaaaatggggtttcaccatgttggccmgtctggtctcaaactcctgacctctagtgatccaccttccttggcctcccaaagtactgggattacaagcgtgagccaccatgtctggcccaagatcacacaactatttca

SEQ ID NO: 616508 - DNA, 400 bp, Homo sapiens
caaaaagaaaaactgtaggatcttgagacgggatagagacatctaagtaratacaacagaatcttgagtccccagattcctctgaaacctctgtccaagcctgcagagttagctcactatatatatatatatatatatgtgtgtgtgtgtgtgtgtgtgtgtgtgtgtgtgtgtgtgtatgtgtgtgtgtgttttgagacagcgtctgtgttagtccattttcatgctgctagtaaaaacataccgagactgggtaatttattacaggaaaaaggtttaatggactcacagttccacatggctggggatgcctcacaatcatggcagaaggcaaggaggagcaagtcacatcttacatggatggcagcaggcaaagagagcttgcccagggaaactcctt

SEQ ID NO: 616509 - DNA, 409 bp, Homo sapiens
tcctatgccaaggttagggtcaaaaagaaaaactgtaggatcttgagacgggatagagacatctaagtagatacaacagaatcttgagtccccagattcctctgaaacctctgtccaagcctgcagagttagctcactatatatatatatatatatrtgtgtgtgtgtgtgtgtgtgtgtgtgtgtgtgtgtgtgtgtatgtgtgtgtgtgttttgagacagcgtctgtgttagtccattttcatgctgctagtaaaaacataccgagactgggtaatttattacaggaaaaaggtttaatggactcacagttccacatggctggggatgcctcacaatcatggcagaaggcaaggaggagcaagtcacatcttacatggatggcagcaggcaaagagagcttgcccag

SEQ ID NO: 616510 - DNA, 407 bp, Homo sapiens
caaaaagaaaaactgtaggatcttgagacgggatagagacatctaagtagatacaacagaatcttgagtccccagattcctctgaaacctctgtccaagcctgcagagttagctcactatatatatatatatatatatrtgtgtgtgtgtgtgtgtgtgtgtgtgtgtgtgtgtgtgtatgtgtgtgtgtgttttgagacagcgtctgtgttagtccattttcatgctgctagtaaaaacataccgagactgggtaatttattacaggaaaaaggtttaatggactcacagttccacatggctggggatgcctcacaatcatggcagaaggcaaggaggagcaagtcacatcttacatggatggcagcaggcaaagagagcttgcccagggaaactccttcttataa

SEQ ID NO: 616511 - DNA, 595 bp, Homo sapiens
cgcctcaaacaaaaaagaaaaagaaagaaagaaactgaggtttggaaaatggagatcacasagccaatgagggccaaagcccaaatttgaatccagaatgatctaactccaaagcccatgcttatttcactagactctactgaatttaacagcatggtatcttctcacttgcctctaaggagaatggagggcttaatatcatctaattgttatcaagaatgaccaaccgaattgggaagggaggagtgaaaattgccatgagtttcagaaagcctgtttcttttatgcttacccaaaggaatcataagaagcccattttgcggagtgttaaatcaaggcccaaagaaggcccactgaggtgtcatagcaggcacaaaggttagaaaacatgtcttttttcttttcttttcttttttcagattcccaactggaaaataatagaattcccaaacttgatgccaatcccatttcctcacctcatggaattttgtgtctttgtgtatgttcttgttaccaggtttgctgaaaagcccagtgaacaagacagccctgacactgattgctgtgagttcctgcatcctggccatggtgtgtg

SEQ ID NO: 616512 - DNA, 595 bp, Homo sapiens
cgcctcaaacaaaaaagaaaaagaaagaaagaaactgaggtttggaaaatggagatcacagagccaaygagggccaaagcccaaatttgaatccagaatgatctaactccaaagcccatgcttatttcactagactctactgaatttaacagcatggtatcttctcacttgcctctaaggagaatggagggcttaatatcatctaattgttatcaagaatgaccaaccgaattgggaagggaggagtgaaaattgccatgagtttcagaaagcctgtttcttttatgcttacccaaaggaatcataagaagcccattttgcggagtgttaaatcaaggcccaaagaaggcccactgaggtgtcatagcaggcacaaaggttagaaaacatgtcttttttcttttcttttcttttttcagattcccaactggaaaataatagaattcccaaacttgatgccaatcccatttcctcacctcatggaattttgtgtctttgtgtatgttcttgttaccaggtttgctgaaaagcccagtgaacaagacagccctgacactgattgctgtgagttcctgcatcctggccatggtgtgtg

SEQ ID NO: 616513 - DNA, 595 bp, Homo sapiens
cgcctcaaacaaaaaagaaaaagaaagaaagaaactgaggtttggaaaatggagatcacagagccaatgagggccaaagcccaaatttgaatccagaatgatctaactccaaagcccatgcttatttcactagactctactgaatttaacagcatggtatcttctcacttgcctctaaggagaatggagggcttaatatcatctaattgttatcaagaatgaccaaccgaattgggaagggaggagtgaaaattgccatgagtttcagaaagcctgtttcttttatgcttacccaaaggaatcataagaagcccattttgyggagtgttaaatcaaggcccaaagaaggcccactgaggtgtcatagcaggcacaaaggttagaaaacatgtcttttttcttttcttttcttttttcagattcccaactggaaaataatagaattcccaaacttgatgccaatcccatttcctcacctcatggaattttgtgtctttgtgtatgttcttgttaccaggtttgctgaaaagcccagtgaacaagacagccctgacactgattgctgtgagttcctgcatcctggccatggtgtgtg

SEQ ID NO: 616514 - DNA, 592 bp, Homo sapiens
tatatattttttgagtatttctaaggaacacaacacactgactttgggggtttgtgatgcttcacaccaatagtctaattttatgtgtgttacaatcatgatagactggaaaatgcactatcagggctgaatacctacctcattcaatagaaatggaacaaactagcctgatttargcaacagttacaaattctccagcttaagttgatggaaccagtgtcaacatgctagcgatattccttcataaaaagcaaatgggaatacattgtataaattccttataccttacaaatccattattacataccactgaggatatttttggggaaaagaaatcagccaagctctgcttacagaacaagatttccaaatgttttggttttcattcaagaatttctagagctctttgtcctctctctttccaaagaaatgatataatatttagacaggaaagtgtgtatgtgtgcagggtaggagtggagatttgtgtgcatatatttacacgtataataagatactcccaaataaatattccagtgtttctatttcgatagtgtttcctccttttatgaaaataatatagctggagctt

SEQ ID NO: 616515 - DNA, 470 bp, Homo sapiens
tggttctgcatctgaagaacatgaaatcagacaaagaagtcacagctgatattcacaaacgatgaggaggttttcaaaagagaactgaagtcggcttgtgctggcagacagccttgagcttgcaagaaacaaggctgactctgtggctcctgtgatatcttttccctgatccccaacaccaaaggaaagagctgcttttgctatacttcccccatctgttgaagaaaaaaatgccacctttctaaaatcaccttggtcacaagtgtgtgaaaggcaattcctgatgtggtgggcatttgaattgtgggttctgtccacggtcgttgagctgacccaactggaagggaagagaaccattccagacaagctgaaggaatgaaatgaccacatctgtcattcccatgatgttcctcttatctgaagrgtcaagacaagggctaatagatggctaaatagaaggaccatgggcc

SEQ ID NO: 616516 - DNA, 606 bp, Homo sapiens
ttatatttattgcgcactttatttctattattttatactctataatatagaataaaataattataccactcactataatgtagaatcagtgggagcactcaacttgttttcctgcaactagatggtcccatctgggagtgatgggagacagggacagagtgcacaacttagacccctcgcatacagttcacaatagtgttcacgctcctatgagaatctaatgctgccgctgatytgaccgaaggcagagctcaggtggtaatgctcacttgcccactgctcacttcctgttgtgtggcccagttcctaacaggccatggatcagcatcagtccacggcctgggtactggggccccctgcagtagagtaaaactactccattgggtggtaaaggagagggcacctgaagaagcttatgtattccagagaggtatagcagagaaagaatcaatgcaattttaagacacctgaaggagtcttgcaataataaaggtatggcagtaggtgacaccacagaccttgtgagccaagaagagatgtgtctctcttgggcaatatccatgggaagagatcctggaagccgcaggagatagctgcattaaaggt

SEQ ID NO: 616517 - DNA, 606 bp, Homo sapiens
ttatatttattgcgcactttatttctattattttatactctataatatagaataaaataattataccactcactataatgtagaatcagtgggagcactcaacttgttttcctgcaactagatggtcccatctgggagtgatgggagacagggacagagtgcacaacttagacccctcgcatacagttcacaatagtgttcacgctcctatgagaatctaatgctgccgctgatttgaccgaaggcagagctcaggtggtaatgctcacttgcccactgctcacttcctgttgtgtggcccagttcctaacaggccatggatcagcatcagtccacggcctgggtactggggccccctgcagtagagtaaaactactccattgggtggtaaaggagagggcacctgaagaagcttatgtattccagagaggtatagcagagaaagaatcaatgcaattttaagacacctgaaggagtcttgcaataataaaggtatggcagtagrtgacaccacagaccttgtgagccaagaagagatgtgtctctcttgggcaatatccatgggaagagatcctggaagccgcaggagatagctgcattaaaggt

SEQ ID NO: 616518 - DNA, 529 bp, Homo sapiens
tacacacaaaacacttcaagccatgattcyatttttcttctctttttacagagaactggtgaatatttacaggaaacattacatctgttggcaagacaatatattaagcttaaaatagcaagaatagcaggactagtagtccaagcaaagaattacacaagatctgggtttggaatgcactttaaggatagaggaggggtgggggatttactgaaaataatttacccctcgccccaatctttgtgcttcatcgtacttgaataaaaacattaattcaatcaaaacgtttttataccccagatttaagaagtaaatagatctgtggtaatgtttgtggaatgtattagaaggccagcacttgattctcttttcaatgttcctgaaatagtttacatcatctgctagcctttgtgagacatttaagaaacagaattttttggtccagaatactgaatgagacaaaccctctgctgccaaagaaaaactcaacatggactttgtatggcaaaaggttatcaccatctgtatt

SEQ ID NO: 616519 - DNA, 413 bp, Homo sapiens
tgtggtaatgtttgtggaatgtattagaaggccagcacttgattctcttttcaatgttcctgaaatagtttacatcatctgctagcctttgtgagacatttaagaaacagaattttttggtccagaatactgaatgagacaaaccctctgctgccaaagaaaaactcaacatggactttgtatggcaaaaggttatcaccatctgtattgtatcaagcctccgattagcttgtataaatatctggcaggaaagtaagcttcccttgtccagcaacagtcattagaatgacaaaaatgcagggttgtgtaatattgttctaacacccgagatccatcaccattacacaagacggcacccccactccatktcaggctgcaagagaactgttttgaaaaatggtcttgaaagaaaa

SEQ ID NO: 616520 - DNA, 620 bp, Homo sapiens
attacacaagacggcacccccactccatgtcaggctgcaagagaactgttttgaaaaatggtcttgaaagaaaaagagaggtcacagcagatctggcatggggacagtgtttgctcttgggctgcattaattaaactacrtgccgatatcataccaactgcaacacaaccttaattgcaattacccattgtgaccagccttcactgaaaatactaactagagacgctaataaagtctttttttgttgttgttttgttctgtttttttgagacaaagtctcactctgtcacccaggctggagtgcagtggtgtgatcttggctcactgcaacctccgcctcatgggttcaagcaattctcctgcctcagcctcccaagtagctgggattacaggcacgtgccaccacgcccagctaattttttgtattgagttggggtttggccatgttgctcaggctggtcttgaactcctgacctcaggtgatccacccagctcagcctcccaaagtgctgggattacaagtgtgagccaccacactcggccataacgttatcttttaaagaacttgatcaatcttgatgagccaatagaaggaaatataaataaataaataaatacaa

SEQ ID NO: 616521 - DNA, 465 bp, Homo sapiens
aattagcttgttcttagtgaaataaagatacagtttaaaaatgtaaattttatgcatgtaaagaccaaacctgcaagaaatattttttctaaatttgcataaaaawctatgatattttctgccatctcttgattgaattaccatctcttcattgagctcttttgttaattgggtaaaagagctctttagcaaaaaatttggctatttttgttttaaaattttgatctacatgtcttgagattatcacaaatgctttgttttttctcaaatcaattaaaaaaagatgctatgacatggcataccctgctcctttgaacctcagtccatctctaaatttttcaaccgtactactaattatctctgctgtactatttttattgtaaggacaccaaaccctaaatgataaggatgttgacatcctgagtagctactttttgtgttctgtcttccatacttacatttatg

SEQ ID NO: 616522 - DNA, 528 bp, Homo sapiens
aggacatacccaacctgaattcatacttgggttgctgtctaaaaccccaaccaaagagttaagtcatgagtactctgtccccctgccctctgctaaatgcaacaaaacatcatggaggaaaacccgagcttgttttatgtttgaggccatttttagttttgttaatattccactcgttaatggcaagagaatttcagatttggttaaatgacaattctcaaatgaatgttatttacaaaaagcctaacacaaatgacagtgaaaggttaaaaataataagatttccagaccgacgaatacaaaaaacaagcaagtaggggtggtaaagggaatttatgaaaaagttcaattcaaagcccagtagcatcacatgaggaagaaaagagttatttttacgtaattcacaagcagtataagttagtcataataaagctttgtcatcaaataacagcagtaaaatacaacaaaatctgtatgtctcacartggtaaattgtaaaaataaaattttcatggaagattttaatac

SEQ ID NO: 616523 - DNA, 604 bp, Homo sapiens
gcaacgtaaattatctgaccataagatgattaaaaacagaaattaattaaagcatattccaaatatttatacattttaaaccatctttctgaaaaataattgtgtcaaaaaatcaaattacaattcatattacttagaaaatagccaataaaaatactaacgataaaactactgattttgctgaacgtctcataggtaaatatattaccttatattattgtagtattaaataaggaggagtcataattacttggtcatgaaagcagttaaaattaacaggcaaagcacaaactggcaaaaataattagtctaagtgtgtcaaakgattcatattcttaatatataaaataatcataaaaaacctccataaaagactattcaggagaaataaaatttctaataagcagaagaaagcaacttcatttatcatcaagatgcaaattaaaataactaattccgttttcaccctcaaattggaaaaaaaatttaataataccaatgctgaagagcatgtagtgaaaagagtgatttcatacactactaatgggagtataaattggaactacttatttttttaatgatttggcactatatatcaatggct

SEQ ID NO: 616524 - DNA, 598 bp, Homo sapiens
tcagcaccatagtataaagtaaaaaatatcattggctttaatttgttgcttgctttgacagtacgtttcagtttctgctagttaattctagttgacagcctcattttcaagtgtagtttcttcctgtcacagtcaacattttttaatttagttcattcaaaaaatatttctcaagctcctatgatatgtcaggtaccatataagacagtggggcaagacatcctgaccttcaaataacttaaattctattgggggagaaaattcaatttcaaaatagcttgttgagttttatggttgggaaatccagagggctatgggaacttgtggagtggggacctcaaatgggcctggagaatcagcaagagcttcctgaggagctgtgtctaagcctgttcaagagcaagtactagacatccaggtaaagggagaagagggcactaattcaggcaaataaaagaacataggtaagggcccaggtaaaagaaaggcaatggcctgacagtaactcamtgtggagagtgaattcctgtaggagaaaaggaagaaatgaggctaagaggttaataggtactagttcaagattgggctcgtaagccat

SEQ ID NO: 616525 - DNA, 558 bp, Homo sapiens
tttaaaaacttttagaagaaatatcaaattctgtgattctactagggttgaatgatctcttgggtatgatcattgcagcatcttatgctccagataccccaagctgctagtgactcctcagtcacttcaagccttttcatgaatccacttgtgcagttttgttccctttgcctagaataccctcatgccttgtgtgtccgttcatttcttactagtccttctcgatttacagcaaactaacttctatgacacctttcctctcatcccttctcccttagatttatagctctgacacagctagacctgaaatttgagggtcataaatatcttctctctgttcacacttaycatatggtattataatgtttggtaggttttcttttctctaatattctatgaattcctctggggcaagattatgcctcctttatttttttatagcctctcctaaaaaacatatggacttggagtaagcattaataaatttttggtgaatgaatgaaggagtaaataaataaagtgagatgcatgtttagatactagaacacagcatatggg

SEQ ID NO: 616526 - DNA, 598 bp, Homo sapiens
aacctaggaaaaactgtctggaccttgacctaggcaaagaatttgtgactaagactccaaaagcaaatgcaacagaaatgaaaattaattgattaacaattaagattcagttttagaattaataaatgtaatttaaattttaatttaaaatatatttattttaataaattgatttttaaagcttctgcatagccataataataataataatcaacagtaaacagcctacagaatgggagaaaatatttgcaaactatggacctgacaaaggactaatatccagaatgcacaaggaactcaaacaaatcagcaaggaaaacaaacaaataaataatctcattaaaaagtagacaatcaacttagacatttctcaaggaagatatataaatggccaacaaacatatgaaaaatgctcaaaatcactaattatcaaggaaatacagattaaaaccacaatgagacaccagtttactccagccagaatggccatgattaaaaagtcaaaacataaaatatgttggcacggatatggtgaaaaggaacacttatatactgctaktggaaatgtaaagtagtaaaacctctatggaaaacagta

SEQ ID NO: 616527 - DNA, 552 bp, Homo sapiens
aaaggcaacctatgtatggaggttagagacaatcaaggcctaaaataaaaaggcttttaaattagtgtaccaataatggaaatggataacaactgatataatccgtatttccaaacgactacagactaatttcttattgaatgtgaggtagaggagtgaagaaagaaaaatatcaaagccaactacagcctgaatgttactcataagttaccactctttataggacccaaagggaaacacatttgacaataaacaccaaactacactcagaatctttcctccttcctagctgctaaaatcaagggtcattagggctgacatatgccgattctctctttctttargacaggcggacattcagcaagtatgcaacaatacagttgtaaaagctgttaaaatcctgaaatacttatgtgctgggtggtaaattgctattgttcaagtgccttgagtgcctctttgctgatctgaccccctttgctggcccactggcctatcccacaatccagcatctataaaggttaacatctggcagataagttggtatgcaga

SEQ ID NO: 616528 - DNA, 512 bp, Homo sapiens
cgacaggctgctaatgcattctacagaggtacagatgtatagaattcagggcaattgaaagtctccttgtctaattcattgaggaaaatagaaaggatcttggctgcctcataaaaagaaagtccctatatgcacacctgggtccttgtcttatttttgaaaacattggttcaacatggagaaaacacgttctgttctagagcagtgtattcctatgttcaaaatcttagcacaactctttgtaggaacagattcctcattcagatcaaatccataaagtcgaaaagagaatgcgggcccagattttgcttggtttcttacctatttatagcagaaagtagaggcttggtgttgtacaactccaggggatgccattattattcacataaacaggcacccttgaagttgtggagtgcacagcytaaatgcagctcatgcaactgccctaaaactctttaaagtgatttgttaacttttaaagatgaattgtgcaaggaaataaaggctcctaa

SEQ ID NO: 616529 - DNA, 512 bp, Homo sapiens
cgacaggctgctaatgcattctacagaggtacagatgtatagaattcagggcaattgaaagtctccttgtctaattcattgaggaaaatagaaaggatcttggctgcctcataaaaagaaagtccctatatgcacacctgggtccttgtcttatttttgaaaacattggttcaacatggagaaaacacgttctgttctagagcagtgtattcctatgttcaaaatcttagcacaactctttgtaggaacagattcctcattcagatcaaatccataaagtcgaaaagagaatgcgggcccagattttgcttggtttcttacctatttatagcagaaagtagaggcttggtgttgtacaactccaggggatgccattattattcacataaacaggcacccttgaagttgtggagtgcacagcctaaatgcagctcatgcaactgccytaaaactctttaaagtgatttgttaacttttaaagatgaattgtgcaaggaaataaaggctcctaa

SEQ ID NO: 616530 - DNA, 519 bp, Homo sapiens
ggtggctgtctacaagccaggaagggggctctcaccaggaaccaaccatactgctaccctgatctcagacttctagcctgcaggactacaagaacattaatttygggtatttttattttttttatttttgaggcagagtgtcactcttgttgcccaggctggagtgcagtggcgcaatctcacctcactgcgacctctgcctcctgggttcaagcaattctcctgcctcagcctcccgagtagctgggattacaggcacctgccaccacgcccggctaatttttttttttgtatttttagtagagacggggtttcaccatgttggccaagctggtcttgaactcctgaccccaggtgatccacttgtctcagcgtcccaaagtgctgggactacaggtgtgagccactgcgcccggccaatgttggttatttaagccactttgtgtatggtatttctttatggtaacccaagcagactaagacagccacgaagggtgtcaattggaactctgcaatatt

SEQ ID NO: 616531 - DNA, 557 bp, Homo sapiens
attcatttttgtctatttaattttcttttagtatacctgaaacaaatgagcaaagtaaaaaataatgtcatatgcatatacttctatagatgtatccagatagaacaagcttattgccatgtacaatgctgagaacctgggtcacctaatgaaatttagtttgcaattcttcaaactaaaactcctgggatatttattaaaaagtattttttagaagacaagccaagatctatttgaaaagggccataaaagatggatagcagtggtcctgcttatatactgattacaaaacaaaacaatccttaaaataaacaaaaaataccagtaattaatctccttagaagacagtttagcaaccagctgctarttcagcatgcttcttggtagtcttaatgtagatcttcaaaggcatttctcacacagagaggcaaacagcttacttaggaaaaaagcttctaataacccacagttaggataatcagggagtaggaaataagagagatagctgttaatctttgtttgaaaccaagaacaacaatgctagcaaacctgatgtc

SEQ ID NO: 616532 - DNA, 557 bp, Homo sapiens
attcatttttgtctatttaattttcttttagtatacctgaaacaaatgagcaaagtaaaaaataatgtcatatgcatatacttctatagatgtatccagatagaacaagcttattgccatgtacaatgctgagaacctgggtcacctaatgaaatttagtttgcaattcttcaaactaaaactcctgggatatttattaaaaagtattttttagaagacaagccaagatctatttgaaaagggccataaaagatggatagcagtggtcctgcttatatactgattacaaaacaaaacaatccttaaaataaacaaaaaataccagtaattaatctccttagaagacagtttagcaaccagctgctaattcagcatgcttcttggtagtcttaatgtagatcttcaaaggcatttctcacacagagaggcaaacagcttacttaggaaaaaagcttctaataacccacagttaggataatcagggagtaggaaatragagagatagctgttaatctttgtttgaaaccaagaacaacaatgctagcaaacctgatgtc

SEQ ID NO: 616533 - DNA, 582 bp, Homo sapiens
gacaatagtctgacctaaaatggctttgtctaggacaacaaggctgtcctttatgtggcctctcatactccatcaggctagcccaggcttgttcaggtggggacggcagggttccaagaagaaraatggaagcttgtaaggccccttggagcctagttcagaactgggaggagaaagatttggggtctttgtaattagtctaataaaacagccaatctgtcctctaggcatgtaaaccaaaatgtgcctcaatctctctatgagattgaagccagtggaattcttgtccccaggccacatgtaactggtaagatttacacataaaaaaatgcatccttcacttgatggctttttaaactcttcaggagcctccacaaaagtgcattgaaaagttctaaaactgccatcacttcgaaatggaattggaatgactactatcaaaaagacaaaaaattacaaatgatggcaaggatggagagaaagaggcactcttaaacactgttggtgggaatgtgaattagcatagccattatggaaaacagtatggaggttcctcaaaaaactaaaaagagaactaccata

SEQ ID NO: 616534 - DNA, 566 bp, Homo sapiens
attccagcctggctaattctagtcagaccggttctctgctcttgaaccctgtttcctgttaagatgtttatcaatgacaatgcgtgcacagtgggacatgaaacttcattagcaattctagtttcaccctggccttgtgaccttgccctgcccatttgccttgtgatattttattgcctttgaagcatgtgatctctgtgacccacaccctattcatacactccctcccctttgaaaatcgctaataaaaacttgctggttttgtggctcagggggcatcacagaacctgctgacatacgatgtctcccccggacacccagctttaaaatttctttcttttgtactctttccctttatttctcagactggctgacacttagagaaaatagaaaagaatctacgttgaaatattgggggctggttgcccckataatgtcacataagtagaatcacaccatatgcaactttttggtttggattttttcagctagcacaatatatttgagattcatccatgttgtgtgtatgaatagtttgctcttttattaattagtagcattccatt

SEQ ID NO: 616535 - DNA, 570 bp, Homo sapiens
ttatgcagccagcaaagtgaggttttcattctgttttgactccagctgttttccttcagggctgctcctgctcatgtgtctgaggctttccctgttggaggcctttggctacctcatcccaaggtgcaccttccatagacggtctatcaggctggccaagggaaagcaattcttgtacccaagaccctgtcacctcttgctacgactctccttatcccttgcatttctacctggtcctgaaggccaactgcttcctctytgacatctcttttttcactccataatgattcctcttctagccttttatccacatagagggccctacctgtgtgcctgagatggagttgtctgggttcatatgaggattccctacctaggatcctcagctggtatttcttcaagaatggccaacagaccaactgcatcagtaccaccttagggtgcctgttaaaaatacaaattaggggggcccatgggatcatttgcaggaagcatggaatctgccttttaacaaacacccaaatgtttctctttgcattcgagttttagaacaattggcccagcccttcc

SEQ ID NO: 616536 - DNA, 589 bp, Homo sapiens
gggctgcaggcgttgccagctgtgtgccctggtctcaggtcttttggtctagctttttccccaggaaatcgrgtgtgttttctgatcacaatacttttacataaagtgtgtgtgtgtgcatacgtgaatgcgtgtatgtatgtatatgtacatgcatgggcatatgtatctttcctcttacatgagaaaacctgcaaaagaaatattgtgggtaatgattcatcacacttcatttctccagtccctcaattggttaaaaaaaaaaaactcagcccacaggagaatcacttgaatccaggaggcggaggttgcagtgagctgagatcgcgccattgcactccagcctgggcgacaagaatgaaactccattgcaaaaaaaaaaaagaaaaaaaaaaaaagatcggccatccccatccttgttacattgactgataacttgttttcaaagaaaaaagccaatgccaaagccacctgcatacaccttccctgccacccccagcaatgggaaaatcctagagcaacagcctgatctaggcgaaggattgaggcctagagatgaactcctcagaaaccctgctcttcttgccct

SEQ ID NO: 616537 - DNA, 563 bp, Homo sapiens
  misc_feature 24: n = A,T,C or G
acccaaccaaaacaaaaacagaancaaatacaaaaaacccacacacaattctaaaatgtgaaaccatcttagtaatcatattgttgatgatagaattgatattgttatttggagactgttgtgtgtgttatagtaagaaaagtagttatatggtgttgatgagaaatcagatttttttgtatccttgaaaggaaggaaaaaatttagtgaggttctataaaaactctgtattctggaatttaaatgagagatatcaatatgaactcacgatacatttttttttcaacaaaacatatgtcttagctttgtccaccaaaaatgcccagaaacagtgaccaacccaatagcagtgaacaatcctttaccttctagattttgttctatctaaatactacttaccactaaaagggatcagagctctttagggaaatggtcggttccaggtttggggsacaaatgagcatggaacttttgtcaaaccaaaaaggaaagaagctattaaatattactagaattatgtcaaaagaactgaagagctaatctgaataaattctcattgacca

SEQ ID NO: 616538 - DNA, 562 bp, Homo sapiens
taaatactacttaccactaaaagggatcagagctctttagggaaatggtcggttccaggtttggggcacaaatgagcatggaactttkgtcaaaccaaaaaggaaagaagctattaaatattactagaattatgtcaaaagaactgaagagctaatctgaataaattctcattgaccaaagatgagacaacttcagcatcaataaagataataacgtttaaatctgtaggttcataattacacaaaaaaaccccacccaccttgtttagtcatcttggagggtttcagcgaaccatctcattattttgaaaacaagtaaaggaaaaagtcagaaatctattctggtttttccatatgatctgtacttcagagtaaccaaatcgtagaaaaaaagaacatttctctttaaataaatttaactgataaatgaaggcaaaatagcaaacttgggatatcattaagcaatgaccctcagtgactgagaatatcacagggagagagaccataagacatcatgtaccacttgataaagtcatcctgccaaaaaagaaaacaatgaatc

SEQ ID NO: 616539 - DNA, 585 bp, Homo sapiens
taggaatttatccatgtcttctagtttttctagtttgtgtgcatagaggtgttcataatagtctctgaaggtttttgcattcttgtgtttcatttgtaatttatgattgtgtttatttgaatcttttcctttcttttcattagactagctagcagtctatcaatcttatttatttttccaaagagccaattcctggatttgytgatcttttgtatggtttttcatgtctcaacttcattcagttcagctctgattttggttatttcttgtcttttgctagctttggggttagtttgttcttgtttctcattttctagttcctggaggtataacgttaggttgttaatttgagatctttctaaatttttgatgtgggctttagcactataaacatttctcgtaacactactttagacatgtcccagagattctggtatgttgtatctttgttcttactagtttcaaataatttcttgatttctgccttaatttcatcatttactcaaaagccatttaggaggaggttgtttaatttccgtgtgctgtggtccaagagtgtggttggcatgattttggtttttttga

SEQ ID NO: 616540 - DNA, 502 bp, Homo sapiens
tattctagaacaacctagaaaaaagtatctgaaataatctagagatgtgaagtacctggaacatcttgggtgaaaggtctaacaaaagttactgttttgacaggcttacttcatgctttagttctttaagttttaaaatttcatcttggcccattgggaagttcattaaaatgcctttgcaccagttttttggaggtaaatgctttttgggtttcttaaaacattcctcttcawatcccttcatggtctcaggaaaagtatgtgtgtggggcctccccctcctcttccctgaaaaagaccctggccacctatgacagatggaggcctgtcgattgaatctaaagctactgaataataaaaactcatgaaaaataaatgtgctcagagaaataagcttttccatagcagctcattccatcatattttcctgatggcctatctaatttatgatggcaactccatagcaattcctcttaatttcctattatgagtaacttatttt

SEQ ID NO: 616541 - DNA, 502 bp, Homo sapiens
tattctagaacaacctagaaaaaagtatctgaaataatctagagatgtgaagtacctggaacatcttgggtgaaaggtctaacaaaagttactgttttgacaggcttacttcatgctttagttctttaagttttaaaatttcatcttggcccattgggaagttcattaaaatgcctttgcaccagttttttggaggtaaatgctttttgggtttcttaaaacattcctcttcaaatcccttcatggtctcagkaaaagtatgtgtgtggggcctccccctcctcttccctgaaaaagaccctggccacctatgacagatggaggcctgtcgattgaatctaaagctactgaataataaaaactcatgaaaaataaatgtgctcagagaaataagcttttccatagcagctcattccatcatattttcctgatggcctatctaatttatgatggcaactccatagcaattcctcttaatttcctattatgagtaacttatttt

SEQ ID NO: 616542 - DNA, 502 bp, Homo sapiens
tattctagaacaacctagaaaaaagtatctgaaataatctagagatgtgaagtacctggaacatcttgggtgaaaggtctaacaaaagttactgttttgacaggcttacttcatgctttagttctttaagttttaaaatttcatcttggcccattgggaagttcattaaaatgcctttgcaccagttttttggaggtaaatgctttttgggtttcttaaaacattcctcttcaaatcccttcatggtctcaggaaaagtatgtgtgtggkgcctccccctcctcttccctgaaaaagaccctggccacctatgacagatggaggcctgtcgattgaatctaaagctactgaataataaaaactcatgaaaaataaatgtgctcagagaaataagcttttccatagcagctcattccatcatattttcctgatggcctatctaatttatgatggcaactccatagcaattcctcttaatttcctattatgagtaacttatttt

SEQ ID NO: 616543 - DNA, 497 bp, Homo sapiens
catgagactcaatccttcctggaatcagatgagtggacagtggggtgggccctgccagcccagccaaacagtcagatcctctccctgaggatctggaatagggatgcttccagttccggggactgacttgattagctataggttccaagtacagttatgtagagtcaagtttcatggtgaggcttacttagacaaagcaataagcaaactgaagttgtgaaggagcagaaaccctgaacagcaaggggaagccagcccatagggaggatatgggagcaggtgtacagagagaagccaagatgagagatgatgtggcttgagaaacggttgccattcattctctggttccctggagacccagctgcmcttcctacagctgggttctgttacatcgctctgtgtcttgtacaataaaccttttgcttgagctggcttgcgtgggtttctgatccttcaacaaaaacttcctgtgattctagcagtcccaaatcgatttc

SEQ ID NO: 616544 - DNA, 668 bp, Homo sapiens
ttagtgagtttgtggttgaaattttggctatttcaaatgggtaggagggtacacaaaatgactgaatttaacccctgagaataaattctggactgatctagaatcttctggagaatggcctggcccttcccacctctctagcctcatgtcttacacctcacggatacactggcatcttccaggcacgggcccaccccacacttccacttctggaaatgtgtttttttctctgyataggttgactttatcctaactacccattttgctgggccaacccctgtatatccttccaaactcagtttgagacacttttccaggcaggtgctctgcctcctccctgtgtgaatttgcatcatagaagatcctgtgtgcagcttgcttggatcccttctgccatgcactgctgcagagggggcaaatactgagccgctccaagtcacattctctttgcatctaagatgggactagtaatacccatcccttaatgatgtggcaaggatgaagttgactcatttgtacccagtgtttaaaatgccatctgatagttagtaaatgtttgaataattgaaagcataaccatactaataggatctttgcctggctacatgatagccatgagaaatatcagaccacgagccagggagacaaggtgcatagttccaatcaac

SEQ ID NO: 616545 - DNA, 465 bp, Homo sapiens
gacacagtccctggcttcaccaggcatgtcttttagtgaaaaagacagttattagtcaaataatcacacaaatgaatttgcaattgcaaatgatggtaaatgcaaggaagaaaaatcaagatagctaacatttatcgtgcattgctctcacaggcggctctgtggattatctcctttagcccactcmctcccttaggcctattaggtgaatcttgttaatatctacagtctacgctggaggaaactcaagtgaggccttgcccaaaggcccccagctggagaggtagagctggaattgaacttgactggctgatgtatgtctctgcatatattcaccacgctgcaaaactgccaagccctactgagccaccagctctgagggtataactcacaccagggctaggcatggtggcctgtgcctgtagtctcagttacttgggaggctgaagcaggaggatcacttga

SEQ ID NO: 616546 - DNA, 465 bp, Homo sapiens
gacacagtccctggcttcaccaggcatgtcttttagtgaaaaagacagttattagtcaaataatcacacaaatgaatttgcaattgcaaatgatggtaaatgcaaggaagaaaaatcaagatagctaacatttatcgtgcattgctctcacaggcggctctgtggattatctcctttagcccactccytcccttaggcctattaggtgaatcttgttaatatctacagtctacgctggaggaaactcaagtgaggccttgcccaaaggcccccagctggagaggtagagctggaattgaacttgactggctgatgtatgtctctgcatatattcaccacgctgcaaaactgccaagccctactgagccaccagctctgagggtataactcacaccagggctaggcatggtggcctgtgcctgtagtctcagttacttgggaggctgaagcaggaggatcacttga

SEQ ID NO: 616547 - DNA, 586 bp, Homo sapiens
ccaatcctctgggctcaagtgatccttccacctcagctgcccaggtagcttggactacaggtgcgtgccaccacaccggctaatttttgtattttttgtagagatggtgtttcaccatgttgcccagactggtcttgaactcctgggctcaagcgattcacccatcttggcctcccaaagtgctgggattacaggtgtgagccactgtgcccgrcatttatctgattactttaattcctttctccttttcctttgagttccagaaacagtatcaagttactttttaaacacagatgccagcatctgtgtgctgtcaattttatgctcactgtctttcctgaggttttcttttcacctcacttgacaattgtgtgtcccttctccaagcagtctttctgaacttcagcctatgttgttttcaagacttcctgcttgttagtctgcttgggatgccataacaaaataccgtgaactgggtggcttaaatagcaaaaatgtattttcttacagttctggaggctggaagtccaagttcagagtgccagcctggccgagttctggtcagggctatcttcctggcttgcag

SEQ ID NO: 616548 - DNA, 604 bp, Homo sapiens
cattagcaatgaacaatccaaaaaatgaatccaataaaataattccacttacaatagcatcagaaaaataaaatacttataaataaatctaacaaaaaagttcaagacatatacatcaaaaactataaaatattacttagagaaaatttttaaaacctaaatagttgctatgttcatggattgaaaggcttaatattgctaaaatggtgataccccccaaattgatatgcagattcaacacaatccctaactttggatttggcagcagtttattagctttaacagctaaagcacgagcctttgaaaaamtagattgtatttcatcaaaattaaaaccttttttgcttcaatggacatgatcaagaaagtgaaaagacaacccacagaatgggagaaaatatttgtaaatcatgtattggattagagtcttgtatccagaatctacaaagaactctttacaaattaacaacaaagtcacccaatcaaaacttgggtaaaggaatcaaatagacatatctctaaagaaaatacacaaagagcatatatatatatactcaacactattagtcattagggaaaagtaaatcaaaatcacaatgagata

SEQ ID NO: 616549 - DNA, 495 bp, Homo sapiens
ctctaagaggatctcaggtgttttcctggatcacagaagcccagggagcagaccccacagctaacactgactcatgcctcttccatgccaccccctgcccctgtgccccagagcctcccttggttcatttttggcaatccttggttcctacaattcctgcagctgccttgattcaaactccctccccaactccaccccaggcttaagggtggactggatgggagctgcaggtcatggcggrggtcgggggggatctccagccagttacaccccaaggagatggaaatcaaagccaatagaaactcctgttgttcaccagccccttcaaacatcctgcttggagcagattcaggctctggaaaagttcacaggaaatcctggagatcagatgcttactcagcaaccacaagctttatcttgggtctgagtcccagaaaacaaagacaaaagtttcttctaagactcccttctcccttcgccaactggtggagcacc

SEQ ID NO: 616550 - DNA, 584 bp, Homo sapiens
ctgtcccaccaaccctggcagagagacagatgaaaggagtgcacagacacaggtattttgcctgagagcgtggctaggggactgcacagcatagcaccattgacaagagtgcagccctgataagatggagccatttgtatttatttagtacagatttaatgacaaaggcctggagcaaacacaacttgtgggtaattaacactgtsgaccccccaagttagagagctcctgagtgcgaatgatcaaaggctggtttccagggacataagtaaaccaatttatctagctaagttcctttacattcccttgttacctaccctttacccttaagagaatttagctgatggcagaatttagctgaaagcttttgcaaaacctcccagccttccaaggagatttgcgtctttccctaaaattttttcttataacttttcccaccaccctgactgatgtcctacagatctttttgttccaggtcctcccaattctgaagagattaactaaaagtctagcaccttttaaagatctgaataggaaacatttgtcatctattgtctctaaggcagccactataagacttcaaa

SEQ ID NO: 616551 - DNA, 509 bp, Homo sapiens
aaaatcctttagatgtttagagaaaacttatagcttatgcaaacccctgtartttatttatataacataattttaaagcttaactaaaacattcccagttcaaattattattattttaaatcctttgacatttttgtatttcctaataacattctcttgcagctataatttccaagaagttagaacctcagaaaacagcacccacctgaatctttggattcacccaagacctaggattagcaaggaaaaggaaagtttagattatcataaaaatgtcatcaacatttctaggagtatttttaaaactgctagtacatactaacttttaaaagggatagaaaaaacaaaaatctagtagtaactaaatggtaacagtctcaaaaagaagagggctggggtaaggaaagaacattgttagacacttgcaggtaagggctgagaattgcaatgagaataaaacaagttgagagagaaaagcctgtgtgcagaaggaaaggagaaaacacagg

SEQ ID NO: 616552 - DNA, 462 bp, Homo sapiens
tatcccacattcttcttcctgctttgttccagccacactggcagctgattggatgatgcccaccacagagagggtgggtcttcctctcccagtccrcctactcaaatgtcaatctcttctgccaacaccctcacagacactcccagaaacaatgcttcaccagccacctcggcatctgtattagtccattctcacactcctaatagacatacccaagactgggtaatttataaaggaaagaggtttgattgacttacagttcagcatggctggggaggcctcaggaaacttacaatcatggtggaaggggaagcgaacacatccttcttcacatggtggccacaaggggaagcgttgagcaaaagaggaaaaaaccccttataaaatctttagatctcatgagaactcactcattatcccaagaacagcatgagggtaaccgtccccatgattcaattacct

SEQ ID NO: 616553 - DNA, 556 bp, Homo sapiens
aaaaggctgatctgcagaagaggaatgatagaagcattgtttgaggacactgcagctggctgaagacaaatggtggagtaagaggtgctacacctattggagccacagaaaatcttgagaaggccacacacccaagggcttccctaagtctaaaacctaatgagratattatagtgaacccgctcgctccttccaccccacctcataaccatgctaacaagcttcaagtaaacaataacagaggaaacatctagagaactgcaaaaggaaaactctctccagggagaaacacaaattaaagatgcaaagccaaccagagagaaaaaatccaaaatatcactagagaaactgcaagtctcctgtgcccataacaacaactaattccaactctggtaaatagagcaatggaacacttcaaagtcagcccaaatcctgacaaaattaaaacaaatgccatactaaatgcatagcagaaggcatataataaatacttgccttgacatctcttgtcacatacaatacatccacctttcaatacaaaagtatagggcatacc

SEQ ID NO: 616554 - DNA, 574 bp, Homo sapiens
ttattcttgcctctaaaataattgagaaaaaatttttaaatgcagtaaaatattaatatttgaggattctgtaaaggatatccagcaattatttgaaccattcttctatattgcccataagtctttaaatatttttttttwaaaaaccatttggaaatattgtgcaataaataactttcattaagtctatataaactatgataatttttttttctgatgattaacaaagtcaccaacatcttgtaggaccttgcctctcgtataaatatgaatagtattgataattactgtatagaaatgtaagaaacattaggcaagaaatggagatatgtttagtaaggatttccaaattagaagtatttttggttattgcaatgtttattttaattcaaaataatgtgtgtaataagaaagatattactttactatgcattaatatttcaaaaattgtaagtagagtcaacatgtgttaaatatctgccaagctttgtgctgtatattttagatagctttacagataattctatcagaacttttagagaagtttgatactaagcccatttcatagatgaag

SEQ ID NO: 616555 - DNA, 541 bp, Homo sapiens
ataaacttgcattcttcaagtctgtttgtatagcattcttgcaactcattgtgcttttatgaaatrgtgtttgggtgttcccttgattttccttgttgtttatgttattaatgagacacttataaattcttgtacaagggagctaagaagtataaatgttatgtgggtggtatgcaatcaggatatatatgaatgaccacttttaagagtgggaatgatcagactgatttctccatgttattatgttaattaattcacatcataaagttttagtccatttccttttattaagaaaacttaagacacttggcatagagatttagatttaaatataggacagggtcaatggtcacatcatagccagacgataggagcaaagcagaaatccttcctcaaaactagtagcaaactagttaaagaagaggaagttgcatgaaacacagaaggtaaagtgaatatcaaggttatgtagctgttgtgaataaagctgttttaattttctgagttagggctcctttagtttcagatgacatattcacaa

SEQ ID NO: 616556 - DNA, 558 bp, Homo sapiens
atctaagaaatgtctttcaaaaatatcaaatatagtcgtttcagaaaatagaaaaagaaataaaagattctggatcctactttaacattttgagcaatacaggcattagaaggatgcttaagggctgtgcaagtcaatgatgaatgcctgctgcctgagagttgggtagctcaccttgcctctcctggtggcctgctgaacgacaagtttttagaactaattatttgtttccactagcaaatgatgyctagatactaacattattgtataaatttttacaattaatattgtaataaatataatgagtctgttataaacgtattccatgttttccataaaactcaaaaaagctgtcttaacctttttgaatgaaaatagccaccaaagacatattttcttgttcacaaactaccctttgcaaaatagttactcattaaatatcgaattcatctctctcatataaaaatgcctgcaggtgcaaatatatttaaacaacttgagtgaaggaattaagattttaagttgcttctcttaaaatacagaggctattatatgggt

SEQ ID NO: 616557 - DNA, 618 bp, Homo sapiens
catagatatttaatgttcaaacaaaaaaatcaagagtaattcactaattattttcctattttatgagatattcgtagagaatttaataaattatgtaaatggaaactcctgattttcctccgtagacatctcttctcttgcttatatcatgaaaatttgaataaagtatattcattcccatgcccgaaatatatattctggtagttgctattttaacaaagatccttattcttgactcaagcataagtgttttattgattatttttggaaagctataagtaaaaatgcgtcaggttaacttagtaaacaaaaagaaacttaatagtaggtgattgagtcaaaaatcaagaaccacaaaatttcaaaatacattggytggcagtgggaatttagctttaagcacccttccatatctggaaatgtgtaattgataaaagagaattatatgtttaacttttatttcattcttatcatacacaaacaaaaatgacacaaccactttgaagtgttaaccaaaactgagtcacactagatattagcaaccagcaataaactatcctttgagtggttattatcaaaaggctagactgagtcacaccatttttacaatcaaattta

SEQ ID NO: 616558 - DNA, 618 bp, Homo sapiens
catagatatttaatgttcaaacaaaaaaatcaagagtaattcactaattattttcctattttatgagatattcgtagagaatttaataaattatgtaaatggaaactcctgattttcctccgtagacatctcttctcttgcttatatcatgaaaatttgaataaagtatattcattcccatgcccgaaatatatattctggtagttgctattttaacaaagatccttattcttgactcaagcataagtgttttattgattatttttggaaagctataagtaaaaatgcgtcaggttaacttagtaaacaaaaagaaacttaatagtaggtgattgagtcaaaaatcaagaaccacaaaatttcaaaatacattggctggcagtgrgaatttagctttaagcacccttccatatctggaaatgtgtaattgataaaagagaattatatgtttaacttttatttcattcttatcatacacaaacaaaaatgacacaaccactttgaagtgttaaccaaaactgagtcacactagatattagcaaccagcaataaactatcctttgagtggttattatcaaaaggctagactgagtcacaccatttttacaatcaaattta

SEQ ID NO: 616559 - DNA, 474 bp, Homo sapiens
cagtgagtcttatttctactggcttatgtcagactgtgtgttttagtctcacaaacagcattaatacaaaagtgatgggttcaatctgatttacttccttacaataagcaaatcatttgaaatttgagcatataataaatttctcattactctcattgtgatgtttgtttctttttcatagtttatttcatgacatgcttaaactttaacctttataaagatttaaaagtgtgataaaggtcaagtgtaaagtgggttattttggctgttggggctcaaaaaataaaccccraaaatatggtgctttgatgtgctgaactaaagtagcagcttcaaggtctctctgacatcctcccaattttctctctcaatcctcttcctctcccaagccacaagatgaggctgttctctgaaattcccttatgcacctaaaaccaggtcccccagagagaaacgcgattgccttcaatccct

SEQ ID NO: 616560 - DNA, 525 bp, Homo sapiens
ctgggccaaaccaatatagattcatgtattagtgcaaaatraagatactcttggaattgcaaagctcagaaagtattctgcatgcgctgttcttggcctgttgacccaaaagccatgccctgcccttccccagggtctatattctgcaaaccaagtttcccagccttcctctctagctggcttctcactagattccaataaaaggaggccctggcaggagaatggaaagtagccggaagggagaaatcagaagcttttttcctgcctgttactgcagcaggttgcacccttggctgtcactatctcttctgtggttcaactccatcatggttcttgtaagaccacctgttcccttacccctccaacccttgtggaaatagctgcttagaggaaaagaggaagaggaggcagtgtaacagagactttataatgcatttttttgcaaacctgactctctgccaaagctgctgattgaggagacagcggtgtcttcagacatgtggaatgaagcagcagctgtactga

SEQ ID NO: 616561 - DNA, 525 bp, Homo sapiens
ctgggccaaaccaatatagattcatgtattagtgcaaaataaagatactcttggaattgcraagctcagaaagtattctgcatgcgctgttcttggcctgttgacccaaaagccatgccctgcccttccccagggtctatattctgcaaaccaagtttcccagccttcctctctagctggcttctcactagattccaataaaaggaggccctggcaggagaatggaaagtagccggaagggagaaatcagaagcttttttcctgcctgttactgcagcaggttgcacccttggctgtcactatctcttctgtggttcaactccatcatggttcttgtaagaccacctgttcccttacccctccaacccttgtggaaatagctgcttagaggaaaagaggaagaggaggcagtgtaacagagactttataatgcatttttttgcaaacctgactctctgccaaagctgctgattgaggagacagcggtgtcttcagacatgtggaatgaagcagcagctgtactga

SEQ ID NO: 616562 - DNA, 525 bp, Homo sapiens
ctgggccaaaccaatatagattcatgtattagtgcaaaataaagatactcttggaattgcaaagctcagaaagtattctgcatgcgctgttcttggcctgttgacccaaaagccatgccctgcccttccccagggtctatattctgcaaaccaagtttcccagccttcctctctagctggcttctyactagattccaataaaaggaggccctggcaggagaatggaaagtagccggaagggagaaatcagaagcttttttcctgcctgttactgcagcaggttgcacccttggctgtcactatctcttctgtggttcaactccatcatggttcttgtaagaccacctgttcccttacccctccaacccttgtggaaatagctgcttagaggaaaagaggaagaggaggcagtgtaacagagactttataatgcatttttttgcaaacctgactctctgccaaagctgctgattgaggagacagcggtgtcttcagacatgtggaatgaagcagcagctgtactga

SEQ ID NO: 616563 - DNA, 525 bp, Homo sapiens
ctgggccaaaccaatatagattcatgtattagtgcaaaataaagatactcttggaattgcaaagctcagaaagtattctgcatgcgctgttcttggcctgttgacccaaaagccatgccctgcccttccccagggtctatattctgcaaaccaagtttcccagccttcctctctagctggcttctcactagattccaataaaaggaggccctggcaggagaatggaaagtagccggaagggagaaatcagaagcttttttcctgcctgttactgcagcaggttgcamccttggctgtcactatctcttctgtggttcaactccatcatggttcttgtaagaccacctgttcccttacccctccaacccttgtggaaatagctgcttagaggaaaagaggaagaggaggcagtgtaacagagactttataatgcatttttttgcaaacctgactctctgccaaagctgctgattgaggagacagcggtgtcttcagacatgtggaatgaagcagcagctgtactga

SEQ ID NO: 616564 - DNA, 531 bp, Homo sapiens
gaagcacaaccattagtttttatttttgtatgtatatattgctctccccatgaaaacagtaaaacaagatctttgattaagaaagagctacagttcattttctatggctagcctgaggtcagcatacatttctatgactttttcccttgcttcttcttctttataagtaatactaaaatcatatatgtaaaatattctgcaatgaatattctaatgtatatatacatacatacatatacacacacrcacacacacacaaagtgtttcatacattataaaaaacactctatctttccctacttcatcggaaactattctgcttaatatattcttctttaaaatgtatatatttttaatcctgtgtgtatgcattttaaatcctcttaatgggattgtgctaaatatgttgcattgtttctttcttcagtaagcaaatgcttttaagatctatgcgtgttgctatgtatgcgtatccaacccattgtttctaactgctgcacaatacttcttggtgtatatcctccaaatttg

SEQ ID NO: 616565 - DNA, 632 bp, Homo sapiens
ggcctccaccacatgccagcttgacacaatcttatttgaatctcatattggttttacaattccatatttgacctctcaccaactccctgccaaggatgtagcatggttcaattagactgctttttgttgttgttgtttgtttgttccattcatttagtaaatattattgaatgtctrctagattctaggccctgtgaaatctctttgtgatacagtcatgaacaaatgagcccctgagttcaaatcttacagacaacatatcttgtgtaagatataaggaacacagaaaattatgctgcgataatctaggaacctcttagaaaattgagaaaatgttcaaccttatttctccccatggtttcaaaataagttgtaaaatgcaatttcggtcactgtccatcaaaatgctactcaaggctaaacttggaatgtaactatggaaatgggaaatattcaagaagagataggaaatcataagtgcatagaactcattgactatgtaaactgtaatacccaacatacatgaacatatgtgaacctgaccaccactttcatgagtttaagttcttacctaaaagagttaggtcaatcctacagaagttgatatagtttggctctgtgaccccacccaa

SEQ ID NO: 616566 - DNA, 442 bp, Homo sapiens
cccaaactaataataatattttagagttattttttaagaacataaattttagtatttctttgttgactcatcttatgtggatacttcttagtacatgatgagattcatattctagcaggaaacctgaccgatattcttcataatcttactcttgctaatcttactcctgctgtttttttctaatcactcccctgtcatacaccatcattcagccataatgatgtctttcctgttctctggacaaatatgctgtttcacacaacagtgcctgcacatatgctgctaccatttgtgagaaatgctctatcattttcatgtactggaaaaatccctactcatatttcagaacttctgcagattgttctagtctctcctctcrcccttaaatattcactaagaccatctattagagcctttaccaatttatcttgtaaaacattct

SEQ ID NO: 616567 - DNA, 435 bp, Homo sapiens
ttaaaggcagctagagagagagggaaggtaacctccaaagagaacacctttcatttgagaggctaacactggacctctcaaatgaaaccctataagccaaaagaaattgggggcccatgttcaacattytaaaacaaaaaatcttcaaccaagaattttatattcagccaaaccaagcttcctaagtgaaggagaaataataagatttttttcagataagcaaatgttgaggaagtttggtaccacaagacctgccctacaagagatcttgaaaggagcactaaacatagaaaggaaaaactactaccagatactacaaaaatgcacttaaacacacagaccagtgtcactagaaagcaaccacacaaacaagcaaacataataaccaggtcacagctcaatgacaggaacaaatgcacacatattaatactaac

SEQ ID NO: 616568 - DNA, 503 bp, Homo sapiens
gagaggaaaccccgtaaatatgaagctagcaagttcaccctggctcatgtccaaatcttgaacaacagaagcttctttctaaacgtacaggaaaatcaatcttactttactataatagcaccatacaaggtctgcagcccaaatccatacaaagatgttgtaagaaagatgaggtcaaaatatgagtaactattttaatctgttttaatgctcctgataaaggcataaccaagactgagtaatttataaacaaaaagaggtttaatggactcacagttccacatggttggggaggcctcacaatcacggcagaaggtgaaaacgatgtcttacatgtcagcagacaagtgataatgagaatgaagygaatataaaaccatcagatctcgagagacttattcactaccacaagaagagtatgggggaaccaccctcatgattcagttacctcctaccaggcacctctcacaacacatgggaattatgggagctacaattcacga

SEQ ID NO: 616569 - DNA, 493 bp, Homo sapiens
agctagtacattttaaaaatgtaagagaaaaataaagcattaaaggtattattatatttagttgtaaagttcactcattgaaaacaaaacaaatatttcaaattgccaaaaataattgttgagaggcagttaaaacatgcaaaaacaaaataaatcattctttgtaagactcaaaccaccttaaaatattaaaatccaacaatgcagcaggaggcctctttctgacccatccttatcaattcctctctatccttaaagtaccaactcaagtgccactttctttcctggatcatctcagaaaaaagaatcttccaaatatggacacatcacatttaatatcactctrcttagtttaatatatgatcaaatattgcaatcatatttctttttctaaattaaaaactcttagtggataaaaattttctgatatctgaacccacactgtgccaagcatcatgcttttgcacatagaaggtatataatgaacctattc

SEQ ID NO: 616570 - DNA, 493 bp, Homo sapiens
agctagtacattttaaaaatgtaagagaaaaataaagcattaaaggtattattatatttagttgtaaagttcactcattgaaaacaaaacaaatatttcaaattgccaaaaataattgttgagaggcagttaaaacatgcaaaaacaaaataaatcattctttgtaagactcaaaccaccttaaaatattaaaatccaacaatgcagcaggaggcctctttctgacccatccttatcaattcctctctatccttaaagtaccaactcaagtgccactttctttcctggatcatctcagaaaaaagaatcttccaaatatggacacatcacatttaatatcactctgcttagtttaatatatgatcaaatattgcaatcatatttcttyttctaaattaaaaactcttagtggataaaaattttctgatatctgaacccacactgtgccaagcatcatgcttttgcacatagaaggtatataatgaacctattc

SEQ ID NO: 616571 - DNA, 505 bp, Homo sapiens
gcaccaccaagaaagcatggcctaaagacgaggatgaagatgttactgtgaaatgttttgttcaaaccttagaaagaccaaatgtggcactctagagatatctgtcagacaaaaggccttttaacgagatgaagggtgtgcctcacgtcctctatatcaaacactggacttccaggaaatttaaaggaattggtccataggctgttcaacagaagcccactggcttattttttcatggaatccgggtgaagttttgcaagattctctgacttggttcttagcaaaggtgttagtcaagttgctaaattttccagacttctcagcgacactggaatttatttatttctcttttagagactctgagcagagagaagatagagcctcaaagaaatgagtcccttggctctttctcattctgtaaatggtttccctaactttttcttttcttccttccagcagactcaggaaastcagccactttgccctctctcaaaagctggcaaca

SEQ ID NO: 616572 - DNA, 544 bp, Homo sapiens
cttgttaaaaattaaacaattttcttttattctctctcatttttgtaagatcaataaaaggactgttgatggaggctaactttttaactaaatccttaggttttaggacagaaaagtggattgggactgacccggaggagrgaaaagcatcatccacagatgtgcacggtgattgatagttctatggagttcccttttcagggtgtggggaaatgtaatttggaccacactttttgaaagtgcaaatgcaaatggaagggtaagtatagatgcggaagagcgtacactctagtgagtctttgcaaagactttaaagttagtagctgcacttcccagcatctctcacagatagggtcctgaaagtgaattaagttcttccagttagataaacttacatgaggcataggaagtggaggttgagtggaagctctactcctggctgttttggaaagctgggtcaggacatgtgggtatttccctggataaacagtcaaggtccactactccagtgttttaaaacattttaccaggacctaatgctcta

SEQ ID NO: 616573 - DNA, 544 bp, Homo sapiens
cttgttaaaaattaaacaattttcttttattctctctcatttttgtaagatcaataaaaggactgttgatggaggctaactttttaactaaatccttaggttttaggacagaaaagtggattgggactgacccggaggagggaaaagcatcatccacagatgtgcacggtgattgatagttctatggagttcccttttcagggtgtggggaaatgtaatttggaccacactttttgaaagtgcaaatgcaaatggaagggtaagtatagatgcggaagagcgtacactctagtgagtctttgcaaagactttaaagttagtagctgcacttcccagcatctctcacagatagggtcctgaaagtgaattaagttcttccagttagataaacttacatgaggcataggaagtggaggttgagtggaagctytactcctggctgttttggaaagctgggtcaggacatgtgggtatttccctggataaacagtcaaggtccactactccagtgttttaaaacattttaccaggacctaatgctcta

SEQ ID NO: 616574 - DNA, 556 bp, Homo sapiens
aaaagatcatgtgacattcaaggtaagtagaaccaatatggcgaagttgtcaattttccccaaattaatctatacaatcaagtcatgccaatctataactaacctgggtgtttcatgaaatttggcaagctaatttgaaaatttatatgggcttgaaaaaggccaagaggagtcaagataattttgaagaaggaaatggctgggggatttggtgtactagaacttaaaatgtattttcaagttattttaaagcttaatagttaaggccacatagyattgtttatgggtaggccaagacacaattgaaacaaaatagcacagaccaaggccagtgcctctgagaaacctagcatacaacatagctgagaaagaagattgttccataactggtgctgagtcaactagttaaccatatgcagacaaataaacctgaatccttttttacgccatatagaaaaagcaatttcagttgggttatgttactaaatatgacaaaacagtattagcagtgtgtttttataaccacaaagtaatgaaagttttcttaaagaagacg

SEQ ID NO: 616575 - DNA, 556 bp, Homo sapiens
aaaagatcatgtgacattcaaggtaagtagaaccaatatggcgaagttgtcaattttccccaaattaatctatacaatcaagtcatgccaatctataactaacctgggtgtttcatgaaatttggcaagctaatttgaaaatttatatgggcttgaaaaaggccaagaggagtcaagataattttgaagaaggaaatggctgggggatttggtgtactagaacttaaaatgtattttcaagttattttaaagcttaatagttaaggccacatagtattgtttatgggtaggccaagacacaattgaaacaaaatagcacagaccaaggccagtgcctctgagaaacctagcatacaacatagctgagaaagaagattgttcmataactggtgctgagtcaactagttaaccatatgcagacaaataaacctgaatccttttttacgccatatagaaaaagcaatttcagttgggttatgttactaaatatgacaaaacagtattagcagtgtgtttttataaccacaaagtaatgaaagttttcttaaagaagacg

SEQ ID NO: 616576 - DNA, 556 bp, Homo sapiens
aaaagatcatgtgacattcaaggtaagtagaaccaatatggcgaagttgtcaattttccccaaattaatctatacaatcaagtcatgccaatctataactaacctgggtgtttcatgaaatttggcaagctaatttgaaaatttatatgggcttgaaaaaggccaagaggagtcaagataattttgaagaaggaaatggctgggggatttggtgtactagaacttaaaatgtattttcaagttattttaaagcttaatagttaaggccacatagtattgtttatgggtaggccaagacacaattgaaacaaaatagcacagaccaaggccagtgcctctgagaaacctagcatacaacatagctgagaaagaagattgttccataactggtgctgagtcaactagttaaccatatgcagacaaataaacctgaatccttttttacrccatatagaaaaagcaatttcagttgggttatgttactaaatatgacaaaacagtattagcagtgtgtttttataaccacaaagtaatgaaagttttcttaaagaagacg

SEQ ID NO: 616577 - DNA, 599 bp, Homo sapiens
tgggttatgttactaaatatgacaaaacagtattagcagtgtgtttttataaccacaaagtaatgaaagttttcttaaagaagacgcagaaaaaaagaaaaatgcaaacaagttagaaaaaattaaaawtaactaattattttaaaaatattttgttgttaaaaggtaccatagaattgcaaaaataagccatgaactaggagaagatgtttgatacatgcttaaccaacaaaagattattatgcaaaatatattaataactttgactaattaaaaagaaaagatggaccacccaattgaagataagtagagaaatgagtaggcattccatgaaagaaaaaaatacaaatgacaattaaatatattaaaatgagaccttactggtttgaaaattaaaatcaaaattattatctcacattcaacaggtagtcaaatattaaaatccaacaatatcaagtaatgctgaggatatggagcggtggaaattcatatactgctgagcaaattagaaatgcctgctattgaccataagaacattttctctgagttatgtcccctgagaaactttcactcatggaacctaatggtcatgacaacat

SEQ ID NO: 616578 - DNA, 599 bp, Homo sapiens
tgggttatgttactaaatatgacaaaacagtattagcagtgtgtttttataaccacaaagtaatgaaagttttcttaaagaagacgcagaaaaaaagaaaaatgcaaacaagttagaaaaaattaaaaataactaattattttaaaaatattttgttgttaaaaggtacyatagaattgcaaaaataagccatgaactaggagaagatgtttgatacatgcttaaccaacaaaagattattatgcaaaatatattaataactttgactaattaaaaagaaaagatggaccacccaattgaagataagtagagaaatgagtaggcattccatgaaagaaaaaaatacaaatgacaattaaatatattaaaatgagaccttactggtttgaaaattaaaatcaaaattattatctcacattcaacaggtagtcaaatattaaaatccaacaatatcaagtaatgctgaggatatggagcggtggaaattcatatactgctgagcaaattagaaatgcctgctattgaccataagaacattttctctgagttatgtcccctgagaaactttcactcatggaacctaatggtcatgacaacat

SEQ ID NO: 616579 - DNA, 563 bp, Homo sapiens
tatttggttttatttgctatcatgtgtttcatgtgtggcttgagttgtctattcataattgaacccacatcaattttatgacattctgccttgggctatgagtgtaaccattaagggggtccttatggtggaggccagagaaaccagaaaaggttatgttgagaaaagggactcagaagagaacagattcagagaaaagggtggattttctctgtgcctaagtccatccccctcctcagcaaagggcaacccaaaatatctgtattcactgcccmcatcatcaatccagagtttctgattgcaaacttcagtttcctttcagaccctaggaattctgggaaagaagaggctgagggcggtgggcggacatcacaactttagggtttaccgggctagtcagtggacaacagagtcgctaaaatgaagctgttcctctagtggatctgagttttatgaggcctttttgtgtttgagaccttgcccttctcgctcttctgttttgggcgtatttcttaaactcttagtttatttatgcactcacactaacctctgggaagtttgaa

SEQ ID NO: 616580 - DNA, 501 bp, Homo sapiens
aaacacaaatttcacttatgagaaatagtcaaatagagaaaaaagtctcttaaaaagagatatctaaaataataataatcatgagtaaaataatacccgacatcctaaaagtagtagatgttagaaaacaaaatcactaaagcagatgacctacatagaggcatatgtgattcttgtgttgtctagtatttcayggaacagaatactatctgctttcttgtaagtgaataaaatataatttctagggctgaaaattcatgtgtagagaatccagtatgagaatataacttttcaagagtagagtgataattagattattaaccaggcacaggaattttttcactatggacatctccctctctataatttctgctcaccttgtacttcaaaaacacatatttcttaaagctgacagtaaactccatacttgaatgcacacttcaaataaggtctcacataagcttggaaaaatctgaacataggtccatattttgacacttg

SEQ ID NO: 616581 - DNA, 507 bp, Homo sapiens
aaaatagcacaagaagaacagtttttcaatgaagaatgatgagaacttagaaaaagtgggaaaacataaagtcttcctggatcctcacttcacattataccaaaacacattctagacaaattccagacacaactaagcaaaacactaagctattaattaaaccaaaaataatttgaagaaaatataaatgagtccataataaaattcttggagayggatccaataaacttcaaagtaattcaaaaagaaatgccaaatgaaattgatctatttgataacaaactgctgaatttatgtttggatatttctgatagaacccaccaagctaatcacaaagataatttacaatgggagttgccgggaatgtcctctctttgcttcctagcatagctagctacttgtccttcaagaaatcgctatacgcaggtggttggggcagggctgagccagctgagctgcaggggttgaataaaggagagctgactgccttctagcagtcaatgaagc

SEQ ID NO: 616582 - DNA, 594 bp, Homo sapiens
atgctaccaaattctgtcaaactccaggtcatcaagtcccctagaatctagaaaaacagytccagataccctctaatgaggaaattaagtaatttcacactattttataaactaaccaaagtttttatttattaaaggtccttaatcaagtgacttcaaggcattcataaacccttgaaactgtatgaaaatgtgtatatgtgcatatatatttatttcctagggacaaaatagcttttattcatatctcaaaagggtcaatgactataagcaacctgaagaatgtgcttgatttctagaaaaaactagtattattttcaatgataagtacaagaatgttaaaggtgatgattaaatgttttattagcatggtacaacttattcacctttagaaaatcattttactgaggtaagaaattacagggagaaattatggacccattggattttttatcacctgagaatgtaaaaagtagataagagcatgataatatatcttatatagaaagaataaggggagtaaatctcatttttaatgacttaaatattagtaatctactataataacaagtgttgacactgtgttttttatat

SEQ ID NO: 616583 - DNA, 613 bp, Homo sapiens
ggtctcccactccatccaggttgctgtgaatgctgtgattttttttcctttttgtggctgagtagtattccacaatgtatatgtaccacattttctttatgcactcattggttgacaggcatttaggctggttccatatttttgcaattgcaaattgtgctgctataaacatgcaaatgcaagttatttttcacataatgacttcttttcctttgggtagatacccagtagtgggattgctggatcaaatggtagttttacttttagttctttaaggactctccatcctattttccatagtggttgtactagtttacattcccaccagcagtgtagaartgttcccttttcactacatccatgccaacatctattcttttctgatttttttattaagaccattcttgcagtagtaaggtggtatctcactgtggttttaatttgcatttccctgaccattagtgatattgagcatttttttcatgtttgtcggtcacttgcatatcttcttttgagaatttgtctattcatatcctttgtccactttttaatgggattatttttatcttgctgatttgagtttgagtcagttccacaggcttaacaggaagca

SEQ ID NO: 616584 - DNA, 579 bp, Homo sapiens
tgacttacaggcttttgtgaactttgagagatatatcaggtcatgaaggctgatgctactaacctctgaatcacctaactccctcgtttctgattccatgctctctgactatgcatctggtgagaaytggctgttccaggctgcttcatccagagagaaaataagttggccagaggatgcaagtatgagatgcccatgacagagtactctttttaattaatagtttaaaaaataatattctggatttatatgctagtctcttgtcagttagttagcatggaatattgacaaggttgggtttctgcaaagcagagttggttgacttctcctggtgataccttactgttaagttctagactattcaaaacaaaggaaagagattgaggaaaggcatttcaaatacagagtggtctgctacttcaaacgagagaattataaccatttgttatatcactctcattaacccaatgtaatttcttatgaaagaatacaagaacaccaccataagaacagtttattttgtggtccccagagtccctttgttaaacctcccaggaaagcaaatagtcactttcctga

SEQ ID NO: 616585 - DNA, 579 bp, Homo sapiens
tgacttacaggcttttgtgaactttgagagatatatcaggtcatgaaggctgatgctactaacctctgaatcacctaactccctcgtttctgattccatgctctctgactatgcatctggtgagaattggctgttccaggctgcttcatccagagagaaaataagttggccagaggatgcaagtatgagatgcccatgacagagtactctttttaattaatartttaaaaaataatattctggatttatatgctagtctcttgtcagttagttagcatggaatattgacaaggttgggtttctgcaaagcagagttggttgacttctcctggtgataccttactgttaagttctagactattcaaaacaaaggaaagagattgaggaaaggcatttcaaatacagagtggtctgctacttcaaacgagagaattataaccatttgttatatcactctcattaacccaatgtaatttcttatgaaagaatacaagaacaccaccataagaacagtttattttgtggtccccagagtccctttgttaaacctcccaggaaagcaaatagtcactttcctga

SEQ ID NO: 616586 - DNA, 579 bp, Homo sapiens
tgacttacaggcttttgtgaactttgagagatatatcaggtcatgaaggctgatgctactaacctctgaatcacctaactccctcgtttctgattccatgctctctgactatgcatctggtgagaattggctgttccaggctgcttcatccagagagaaaataagttggccagaggatgcaagtatgagatgcccatgacagagtactctttttaattaatagtttwaaaaataatattctggatttatatgctagtctcttgtcagttagttagcatggaatattgacaaggttgggtttctgcaaagcagagttggttgacttctcctggtgataccttactgttaagttctagactattcaaaacaaaggaaagagattgaggaaaggcatttcaaatacagagtggtctgctacttcaaacgagagaattataaccatttgttatatcactctcattaacccaatgtaatttcttatgaaagaatacaagaacaccaccataagaacagtttattttgtggtccccagagtccctttgttaaacctcccaggaaagcaaatagtcactttcctga

SEQ ID NO: 616587 - DNA, 579 bp, Homo sapiens
tgacttacaggcttttgtgaactttgagagatatatcaggtcatgaaggctgatgctactaacctctgaatcacctaactccctcgtttctgattccatgctctctgactatgcatctggtgagaattggctgttccaggctgcttcatccagagagaaaataagttggccagaggatgcaagtatgagatgcccatgacagagtactctttttaattaatagtttaaaaaataatattctggatttatatgctagtctcttgtcagttagttagcatggaatattgacaaggttgggtttctgcaaagcagagttggttgacttctcctggtgataccttactgttaagttctagactattcaaaacaaaggaaagagattgaggaaaggcatttcaaatacagagtggtctgctacytcaaacgagagaattataaccatttgttatatcactctcattaacccaatgtaatttcttatgaaagaatacaagaacaccaccataagaacagtttattttgtggtccccagagtccctttgttaaacctcccaggaaagcaaatagtcactttcctga

SEQ ID NO: 616588 - DNA, 581 bp, Homo sapiens
aatggccaaaaggtacacaaaaaatgctcatcactaaacatcaataaaatacaaatgaaaaccacaatgagatatcatcttaccccagttagaacggctattatcaaaaagacaaaaaatagcctgtaatcccaactactgaggtggctgaaacaggaagattgcctgaacccaggagttcaagactgcaatgagttatgatcatgacactgcatttaactaattaagcaaattaaacagatgctggtgaagatacagggaaaagggaactctcatacactattggtgggaatataaactggtacagccaytttggaaaacagtatggagatttatcaaaaacaaaaaattgaattaccgtatgatccagcaatcccattagcagatatttatacaaagaaaaggaaaccaatagtgcttcatgtttgccaggttgtggtggctgtggcaatttctatttttttttaatttttaactttttacagatacataatatttaaacaaatttatggggtacatgtggtactttgttacatgcagagaatatataattatcaagttgaggtatttaggatatccgt

SEQ ID NO: 616589 - DNA, 451 bp, Homo sapiens
ttcctactcatttctttttaaaatttctctcaatgttttgtagtttttggtatacagatgttacatacttttcgttagattcatacactggtgtttggcatttttgtgttactataaattgaatttttcaatattctttattttctgattgttgttggtatacagaaagataactgcagtctgtagctactttgctaacttattaattccaatttatctgtaaatttaaatctctatgtatataatcatgttatcagccaacagtggtagttttatttcttcctttccaatccttatcactttttaaaacagtaattgttttaataccattagatattgaggcaaaatgataaaattatagtgttaccaaaaggccacgattatttctacttcaaaatagaaagagttttagcaaatgtrttccttggaaataactgctatttagcccagt

SEQ ID NO: 616590 - DNA, 521 bp, Homo sapiens
catttgtttcttttaatgcagtaggcaaacttagttctcagtctgataactccaccattgggaacctctgctgacatgctctgttactgctgtttggatcttaatagctttatttaggtataactgctacaataagttgcacatatctaagttttgacacaggcatataagtaaaatcatcacaatctaatgaacatagtcatcaccctcctggatgtttccttgtgaaccttgtgtctgttcttccctctcctttcctgccacgcctttgttcccaactactgatctgctttcagccaccacaaataactgcattttctagaattttatatatgtccagtcacatggcaagcattcttccttgtgtcttttcattcagcataattattctgaaaatcatccatgctgcaatgtgtatcaacaattgattcctttttactgcagagtagcattatagtgtatggrtagaccacaaagtgtttcacaaaagcatgtggaaaaattcaaagaatgttagagaa

SEQ ID NO: 616591 - DNA, 517 bp, Homo sapiens
tatttcattttgttgatctatctgtctgtctttgcatcaataccacattgtcttgattactgtagttttataataattattgaaatctggtattgttagttctctgatttagttctgtttccaattttccatgccctttgtgttttcatgtgaaattcagagttggcttctcagtttctacaaagactgctggtcttctgactgcagctcattggctctgtcggtcaatttagggagaattagcactgtaacaatactgtrtcttctgacccatgaacagggcgcttgtttggatcttctttaatttccatgagcattgttctgctgttttcactgtacagatcttgcacatattctgtcaggtttaaccctaaataatccatacaaaaataattttcagaatttcaatctttgattgttgttagcatacagaaatacaacagcttttcatatattgatcatgtatcttactacccagctcacttattgattctagttgtgttggggattccatttg

SEQ ID NO: 616592 - DNA, 517 bp, Homo sapiens
tatttcattttgttgatctatctgtctgtctttgcatcaataccacattgtcttgattactgtagttttataataattattgaaatctggtattgttagttctctgatttagttctgtttccaattttccatgccctttgtgttttcatgtgaaattcagagttggcttctcagtttctacaaagactgctggtcttctgactgcagctcattggctctgtcggtcaatttagggagaattagcactgtaacaatactgtgtcttctgacccatgaacagggcgcttgtttggatcttctttratttccatgagcattgttctgctgttttcactgtacagatcttgcacatattctgtcaggtttaaccctaaataatccatacaaaaataattttcagaatttcaatctttgattgttgttagcatacagaaatacaacagcttttcatatattgatcatgtatcttactacccagctcacttattgattctagttgtgttggggattccatttg

SEQ ID NO: 616593 - DNA, 536 bp, Homo sapiens
ggtgaaaacatattcttgccttgtttctcaatcttagggagaacacatttggtctaaatatgctggaaacggtgggtttttatsttgtgtgtatgtatgtgtgttttaaattaatcagactgaagaagtacccttattttcctagtttgctaagaattattactttttttttttaagatacctgggtcttgctatgttgcccaggctggaatgcagtggccattcacaggcacagtcttagcacactgcagcctcaaactcctggcctcaagtgatcctcctgcctcagcctcccaagtagctacaactataggcatgtgcaattgtgcctggcttgtttgccaaggatttttgtcatgaatggatgttgtatttagtcaactgattctgctgtgtcaactgttatgatcatatgtttcttccttctttagactattaatatggtggactgactcttcaatattgctctcccagcatatacccactttctcatggcacactgtccttttaatatagtgctgaatttgacttgctaa

SEQ ID NO: 616594 - DNA, 657 bp, Homo sapiens
cccctgtactgacacatgcacaaactctcccactatcaacattccacacaagagaggtacacttgctacaactgatgaagatacattgacccattaatatcacccaagtccatccttgrtattaaggttcactcttggtattgtccattctatgggtttgcacaaatatataatgatatgtattcaccattacagtatcatacagattacttttactactcaaaaaatcttctgtgccccacttcttcatcctcctcacctccctaacacctggcaatcactgatctttttactgtccccatagttttgcctttcccagaatgttatatacttgttatcatacagtatgtagccttttcagattggtttctagcacttagaaaccatttgttcctccatgttttttcatggcttaatagttcattgctttttaacactgaacaatatcccattgtctgaaggcaccatagtttatttttttcattcacttactgaagtacattttggttgcttccaagttttggcagttatgaataaaacagctgtgtgcacgtttttgtgtggacataagttttcaacgccttgggcaaatacttaagagcttaattactggatcatacggtaagggtatgtttagtttcatttggcaaactgtat

SEQ ID NO: 616595 - DNA, 575 bp, Homo sapiens
tgatttaaagtctattttgtctcatcttaatatagccacccctgctctcttttttttttttttttggctactgtttgcacgaggtatctttttgcatcctttcactttcaatgtaggtgtgtccttagatctgaagtgcttctcttgtagaccgaatctatttggatcacatatttttatccattctgccaatctgtaacttttgattgggtagtttaattcatttacatttatttttattttttattatttattaatttattctgagacagagtcttactctgtcacctaggctggagtgcagtggcacaatctcttagttatgtacatgtcatctccagaattttttgttcatttttacaatttttctctttgttgatatctttacttttaatatatcattttttcttatttcttttagttctattcccatgttgtcatttagctctttcagcatatttaagacaagtttktaaaagtctttgtttaataagtctggtgcttgtgttttctcatgtatgaagatccacagaaacaactttcaatactttcaattgttgcttctagtatttacc

SEQ ID NO: 616596 - DNA, 387 bp, Homo sapiens
tgtagttttcttttcttgtagtgtctttgcctagttttggtgtcaggataatgctggcctcacagaataatttagaaagtgttttttctgattcaactttctggaagtgtttgagaaggatttatagtggttcttcttaaatatttggtagaatttacctgtgaagccatcaggtgcagggattttctttgttgggagtttttgttattattattagttatrtgtttattcagattttctacttcatggttcagtcttggtaggtttgtgtttctaagaattagtccatttcatctggatcatctaacttcttggtgtacagttgttcatagtactcacttaaagtcatttttatctgtagaatctgtagcaatgtcctcactttca

SEQ ID NO: 616597 - DNA, 520 bp, Homo sapiens
ctcctctgccttcattcctctcaagtctaacatgtctgtctcttccttattataataaaagtggaagcagattcaaggaaattaagttactcctaacacacagcttgaatccaatatttgattacagggtgtaccctgcattcttcatggcacttcatacyacaaggatggcaaaacacaagactctgagcaggtcaaattccagtggcagaaacaagatgcatctccagaaaacagtaaagatgccataacggagacaaagacaataagcactgcgagaggtcagagggagaccagatgcccagagctccaaaaagctgacgataaccttcacagacaggtaggaggtgcatacccagaaaagacaggacatgttcgggcagttctactcactccaagttcagctcatcctaacaaagatgatgatatggtttggttgtgtccccacccaaatctcatcttgaattgcagctcccataattcccacaggtcatggtaggtatctggtgggaggtcattg

SEQ ID NO: 616598 - DNA, 520 bp, Homo sapiens
ctcctctgccttcattcctctcaagtctaacatgtctgtctcttccttattataataaaagtggaagcagattcaaggaaattaagttactcctaacacacagcttgaatccaatatttgattacagggtgtaccctgcattcttcatggcacttcatactacaaggatggcaaaacacaagactctgagcaggtcaaattccagtggcagaaacaagatgcatctccagaaaacagtaaagatgccataacggagayaaagacaataagcactgcgagaggtcagagggagaccagatgcccagagctccaaaaagctgacgataaccttcacagacaggtaggaggtgcatacccagaaaagacaggacatgttcgggcagttctactcactccaagttcagctcatcctaacaaagatgatgatatggtttggttgtgtccccacccaaatctcatcttgaattgcagctcccataattcccacaggtcatggtaggtatctggtgggaggtcattg

SEQ ID NO: 616599 - DNA, 520 bp, Homo sapiens
ctcctctgccttcattcctctcaagtctaacatgtctgtctcttccttattataataaaagtggaagcagattcaaggaaattaagttactcctaacacacagcttgaatccaatatttgattacagggtgtaccctgcattcttcatggcacttcatactacaaggatggcaaaacacaagactctgagcaggtcaaattccagtggcagaaacaagatgcatctccagaaaacagtaaagatgccataacggagacaaagacaataagcactgcgagaggtcagagggagaccagatgcccagagctccaaaaagctgaygataaccttcacagacaggtaggaggtgcatacccagaaaagacaggacatgttcgggcagttctactcactccaagttcagctcatcctaacaaagatgatgatatggtttggttgtgtccccacccaaatctcatcttgaattgcagctcccataattcccacaggtcatggtaggtatctggtgggaggtcattg

SEQ ID NO: 616600 - DNA, 599 bp, Homo sapiens
agactatctagaagactaatgagtgatttgaccagatagttgaatcagtgttatgataaaaagaaccctttactaaattcttgatcatgttctgaagttttgcaaaagcataatctgtatagtgtagatctttatttcttagactatttaaagattaaagatttaatttttagtaacatctagcatactagtgtgaaaggaaaacatcttgggcccccagaatcactaagctagaggagaaattcaagctgggaactgctcagggcaaacttgcctcccatgctattcaaagtcatcgctctgctcactgagatagatgcatattctgattgcctcctttagaaagccttatcagaaactccaaagaatacaatcatttgtctctcacctacctgtgacctggaagccctctccctgcttcaagttgtccctgtgtttttggacagaaccaatgtagttcttacatatattgattgatgtctcatgtctccctaaaatatataaaaccaagctgtgccacgactaccttgygtacatgttgtcaggacttcctgaggctgtgtcatgggcatgtgttctcaaccttggcaaaatacgtt

SEQ ID NO: 616601 - DNA, 633 bp, Homo sapiens
caagactactattctgactatcaagatgataatacaaagagtttggagtacactacttagccaggatccccatgatcaaaccaactaaaatctaatagccaggcaaagacccgatccattttaaccaagtaattggatctaaaaaccaacgtatttatctatgtgcatcaggaagtatcatcaactgcacagattcctccctctttaattagtaggtaatctagcatcccaagactgggtcaayttaatgcaggcagtgcaagttatcctctgaagcttttgtaaaaacttaactacagtactatcctgccaagcaaaagaggtaggcacaagtaaggaaaaagaaagaggggtaagaatcttattatggtagggagttttattctgagaatcttggaaatagcttttcacagtatgaagttggcaacttcttgtcctagtttgcagtttgaatgtctctagttgtggcatggggtgttctggtaaactctatgtagctcacacatcagaactgagacttgtcccttgaaatttatattgagttgttcagcttcggcttatagggcttcaagaacagagcagttcttgtttttagctggacagctgtagccagatattagaaaaaaaaataga

SEQ ID NO: 616602 - DNA, 633 bp, Homo sapiens
caagactactattctgactatcaagatgataatacaaagagtttggagtacactacttagccaggatccccatgatcaaaccaactaaaatctaatagccaggcaaagacccgatccattttaaccaagtaattggatctaaaaaccaacgtatttatctatgtgcatcaggaagtatcatcaactgcacagattcctccctctttaattagtaggtaatctagcatcccaagactgggtcaacttaatgcaggcagtgcaagttatcctctgaagcttttgtaaaaacttaactacagtactatcctgccaagcaaaagaggtaggcacaagtaaggaaaaagaaagaggggtaagaatcttattatggtagggagttttattctgagaatcttggaratagcttttcacagtatgaagttggcaacttcttgtcctagtttgcagtttgaatgtctctagttgtggcatggggtgttctggtaaactctatgtagctcacacatcagaactgagacttgtcccttgaaatttatattgagttgttcagcttcggcttatagggcttcaagaacagagcagttcttgtttttagctggacagctgtagccagatattagaaaaaaaaataga

SEQ ID NO: 616603 - DNA, 633 bp, Homo sapiens
caagactactattctgactatcaagatgataatacaaagagtttggagtacactacttagccaggatccccatgatcaaaccaactaaaatctaatagccaggcaaagacccgatccattttaaccaagtaattggatctaaaaaccaacgtatttatctatgtgcatcaggaagtatcatcaactgcacagattcctccctctttaattagtaggtaatctagcatcccaagactgggtcaacttaatgcaggcagtgcaagttatcctctgaagcttttgtaaaaacttaactacagtactatcctgccaagcaaaagaggtaggcacaagtaaggaaaaagaaagaggggtaagaatcttattatggtagggagttttattctgagaatcttggaaatagcttttcacagtatgaagttggcaacttcttgtcctagtttgcagtttgaatgtctctagttgtggcatggggtgttctggtaaactctatgtagctcacacatcagaactgagacttgtcccttgaaatttatattgagttgttcagcttcggcttatagggcttcaagaacagagcagttcttgtttttagctggasagctgtagccagatattagaaaaaaaaataga

SEQ ID NO: 616604 - DNA, 640 bp, Homo sapiens
atatagcttaaaggaaaaataatgttttcttaaatctggaaatcaaaacattgagaaaaccagcaatgtctcaagtaaagtttgaaataaagtttcaaatgtttcaagtaaagtttgaaatgtttcaaataaagtggtgaaataaagaaatgtttcaaataaagttgtgaagaacctcataattatttttcacttgttcattcagtctcaagtaagtaattcttgctctcatcttggttagcagttttacaaacacatcagtttcrtatgagttttggaaatttagtccaatgttataaactcaaagttattagaaacctgtccttgtcagagttattttattctttccatgaacctccctgaagacataacactttaggcttataaatttcttgccagaaggcttcagaaaggcatcaaaataaagcaactaactggagaacaagacctaaaatgaccatgcttaaatattgttatagaactaagctgaggtccactcacctggtgcacatccacaccaaggttttgcagaggtagaaaggaaggcatttatttgcagagcagcaagcaaggaggaccaggaagctaatgctcaaatcctgacctccctgatttacaggtaagggttttaaagacaggg

SEQ ID NO: 616605 - DNA, 586 bp, Homo sapiens
caggtcataagcagattcaaagattttctgattagcaattggttaagaaagggaacgtttatttaaaaatttagaatcagcagaaaacaatattgcctctggcttgtggatgtgactcccccggggtccctcaggaagaaatttaggacaaagaatggtggtcagarttcagccttcacatgcccctcatctgagatctttgtgccagcagatcctttcaggaggggtctggatttctgaatctattcagggacatatttttggatgttatctttgcctctacagagaaccaaacatctcctaactctaacttccttggctattgttttacactactattaccttcttctttatcgagttgttaatttacttctcagggatagctaggtacctggaatttcccttgaaggaactgaagagttttattcattcctatgcttggggacttgcaggtctctaagagggagtccctgatctgtcacaagagctgacaagttcataataatgattcaactgacaaagaaatttgtttatttttggtggcctccaacaattttacataatagccattattattactgataat

SEQ ID NO: 616606 - DNA, 659 bp, Homo sapiens
ctttatcgagttgttaatttacttctcagggatagctaggtacctggaatttcccttgaaggaactgaagagttttattcattcctatgcttggggacttgcaggtctctaagagggagtccctgatctgtcacaagagctgacaagttcataataatgattcaactgacaaagaaatttgtttatttttggtggcctccaacaattttacataatagccattattattactgataatgtatactaagacataatagatttttaggaatcttacaaaattttggaacatatgttaataacatattaatacaaacataattcacagaagattaaacatgttttacttgacaatgcttcccataaaatttatcatattaaataaggctaatatttctttcctggacttccaggaacttatcttcgakgttcaaaggttagtttcacgtacaaaagacttaattttgattttgagaaatctgtcaggaatgaaagatttaaaacacctgatcaaaatagactcacaggtcacaatgaaataaaactgaagtgccaaaaggtttcaaaagcaaaaaactcaagaaattatcttgatgaagcatagaatctctgttttgtaggccagttacctaaaaagtaaagaaaatcctgcacaattttat

SEQ ID NO: 616607 - DNA, 611 bp, Homo sapiens
tcctttctgccttgtttctgttaccttcataatctgtatttttgaaacaacatttaaataacyttcaaattagatgaaattgcttttttttttttaaagaagaagatagcctgatatctttttataattttctcgtcaaaaacacatcttactttccttgtatactttacatacagaattgttttccttagaaagttgcattttgaggaacatttagtttggtaggtagtctttcacctttgcctgtttcataattgtattaccatcttcagaaaagagccctttaaggaatagggcaaaaaataatttgtaaaaacttgtgataacttcccctgggaggcctattagtcttaataattaatatggacattattatcagagggtgaacagcctcttttttagatgttgtcttcaaatctttgggggaaatccctttctcgatgtcctggttatttccacaaacagcaaccaatttttggaaactgctgtttccggggtcacttattggagagctgccctggagcaagcctaaaggtcattctagatttttggtagccatgaagctgaaacactttgggaatgattttcaaaaggtcatttgcaatcttttg

SEQ ID NO: 616608 - DNA, 611 bp, Homo sapiens
tcctttctgccttgtttctgttaccttcataatctgtatttttgaaacaacatttaaataaccttcaaattagatgaaattgcttttttttttttaaagaagaagatagcctgatatctttttataattttctcgtcaaaaacacatcttactttccttgtatactttacatacagaattgttttccttagaaagttgcattttgaggaacatttagtttggtaggtagtctttcacctttgcctgtttcataattgtattaccatcttcagaaaagagcyctttaaggaatagggcaaaaaataatttgtaaaaacttgtgataacttcccctgggaggcctattagtcttaataattaatatggacattattatcagagggtgaacagcctcttttttagatgttgtcttcaaatctttgggggaaatccctttctcgatgtcctggttatttccacaaacagcaaccaatttttggaaactgctgtttccggggtcacttattggagagctgccctggagcaagcctaaaggtcattctagatttttggtagccatgaagctgaaacactttgggaatgattttcaaaaggtcatttgcaatcttttg

SEQ ID NO: 616609 - DNA, 611 bp, Homo sapiens
tcctttctgccttgtttctgttaccttcataatctgtatttttgaaacaacatttaaataaccttcaaattagatgaaattgcttttttttttttaaagaagaagatagcctgatatctttttataattttctcgtcaaaaacacatcttactttccttgtatactttacatacagaattgttttccttagaaagttgcattttgaggaacatttagtttggtaggtagtctttcacctttgcctgtttcataattgtattaccatcttcagaaaagagccctttaaggaatagggcaaaaaataatttgtaaaaacttgtgataacttcccctgggaggcctattagtcttaataattaatatggacattattatcagagggtgaacagcctcttttttagatgttgtcttcaaatctttgggggaaatccctttctcgatgtcctggttatttccacaaacagcaaccaatttttggaaactgctgtttccggggtcacttaytggagagctgccctggagcaagcctaaaggtcattctagatttttggtagccatgaagctgaaacactttgggaatgattttcaaaaggtcatttgcaatcttttg

SEQ ID NO: 616610 - DNA, 575 bp, Homo sapiens
ccggggtcacttattggagagctgccctggagcaagcctaaaggtcattctagatttttggtagccatgaagctgaaacactttgggaatgattttcaaaaggtcatttgcaatcttttgggctcttcctggcaataaaagtagaccaggtgaatcttgttggattgttgataccattctcaagggaatatcattctgcctcttttatgcatttaaccccaggtcctaccaacatgtgtattacttcatagaagccagrtattctgaggtcataagttataattaagaaataaattccaagacccccaagcaactgaacagattcccgtttggtcaacaggaccccagggacaccctggaagctgagttcctggccatgatgggatcagaggtatgacatgccttgttatagcccctccctcactaaccaccattaggcttcttcctaaagagctaaacagaaactattcctttcaaaagacttcggtgctgacttcagccaagagcctgactgtggcccctccctttagtcattcacaacaactgaggagcatttcttcatgataagagaccac

SEQ ID NO: 616611 - DNA, 591 bp, Homo sapiens
ttttatgtgatgtgatggagaaactataaaatttggaagaaatattaattaaaaaccaatgctaagtttattattataagttacaaaatggttcatgaccttaagcctaacatttgttactcaaagagtcaaatgtgcaacaaataatgttaacaccatgatagatgctacaatgaaatmataaacttatctttgcttccagaaaacagtaataaggaacctctccctgtggacactaggccaggttttacaataggagagataaatgagctgattcttgaatgcccaaatgagaaagaacattctaagaacaaagaaaatagcaaacaatcatttgtatatgactcatagacttttaaatcaattaattgaaattgagaatttataaggtttatcaaaccaaagttatttttgattatcttttgaggataggaattccatatggcctgagtttatatgtacattatacaaatatgtaaatattagccaatttaaaagtatgtgtgtcttataggtgctatacacaccgtgggttggttgtttacctatactttaagattcacttgtggttactgataatccacttattac

SEQ ID NO: 616612 - DNA, 564 bp, Homo sapiens
ttctaattttttcttttttttaatgcatatcactctttatctagtgcagatttgttggcaaatgtcttaatcttgatgtgttttattccaagagtcagcaaacttctcttgactatttgaggccttgaagaatgtataaactctgtagaaaccactaaactctgcttctgtagcacaaaattagccatagataatacacaaatgagtggctggctgtgtcccaacgaaactttatttactaaaatagatgactgcaggcaggctatagtttgccagcctttgctttagtctatttaatttttttcctccctaaatgtgacaagtgctaatgtataatgtagaaaaaaatgtgaagcttaatcaatccttcaggcagggaacattattaaaaatatttgaaactgtgtaagasaaatacgatatgtttgaatgtgcattcaggatgatgtattttagactttaagtactaaaaaagctgaaaatatatcttttgtaattctaaatgtctgaaggtattacacaggaatgcaagatactttcaactaaagtcataaaatagtgtta

SEQ ID NO: 616613 - DNA, 559 bp, Homo sapiens
cttattgatgtcattgaaagacattctaagtagatattgcaacagaaatatggaacgattcaaatgttttgagtaaaaataaactaattgtgaagaaaaatgcacccattcatttatcaatcatgtattgaaaacttcaaaacttcttatggacctgcttagtacatgataaggcagtataaactctaaagttatatattgtcctctgccttatacctgccacctctttcaactcatctcaaattgttgggttttgcaaaactaactcttttacctagagaaatattttctactttagtaagcagatttaaatcataatgcagtctctgaatgcacatcagcctctgcttctgttaggttgtttgccaagctaatgaataacagattttaatgttcttttttttacccccattaaaatctccttasgattttagcatccaacacataagaagtaatatttttgtgacttttatcatgggaattatgtgatgaatatagccagttttcttgcttgagaagtagcgtgtcaatactttttaaaagcctggtgcccaagttt

SEQ ID NO: 616614 - DNA, 620 bp, Homo sapiens
gagattgatgtgactttatttttttcctcaaactaatttttagataaatataaatactgcatttttgttattcactttctctacaatggcttttaaaatctttaagctcaaagtcatacagggcacagaaccatataacactagatagttgcaaacacagatttagttcaagctgatcaagtcagtgttaatttagaattgatacttaggtccaaaattgtaaagatatgtttgcaaagtgacagagtattttagattaaagctatataaattattcagaaaattttcctgcatatttctgtcccttttttctttttttcttataatatctcttgtctcaaactaaacttcaaaggtgcatttaacaataattgttctctatttgtagcaatattaaaagatgttatgtgaaaagtaagtttaaaggtcaaaaaattgagggtaaattctagctttgacaaaatagaatagatttacttacttagggaacaccacaastctgaaaatatttctgtgcatagtgattctctgaaccgtatacagaaagcaggtttcctaattttatttgataaatcactcctcatagcagttggtcttttaaactattatttcaggcaaca

SEQ ID NO: 616615 - DNA, 527 bp, Homo sapiens
ctcaaggtttgtgagtgcaccaatcggcactctgtatctagctgctctggtggggccttggagaacctttatgtctagctcagggattgtaaagaaaccaattggcactctgtatctagctcagggattgtaaatacaccaatcggcagtctgtatctagctsaaggtttgtaaacacaccaatcagcaccctgtgtttagctcaaggtttgtgaatgcaccaattgacactctgtatctagctgctctggtggggccttggagaacctgtgtgtcgaaactctgtatctaactaatctgatggggacgtggagaacctttgtatctagctcagggattgtaaacgcaccaatcagggccctgacaaaacaggccactcggctctaccaatcagcaggatgtgggtggggccagattagagaataaaagcagactgccccagccagcattggcaacctgcttgggtccccttccacactgtggaagctttgttctttcgctctttgcaataaatcttgctagtgctc

SEQ ID NO: 616616 - DNA, 498 bp, Homo sapiens
atctttatttatttattcattaattcatgtatattatataattgttgaatgaaatgcttgaccttgtctaaaggacagagctcactttggaaattgaagtgttattctttgagtcaaaaaccttagctgataatatccttgagttatgggtggaactgggcttcccrtccctcaaattaatatgttgaagtcctaacgcctgtatctaagaactaagagcacgatcttacttggaaataggatcgttgcagatgtaaatagttaagatgaggtcatactggagtagagtgggacactaatccaatatgatgattgttcttatatacaaacaaaatttggttatggatacacacaccagaagcacaccatgtgaagatgaagacagagatcagggtgatgcagcagaagccaaggaatgccaaagattccagcaaactaacagaagctgggagtgaggcatggaacagattcttcctcatggccctcagaaggaaccaa

SEQ ID NO: 616617 - DNA, 478 bp, Homo sapiens
tatattatataattgttgaatgaaatgcttgaccttgtctaaaggacagagctcactttggaaattgaagtgttattctttgagtcaaaaaccttagctgataatatccttgagttatgggtggaactgggcttcccatccctcaaattaatatgttgaagtcctaacscctgtatctaagaactaagagcacgatcttacttggaaataggatcgttgcagatgtaaatagttaagatgaggtcatactggagtagagtgggacactaatccaatatgatgattgttcttatatacaaacaaaatttggttatggatacacacaccagaagcacaccatgtgaagatgaagacagagatcagggtgatgcagcagaagccaaggaatgccaaagattccagcaaactaacagaagctgggagtgaggcatggaacagattcttcctcatggccctcagaaggaaccaaccctgctga

SEQ ID NO: 616618 - DNA, 479 bp, Homo sapiens
tatattatataattgttgaatgaaatgcttgaccttgtctaaaggacagagctcactttggaaattgaagtgttattctttgagtcaaaaaccttagctgataatatccttgagttatgggtggaactgggcttcccatccctcaaattaatatgttgaagtcctaacgcctgtatctaagaactaagagcacgatcttacttggaaataggatcgttgcagatgtaaatagttaagatgaggtcatactggagtagagtgggacactaatccaatatgatgattgttcttatatacaaacaaaatttggtkatggatacacacaccagaagcacaccatgtgaagatgaagacagagatcagggtgatgcagcagaagccaaggaatgccaaagattccagcaaactaacagaagctgggagtgaggcatggaacagattcttcctcatggccctcagaaggaaccaaccctgctgac

SEQ ID NO: 616619 - DNA, 641 bp, Homo sapiens
ggagactgaggcaaaagaattgcttgaacccaggagttggaggttgccatgagccaagattgcgccactgcactccagcctaggggacatagtgggacgccgtctcaaaaataaataaataaataaaaataaaaaaatactgagtcagagatatgtacatacatagaaaacattcaaaacattgttaagtaaaataaaatagtatcataacaatatgcattgwaaggtagaatataccatttattaagaggctttacttttttctaatatatattactgtactttgactagcttataatggaggtgtatattatttctattaaaaataatttcttaatttttattaacatttcctatgaagtaataaaatcattgcattcttctagaatttttaaaaggagcagtatttaattatttaaataaaatgttgaattataataaagtctctgatatacaccatcagttctattttaatatgtgatgacttcataaaagtaaatacttctttcaaaattttttaaatttatatttctatgggcacactgtaggtgtgtatctatttataggatacaagagatattttgatacagacatacaatgtataataatcacatcaggataaatgtatcaggtattcatca

SEQ ID NO: 616620 - DNA, 641 bp, Homo sapiens
ggagactgaggcaaaagaattgcttgaacccaggagttggaggttgccatgagccaagattgcgccactgcactccagcctaggggacatagtgggacgccgtctcaaaaataaataaataaataaaaataaaaaaatactgagtcagagatatgtacatacatagaaaacattcaaaacattgttaagtaaaataaaatagtatcataacaatatgcattgtaaggtagaatataccatttattaagaggctttacttttttctaatatatattactgtactttgactagcttataatggaggtgtatattatttctattaaaaataatttcttaatttktattaacatttcctatgaagtaataaaatcattgcattcttctagaatttttaaaaggagcagtatttaattatttaaataaaatgttgaattataataaagtctctgatatacaccatcagttctattttaatatgtgatgacttcataaaagtaaatacttctttcaaaattttttaaatttatatttctatgggcacactgtaggtgtgtatctatttataggatacaagagatattttgatacagacatacaatgtataataatcacatcaggataaatgtatcaggtattcatca

SEQ ID NO: 616621 - DNA, 641 bp, Homo sapiens
ggagactgaggcaaaagaattgcttgaacccaggagttggaggttgccatgagccaagattgcgccactgcactccagcctaggggacatagtgggacgccgtctcaaaaataaataaataaataaaaataaaaaaatactgagtcagagatatgtacatacatagaaaacattcaaaacattgttaagtaaaataaaatagtatcataacaatatgcattgtaaggtagaatataccatttattaagaggctttacttttttctaatatatattactgtactttgactagcttataatggaggtgtatattatttctattaaaaataatttcttaatttttattaacatttcctatgaagtaataaaatcattgcattcttctrgaatttttaaaaggagcagtatttaattatttaaataaaatgttgaattataataaagtctctgatatacaccatcagttctattttaatatgtgatgacttcataaaagtaaatacttctttcaaaattttttaaatttatatttctatgggcacactgtaggtgtgtatctatttataggatacaagagatattttgatacagacatacaatgtataataatcacatcaggataaatgtatcaggtattcatca

SEQ ID NO: 616622 - DNA, 581 bp, Homo sapiens
cacaaattactgcataaacgtctatgcctgaccaccctctggattatctaaccagttctatagcctcatagaaagtcagaaaaacaactgtcgatccacaaattactgcattaatgtttatgcctgactgccctcaagattgtctgaccagttctatagagcstcatagaaagtcagaaaaacaactaagaatagaataggggaaaagatgcactattttcccacaacttctatgaatggagagtataggaaaacaaacatcataaatcggctggcttagtttacttactaggcaatttattgacttaaaaaaaggaatttggttgtgaataagtaaatgaagaaagtataggtattactaatttgtgaaaaatgaattatgattgatttaatttctgtagcaaattagaacatggaaataagacaaaagtagaattctcattagggcttaactaatattacaaattaaatctttatggaaagaagacattaatttaaaccatttatattgtaggtaagaaatctgggaaatcaatttatatgaaaggtcacgttatttactctacataacagcataataa

SEQ ID NO: 616623 - DNA, 626 bp, Homo sapiens
tttacgtctcttttactctttttctttttctgaaaagagaaattttgaattaacaatgtgaataaattttaatcaaggggtccaaaagaggatgaaaatatggaaaaagaggtaagyagcgaggcatctttcttttcagtttgttttacatattgttacgtaattatccagtagacatacaaacaaggaccaacaaaaagaaagataatgtatttccttaactcgaaaacattcatttccatctaaagaagatgccaagttttaactaaccatttctatattgtgggatatatagattttttccatcaacataaaacgtatcccttgtttttaaattacattcatttctatgtaggttgagatgacatttctcaaaatggtgccggaacactatgaaatctcaacattataccgtaaattcatttttgataaagtattattctaaattgcaataaagcattacactaaattttgttttttagacaaaattatgtggaaaaaaacctcaaaactgatttttatgcattaactcaactttatcaactaattgccaaaagacagactccattcctttatttttcgtagcctgtacctaatttcttccacctgtagaagagattaccaaa

SEQ ID NO: 616624 - DNA, 626 bp, Homo sapiens
tttacgtctcttttactctttttctttttctgaaaagagaaattttgaattaacaatgtgaataaattttaatcaaggggtccaaaagaggatgaaaatatggaaaaagaggtaagcagcgaggcatctttcttttcagtttgttttacatattgttacgtaattatccagtasacatacaaacaaggaccaacaaaaagaaagataatgtatttccttaactcgaaaacattcatttccatctaaagaagatgccaagttttaactaaccatttctatattgtgggatatatagattttttccatcaacataaaacgtatcccttgtttttaaattacattcatttctatgtaggttgagatgacatttctcaaaatggtgccggaacactatgaaatctcaacattataccgtaaattcatttttgataaagtattattctaaattgcaataaagcattacactaaattttgttttttagacaaaattatgtggaaaaaaacctcaaaactgatttttatgcattaactcaactttatcaactaattgccaaaagacagactccattcctttatttttcgtagcctgtacctaatttcttccacctgtagaagagattaccaaa

SEQ ID NO: 616625 - DNA, 626 bp, Homo sapiens
tttacgtctcttttactctttttctttttctgaaaagagaaattttgaattaacaatgtgaataaattttaatcaaggggtccaaaagaggatgaaaatatggaaaaagaggtaagcagcgaggcatctttcttttcagtttgttttacatattgttacgtaattatccagtagacatacaaacaaggaccaacaaaaagaaagataatgtatttccttaactcgaaaacattcatttccatctaaagaagatgccaagttttaactaaccatttctatattgtgggatatatagattttttccatcaacataaaacgtatcccttgtttttaaattacattcatttctatgtaggttgagatgacatttctcaaaatggtgccggaacactatgaaatctcaacattataccgtaaattcatttttgataaagtattattctaaattgcaataaagcattacactaaattttgttttttagamaaaattatgtggaaaaaaacctcaaaactgatttttatgcattaactcaactttatcaactaattgccaaaagacagactccattcctttatttttcgtagcctgtacctaatttcttccacctgtagaagagattaccaaa

SEQ ID NO: 616626 - DNA, 578 bp, Homo sapiens
tcagaaaacataatagtcaagattctgaatgcaattctcttcctactaacaattttgttaattattaatactaaattggacaaggagagcaaaagaaaatataacaaatcaatagaaaaaatattacwtctaactgtatttaaatgttttcaaaagtgaattaaaagaattgctgtgttttcagacaatatttttttagtcacaagaaaagcttcttaaataataccaccaaggtagtggttcttaggggaggggacatttgactcccaggataaatttgaaaacatctagagactttttagttgtcacaccaggaatgggacgggagacacttctatagtccagtgggtagaggccagagatcctgctaaacttcctacagtgaacaggacagttcaccaaggaattacctggtccaaaatgttagtagtgctaaggttgagaaactgtgtattaaggtcataaaaagttttaaattggacaaataattataagtgcatatgtgaactttaacatcttaatgatataaaatataaagagattagcattttatcacattcttatactcctcaatttta

SEQ ID NO: 616627 - DNA, 578 bp, Homo sapiens
tcagaaaacataatagtcaagattctgaatgcaattctcttcctactaacaattttgttaattattaatactaaattggacaaggagagcaaaagaaaatataacaaatcaatagaaaaaatattactyctaactgtatttaaatgttttcaaaagtgaattaaaagaattgctgtgttttcagacaatatttttttagtcacaagaaaagcttcttaaataataccaccaaggtagtggttcttaggggaggggacatttgactcccaggataaatttgaaaacatctagagactttttagttgtcacaccaggaatgggacgggagacacttctatagtccagtgggtagaggccagagatcctgctaaacttcctacagtgaacaggacagttcaccaaggaattacctggtccaaaatgttagtagtgctaaggttgagaaactgtgtattaaggtcataaaaagttttaaattggacaaataattataagtgcatatgtgaactttaacatcttaatgatataaaatataaagagattagcattttatcacattcttatactcctcaatttta

SEQ ID NO: 616628 - DNA, 630 bp, Homo sapiens
catatgtgaactttaacatcttaatgatataaaatataaagagattagcattttatcacattcttatactcctcaattttaaattatataattttcttattttatataatagttaattttagtatgtgattaaattttaattaaaatattcatattgtaatgtccccgaaattgttcgatcatggttctctatctaactagattgaatgtttactctctatctctgtaatatgatgtagtcttattgagttatttaacttgatcctttttaattggctggattgtataatcaattttttttcccagtcaccatgagaacctcaagaatatttttctggacatttcaatcacttttattctgatagaagattttatcccagtataatcttggagcaaaattttcctgagatatgaaataatgttttttcatcttaaattaaatgttgcctgagcaaagcaaactatcagtcagttatcttctgtctgcatgcttgaaaaattatttcttgwcctataaattttaatgatacaatcaggcttaagatctttgcttttattgccctgtaatcaattgttttcagtggtttttccttctatctacaaaatcggctgttctcttatgacaaagaa

SEQ ID NO: 616629 - DNA, 280 bp, Homo sapiens
gatcgtctgtacaaaatgtttttaaaaaattaggtgggtgtgctggcatgtgcctgtagtcccagctactggggaggctgagaagggaggattcattaagcccaggaattagagatwacaatgagctgtagtcatgccactgcactccagcctgggtgaaagagtgagactgtttcaaaagagaaaaaaaaaaaaaggaagggaggagggagggaaggaggaaggaaggaaggaaggaaagaaggaaggaaggaaggaaggaaggaaggaaggaaggaag

SEQ ID NO: 616630 - DNA, 280 bp, Homo sapiens
gatcgtctgtacaaaatgtttttaaaaaattaggtgggtgtgctggcatgtgcctgtagtcccagctactggggaggctgagaagggaggattcattaagcccaggaattagagatarcaatgagctgtagtcatgccactgcactccagcctgggtgaaagagtgagactgtttcaaaagagaaaaaaaaaaaaaggaagggaggagggagggaaggaggaaggaaggaaggaaggaaagaaggaaggaaggaaggaaggaaggaaggaaggaaggaag

SEQ ID NO: 616631 - DNA, 495 bp, Homo sapiens
actaactgttttagcaagcacctcctgatctcagtgacttaatatgattgttgcttatttttactgatattacagtgtgtgtcagaaagctttcttccaactggagactcgggaatccagtatgcttccatctgatacatctggcatcttcatcgtaagrctttcaaaatctatgtggacaagataatagaatgtcaagtatcaagcatggttttcaaggatgtgcttgtacatgataggcattaatttggccaacataactttggccagaacttcatcacatgaccccaacataactacaaaggatgtaggcaaatgtagcctttatgtatgccagtagggagatcacatatttggtgaaaacacagtattgtctctgctatgctatctaaattgatgtctgtgctcctttaggtatgtgtgctccatgaagtttatttatttatttttttctgagatggaatctcactcactcacaatctcggctcactgcat

SEQ ID NO: 616632 - DNA, 495 bp, Homo sapiens
actaactgttttagcaagcacctcctgatctcagtgacttaatatgattgttgcttatttttactgatattacagtgtgtgtcagaaagctttcttccaactggagactcgggaatccagtatgcttccatctgatacatctggcatcttcatcgtaagactttcaaaatctatgtggacaagataatagaatgtcaagtatcaagcatggttttcaaggatgtgcttgtacatgataggcattaatttggccaacataactttggccagaacttcatcacatgaccccaacataactacaaaggatgtaggyaaatgtagcctttatgtatgccagtagggagatcacatatttggtgaaaacacagtattgtctctgctatgctatctaaattgatgtctgtgctcctttaggtatgtgtgctccatgaagtttatttatttatttttttctgagatggaatctcactcactcacaatctcggctcactgcat

SEQ ID NO: 616633 - DNA, 495 bp, Homo sapiens
actaactgttttagcaagcacctcctgatctcagtgacttaatatgattgttgcttatttttactgatattacagtgtgtgtcagaaagctttcttccaactggagactcgggaatccagtatgcttccatctgatacatctggcatcttcatcgtaagactttcaaaatctatgtggacaagataatagaatgtcaagtatcaagcatggttttcaaggatgtgcttgtacatgataggcattaatttggccaacataactttggccagaacttcatcacatgaccccaacataactacaaaggatgtaggcaaatgtagcctttatgtatgccagtagggagatcacatatttggtgaaaacacagtattgtctctgctatgctatctaaattgatgtctgtgctcctttargtatgtgtgctccatgaagtttatttatttatttttttctgagatggaatctcactcactcacaatctcggctcactgcat

SEQ ID NO: 616634 - DNA, 495 bp, Homo sapiens
actaactgttttagcaagcacctcctgatctcagtgacttaatatgattgttgcttatttttactgatattacagtgtgtgtcagaaagctttcttccaactggagactcgggaatccagtatgcttccatctgatacatctggcatcttcatcgtaagactttcaaaatctatgtggacaagataatagaatgtcaagtatcaagcatggttttcaaggatgtgcttgtacatgataggcattaatttggccaacataactttggccagaacttcatcacatgaccccaacataactacaaaggatgtaggcaaatgtagcctttatgtatgccagtagggagatcacatatttggtgaaaacacagtattgtctctgctatgctatctaaattgatgtctgtgctcctttaggtatgtgtgctccatgaagtttatttatttatttwtttctgagatggaatctcactcactcacaatctcggctcactgcat

SEQ ID NO: 616635 - DNA, 621 bp, Homo sapiens
taacttgattgacatactagagttttatatctttaataggtggtatatttgttgtgttgagatgaaaataaaatttattcttgaagtactaaaataaagcatttgttttacaattagtttagacttcatgtcaagctatgatgtataatacayatgatgttggggtagaaatttttgaacagttactcaaaagtagtctgactttttatagtaataagaagacagcatcaattatagttttcttgatttgaaagcacagcactaggcaaacttttctaaaaacatgatcaatatttattttgcacatgttagtcattaacattttatttatgaagctgatttcaacactatcagattatttttattaaatcatgaagatgttgaatgatttatttagtgagtgttcacgtactactaagcacttttcctattttgtcaataaaacaatagctatctttcgttgatttttaaatatgcatcaggcagtgtgttgagcccttatatatattatcttatttaatccctgtgacaacgcatatagacaaaagtaaccaggtttcagacggtgaaaaaacttttccaaaggtagctaagatggtaatagaattggaattcaaagcc

SEQ ID NO: 616636 - DNA, 621 bp, Homo sapiens
taacttgattgacatactagagttttatatctttaataggtggtatatttgttgtgttgagatgaaaataaaatttattcttgaagtactaaaataaagcatttgttttacaattagtttagacttcatgtcaagctatgatgtataatacacatgatgttggggtagaaatttttgaacagttactcaaaagtagtctgactttttatagtaataagaagacagcatcaattatagttttcttgatttgaaagcacagcactaggcaaacttttctaaaaacatgatcaatatttattttgcacatgttagtcattaacattttatttatgaagctgatttcaacactatcagattatttttattaaatcatgargatgttgaatgatttatttagtgagtgttcacgtactactaagcacttttcctattttgtcaataaaacaatagctatctttcgttgatttttaaatatgcatcaggcagtgtgttgagcccttatatatattatcttatttaatccctgtgacaacgcatatagacaaaagtaaccaggtttcagacggtgaaaaaacttttccaaaggtagctaagatggtaatagaattggaattcaaagcc

SEQ ID NO: 616637 - DNA, 621 bp, Homo sapiens
taacttgattgacatactagagttttatatctttaataggtggtatatttgttgtgttgagatgaaaataaaatttattcttgaagtactaaaataaagcatttgttttacaattagtttagacttcatgtcaagctatgatgtataatacacatgatgttggggtagaaatttttgaacagttactcaaaagtagtctgactttttatagtaataagaagacagcatcaattatagttttcttgatttgaaagcacagcactaggcaaacttttctaaaaacatgatcaatatttattttgcacatgttagtcattaacattttatttatgaagctgatttcaacactatcagattatttttattaaatcatgaagatgttgaatgatttatttagtgagtgttcacgtactactaagcacttttcctattttgtcaataaaacaatagctatctttcgttgatttttaaatatgcatcaggcagtgtgttgagcccttatatatattatcttatttaatccctgtgacaacgcatatagacaaaagtaaccaggtttcagayggtgaaaaaacttttccaaaggtagctaagatggtaatagaattggaattcaaagcc

SEQ ID NO: 616638 - DNA, 227 bp, Homo sapiens
gctaagatggtaatagaattggaattcaaagccctgtcttcctataatcactccaaacattttacaattttctaaagtcagtactggttcagagacatgctgtttttaacatgctctaaattgtaaacaattctcgtatgagcaaakgcatagttttctagttataagagatttgtcattagcagttctcagatgcaaatgaatttgcaacagcatcaataacaaat

SEQ ID NO: 616639 - DNA, 604 bp, Homo sapiens
ctttaaagcaatgtgagaatggactaacacaagatctcataaaatttacagttgaaaagtgtcttcacataatcaagttgttccaaacatactactaaagggctttccaataactcagtaacttaactgagtcaaaaaattattttcttaggctgggtgcggtggtggctcacgcctgtaatcccagaactttgggaggccgargcttgcagatcacctgaggttgggagttcgagaccagcctaaccaacatggagaaaccccctgtctactaaaactacaaaattagctgggcttggtggtgcatgcctgtaatcccagctactcaggaggctgaggcaggagaatcacttgaacccaggaggtgaggttgcagtgagccgagatcgtgccattgcactccagcctgggcaacaagagtgaaactctgtctcaaaaaaaaaaaaagttaaaaaattattttcttttatatttacattcatgttgacaaaatggcttcatgttttttagaataattgatttatctttgaagcaaaaacacattactttcaagactacttctgtccaagttaagtaaattcactaactctcgttttgcttacca

SEQ ID NO: 616640 - DNA, 566 bp, Homo sapiens
tttaacaacacactctgccttaacaagtcctagtactctctgtttaagraaactgtaattgagtattatttacctgttttgcatcatgttttcttggagctacaacaataatcctgtggcaattttttgagtcattggcaaaattattagtaccaggggaactcatgatatttttaggataagaaaaattgtaaaaatgcacacagtattgttgttacattaaaaactaaatagtaaatacattttttaatttaatataattaatataaaatctgtgcattcaatatttctgactagagaatataagcgcaagcactgatgaataataatatagaagactcaacataatagacaattactacaaaaaagttcaaaatgttttattattttaaaataaataagtgttctgtttaaaacataagattcttcctcatggttcatgtacttatttgtaatttataagacattgtgaacctctttacagaaaacttcaaagaaagcaacaaaattcaactgaaacaaatataaaattagtaattttggtatctgaagcattatttccttta

SEQ ID NO: 616641 - DNA, 566 bp, Homo sapiens
tttaacaacacactctgccttaacaagtcctagtactctctgtttaagaaaactgtaattgagtattatttacctgttttgcatcatgttttcttggagctacaacaataatcctgtggcaattttttgagtcattggcaaaattattagtaccaggggaactcatgatatttttaggataagaaaaattgtaaaaatgcacacagtattgttgttacattaaaaactaaatagtaaatacattttttaatttaatataattaatataaaatctgtgcattcaatatttctgactagagaatataagcgcaagcactgatgaataataatatagaagactcaacataatagacaattactacaaaaaagttcaaaatgttttattattttaaaataaataagtgttctgtttaaaacataagattcttcctcatggttcatgtacttatttgtaatttataagacattgtgaacctckttacagaaaacttcaaagaaagcaacaaaattcaactgaaacaaatataaaattagtaattttggtatctgaagcattatttccttta

SEQ ID NO: 616642 - DNA, 624 bp, Homo sapiens
atacatgcaatgtgcttctcaatatttagatctcgttcaaggaaatttggatgctattcttaacaacaaagagttgcctgtacactaagatctaggctcattttggaaagtgatctctcatttcccttgcttaagttagtgccaagtgattcatcagtgccctattctgcactgtatacttccctttcaattgaggtcattttctcttacacctctgtcttttctgacttctctgatatttgtttatttctatctatatgtggtcatcagcaggtaacgcagaccctaaaaacactaagtttttataaggaaactaccaaatgcaacctaaaatattcacaacttccttttattcttgtgtccacttgcaagtaatacacatgtagacacacattcatacatgcacacatatgtacacacacacacgagttattttagcttcaaagctttgccatctggctcatatttaacaatttggtaaacctcttattcaatcttattacatctggtgtcaatatttccaaaatagttgtgtttgtcttgagaaattgtagaacaagstaacaaaacaaggactttcactggaggttagatttaatcactctttagctgctttataaaaag

SEQ ID NO: 616643 - DNA, 579 bp, Homo sapiens
actctcaaataggaaccgaccttaggcaaaatgatgaagccggtcctcagagatgccctccacacccttgggcttctcattgccagctttgttatctgattcctgcaagcaatcctctggcaaagactcagcttgggcctatgatcctcagtaccctattttatgtcttgacatttccctgggtcatctccagatcagaagttacctgcccagtgtcaagtcttccacctactttcccaaagttaatacacacacacacacacacaaacatatatatgctaaaaaccagtgtctgcctstttttcacaatatccagtattcatttgaacagatgtgataataacagtagacattttaaaacctgttttttttgttgttgttgttgttttgttttgtttttgttttttgagacagggtctcgctctgttgcccaggctggagttcagttgtggtacaattatggctcactgcagcttcaacctccttggctcaagctatcctcccacctcagcctcccaagtagttgggtttacaggcttgtgacaccatgcccagctaatgttttaaatgtttttgtag

SEQ ID NO: 616644 - DNA, 566 bp, Homo sapiens
ctagtttctccataccatcaccaatgttgaatattgtcaataatttttaatataaacgtgtttgtttagtggtaactcattgtgatattgacttgaatttccctaataagtaaacatcttttcatgtgcttattagcaattctattatcttcttgtgtaatrcacctactctgtgtatatataatctaggtgtttgcatccactggtttttctcataataatatgaatattatatgttatatattattatatattatatatattttatatatttttatattatatattaatatgtatatatgtaaagccgtgttaggttaaaatatttaagtacttgtatgcttacagaaaaactgagtggacagaatagagtttgcatatagccacccacacttttagctagatgaaccaagaaaaaacagagaagattcaaatcactaaaacctgtagtaaagttgggtcattgttactgactggaaaagaacaaaaaaggttataagggaatattatgaacaaatgtatggcaataaattagataacttaggtaaaagagacaaaatcataga

SEQ ID NO: 616645 - DNA, 566 bp, Homo sapiens
ctagtttctccataccatcaccaatgttgaatattgtcaataatttttaatataaacgtgtttgtttagtggtaactcattgtgatattgacttgaatttccctaataagtaaacatcttttcatgtgcttattagcaattctattatcttcttgtgtaatacacctactctgtgtatatataatctaggtgtttgcatccactggtttttctcataataatatgaatattatatgttatatattattatatattatatatattttatatatttttatattatatattaatatgtatatatgtaaagccgtgttaggttaaaatatttaagtacttgtrtgcttacagaaaaactgagtggacagaatagagtttgcatatagccacccacacttttagctagatgaaccaagaaaaaacagagaagattcaaatcactaaaacctgtagtaaagttgggtcattgttactgactggaaaagaacaaaaaaggttataagggaatattatgaacaaatgtatggcaataaattagataacttaggtaaaagagacaaaatcataga

SEQ ID NO: 616646 - DNA, 572 bp, Homo sapiens
aatgaacatataaaatattaataattattattcacaagctcttccaaaaaaaatggaaaaagggagcagttccttaatcattttctgagtacaatattaccctgataataaaagcagacaaaaaccttaccagaaaagtaactacagaccaacataaccaatatataattaatagagaaatctgaaaaaaatacgagcaaaccaaatccagtaacatataaaaaaattatatactataagtggcatttatctcataagtgcaacattagttcagtatccaaaaatcagttaatgtagtaccaccagtaaggtataaggtttccttttctctgcagcctcacgagcatctgttgtttttgtttgtttgtttgtttttactttttagtaatagccaytctgacttctgtgagatggtatcttattgtggttttgatttgcatttctctaataattagcgatgatgaggatttttttcatatttttgttggctatttgtatgtctttttctgagaagtctctgcacatgtcctttgaccattttttaatggacttatttgtcttttaatacatgt

SEQ ID NO: 616647 - DNA, 577 bp, Homo sapiens
atgtcctttgaccattttttaatggacttatttgtcttttaatacatgtttttacattctggatattagatctttgtgagatgcatagtttgtaaacattttctcccattctgtaagttgtctattttgttgatgatttcttttgttgtggagaagctctttaggttaattaggttctacttgtcaattttttgttttattgcaattgcttttgagaacttagtcacaacttctttggcaaggtcaatatcmagaaaagtatttcctacgttttcttctaggattattatactttggggtcttacactaaatatttaattcatcttgagttgatgtttgtgtatggggaaaggaaagattccaatttcattcttctgcttatggctaacctgttatctcagcatcatttattgaatagggagtcctttttccattgcttgttttgttggctttgtcaaagatcagatagctgtaggtttgcagctttatttctgagttttctatttagtttcattggtttgtatgtctgttattgtaccagcaccatgctattttgggtactgtagccttatagtat

SEQ ID NO: 616648 - DNA, 582 bp, Homo sapiens
ttttccatttaattatgttgtctctaatttctttcagcaggattttatagttctccttatagagattgttcaccttctaggttagctgtattcctaggtatttcattttttgtggctgttttaaatgaaattgttctygattttacttgaattcttaagttgttcttgatttgactctcagcctggatgatattggtgtattaaaatgctacttatttttgtacattgattttgaatcctgaagctttactaaaatcatttatcagttctagtagcattttgacagtctttagggttttctatgtgtagaatcatattattaacgaagaaaagtacttggattccttttttttttctctatttggatgccatttatttctcttgcctgattgctgtgactaggacttccagtactacattgaataggagtggggagattgggttacactgtcttcttccagttcatagggcaatgcttccaggttttgccattctgtatgttattggtcgtgggtttgtctaagaattgctcttaatatggtgaggtgtgttcctccaatgcctagtctattgcgggttttt

SEQ ID NO: 616649 - DNA, 571 bp, Homo sapiens
atgatattggtgtattaaaatgctacttatttttgtacattgattttgaatcctgaagctttactaaaatcatttatcagttctagtagcattttgacagtctttagggttttctatgtgtagaatcatattattaaygaagaaaagtacttggattccttttttttttctctatttggatgccatttatttctcttgcctgattgctgtgactaggacttccagtactacattgaataggagtggggagattgggttacactgtcttcttccagttcatagggcaatgcttccaggttttgccattctgtatgttattggtcgtgggtttgtctaagaattgctcttaatatggtgaggtgtgttcctccaatgcctagtctattgcgggtttttattatgaaggtatgctggattctatggaaagatttttctgagtctattgagatgatcacattgtttttgcttttaattctgtttatgtggtgaatcacacgcattgatttgtgtatgttgaaccagccttgcatcccaggaataaagcccatttgattgtgatgtatgaattttt

SEQ ID NO: 616650 - DNA, 571 bp, Homo sapiens
atgatattggtgtattaaaatgctacttatttttgtacattgattttgaatcctgaagctttactaaaatcatttatcagttctagtagcattttgacagtctttagggttttctatgtgtagaatcatattattaacgaagaaaagtacttggattccttttttttttctctatttggatgccatttatttctcttgcctsattgctgtgactaggacttccagtactacattgaataggagtggggagattgggttacactgtcttcttccagttcatagggcaatgcttccaggttttgccattctgtatgttattggtcgtgggtttgtctaagaattgctcttaatatggtgaggtgtgttcctccaatgcctagtctattgcgggtttttattatgaaggtatgctggattctatggaaagatttttctgagtctattgagatgatcacattgtttttgcttttaattctgtttatgtggtgaatcacacgcattgatttgtgtatgttgaaccagccttgcatcccaggaataaagcccatttgattgtgatgtatgaattttt

SEQ ID NO: 616651 - DNA, 571 bp, Homo sapiens
atgatattggtgtattaaaatgctacttatttttgtacattgattttgaatcctgaagctttactaaaatcatttatcagttctagtagcattttgacagtctttagggttttctatgtgtagaatcatattattaacgaagaaaagtacttggattccttttttttttctctatttggatgccatttatttctcttgcctgattgctgtgactaggacttccagtactacattgaataggagtggggagattgggttacactgtcttcttccagttcatagggcaatgcttccaggttttgccattctgtatgttattggtcgtgggtttgtctaagaattgctcttaatatggtgaggtgtgttcctccaatgcctagtctattgcgggtttttattatgaaggtatgctggattctatggaaagatttttctgwgtctattgagatgatcacattgtttttgcttttaattctgtttatgtggtgaatcacacgcattgatttgtgtatgttgaaccagccttgcatcccaggaataaagcccatttgattgtgatgtatgaattttt

SEQ ID NO: 616652 - DNA, 558 bp, Homo sapiens
tgtgtatgttgaaccagccttgcatcccaggaataaagcccatttgattgtgatgtatgaatttttcaatgtgctgttgaattcggtttgctagtgttctgttgagggttcttgcatctatggtcatcagagatattggccggaaattttcttttatcattgtgtctctgccatattttgatattatgctgatactgccttcayggaataagttagggaggagcctttcttccttttggtggaaatcattttagtaggattggtaccagttcttttttgtacatctggtagaattcagctgtgaatctatctagtcaaggcctttgtttttgttgctgttgttgttgttgttggtagtggtggtaggttttttattactgatttaatttcagagcgctgttggtctattgtggatttcaatctcttcctgattcaaacttcctgaatcctaattcaatattgtgtgtttccagaaatttcctctaaatttctaattttttgaatagatttgttcacagtattctctgagaatcttttgtatatctgtggggccagttg

SEQ ID NO: 616653 - DNA, 620 bp, Homo sapiens
ctctccctactcagtggtcccctggggccagagcttcctacggcaggaggtgggggagacccctgagggatgakcatatatggccactcctttgcaggagctgttaattgcacaagagcttctaggctccatgccctctggaggcctgtgtctgcttactgctcaggcacttcaccctgccagctcacatgtctatggggaatgcagggtcctctgtagctaggatcctgaggcttgtaggagagtgagccttccctgaattcattcactcacccctttcccaggagccagtttgggaccagaagttagtgtttgggttccctgtgcaaggtttcctacttcctccctcttcaagctcagcttcatcatccttctctattcactctcagcattttctttccaaagatctgcccaaattatgttggtgtactcagtagtttggtctctctcattgggagcagtgcttcctggtcatgtctagtcagctattttgtcccctcctccctaattctctatttagtgtatgaaaaattaatatgcaaaatacatgtggttatgataataagaaattatttacattctcactaatcatgaaacaaaatattgtgtaatagaatatt

SEQ ID NO: 616654 - DNA, 620 bp, Homo sapiens
ctctccctactcagtggtcccctggggccagagcttcctacggcaggaggtgggggagacccctgagggatgagcatatatggccactcctytgcaggagctgttaattgcacaagagcttctaggctccatgccctctggaggcctgtgtctgcttactgctcaggcacttcaccctgccagctcacatgtctatggggaatgcagggtcctctgtagctaggatcctgaggcttgtaggagagtgagccttccctgaattcattcactcacccctttcccaggagccagtttgggaccagaagttagtgtttgggttccctgtgcaaggtttcctacttcctccctcttcaagctcagcttcatcatccttctctattcactctcagcattttctttccaaagatctgcccaaattatgttggtgtactcagtagtttggtctctctcattgggagcagtgcttcctggtcatgtctagtcagctattttgtcccctcctccctaattctctatttagtgtatgaaaaattaatatgcaaaatacatgtggttatgataataagaaattatttacattctcactaatcatgaaacaaaatattgtgtaatagaatatt

SEQ ID NO: 616655 - DNA, 620 bp, Homo sapiens
ctctccctactcagtggtcccctggggccagagcttcctacggcaggaggtgggggagacccctgagggatgagcatatatggccactcctttgcaggagctgttaattgcacaagagcttcyaggctccatgccctctggaggcctgtgtctgcttactgctcaggcacttcaccctgccagctcacatgtctatggggaatgcagggtcctctgtagctaggatcctgaggcttgtaggagagtgagccttccctgaattcattcactcacccctttcccaggagccagtttgggaccagaagttagtgtttgggttccctgtgcaaggtttcctacttcctccctcttcaagctcagcttcatcatccttctctattcactctcagcattttctttccaaagatctgcccaaattatgttggtgtactcagtagtttggtctctctcattgggagcagtgcttcctggtcatgtctagtcagctattttgtcccctcctccctaattctctatttagtgtatgaaaaattaatatgcaaaatacatgtggttatgataataagaaattatttacattctcactaatcatgaaacaaaatattgtgtaatagaatatt

SEQ ID NO: 616656 - DNA, 620 bp, Homo sapiens
ctctccctactcagtggtcccctggggccagagcttcctacggcaggaggtgggggagacccctgagggatgagcatatatggccactcctttgcaggagctgttaattgcacaagagcttctaggctccatgccctctggaggcctgtgtctgcttactgctcaggcacttcaccctgccagctcacatgtctatggggaatgcagggtcctctgtagctaggatcctgaggcttgtaggagagtgagccttccctsaattcattcactcacccctttcccaggagccagtttgggaccagaagttagtgtttgggttccctgtgcaaggtttcctacttcctccctcttcaagctcagcttcatcatccttctctattcactctcagcattttctttccaaagatctgcccaaattatgttggtgtactcagtagtttggtctctctcattgggagcagtgcttcctggtcatgtctagtcagctattttgtcccctcctccctaattctctatttagtgtatgaaaaattaatatgcaaaatacatgtggttatgataataagaaattatttacattctcactaatcatgaaacaaaatattgtgtaatagaatatt

SEQ ID NO: 616657 - DNA, 613 bp, Homo sapiens
gtctagtcagctattttgtcccctcctccctaattctctatttagtgtatgaaaaattaatatgcaaaatacatgtggttatgataataagaaattatttacattctcactaatcatgaaacaaaatattgtgtaatagaatattaccagaaactttggtatgaggccctctctaaacttttccttcccactaatcctcaacatgagtcactamcctcaatactatcttattcattttcttgtgggtttaaaatattggtatttatctctaacctatctaagtttctttttatctttgtataactagaatcataatttttaaatgacttcatatttgttcaacattatattctttacagtcataaattgatgtggatagttgtagctaatttatttttattggagtatagtacttcataaaataaatattttaattcatttgtacactgtcctatattatccttttaaattattttactttcaagtttatacatcataaaatttaagataaatcatgtctatgttgcacaaagatgaatattatttttctatttcttaatagactttatatttagagaggtattatgattacagaaagacagagcaaaaagta

SEQ ID NO: 616658 - DNA, 565 bp, Homo sapiens
tattagcatctgaattggtgaatcatttccagattttcaactgactgctcagatctatccaaggaattaccatctatgacagctaactccttaccaaatgtatttattaaataatattacttgaaagtcaaaattactccttgatccatggaatgcagaatggatattgtgttcacaggcacaagaatgaccttaatatctttgtacatttkcatcagagctcttgggtgaaagctatgatgtaccagcaggtgcattgtcaatgagcaagcagtactattatgaaaggaatttttttctcagtagtaggtctcaagagtggtcttaaagtattcagtaaactatgcagtaaacagatgtgctgtcatccgggatttgttgtatcatttatgaagcacagataaagtagatttcacataattcataaggaccctagaattttcagaaaaatgaataaacattggcttcattaaaattagcagttgtaataacacctaacaagagagtcagcctgttttttgaagctctggagccaggtattaacttcccctctctagctatgaaa

SEQ ID NO: 616659 - DNA, 604 bp, Homo sapiens
tgttgtttagtgtagccacctttatcaattatcttagctggatcttctggataggttgctgcagcttctacattagctgttttaccttgtgcttctatgttatagagatggtgtctttccttaaacctcatgaaccaacctctgctagctttcaatttttcttctgcagcttcctcacctctctcagctttcctagaattggagagagttatggtttcactctggatcaggctttgtcttaagggaatgttgtatctrgtttgatctcctatccataccactaaaactttatataagtagaaaactgttttaatttcctattgttatggtttgaatgtaatttgtctctaccaaaactgacattaacatttgatttccaagttggcagtgttgggaggtatttgggtcgtgaaggaggatcctgtattagaagattgatatcctcttgtgggaatagattagttactgaaagtacaggttgttaaaatgcatctggcttcaatggtttcttctcttgcttcctctctcatcatggaatctctacacacaaccaccttttgctttccagcatgagtcaaagcagcctgaagccctcactagatgc

SEQ ID NO: 616660 - DNA, 595 bp, Homo sapiens
tgttatggtttgaatgtaatttgtctctaccaaaactgacattaacatttgatttccaagttggcagtgttgggaggtatttgggtcgtgaaggaggatcctgtattagaagattgatatcctcttgtgggaatagattagttactgaaagtacaggttgttaaaatgcatctggcttcaatggtttcttctcttgcttcctctctcatcatggaatytctacacacaaccaccttttgctttccagcatgagtcaaagcagcctgaagccctcactagatgcagctgcacaatcttgaactttttagccacaaggattgtgagccaaataagctcatcttctttataaattacttctggtattctgttatagtaacacaaaactaactaagacagaaaattggtactataaaattctctgatatggttaaagtggctttggaactgggtaatgagcagaggttggaagagtttaaatttgcaggcaagagaaacattgtatagcagtaaatggaacattaatggtgattctggcgagggctgagaagaatacaaaaagaccaggaaaagtttgaaacttcttagagattggtta

SEQ ID NO: 616661 - DNA, 599 bp, Homo sapiens
tttgaaacttcttagagattggttaagtgttcatgaacaaaatgctgatagaaatatagacagtaaatgccatatgatgagctctcatatgggaaggaggaacaaggtattggaaattaaacaaaaggtgatttgtattatgccatagcaaagaaattggctgcaktgtgttcataccctagaactttgtggagggccaaacttaagagtgataacctagggtatcaagcagaagacatttctaaacagtaaagtattcaggctactgcatggttacttctaactgcctacagtgaactgctggggaaaaaaaaaagagcagggtgggaaaacctgaaaaatttgtggcctggccatgtggtagggaagaagaacaagctgttttcaggaaagaaattaaagagtgcagctgagagagtcttttaaaaaaaagattagcatggctaaaagggagccaggtgttaatagaacaatgagaaaaaaggcctcaaggacatttcacagatcctcaaggctgtccttctcatcacaggccaggagacctagaggtacagagtggtttcagggaataggcttgggacaccagttttctgcatcac

SEQ ID NO: 616662 - DNA, 599 bp, Homo sapiens
tttgaaacttcttagagattggttaagtgttcatgaacaaaatgctgatagaaatatagacagtaaatgccatatgatgagctctcatatgggaaggaggaacaaggtattggaaattaaacaaaaggtgatttgtattatgccatagcaaagaaattggctgcattgtgttcataccctagaactttgtggagggccaaacttaagagtgataacctagggtatcaagcagaagacatttctaaacagtaaagtattcaggctactgcatggttacttctaactgcctacagtgaactgctggggaaaaaaaaaagagcagggtgggaaaacctgaaaaatttgtggcctggccatgtggtagggaagaagaacaagctgttttcaggaaagaaattaaagagtgcagctgagagagtcttttaaaaaaaagattagcatggctaaaagggagccaggtgttaatagaacaatgagaaaaaaggcctcaaggacatttcacagatcctcaaggctgtccttctcatcacaggccargagacctagaggtacagagtggtttcagggaataggcttgggacaccagttttctgcatcac

SEQ ID NO: 616663 - DNA, 505 bp, Homo sapiens
gtccttctcatcacaggccaggagacctasaggtacagagtggtttcagggaataggcttgggacaccagttttctgcatcaccttagttaccctgctccatgtatcgcagctactctggctacagcatccatggctcaaacagccccagatgtggcttgggccacttttctggagggcccaatgggtaaaccttagtggcatccatgtcaatgtggtgctaattttgtaagctggcagaatgcaagagaaataacagcatcaaggcctccatgtagatttcagaggatgtattggaaagcttgggagcccattggaaaacttgtcccagggacaaaatcactgtagagattcactgctataacaatgcagagtgaagtttgggtcagaactgccacaaagagctcacactggagcaatgcctaatggtatgaggctgccactgggaccccagaaatgtaaagccattggcagcatgcaacctcagtccagaaaagctacagaca

SEQ ID NO: 616664 - DNA, 558 bp, Homo sapiens
ggcatgagtttaggattataggaggggcctgtattctgatgagatagagkcatggttaaacaatagctagccattgttccagaagtcacaaaatttgtatcttccccaattgctcctgtagataacatcactattgtcaaaacctaagattatcctttgagacttttttttagacttttgcattctggtgaccaactgactccacccagacccatgactcataccaaggaactgactcctacccagaaattgatccagaacatgaaaacagtttgaatactcctgtgatttcatccccaaccaatcagtagcactcattccctagctcctggccactaagttatcttagaaaatcttagtcaaatgcttttggggcagcaggtttcagaaatgtctcccatcctgctgcttggctggaccttcaataattaaaccctttctttgatgcaatacctgctgttctcagtgcattggcttttctgggcagcaggcaagatgaacctgttgggctgttacaaattagacatgagttttgagagccaagcatggaattctgtg

SEQ ID NO: 616665 - DNA, 613 bp, Homo sapiens
ctgctatataaaacccttatttcttgtcagttggagagatagatgagattgacctcccatctcctgagctgcagcacctgattaaagcctttttctctggcaatacttgttgtctcagtggttggcgttatgtgtggcgagcagtaggacctagaccaaacccctggcctttcagtaacgatgcccacacctgcaccactcagtcccatcaccctgcttacggtcttcacagcactcacctcatctgacgtggtcttgatggcttgcttgcttattgtcttctcctccctctggaaygcaaacttaccagaggcagaggtcctatctgtcttgttccttggtgtgtcctctgtatcaaagcggtacccagtaatgggcctgaagcaaatgttttcccaatatttactgaaggaatctatgttcactggtaagtcaagagcaaaaaatacacaaagttttgctacttcacctggtctagtggtcatcgggcattattatttcataaatgtatactaataattttagtagcagttgaatatgtttttctttttttattattattatactttaagttttagggtacatgtgcacattgtgcaggttagttacatac

SEQ ID NO: 616666 - DNA, 582 bp, Homo sapiens
tttctgtgaatgccatcatttcattcctttttatggctgagtagtattccatggtatatatacaacacattttcttttttttttttttttttttttcttcagacagagtcttgctctgttgccgaggctgsagtgcagtggtgtgatcttggctcactgcaagttccgcctcccgggttcacgccattctcctgcctcagcctcccaagtagctgggactacaggcacccgccaccatgcctggctaattttttgtattttttagtacagatggggtttcatcgtgttaaccaggatggtctcgatctcctgacctcgtgatctgcccgccttggcctctcaaagtgccgggattacaggcgtgagccaccgtgcccagccatataccacattttctttatccacttggttgatggacatttgggctggtctatatttttgcaattgcgaattgtgctgctataaacatgagtgtgcaagtgtctttttcatataatgacttcttttcccctgtagtgggagtgctggatcaaatggtagatctacttttagttccttaatgaatctctacactgttttcca

SEQ ID NO: 616667 - DNA, 609 bp, Homo sapiens
atgttatatatatacacataatagaattatatttagcctctaaaatgaaggaaatcctttcctttgccacaacatggatgaatctggaagacattatgttaagcaagccaggcacagaaagacatcatacatgtactcacttagatgtgaattgtgaaaaagtaaaattcatggaaaaagatagtaaaatagtggttaccagaggctaggggatgaaggtggggtggaggatatgctggacagaagacacaaaatgttagttcagcaggaggaataagttcaagagatctattgtatatcatggtgactacagttaataaaaatatattgtattcttgaaaattgcttggagagattttaagtgctttaccacacacaaacgcacacacacaatatttatgtgagtttatgcatatgtcaaatagcttaatttaaccatttcacaatgtatacatatatccaaacatcatgttgtacacaaaaatgtatgtatacttgtcaattataatttttataaaaatytgtatattaagaaatgtttaaaaattaagtttttaaattgtttaaaaattgaatccacaattgaaaatatctgtcctggtccaccta

SEQ ID NO: 616668 - DNA, 567 bp, Homo sapiens
tttctacctcttgtctgatactcccctcagccccgcagctaattgttgttactatagtaccataaaaagatgtaagtggrcatatactatcattgatatttgttgagcttcttaatattctttaaaaacagatgttaaaattaaattttctttcttacaaaggtaatcttatttcattcttccttaaatttctaaattccccaagtttattttgcatgtttatactgaccgcagagatgtgtcacaacttttaaattaggatcacttgtgaatttcaccggtgcactgtttaaccactcttccatgctactaattatgatgttaaatcaaaatggatctagcattgatctttagggtcccctgctaatatctttcccagtttccatatatcactatttttgactattggtcttccagatactatttaagcccaaccacaaacatgtttatgagcaagccaacttaatttatttttttcaactttatttatgctaacaagacatttatattttctgttaataactctctgtttcaatatttaatggcaatttagttgcacgatgtcta

SEQ ID NO: 616669 - DNA, 541 bp, Homo sapiens
ctcctacctcaaaggatcctcctgcctcagcctcctgtgtagctgagaccacaggcatgggggtcacatttggttggcccagtgatcttgaactcctgggctcaagtgttccttctacctcagcttcccaaagtgctgggattacaggcatgagccattgtacctggctaattctgtttcttaataggaaacaagtttggggagggatggggttagttctggcatatacatatatacatatataaatktacaagataatgaaatatatagactcttttataaggatgcatatcttatattgataaaaattaaaatttaatttaaacattaaaaatgtaaaataatcagtggaaattcagtattggaaattgaaagacatattctagaaaaagatttatttgtaattatagcatttatactattcactatccaaatttaaatatctaatactatatcaggataatttatgatagtgcttagttttcttgaatgtaattaacaaaatgtagtgactgcttatgtcagtgagtctatttgttta

SEQ ID NO: 616670 - DNA, 613 bp, Homo sapiens
taaaaaattattggaaataatcttctttttctgctttgttccttgggctgcctctccctccgggcttgtcaagtcaatattttccttaaagctatttcagaaccaaggagcaattgatactacagagttaagctctttaccaagttccaaatatttcatctatattgttttatatcctaatttaaagagccagatttttgaaaacaagcataatgtatctgacttttattgtatttctttactgaatctagcatagtagtgggaattcaaatctgctgcctgattagcttgtgatgtggggatcctaagagttgggaggaaaaagacaatgaccaaggattgtggtttttaagtttcccctatgtaacattcagggagaaaactgtaggcaggttggatatcttaaatctacaaacatcctgaaatgggagaacacagaaggatgttcatgcttcaggggtgagttatgcatttgggagtcattcttaccttattcttatgaaacattttataacaggcctcagccctcacatattctttgaagtgagcaatcacatacttttgaaactaatctgttgttccaatcatcragtgttttctcacaaccataaac

SEQ ID NO: 616671 - DNA, 561 bp, Homo sapiens
cttgtcttttttgagtcacttaatgcttttttttttwaatttaattttattttttttaagacagagtttcactcttgttgcccaggctagagggcaatgacacgatctcagctcaccacaacctccacctcccagattcaagtgattctcctgcctccgcctcctgactagctgggattacaggcatgagccatcacacctggctaatttcgtatttttagtagaggtgggacttctccatgttggtgaggctggtctcaaactcctgacctcagataatccactcgcctgggactcccaaagtgctgggattataggcatgagccactgcacctggcctaatgtttctttaatagacagagttcttaattttaatgtactctaattacaaaaaaagacaagcctttcttctttgtttagtagtgtcatccttttcttaagcaagtgaatatacatgtggctgttttttgactgatttgtctgtatatttgagacaaaaccacactgtatcaattcttcagtttaataataaaaatttgttctaacactgtattggatagc

SEQ ID NO: 616672 - DNA, 561 bp, Homo sapiens
cttgtcttttttgagtcacttaatgctttttttttttaatttaattttattttttttaagacagagtttcactcttgttgcccaggctagagggcaatgrcacgatctcagctcaccacaacctccacctcccagattcaagtgattctcctgcctccgcctcctgactagctgggattacaggcatgagccatcacacctggctaatttcgtatttttagtagaggtgggacttctccatgttggtgaggctggtctcaaactcctgacctcagataatccactcgcctgggactcccaaagtgctgggattataggcatgagccactgcacctggcctaatgtttctttaatagacagagttcttaattttaatgtactctaattacaaaaaaagacaagcctttcttctttgtttagtagtgtcatccttttcttaagcaagtgaatatacatgtggctgttttttgactgatttgtctgtatatttgagacaaaaccacactgtatcaattcttcagtttaataataaaaatttgttctaacactgtattggatagc

SEQ ID NO: 616673 - DNA, 612 bp, Homo sapiens
ctatataactatgtaactatatataactatatataactatataactagatgtattactatataactatatgtatagttatgtaactatatatatatatatatatatatatagttcagtccgtctagagagaaccctaatacaatccttgtgcttcacttttgggtttaygatttctaagtatttacagtgattttagaggatgtcgttgtcatgcagtagcttgcttatttttattaactaaaagctagttagacaagctatatatttcaagaaaatgcaaactatcaagaaattacatgcaggcaaaatttctgccagtgaagacacgatttcattacttctggcctgtgtaaaccatcataaaactctattacacacacatctataaataggactacatttttccttaataaaaggtggacaggttaaacagatttcacagcacttagaatctttgactattacaaccagttgaaagtcttttcctccccttccatgaaacttctctctcatatttctttttcaattaactcaactgttcttttatagtctttgttaatgcttcttttgcttgctgtttatgtcaccagaaccagggaaccccttaaaga

SEQ ID NO: 616674 - DNA, 612 bp, Homo sapiens
ctatataactatgtaactatatataactatatataactatataactagatgtattactatataactatatgtatagttatgtaactatatatatatatatatatatatatagttcagtccgtctagagagaaccctaatacaatccttgtgcttcacttttgggtttacgatttctaagtatttacagtgattttagaggatgtcgttgtcatgcagtagcttgcttatttttattaactaaaagctagttagacaasctatatatttcaagaaaatgcaaactatcaagaaattacatgcaggcaaaatttctgccagtgaagacacgatttcattacttctggcctgtgtaaaccatcataaaactctattacacacacatctataaataggactacatttttccttaataaaaggtggacaggttaaacagatttcacagcacttagaatctttgactattacaaccagttgaaagtcttttcctccccttccatgaaacttctctctcatatttctttttcaattaactcaactgttcttttatagtctttgttaatgcttcttttgcttgctgtttatgtcaccagaaccagggaaccccttaaaga

SEQ ID NO: 616675 - DNA, 517 bp, Homo sapiens
agccacactttgctgttttgttttgttwttttttgcatttttaaaatcattatttgttgaaaactggacattttaaataatatcattgggcaacaatggcagtcagcctctctgcttatcatatttgtttttgttgttgtttattgttgctcttgttggtatttatgtatttagtaagctttttcgactaattctctaaaatctgcagctgctggaatagcttcgaggtggcttgcttagtggtcaaccagtgattgaacagagttcctaaatgccttcaaccaataaatctccaaacaactatacattttgccccttttctctctctgtgaatattggttggaacatgccttccacactctggcagtttgcaacttcgccttcaccttcactcccagctggtgcatagccctgtggccagccaggagtaaaaagttgggccttcttatgtcttatgcacacagccctacacaagccatgcctttctggttccccaggaaatgttggaacttttcaa

SEQ ID NO: 616676 - DNA, 517 bp, Homo sapiens
agccacactttgctgttttgttttgttattttttgcatttttaaaatcattatttgttgaaaactggacattttaaataatatcattgggcaacaatggcagtcagcctctctgcttatcatatttgtttttgttgytgtttattgttgctcttgttggtatttatgtatttagtaagctttttcgactaattctctaaaatctgcagctgctggaatagcttcgaggtggcttgcttagtggtcaaccagtgattgaacagagttcctaaatgccttcaaccaataaatctccaaacaactatacattttgccccttttctctctctgtgaatattggttggaacatgccttccacactctggcagtttgcaacttcgccttcaccttcactcccagctggtgcatagccctgtggccagccaggagtaaaaagttgggccttcttatgtcttatgcacacagccctacacaagccatgcctttctggttccccaggaaatgttggaacttttcaa

SEQ ID NO: 616677 - DNA, 294 bp, Homo sapiens
atttttaaaatttttatttgctattgattttaggcagaactatatcaaagaaaaatatttcragaacaaaaggtagattaaataacataagaagagttgacatttttggctaatttcttagtgatgtcattaagatctctaaattcagatagactgaaactctacttttcaaatgcaacggtttataagtttttatttgacataaattaataatgttgcttttaatatgcataaattatacacagtcttggtttatctgaaggaatttccttaaaaaaagaaaagaaaaggaaa

SEQ ID NO: 616678 - DNA, 294 bp, Homo sapiens
atttttaaaatttttatttgctattgattttaggcagaactatatcaaagaaaaatatttcgagracaaaaggtagattaaataacataagaagagttgacatttttggctaatttcttagtgatgtcattaagatctctaaattcagatagactgaaactctacttttcaaatgcaacggtttataagtttttatttgacataaattaataatgttgcttttaatatgcataaattatacacagtcttggtttatctgaaggaatttccttaaaaaaagaaaagaaaaggaaa

SEQ ID NO: 616679 - DNA, 294 bp, Homo sapiens
atttttaaaatttttatttgctattgattttaggcagaactatatcaaagaaaaatatttcgagaacaaaaggtagattaaataacataagaagagttgacatttttggctaatttcttagtgatgtcattaagatctctaaattcagatagactgaaactctacttttcaaatgcaacgktttataagtttttatttgacataaattaataatgttgcttttaatatgcataaattatacacagtcttggtttatctgaaggaatttccttaaaaaaagaaaagaaaaggaaa

SEQ ID NO: 616680 - DNA, 585 bp, Homo sapiens
tttttccagctattaaaaatagaatatttacaaacagataagtcagaagtatttcaggtgaaagagacwagttttggtgggggaagatggtcagtgcttaccattttgtaatcaaaagagtgaggtagatcaagaatgaagttggaatgcaatcaggtatattcacggacttcattaagacccaacagggtaagtacctctcccaatgggtgcaggcatcaggtcttggcatgttaataatatataaatgaaaatgctacataaaaccaagtaaagtaaaacaaaggccagagtgacccgttatttacttttttatttcattgtagacaaaattctgtggagtatttcgtgaaaaaaggatgctaacttttaaagggggtcatagatttggctagtaaataaaaagaataaaattgaaatataagctcaaatattcttgggcattgcccagttgtctaatttgttaaggattataaataagtcagtgtcattaattaatttgtaaatttgtattgcctcatctattctatttggtaaacactagtgcttaggtggaacaactagccctaagaaacctaaatttat

SEQ ID NO: 616681 - DNA, 620 bp, Homo sapiens
aacactagtgcttaggtggaacaactagccctaagaaacctaaatttattcttctggtggatttttatgtagtcttagattattaccaaaggagccattttactgtccactttattttctgcttcctcctgcccaaacaattccatcaaacaasgtccatcaaaatgaatactgttttacttgtatattctctaagaattggaataggcaatggataaggacaaggtgcatattttagaaatttaaatactaaattaggaatatatttagaacatttcaattattatttgctctggaatttaaaattatataattcaagtcctgaatatgtttagttattcactttaaaaatgtattctgttcacactgtaaacagatataatcaaatctagatatatgaaagagcaacaaaatattttataatcattgtaaaagaaacccctacatttatatttctctgaggtgctatgcacaaatacaaattgggggaaattaatattttttctatatttgtgttagctactcatcatataaatatcttcatttctaataatattagaaagagcatttctctgtagaaaaatgtcatttcattatatcagatggcatctattgagtat

SEQ ID NO: 616682 - DNA, 620 bp, Homo sapiens
aacactagtgcttaggtggaacaactagccctaagaaacctaaatttattcttctggtggatttttatgtagtcttagattattaccaaaggagccattttactgtccactttattttctgcttcctcctgcccaaacaattccatcaaacaaggtccatcaaaatgaatactgttttacttgtatattctctaagaattggaataggcaatggawaaggacaaggtgcatattttagaaatttaaatactaaattaggaatatatttagaacatttcaattattatttgctctggaatttaaaattatataattcaagtcctgaatatgtttagttattcactttaaaaatgtattctgttcacactgtaaacagatataatcaaatctagatatatgaaagagcaacaaaatattttataatcattgtaaaagaaacccctacatttatatttctctgaggtgctatgcacaaatacaaattgggggaaattaatattttttctatatttgtgttagctactcatcatataaatatcttcatttctaataatattagaaagagcatttctctgtagaaaaatgtcatttcattatatcagatggcatctattgagtat

SEQ ID NO: 616683 - DNA, 620 bp, Homo sapiens
aacactagtgcttaggtggaacaactagccctaagaaacctaaatttattcttctggtggatttttatgtagtcttagattattaccaaaggagccattttactgtccactttattttctgcttcctcctgcccaaacaattccatcaaacaaggtccatcaaaatgaatactgttttacttgtatattctctaagaattggaataggcaatggataaggacaaggtgcatattttagaaatttaaatactaaattaggaatatatttagaacrtttcaattattatttgctctggaatttaaaattatataattcaagtcctgaatatgtttagttattcactttaaaaatgtattctgttcacactgtaaacagatataatcaaatctagatatatgaaagagcaacaaaatattttataatcattgtaaaagaaacccctacatttatatttctctgaggtgctatgcacaaatacaaattgggggaaattaatattttttctatatttgtgttagctactcatcatataaatatcttcatttctaataatattagaaagagcatttctctgtagaaaaatgtcatttcattatatcagatggcatctattgagtat

SEQ ID NO: 616684 - DNA, 485 bp, Homo sapiens
tgggcattgcccagttgtctaatttgttaaggattataaataagtcagtgtcattaattaatttgtaaatttgtattgcctcatctattctatttggtaaacactagtgcttaggtggaacaactagccctaagaaacctaaatttattcttctggtggatttttatgtagtcttagattattaccaaaggagccattttactgtccactttattttctgcttcctcctgcccaaacaattccatcaaacaaggtccatcaaaatgaatactgttttacttgtatattctctaagaattggaataggcaatggataaggacaaggtgcatattttagaaatttaaatactaaattaggaatatatttagaacatttcaattattatttgctctggaatttaaaattatataattcaagtcctgaatatgtttarttattcactttaaaaatgtattctgttcacactgtaaacagatataatcaa

SEQ ID NO: 616685 - DNA, 620 bp, Homo sapiens
aacactagtgcttaggtggaacaactagccctaagaaacctaaatttattcttctggtggatttttatgtagtcttagattattaccaaaggagccattttactgtccactttattttctgcttcctcctgcccaaacaattccatcaaacaaggtccatcaaaatgaatactgttttacttgtatattctctaagaattggaataggcaatggataaggacaaggtgcatattttagaaatttaaatactaaattaggaatatatttagaacatttcaattattatttgctctggaatttaaaattatataattcaagtcctgaatatgtttagttattcactttaaaaatgtattctgttcacactgtaaacagatataatcaaatctagatatatgaaagagcaacaaaatattttataatcattgtaaaagaaacccctacatttatatttctctgaggtgctatgcacaaatacaaattgggggaaattaatattttttctatatttgtgttagctactcatcatataaatatcttcattyctaataatattagaaagagcatttctctgtagaaaaatgtcatttcattatatcagatggcatctattgagtat

SEQ ID NO: 616686 - DNA, 577 bp, Homo sapiens
atggattgtcttcttcaaggctctatgttgaagtcctgactcccaagtagtcagaatttgacttgtatttggagataggacctttatataggtaattaagattaaatackgtcttatgggtaggtcctaattcaatatggctggtgattttataaaaagaggaagtagagagtagaattgcaggtaagagaggcttggaagcactgaaggaagggcatggtagaaagaggttggttaacagatacaaaattacaacgagataggagagatgtgtgctggtgttctgcagcactatagggtgaatatggttaacaataatttaaggtgtatattcaaaaaactggaagagaggattttgaatgttcacaacgccaagaaatggtacatgcttgaggtgatgggtatgctaattaccctgatttgatcattacacattgtatacatgtattgaaatatcactttgcatcccataaatatgtacaattgttatgtgccaactaaaaataaaagaaaacataggaagaagaagagacaccagggatgtgtgagagcattgaggagaggccatgtaaggaca

SEQ ID NO: 616687 - DNA, 637 bp, Homo sapiens
caatatggctggtgattttataaaaagaggaagtagagagtagaattgcaggtaagagaggcttggaagcactgaaggaagggcatggtagaaagaggttggttaacagatacaaaattacaacgagataggagagatgtgtgctggtgttctgcagcactatagggtgaatatggttaacaataatttaaggtgtatattcaaaaaactggaagagaggattttgaatgttcacaacgccaagaaatggtacatgcttgaggtgatgggtatgctaattaccctgatttgatcattacacattgtatacatgtattgaaatatcactttgcatcccataaatatgtacaattgttatgtgccaactaaaaataaaagaaaacataggaagaagaagagacaccagggatgtgtgagagcattgaggagaggccatgtaaggacacagatgaaagccatctacaaggcaaggaarggggccttacatggaaaccaactctgttgacactttgatcttgaacttctagcctccttaagtaaataaatgtctttctgtaagtcacccagtctctttttgttatagcagccctagcaaacgaatacaatcatcaagtcatttgtaagcacattaaatatt

SEQ ID NO: 616688 - DNA, 644 bp, Homo sapiens
tggctggtgattttataaaaagaggaagtagagagtagaattgcaggtaagagaggcttggaagcactgaaggaagggcatggtagaaagaggttggttaacagatacaaaattacaacgagataggagagatgtgtgctggtgttctgcagcactatagggtgaatatggttaacaataatttaaggtgtatattcaaaaaactggaagagaggattttgaatgttcacaacgccaagaaatggtacatgcttgaggtgatgggtatgctaattaccctgatttgatcattacacattgtatacatgtattgaaatatcactttgcatcccataaatatgtacaattgttatgtgccaactaaaaataaaagaaaacataggaagaagaagagacaccagggatgtgtgagagcattgaggagaggccatgtaaggacacagatgaaagccatctacaaggcaaggaaaggggccttacatggaaaccaactctgttgacactttgatcttgaacttctagcctccttaagtaaataaatgtctttctrtaagtcacccagtctctttttgttatagcagccctagcaaacgaatacaatcatcaagtcatttgtaagcacattaaatattgagaagcattgt

SEQ ID NO: 616689 - DNA, 504 bp, Homo sapiens
tctaactacaaaatattttatgcaagccttcatctaaccacaaagaaaaaaaaayaccctgtaatatatagaaaaaagatgaagaagaaagaatcaaagcaaatcactccctccaaataaaataaaatacaataaaaaaatagcaagagaggaaagagggatgaaacaactgcaaatagacaaaaaaaacactgataacaatctagctgatgaataaattaagaaaataatctcatttagaatagcataagaaagtattcaggaataaatttaaccaagaaagtaaaatatctgtacactgaacactataaaattttgatgaaagaaattaaaaaatacaaataaataaaaagatatactatattaacggattggaataattaatattgttaaaatatctgtactacccaaagtgatatacagattcaatgcaattatcttagtctgtgctgctataacaaagtatctgaaattgggtagttcataaagaacagaaatgtcttt

SEQ ID NO: 616690 - DNA, 621 bp, Homo sapiens
ctttcttttgttgtgaaagttcaactttcccagatcttggtttaattaatctccactgagtggcctcacacatgctgacctctaaatgattttccaaggtactttcacctaatatattattcctaactcttcatagctttacccagttatcaggaccctgacttcttaagactagacctggttcctcagctataagttccaattacatcttatatttcttcatagtaattcactcaatgacaagccagtaatcaattgtgtataataattagctatttatagtctgtcaccttgctattatataatttttataggcaggtgttagatctgtttcattcaccactccagtgttttaagacagtgaaaacaagcagaaactatataacttaaagcaaatgtcataagaattttcagtacatttgttacacaaccaaatctagtaactcraatgatcttttctaaagttataatgaaatttataaaggataataaatctgattatagcacacaatagctttctggatgattgaatcttcattcatattatcccctaaaagtcctcagaataagtctttatattacattgtactggaaatgtagtatagtaacaaaaatatgagc

SEQ ID NO: 616691 - DNA, 621 bp, Homo sapiens
ctttcttttgttgtgaaagttcaactttcccagatcttggtttaattaatctccactgagtggcctcacacatgctgacctctaaatgattttccaaggtactttcacctaatatattattcctaactcttcatagctttacccagttatcaggaccctgacttcttaagactagacctggttcctcagctataagttccaattacatcttatatttcttcatagtaattcactcaatgacaagccagtaatcaattgtgtataataattagctatttatagtctgtcaccttgctattatataatttttataggcaggtgttagatctgtttcattcaccactccagtgttttaagacagtgaaaacaagcagaaactatataacttaaagcaaatgtcataagaattttcagtacatttgttacacaaccaaatctagtaactcaaatgatcttttctaaagttataatgaaatttataaaggataataaatctgattatagcacacaatagctttctggatgattgaatcttcattcatattatcccctaaaagtcctcagaataagtcyttatattacattgtactggaaatgtagtatagtaacaaaaatatgagc

SEQ ID NO: 616692 - DNA, 572 bp, Homo sapiens
ctgagctcctggttatgtcatgaagctgttaaattcacctagccctggagctagctttgttaattktttttatgtaaaacactaacatttcctaattgtaagacattttgataagggttttctgtaacggtactgagagtaactaacttaatagaaaaacaaaaataaaaacaaacaaaaacaaaacaaaacaaaaagcggggagggtgagtaaaacttaaatattttttaaagttatgtctttcatttaccaaatgatatttcctaccatgagattcagaaaatttggttcctagaaataaaagcaatgttctctgcaaatttgaagcaaactttcaagataagtaaaaatgcatggtattgaataaggtagaatttaaagtcagtctctcttgtttcaacttgttattccaactcttacaaatgttataaccttaaacaagctatttaatccttttctaggtctcggtttcctcatgtgtaaaacagataactgatagaaactacctcagagatactatgaggattaaatgagagaatctatgtaaaattcttagcaagtaactgagaca

SEQ ID NO: 616693 - DNA, 504 bp, Homo sapiens
tctaactacaaaatattttatgcaagccttcatctaaccacaaagaaaaaaaaataccctgtaatatatagaaaaaagatgaagaagaaagaatcaaagcaaatcactccctccaaataaaataaaatacaataaaaaaatagcaagagaggaaagagggatgaaacaactgcaaatagacaaaaaaaacactgataacaatctagctgatgaataaattaagaaaataatctcatttagaatagcataaraaagtattcaggaataaatttaaccaagaaagtaaaatatctgtacactgaacactataaaattttgatgaaagaaattaaaaaatacaaataaataaaaagatatactatattaacggattggaataattaatattgttaaaatatctgtactacccaaagtgatatacagattcaatgcaattatcttagtctgtgctgctataacaaagtatctgaaattgggtagttcataaagaacagaaatgtcttt

SEQ ID NO: 616694 - DNA, 620 bp, Homo sapiens
aaattaataaaatgcatctttcacatatcagaaatatcttattgtacccaaaccaaatttttgtacaaaaactgattcttaatttatatatctcttagaaatatccaaaggtaaataatttctaaatgtttcttargatacctataaaattgtcaattcaggtaatgaaataattattaagagttaatatgaagcataatatgaaggatttttttcagaattttttgagataaattaaataggtagaattttaataatcttgaaaattaaaaatgtaatctttatttgaaaataaatataatccaatttaaagtaatccccaataattcttaacatctcttccacttaattaaacagaagcagctttttcctcttttggtacttccctgtcaaagttgattgctttctccttttttggcaaggcctctgtttttatctttttcaacttatattctgggtttgaagagagtgtctgggttgtaataataataattcctaggaaaatggattggatgaaaaataactccatgcattgttgttgatgatgatgttttcacagaaattttagaatatactagataaaactcagcatatttcacaaataaaaatataatgggaca

SEQ ID NO: 616695 - DNA, 499 bp, Homo sapiens
atggaaaacaaagacatcatatttcctaatttcaaattatattacaagtctataaaaatcaaaacagtatggtagaggtataaaaatagacaacaatagaataaaataaagagcccagaaataaacttgagcaatagggtcaactaattttcaacaagcctgccaaaaagacacaatgtgaaaagatattttcttcaataaattgtactgggaaaactggatatacacatgcaaaagaatgaatctggacccttatcttacaccacaaataaaaacaaactgaaaatgaactaaaggtctaaacataaaacctaaaacgtraaactcctagaaaaaaaaaacatagaggaaaagctttgtgacataggcctcagtaatgatttggggggctttatgccaaaagctcagaaaacaaaaacaaaaattaacatgttgaactatgccaaactaaaaagcttttgcacagccaggaaacaaccaatagaatgaaatggcagca

SEQ ID NO: 616696 - DNA, 590 bp, Homo sapiens
agactattcaaataaacacaatcagaaatgataaaggtgacattacaactgataccacaaaaattcaagaaaccatcaaagactactatgagcatctattcatgcaaaaaaagaaaacctagaggaaatggacattttcctggcaacataaaacaagatttaagctaggcagawatagaaatcctgaagagaccaatatgagtaattaaattaaataagtaataaaaagtcttccaacacgcaagctcaggaccagaagcattcacaaacgatttttaccagatgtataaagataagctagtaccaatctcactgacactattcctaataatttaggagaagaactgtctctttaattaattctataaaaccagtatcaccctgtgtattagttcattttcatactgctatgaagaaattcctgagactggttaatgtataaagaaaacgaggtttaatggactcacagtttcacatgggtggggaggcctcacaatcatggtggaaggcaaaagaggagaaaagtcatttcttacgtggcagcagtcaagagagtatgtgcagggcacctgccctttataaaaccatta

SEQ ID NO: 616697 - DNA, 517 bp, Homo sapiens
ggagaagaactgtctctttaattaattctataaaaccagtatcaccctgtgtattagttcattttcatactgctatgaagaaattcctgagactggttaatgtataaagaaaacgaggtttaatggactcacagtttcacatgggtggggaggcctcacaatcatggtggaaggcaaaagaggagaaaagtcatttcttacgtggcagcagtcaagagagtatgtgcagggcacctgccctttataaaaccattagatctcatgagacttattcactatgatgagaacagcacaagaaaaccccaccccaattattcaattatctcccactgggtccttcccaagaaccatggggactatgggagctacaattcaagatgagatttgggtggggtcacagccaaaccatatcactytgataccaaaatcagacatggatacaacaacaacaaaaaagacaactgcaggccaatatctctgttgaacatagattcacgtatcctcaacaaaatactag

SEQ ID NO: 616698 - DNA, 484 bp, Homo sapiens
aggggcttgcatcagactaacagcagatttctcagcagaaacctcacaggccagaagaaaatgagatgatatattcaaaatgctaaaagaaaatactgttatcctatgacactatacccagcaaagttgttcttcataaataaataaggaataaagtctccctagaaaagcaaaagyaggaaatgcatcatcactagattgtctctactagaaatacttaaggaagttctatatctcagaacaaaaggacagtatctaccatcatgaaaacatttaaaactataaaacccactggtggagcaaacacacaaataaggaagagaaaggacacaaattttacttctatagaaaaatacctaaccacaatgataaagattaagagggaaagaaagaaacaaagaatatgcaatacaaccaggaatcaattaataaaatgagggaataaaccctcaaatatcagtaatagtcttgaatagaaacagat

SEQ ID NO: 616699 - DNA, 622 bp, Homo sapiens
tactccacacaaatggaatccagaagtgggctggagtagctatacttatatcagataaaatagacattaaataaaaaatagtttaaagtaaaagataagacagatcattatataacaataaagggatcaatctggcaagaagatgtaacaawtctaaatatatatgcacctagtgctggagcacccaaatccataagacaaatattgatctgaagagagagattaatacaataatagtggggaacttcaacactccactcgtagctttagacagatcatctggacagaaaatcaacaaagaaacattggcttaaaactagactttagagcaaaggggcctaacagacattcacagaactttttatccaatacacacagaatacacattgttttggcacatggaacattctccaaaatagaccatattttaggccacaaaaccagtctcaacaaattttaaataatcaaaatcatgtcggtttcttctccccacaacatgacgtaaaactagaaacgactatcaagagaaattctgaaaaccatttaaatacatagaaattaaacaacacggtcctgaacaatcacagggtcaatgaagaaattaagatggacatttaaaaaa

SEQ ID NO: 616700 - DNA, 537 bp, Homo sapiens
agttgaaagaaaaaatcaaattgtccctttttccaaatgacataatcttatatttagaaaaaccgaaggactctaccagaaatctcttaaagctggaaaacaaatttagtaaagttgtaggatacaagatcaacatacaaaaattagtagcatttttacacactaataatraaatagccaaaaagaaatcaagaatgcaatcccattgtcaatagctactaaaaatagaacacctaataataaatttaaccaaaaaagcaaaagatctctacaaggaaaaccatataacactaatgaaggaaattaaatagaacacaaacaaatgcaaagacattctatcaccatggattggaagaattaatagtattaaagtgattttgtactcaaaagtcagattcaaggcaatccatatcaaactatgaatgtcattttccacagaaataaaaaaggtcttaaaatcaatatggactacaaaaatagacaggctattcaatacaatcctgagcaaaaagaacaaagctcgaggcattatactac

SEQ ID NO: 616701 - DNA, 537 bp, Homo sapiens
agttgaaagaaaaaatcaaattgtccctttttccaaatgacataatcttatatttagaaaaaccgaaggactctaccagaaatctcttaaagctggaaaacaaatttagtaaagttgtaggatacaagatcaacatacaaaaattagtagcatttttacacactaataatgaaatagccaaaaagaaatcaagaatgcaatcccattgtcaatagctactaaaaatagaacacctaataataaatttaaccaaaaaagcaaaagatctctacaaggaaaaccatataacactaatgaaggaaattaaatagaacacaaacaaatgcaaagacattctatcaccatggattggaagaattaatagtattaaagtgattttgtactcaaaagtcagattcaaggcaatccatatcaaactatgaatgtcattttccacagaaataaaaaagrtcttaaaatcaatatggactacaaaaatagacaggctattcaatacaatcctgagcaaaaagaacaaagctcgaggcattatactac

SEQ ID NO: 616702 - DNA, 553 bp, Homo sapiens
ggtgaactatggtaaagtctttacaagcacattcctggttatattargtaaaaaacgaactattttattttcaaaagtcttctctttgagaatctgaaatttatttttagatgagaatttttaacattacttcataatttttagccaattttctgattgatttaattaaacaaacttaggtacaacaatacatatattagtaagagaaagaaacatttctgtagggaaaccattatataaattgaagatattccaggaaataatcccagtacaagaactgtgaaaaaagcagtcaggctgtagcaacttaagtccataaaatacttagttgagctttaagattcatgtttgttaaaacataattttcatattcttttgggttgaaaaattggatatgctatatggaaaatgtatcatcagctgggttccatagactctgaaacagaaatttgcatgcagtgtatttgttgagataaactctttggaacaaccactatgagagtgaagagaacagaatagggcaaacaaagaagttgagctgcatttgtgtcat

SEQ ID NO: 616703 - DNA, 552 bp, Homo sapiens
cataccacacagctttcaggtagttattatattcaacatcctcttccttactcttatctgacaacatctcctacacttattccttctacagtcctggacacagtgcttatgttcagaagaagatgctaaggctcagtgagattttcacctaacaataacaattcattatgtgcctgtattctcattatgatgaaagaataaaagacatcaaatgcaagggacgtcttagtcatggcayaaaaatcataccattgttctgttctgttttatctccttatccccaaagcattctgcctaagaaaagtaacacaaaactggaattccgatacctgtttgctgaagcatcttttcttctggcaacttttaataatatctgatttataaatttggtttattagatacttgttcaagtttcaaaataaataaatatgcctactattttttatgtgaaaacagaggcctccttattttggcccaattgaccctgatatttttaaaagactaaaactggaagtgtttccccatttttccttagggtacaccttcattgca

SEQ ID NO: 616704 - DNA, 594 bp, Homo sapiens
ttacaatcatggtgcagagtgaaggggaaataagacaccttcttcacaaggtggcaggaaggagaatgaaagaaggaggaactacagaacacttataaaaccattagatctcatgagaactcactcaccatccacaagaacagcatgggggaaattgcccccatgatttgattacctccacttggtctctttcttgacacatggggattatagggattgtagggattatggagattacaattcaagatgagattttgagtggggacatagccaaaccacatcattgtcccatctcctcagtagaaaagattcaagtcctgtagcactttgttccttttggcttatttatcaccagtttacttcccttttttttctgtataaagctgttctctgtttctcattacagtccaccagctgatgtttcctcattgttggatggtacaggtagsgagtagtaaagaccctttccccaataatccaggaggcctcttctaaagctttgccctacaacatcatttcattcacacaacatcatttcattcacagcatagccctctctagtggtttgaagacttgtcgtggttttatgacaga

SEQ ID NO: 616705 - DNA, 620 bp, Homo sapiens
aagattcaagtcctgtagcactttgttccttttggcttatttatcaccagtttacttcccttttttttctgtataaagctgttctctgtttctcattacagtccaccagctgatgtttcctcattgttggatggtacaggtagcgagtagtaaagaccctttccccaataatccaggaggcctcttctaaagctttgccctacaacatcatttcattcacacaacatcatttcattcacagcatagccctctctagtggtttgaagacttgtcgtggttttatgacagatagaaatgttgtaaaacaaccctagtgactccattgaagctgtacaatcattatcccaaatagcattattgaatatctaggaactctagcaayaacaattcaagatgatgcttaatcttgactgtgcctattagtctaggatatctgtgcatatctgtgatctcagcagtacgaccactattctttccctttgggaggcctgataccaccatataagtatctctgtttatttccacttgagataggtagagcagctgcaccgtaggtgcattagcaaacttaaaatcagtaaaccgtgaagagaaacaggacttatactgttttaaagatc

SEQ ID NO: 616706 - DNA, 545 bp, Homo sapiens
caagcatatgaataaactgtgaaatttcagattctcacaatatatcaaactggagataattctttaagaaattgaatatatagttgtgagttacagaagaaaaacctgagctggagacacaagagaaacttcatgatattgaacataaaaaaaaaaaaaaaacatgatagtgagatcaatcaatcagagaaactgtgtagaagttttgggataataagaaagccaagatggccaggtgcggtggctcatgcctgtaatcccagcactttgggaggccgaggtgggcggatcacaaggtcaagagattgagaccatcctggtcaacacagtgaaaccccatctctactaaaaatacgaaacttagctgggggtggtggtgcacaccggtagtcccagctactcgggaggctgaggcaggagaatcacttgaaccctggaggcrgagattgcagtaagccaagattgtgccactgcaccccagcctggcgacagagcaagactccatctcaaaaaaaaaaaaaaaaaaagagaaaaagaaaaccaag

SEQ ID NO: 616707 - DNA, 545 bp, Homo sapiens
caagcatatgaataaactgtgaaatttcagattctcacaatatatcaaactggagataattctttaagaaattgaatatatagttgtgagttacagaagaaaaacctgagctggagacacaagagaaacttcatgatattgaacataaaaaaaaaaaaaaaacatgatagtgagatcaatcaatcagagaaactgtgtagaagttttgggataataagaaagccaagatggccaggtgcggtggctcatgcctgtaatcccagcactttgggaggccgaggtgggcggatcacaaggtcaagagattgagaccatcctggtcaacacagtgaaaccccatctctactaaaaatacgaaacttagctgggggtggtggtgcacaccggtagtcccagctactcgggaggctgaggcaggagaatcacttgaaccctggaggcggagattgcagtragccaagattgtgccactgcaccccagcctggcgacagagcaagactccatctcaaaaaaaaaaaaaaaaaaagagaaaaagaaaaccaag

SEQ ID NO: 616708 - DNA, 585 bp, Homo sapiens
atccttggtggggagtgtggttatcactactgatgagaattattctgcactagattttgtgagtaaagcagaatgaaagctgttgtttatgctccccagaggatgaatatcaaaataagaaaagaagaagggaattgatgggaaaratatgtattatgagcctttagtgaggcattgtcttaaggcatgttacatcatcgcatgcattatcttgtaattgaatctttatcataaacaactttgtgaggtaagtattatggacctgtaatgaaaatgaggaaataaagccataaagtttaggtaactttccttaggtcacacaggtagaaggtggacaattgagtgataaaaatccaatgtttcctactctacaatcattctttttaaatcttctcattatacctggctacttttaatttttagtatacatgaaacaatcggggaatgatgttaaatgtatgattattagaaaatattaatattaaatggggcattttcgatccatgcttcacatacctgaattttaaagcagaagcaattcaatcagatcccattgttgtcttacaatattttaaatatacaatt

SEQ ID NO: 616709 - DNA, 501 bp, Homo sapiens
taggactattaggttacacgaagtctccacatttatatattccttgcaggccttttcaacaagatctcttttggctttgagaatcaattttcctagcagtaccatggcttgcttacccactgaactacataacatttttttgttgatttttctggattgtgtgtwttatctaatttgttctactgaattctgaaccctctttaaatgatgcatatcatttagaaggacaatggaagactctacaatgtccagcagcagtagctaactttgtgacagcctgattatcacattattacttcccacctgaagcaccttctaatcgttttgtaattgagctgtccagaacaacagcaatcacaccgacaataacatgtcattaattgcattaaggagcttatattcagtaaaaataataacataagtttcctaatatttggcatatactagtttcagttctctgtaacacagatgccactgatcacaatgtaattgtcaggaaaa

SEQ ID NO: 616710 - DNA, 524 bp, Homo sapiens
ctggcacttttttttacacaatcaatatcatttctcctatcaaaataaaaagtatatagaaatgacaactcctccttattacrgtgtgaaaacaacttacttgcctatatctctgtgttttactaaggaagggagtaaattcacttttatacaggttacatgatgatgtatcttggatgaagttgtaatcatgactcagcctcagacaacaaatgttagaacacatgcttgtctgcagtttgtttttgcaggaattaatgtcacaaaattgttaaaatatattgaacacttactgtatgtcaagtcctgtgcaaagtgctttacagatgttattaactcatttggtccccccaataaactcatgagagaggattaaatgtcatccccattttatagacaagaacattgagacaataaggtaaaggtctcaagagctcataagtggtcaagttggaattcaaaaccaggcagtcagactccaaggtccattcttctaagtaccatgtaagacataccaaggtaaa

SEQ ID NO: 616711 - DNA, 524 bp, Homo sapiens
ctggcacttttttttacacaatcaatatcatttctcctatcaaaataaaaagtatatagaaatgacaactcctccttattacggtgtgaaaacaacttacttgcctatatctctgtgttttactaaggaagggagtaaattcacttttatacaggttacatgatgatgtatcttggatgaagttgtaatcatgactcagcctcagacaacaaatgttagaacacatgcttgtctgcagtttgtttttgcaggaattaatgtcayaaaattgttaaaatatattgaacacttactgtatgtcaagtcctgtgcaaagtgctttacagatgttattaactcatttggtccccccaataaactcatgagagaggattaaatgtcatccccattttatagacaagaacattgagacaataaggtaaaggtctcaagagctcataagtggtcaagttggaattcaaaaccaggcagtcagactccaaggtccattcttctaagtaccatgtaagacataccaaggtaaa

SEQ ID NO: 616712 - DNA, 559 bp, Homo sapiens
gaccactgtctgggagattgacaaatattacattatagaaaacaattagtggaggtcctgctgtggggcagagaaatagctggagatgaataagtgtgcaatgtgagctgtgcactcacactactaatgccaactaatggttctgtaaaatcaattaaatatttttgaaaagtaattttagcattttgaactyaattctgaattaaatatgaatttgcaatacgaggaatgcaatgatttttttctaaataaaattgataaatctgaccccagttccaactgcgcatggaggtaaaaattctatctcagtcattattgattcacctttgctctgaatgtcctaaacattcttctcagttcatcccatttggggagaatccttggtttttcatgcctaggattagcatgtgagaagcagccccaagcccttctcagagagtctacaggtttgcggaagcaaaagttatgacatagtctggtgtgattctcaatgtagaaagggtaaatatttaagacaattatattaatgggggagtgtaaagtcgggcaaaaggaggta

SEQ ID NO: 616713 - DNA, 540 bp, Homo sapiens
tagcagggaaaatattgatgagaagaaagtgttttgcttcatatccctgttttctttttggaggatgctagaggtgcagtgactgtattgcaaccataaggcaaaagtcattaagtcaaaaatctaggatgccagaacatagrgaaaaagtctaggcccttaatgacatcactgagctgctaaactctacctgtatttcttgttacttgtacaacaagtatcctcatgatttgagtcatttttgggcttgatgttgctgctcttgttatttgctgatggaaggcttcctcataaatagatgaaataaattgtttttcttcgttaatttcataaagtcctatttgaaacactcccttaattccattcatggctatactccattttttgatcttgacttatatagctattaccttttggttcctcttttctccaagctctgaaaccaatctcacccaggaaagatagaaaatagaaggttcaattgtcttttacccagttattcaaactcaagtgaatgttgtatgcagattccacaataac

SEQ ID NO: 616714 - DNA, 635 bp, Homo sapiens
ggtaaagaattaaaagcacatcttttccacttttgcacctaaattttattcttttacatctggtgccttgtgaactagtaggaggcacagaatgaatcatttttgcactatcattaacataatgcccatgtgcagattttcagtttgataaactgttggcatgtaaatatttccttgaagaaatttcagtccagmtgcttttgtttacaaatctatcaatggttaaaaccatagagtgtattttgcccatttctgaattataattacatgtctaatggtgaattaattataaaagaggaagacaaaactacgcataaatattttcccatttctggactcacaccaggtttctctatattcatgaaatgtaatattttgctttcacatgacataaccttacatttctgcgtttataggtacagatagttagataaaatgtatttgagtgatgatttgattcttaggaagactgcttattcccttgttttactttcttctctagaccgcttaatcattccaaggctctaattaagattagattttgatatgccagtcacactaacattctaaactgacctgaatattgtatatctgtagctttccaatgttttcatcacatgcaatcaaaatgattc

SEQ ID NO: 616715 - DNA, 605 bp, Homo sapiens
caatggttaaaaccatagagtgtattttgcccatttctgaattataattacatgtctaatggtgaattaattataaaagaggaagacaaaactacgcataaatattttcccatttctggactcacaccaggtttctctatattcatgaaatgtaatattttgctttcacatgacataaccttacatttctgcrtttataggtacagatagttagataaaatgtatttgagtgatgatttgattcttaggaagactgcttattcccttgttttactttcttctctagaccgcttaatcattccaaggctctaattaagattagattttgatatgccagtcacactaacattctaaactgacctgaatattgtatatctgtagctttccaatgttttcatcacatgcaatcaaaatgattctacagttgtgttgttctgcttttcctctatgaaacacaaccaccaaatatagaaatccacaaattaaaacaaatggtgaaaaaacaccagtccatggggctgtgagtgttcatttgtgagagtttaccagtaatacaatcacactggtgagaagagatcatctatactgttcagtccacttaaaag

SEQ ID NO: 616716 - DNA, 562 bp, Homo sapiens
tccaatgttttcatcacatgcaatcaaaatgattctacagttgtgttgttctgcttttcctctatgaaacacaaccaccaaatatagaaatccacaaattaaaacaaatggtgaaaaaacaccagtccatggggctgtgagtgttcatttgtgagagtttaccagtaatacaatcacactggtgagaagagatcatctatactgttcagtccacttaaaaggcatctccttatgcattgtgcctgcaacacaacagacatatagtgaatgagtcacactggatagcctgggaaggctggtgtgtgtgtgtaattttgtgccaagggggcaagtctgagtgaactgatgctaaatacttcctgtttccatgtctgtcctggagcgctaagaaagggcatgtgggagatttcaggaggtggctgtcatgtgaggtcaaaggtagagcattcctagctcagagaagaagctttgrttcctttctgtcccagaaagctgcttttctgtgtagcccggagggcctttaccaggcattcaaatgatctgcagaaactcattcacaaaa

SEQ ID NO: 616717 - DNA, 602 bp, Homo sapiens
aatgtttcatccaaaagtcaagttcgaaaatgtcaaagtggcttacaaatctatatatgttcagaattctgtctgtgctctgttttgcagtaccactctaagttatttcttacaagactccaattttaccaatgtgccagtcttcctaaaagagtcttgggacattctgtttcctaaaacttcagctcacctgattttgcctatctttgaatcccatactgtaatgaatataagagaaacatttcctgactcccaaaactaggatagattttgctatgcgtttatagattaacctatatttctctcctggcaagagttaccacatttctaatgactcactcaatttctactgcttgcttttaagatccatgctggaaggactgggtatgttcccctcgctcattaatccatagcttctataactccgtatggctatgaatgcaacggttatagaacaaatatttcaaggaaatcacatactgataaaaaaagcaagtagagagcttaaaaatttgtttggttatcaaaatacttttacctaatattttatatttaacatagctataatatarctgtttaattccaagctatttaattcatcc

SEQ ID NO: 616718 - DNA, 603 bp, Homo sapiens
ataatgagtaaggagattaaaatattaataactcatttcctatcaaataaaaccccaaacctaatggccttattgccaaattctaccaactatttgaagaactaatactaatccatctcaaactcttcaaaaaaattaaagaaaatacttccaaactcatttacaaggacaaattttctctgataccaaaaacagacaaagacagcataagaaaaaaattataggctaatattcttgatgaatatagatacaaaaatcttcaataaaatattagcaaactgaattcaacaacacattgaatgaattattcaacatgatcaagtgagatttacgccagagatataggaatgatttgacctatgcaaatctataaatgtgatactacattaacagaatgaagaacaaaaaacatgataattttaatatatccagaaaaagcatttgacagaattkaacaacctttcaagataaaaagtctcaacaaattctatataaaaaatgtacctcaacacaatgaataacatatatgataagcccgtaactaaaatcatactcaacagtaaagggttaaaacctttatgactaagatcaggaaagataagg

SEQ ID NO: 616719 - DNA, 631 bp, Homo sapiens
gtattgccttattttcccatcactagtgattgtgacatgaataaaattaacttatgtcaccatgtagatcattatatcctgaattaaggttagatttcgagaagcattatgaatttaaggaattcatctagccttagttctaaaccactttataataaaaatctttattttcccaccatagggactctataccactcttttagggctaattcacagttgcasttggacgatagcaaactgttcaatgcaaaatgctgattttatcttaaaatccatggtcatctacattgatttcaactggacagacttcaatttcatttcttctcaggaaaacctacttgcatggctttaagaatattaacttctatgtcttggataataaacgttggctgtttccccgtcaggttttggtagcatcgtggtgcctgtataaagagttcaaagctgtatagccatctgtaacagctctatttctttacaagttcagtgctcagataaaaattctaaacgttgcagccctagacacttgatgactctattaccaaatgcattttatataagagatcatgatgttcctaaagcttaaaatatcgtgtgagaatagtattattttggtataacctacactttc

SEQ ID NO: 616720 - DNA, 616 bp, Homo sapiens
atttcataacattttcactgtgtagataaatgttatcagtgtttttggaattagtcagttgagactcttgtggtgagtgtgaaattacgagatgaggaaatgtagaaactaagctaaatactattcccagctcttgatcaaaatgagatttgttctattgtttaacatgacagctcatattcttcagtgtatttacatgttttctgggtggatgattgggtggtgttgatgccccatcctgtgcccttgatttgggcttgacamggttgtcttgttgggagccagtgaagaggtttctgtctagtttgaaaccaaaccagtcaaagcattagggctacttgccttcatttgttatattagtgggtgtaaaaaggagcaataagtcactggttgaatttggcctgtattttaaaatctcattacaagactacaataaaatatctatgaataatgaaacaacatggagaaaaagcttattccagtcccatttgactccactgctggtaacccttggaaagtaagtgcaaatatgttacaaacctcaatggggtctcctccagcaaagatatgaagaattacaagaaatgtattccaaaggataaacagtaaacctgtg

SEQ ID NO: 616721 - DNA, 631 bp, Homo sapiens
ggaactatgtttggagatttactatctctggagtgtgattatatatgaattagaagagtctgcagttactccacactatatgaaaatacaaatcatatyaggagaaatttgccaaatataatagaaaaatcaagacactctaatgcttccatcttaaatttgagccaacaataactagtttattttttattctgaaagagataaataattatatataatatgtagctgcaaataaaactccttgtgctatattgttttaattgatgtaattattgaaattcacaccatgtcatgaattttttaaatgctctggaaaatctggtgaatatttatttcattttccagctcaatcatgcctcaaagaacagctatgtatcacatacagaaaaaaaaaatcattgactgaggagaatgcaagatatgtttaatttttaccaaaaataaacacaatttcaactactattacattaaatttgtgcataattgtaaaaatagcaaaatcttttcaacactcggcctctaccagttactgttctaacttctttacgtgtattaattcatttaatcttcataacaatttcacaaataaaatgttattatcatctttgttttacagattaggaacccaaaa

SEQ ID NO: 616722 - DNA, 631 bp, Homo sapiens
ggaactatgtttggagatttactatctctggagtgtgattatatatgaattagaagagtctgcagttactccacactatatgaaaatacaaatcatattaggagaaatttgccaaatataatagaaaaatcaagacactctaatgcttccatcttaaatttgagccaacaataactagtttattttttattctgaaagagataaataattatatataatatgtagctgcaaataaaactccttgtgctatattgttttaattgatgtaattattgaaattcacaccrtgtcatgaattttttaaatgctctggaaaatctggtgaatatttatttcattttccagctcaatcatgcctcaaagaacagctatgtatcacatacagaaaaaaaaaatcattgactgaggagaatgcaagatatgtttaatttttaccaaaaataaacacaatttcaactactattacattaaatttgtgcataattgtaaaaatagcaaaatcttttcaacactcggcctctaccagttactgttctaacttctttacgtgtattaattcatttaatcttcataacaatttcacaaataaaatgttattatcatctttgttttacagattaggaacccaaaa

SEQ ID NO: 616723 - DNA, 631 bp, Homo sapiens
ggaactatgtttggagatttactatctctggagtgtgattatatatgaattagaagagtctgcagttactccacactatatgaaaatacaaatcatattaggagaaatttgccaaatataatagaaaaatcaagacactctaatgcttccatcttaaatttgagccaacaataactagtttattttttattctgaaagagataaataattatatataatatgtagctgcaaataaaactccttgtgctatattgttttaattgatgtaattattgaaattcacaccatgtcatgaattttttaaatgctctggaaaatctggtgaatatttatttcattttccagctcaatcatgcctcaaagaayagctatgtatcacatacagaaaaaaaaaatcattgactgaggagaatgcaagatatgtttaatttttaccaaaaataaacacaatttcaactactattacattaaatttgtgcataattgtaaaaatagcaaaatcttttcaacactcggcctctaccagttactgttctaacttctttacgtgtattaattcatttaatcttcataacaatttcacaaataaaatgttattatcatctttgttttacagattaggaacccaaaa

SEQ ID NO: 616724 - DNA, 631 bp, Homo sapiens
ggaactatgtttggagatttactatctctggagtgtgattatatatgaattagaagagtctgcagttactccacactatatgaaaatacaaatcatattaggagaaatttgccaaatataatagaaaaatcaagacactctaatgcttccatcttaaatttgagccaacaataactagtttattttttattctgaaagagataaataattatatataatatgtagctgcaaataaaactccttgtgctatattgttttaattgatgtaattattgaaattcacaccatgtcatgaattttttaaatgctctggaaaatctggtgaatatttatttcattttccagctcaatcatgcctcaaagaacagctatgtatcacatacagaaaaaaaaartcattgactgaggagaatgcaagatatgtttaatttttaccaaaaataaacacaatttcaactactattacattaaatttgtgcataattgtaaaaatagcaaaatcttttcaacactcggcctctaccagttactgttctaacttctttacgtgtattaattcatttaatcttcataacaatttcacaaataaaatgttattatcatctttgttttacagattaggaacccaaaa

SEQ ID NO: 616725 - DNA, 627 bp, Homo sapiens
aaattcacaccatgtcatgaattttttaaatgctctggaaaatctggtgaatatttatttcattttccagctcaatcatgcctcaaagaacagctatgtatcacatacagaaaaaaaaaatcattgactgaggagaatgcaagatatgtttaatttttaccaaaaataaacacaatttcaactactattacattaaatttgtgcataattgtaaaaatagcaaaatcttttcaacactcggcctctaccagttactgttctaacttctttacgtgtattaattcatttaatcttcataacaatttcacaaataaaatgttattatcatctttgttttacagattaggaacccaaaacatcaaacagtgtaatttacacacttggtattatacttagtattatacagttaacagcagcatgggaatttgaacccaggaattccaggtctagaatctatctatctacacacacacacacacacacacacacacacacacacacacacacayaaaccatgaatacatatgcgtgtgtgtgcatgtgtttgtgtgtctatactcagtgaacaaagtagatgtctttgccattttgacagaataaaaatatcagtgttagaacaggacttag

SEQ ID NO: 616726 - DNA, 556 bp, Homo sapiens
gagattttggatttcatcccttccaggcacggctcttggtttccattatgatctcttagtttgtgagaggagaaactcctgctgcaattctttagcagatagatttagaataaagttagaactgtgtagtttctgccaggaaacactgtcagtcaatctaacagttgttaataataacaaatagatttttacagactaatttcttttaaccagctaaaatattttcaaccaatgaaccatttcccaaacaattaaacattctgatttttctcatatggatgagaaaaatacccataccctctaattgcccagtatttcagccataaaaataacattgtcattaaaaaaaatgagctggtctttataaatcttatttttaaaactaaatcgctgtatgtatttgccatatgatttgccatctttgagaaagtgaaattgaactttctttattttaaagtgttgctgttgttaaaatgatactgaatgcaaaataatrtgtttgtttttcagctgttgtaagactaaagagattttttgaatacttcaattataaaaa

SEQ ID NO: 616727 - DNA, 554 bp, Homo sapiens
ccaacatggtgaaacccatctctacccaaaatacaaaaattagccaggtgccatcatgggtacctgtaactgctcgagaggctgaagcatgaaaatcacttgaacccwggacacggaggtagccataagccgagatcgtgccaatgcactccagcctgggcaacagaatgagactctgtctcagaataaataaataaataaataaacaaaccattatgctttcttaaagggcagataaaacatttctcttaaaagtgaaaaatatactgtagttataacaaaaatttatttttcttttgtccacatatttgtgccatggtcctcaaacctttcagaatatctagcccatgtattgattctaagatgaaagaaaaaattttgtgaatgaatattgggtacaaaaaataattatgcagttggggttatcagcctaattcagtgaatctacataagaaataacatgggtatctcatgtgacttaagaaactgcattcccatcaacagtgtataagcatttcctttcctcggcagcctaaccagcatttgttttttga

SEQ ID NO: 616728 - DNA, 554 bp, Homo sapiens
ccaacatggtgaaacccatctctacccaaaatacaaaaattagccaggtgccatcatgggtacctgtaactgctcgagaggctgaagcatgaaaatcacttgaaccctggacacggaggtagccataagccgagatcgtgccaatgcactccagcctgggcaacagaatgagactctgtctcagaataaataaataaataaataaacaaaccaytatgctttcttaaagggcagataaaacatttctcttaaaagtgaaaaatatactgtagttataacaaaaatttatttttcttttgtccacatatttgtgccatggtcctcaaacctttcagaatatctagcccatgtattgattctaagatgaaagaaaaaattttgtgaatgaatattgggtacaaaaaataattatgcagttggggttatcagcctaattcagtgaatctacataagaaataacatgggtatctcatgtgacttaagaaactgcattcccatcaacagtgtataagcatttcctttcctcggcagcctaaccagcatttgttttttga

SEQ ID NO: 616729 - DNA, 554 bp, Homo sapiens
ccaacatggtgaaacccatctctacccaaaatacaaaaattagccaggtgccatcatgggtacctgtaactgctcgagaggctgaagcatgaaaatcacttgaaccctggacacggaggtagccataagccgagatcgtgccaatgcactccagcctgggcaacagaatgagactctgtctcagaataaataaataaataaataaacaaaccattatgctttcttaaagggcagataaaacatttctcttaaaagtgaaaaatatactgtagttataacaaaaatttatttwtcttttgtccacatatttgtgccatggtcctcaaacctttcagaatatctagcccatgtattgattctaagatgaaagaaaaaattttgtgaatgaatattgggtacaaaaaataattatgcagttggggttatcagcctaattcagtgaatctacataagaaataacatgggtatctcatgtgacttaagaaactgcattcccatcaacagtgtataagcatttcctttcctcggcagcctaaccagcatttgttttttga

SEQ ID NO: 616730 - DNA, 554 bp, Homo sapiens
ccaacatggtgaaacccatctctacccaaaatacaaaaattagccaggtgccatcatgggtacctgtaactgctcgagaggctgaagcatgaaaatcacttgaaccctggacacggaggtagccataagccgagatcgtgccaatgcactccagcctgggcaacagaatgagactctgtctcagaataaataaataaataaataaacaaaccattatgctttcttaaagggcagataaaacatttctcttaaaagtgaaaaatatactgtagttataacaaaaatttatttttcttttgtccacatatttgtgccatggtcctcaaacctttcagaatatctagcccatgtattgattctaagatgaaagaaaaaattttgtgaatgaatattgggtacaaaaaataattatgcagttggggttatcagcctaattcagtgaatctacataagaaataacatgggtatctcatgtgacttaagaaactgcattcccaycaacagtgtataagcatttcctttcctcggcagcctaaccagcatttgttttttga

SEQ ID NO: 616731 - DNA, 544 bp, Homo sapiens
cttttctgctgtatttgaactttcattgcattctgccctcatttataactagataaaatgaatataattcattattgctagctttattattagagagttaagtagaagaactaatgggaaaaaaaaataacagcacaccgttccactatttactgtttcattcttgggattttgtgtaactcattatttctaagtttaaaacttcccaagccatttttctaacaaccttggccagcgtgcttgaggtaggtaacctgctttaaattgctttgattaactcatgaagaaatattctcaatgcatccaattgtattgtgtatttataagctctagtgctctaccatgaactttgaattaacaaaactatagaaatgagctgataatgcccttaatttcttaaactatacytcttatttcaagactttcccatcagtgcttttagaaaaagatacaatgtctctgatttttattcacattttcctagaataagatcacaatatgcatttattttcaacatctttcttaatattaaaaatcacaattt

SEQ ID NO: 616732 - DNA, 579 bp, Homo sapiens
caatttgcccgccttggcctcccaaagtgctgggattacaggcgtgagccacctcacctggccaacaatttcacatatactctttttttttttctttttctttttctttttttttttttctttctgagatagagtctagctctgtggcccaggctggagtgcagtggcacgatctcggctcactgcaacctctacctcccgggttcaagtgattctcctgtctcagcctcccgaatagctgggattacaggtgcccaccaccactccccgctaatttgtgtatttttattagagacggggtttcaccatgytggccaggctggtctcgaatgcctgacctcagttgatccgccgcccttggcctctcaaagtgctgggattacaggaatgagtcaccacgcccggcccacatagacatttaaacacaatttattaaatagcaacatttaaaatttgtactttgttatttgaaattcacaaccttagtcaagtaataaagcaggtttgaatggacagtattcactccgcttcatatctctacactccctacagatcactttttggcctttggctgagatc

SEQ ID NO: 616733 - DNA, 579 bp, Homo sapiens
caatttgcccgccttggcctcccaaagtgctgggattacaggcgtgagccacctcacctggccaacaatttcacatatactctttttttttttctttttctttttctttttttttttttctttctgagatagagtctagctctgtggcccaggctggagtgcagtggcacgatctcggctcactgcaacctctacctcccgggttcaagtgattctcctgtctcagcctcccgaatagctgggattacaggtgcccaccaccactccccgctaatttgtgtatttttattagagacggggtttcaccatgttggccaggctggtytcgaatgcctgacctcagttgatccgccgcccttggcctctcaaagtgctgggattacaggaatgagtcaccacgcccggcccacatagacatttaaacacaatttattaaatagcaacatttaaaatttgtactttgttatttgaaattcacaaccttagtcaagtaataaagcaggtttgaatggacagtattcactccgcttcatatctctacactccctacagatcactttttggcctttggctgagatc

SEQ ID NO: 616734 - DNA, 616 bp, Homo sapiens
tttgactgtcttatttcagaaaggcattcttcaagttctgagattctttcctcagcttggtctattatgctgttaatacttgctatggcattttgaagttcttatagcatgtttttcagctctagcacatcagttagtctcttttttttactgaaaattttgtgtgtcagctcctgtgtcattttgcctaggttgtcttccagtgtttcttatagttttgggktttacatttaagtcttaaaaacattttttttaaataaatttgagacaggctctcactctagttgcccaggctggagcacagtggggcaacctcagctcactgcagccttgacctcctgggctcaggtggttctcccatcttagcctccagagtagctgggattacaggcatgtgccaccaccctggctacttttttgtatttttagtagagatggggtttcactatgttggccaggctgatctcaaacttctggactcaagcaatccgcctgcctcagcctcccagaattttgggattacagggatgaaccacagcacctggccaacatttaagtctttaaaccaccttgatttgatttttatatatggtataacgaatgggtccagtttcag

SEQ ID NO: 616735 - DNA, 484 bp, Homo sapiens
attctacatattatgaattatttgctattagacttcctttttcagcctatttagcttattagacattggcctctcttttcgtgcggaaataataaacaaatatgcttcactatagtggaatgctttatgtcacccctggcacgaaaaataaagcttaagggaaactttyactcaagtcctatagcaactaaagagctatggctgaatataaattattggaaattttcttcaaatattttctacctgccacactctgatttcataaaaataaccattttgttatttgtgacttaattctttttctaaacaatgagattaacgactgtgttcattttggtaatttttaaaatttagaggcaaaattagtgacataaacataaacaagaggcattaaactctatttactttaggggaacacaaatacatattctgatttctattaaaacaccattatggactatatattaatatataaagctggtga

SEQ ID NO: 616736 - DNA, 456 bp, Homo sapiens
taaatttttatatcttagtaggaaaccacaagtctctgtttttatttaatgtatattgtaaaaacagcgaaagattcaaagagaacagagtggaaagcatgtgagattgtttcaaactctgttccttccagtcttcattgtgtgtcctcacagtatggcatttaatttttctccttgtttgttttcttatctgatggcgaataaacacaaaaatgrtatacatagcaaagaagttcagtgaacactatttttattaacaaggcatgtttctatctaggagtattatatgccaaaaattagcatcttacagtgtaaaacagtgtgtggtttctagtattagtgttaagcattaaaaacacagaaaaagttgtatattaaaaataaagcaaacattatgacaagaactagaatgcaaattttccaaacagatagaatgttttgaaaggaacaaacata

SEQ ID NO: 616737 - DNA, 365 bp, Homo sapiens
tccattaaagcagttggttagatctgtcctttgttctggttaagttcataggttcaccaacagtttgtctgttgtctggggcacaatggcagatgacattgacaaactgacatttttttttttttttgcaccaaagcatactttaaacattttttgaaaagcaactaatgagtgagtaaatatattactcattagcatccagtgattaaacttccatttttccatctatttctctacactctataatttactgagagcccagagataccattcatgttattcaggtagtctcccattytccatttcagggccacttttcccctagggctgcctgtacctatacgttatactaatcaaaatttaga

SEQ ID NO: 616738 - DNA, 508 bp, Homo sapiens
gctgcagtgagctgtgattacwcactgtgctctagcctgggcaacagggtgagaccttgtctctctcaataataataataaagtatgctatattaatgtactggcatattatgcagtaattcagaataatagaattatgtgtgcttatatggaaagatcttcaagatacacatcgagtgaagaaaaagcaaggcccacaactgagcatactgttacttaatttctataagatattttaggtacatatgcatatatgttcagagacaatattttgaaaagtaactcttaatagtagttctctctgggaacagaagtaggagaccgatcataatctaaggtctagttctcagagagatcaaaggctaaggtgcagtgatattcacaaaacaaaaacagatagtaccattgctatctttataaaaagatataaaaagatataaaaaaattataaaaacaaaatactgagtactttctatgtgaaaattcttattgaaagctatatatatac

SEQ ID NO: 616739 - DNA, 508 bp, Homo sapiens
gctgcagtgagctgtgattacacactgtgctctagcctgggcaacagggtgagaccttgtctctctcaataataataataaagtatgctatattaatgtactggcatattatgcagtaattcagaataatagaattatgtgtgcttatatggaaagatcttcaagatacacatcgagtgaagaaaaagcaaggcccacaactgagcatacygttacttaatttctataagatattttaggtacatatgcatatatgttcagagacaatattttgaaaagtaactcttaatagtagttctctctgggaacagaagtaggagaccgatcataatctaaggtctagttctcagagagatcaaaggctaaggtgcagtgatattcacaaaacaaaaacagatagtaccattgctatctttataaaaagatataaaaagatataaaaaaattataaaaacaaaatactgagtactttctatgtgaaaattcttattgaaagctatatatatac

SEQ ID NO: 616740 - DNA, 659 bp, Homo sapiens
atagtccccctgcaggctgtatacagtgtaatacctatatggagrcatttacaagcgaattacagatgatctcacaccttcccttcttgagctcctcctttctcatgaattatatcatctgttttatggcttgatgaaatttttagagattctgaagtccacctcttgtatttgggtaaactgaggcaattctggagaggctaagtgccttaggcaggtcacagagccacttaatagcagaatctattattcttgtttgactacagaaaaccttaataagattagaggtttggaaggtgctataaaatataggcaaatctatattgaacactatgtaaaggtcttttttacttggtttcccttattagggatatcaggtttatggatgatttgtcacctactcaaatttctatatgtttataaatatggctaaaacatctttcttatgccaattttaatataagtatgtttttctaaagtctctaagcaaagaaaagtttgaaaagatttatagttatcctgtagctgtgagtgtcatttagcagactcttgaaaaccctaatgaatgggggatgggagataatggagtcaggtgccagtgacctctaatgagtactgatgtgaaaaaatatgataggaaagatttgatatgggtaagg

SEQ ID NO: 616741 - DNA, 659 bp, Homo sapiens
atagtccccctgcaggctgtatacagtgtaatacctatatggagacatttacaagcgaattacagatgatctcacaccttcccttcttgagctcctcctttctcatgaattatatcatctgttttatggcttgatgaaatttttagagattctgaagtccacctcttgtatttgggtaaactgaggcaattctggagaggctaagtgccttaggcaggtcacagarccacttaatagcagaatctattattcttgtttgactacagaaaaccttaataagattagaggtttggaaggtgctataaaatataggcaaatctatattgaacactatgtaaaggtcttttttacttggtttcccttattagggatatcaggtttatggatgatttgtcacctactcaaatttctatatgtttataaatatggctaaaacatctttcttatgccaattttaatataagtatgtttttctaaagtctctaagcaaagaaaagtttgaaaagatttatagttatcctgtagctgtgagtgtcatttagcagactcttgaaaaccctaatgaatgggggatgggagataatggagtcaggtgccagtgacctctaatgagtactgatgtgaaaaaatatgataggaaagatttgatatgggtaagg

SEQ ID NO: 616742 - DNA, 659 bp, Homo sapiens
atagtccccctgcaggctgtatacagtgtaatacctatatggagacatttacaagcgaattacagatgatctcacaccttcccttcttgagctcctcctttctcatgaattatatcatctgttttatggcttgatgaaatttttagagattctgaagtccacctcttgtatttgggtaaactgaggcaattctggagaggctaagtgccttaggcaggtcacagagccacttaatagcagaatctattattcttgtttgactacagaaaaccttaataagattagaggtttggaaggtgctataaaatataggcaaatctatattgaacactatgtaaaggtcttttttacttggtttcccttattagggatatyaggtttatggatgatttgtcacctactcaaatttctatatgtttataaatatggctaaaacatctttcttatgccaattttaatataagtatgtttttctaaagtctctaagcaaagaaaagtttgaaaagatttatagttatcctgtagctgtgagtgtcatttagcagactcttgaaaaccctaatgaatgggggatgggagataatggagtcaggtgccagtgacctctaatgagtactgatgtgaaaaaatatgataggaaagatttgatatgggtaagg

SEQ ID NO: 616743 - DNA, 508 bp, Homo sapiens
ttacttggtttcccttattagggatatcaggtttatggatgatttgtcacctactcaaatttctatatgtttataaatatggctaaaacatctttcttatgccaattttaatataartatgtttttctaaagtctctaagcaaagaaaagtttgaaaagatttatagttatcctgtagctgtgagtgtcatttagcagactcttgaaaaccctaatgaatgggggatgggagataatggagtcaggtgccagtgacctctaatgagtactgatgtgaaaaaatatgataggaaagatttgatatgggtaaggcagcctaacaggatgtgtgtgtgtgtgtgtgtgtgtgtgtgtgtgtgtgtgtaagagtagcagctaacagtgatatcagagtaaagacaagacccatctctctttgccttccacaattttaccaaggactagtcctggaatcccagaatggattgagacatgggcctcatctgggtcacagcatccctcagggcct

SEQ ID NO: 616744 - DNA, 508 bp, Homo sapiens
ttacttggtttcccttattagggatatcaggtttatggatgatttgtcacctactcaaatttctatatgtttataaatatggctaaaacatctttcttatgccaattttaatataagtatgtttttctaaagtctctaagcaaagaaaagtttgaaaagatttatagttatcctgtagctgtgagtgtcatttagcagactcttgaaaaccctaatgaatgggggatgggagataatggagtcaggtgccagtgacctctaatgagtactgatgtgaaaaaatatgataggaaagatttgatatgggtaaggcagcctaacaggrtgtgtgtgtgtgtgtgtgtgtgtgtgtgtgtgtgtgtgtaagagtagcagctaacagtgatatcagagtaaagacaagacccatctctctttgccttccacaattttaccaaggactagtcctggaatcccagaatggattgagacatgggcctcatctgggtcacagcatccctcagggcct

SEQ ID NO: 616745 - DNA, 483 bp, Homo sapiens
tggtgttcagtgtcacttatttgaaaacatactgggccattatttgacctgtgacagttctgacattcattctaagactaccagatatgaaagtcaggagactgattaktttcttttttggtgcttttctcactctaaacttcaactttccatatcattaaagccactaaggtaaacaattagcctaagaggtatattcattacttttttgctgcctttaaatttgatgcctcattgtaaaaaatatgacctcacttgtatttgtgtggatgatattttaaaagatcatactgggcagagaatatggacactttcattatttaatactttagactaatgccaatcattcaaacatgaattcttcattcatctgtcttgtcaaagaaacagagctcatattgcatatgtgaaatatcacctagtgtctatttcaatcgtatatattttctgtttgtatctcagaaaaattatttcacctcaaca

SEQ ID NO: 616746 - DNA, 483 bp, Homo sapiens
tggtgttcagtgtcacttatttgaaaacatactgggccattatttgacctgtgacagttctgacattcattctaagactaccagatatgaaagtcaggagactgattagtttcttttttggtgcttttctcactctaaacttcaactttccatatcattaaagccactaaggtaaacaattagcctaagaggtatattcattayttttttgctgcctttaaatttgatgcctcattgtaaaaaatatgacctcacttgtatttgtgtggatgatattttaaaagatcatactgggcagagaatatggacactttcattatttaatactttagactaatgccaatcattcaaacatgaattcttcattcatctgtcttgtcaaagaaacagagctcatattgcatatgtgaaatatcacctagtgtctatttcaatcgtatatattttctgtttgtatctcagaaaaattatttcacctcaaca

SEQ ID NO: 616747 - DNA, 405 bp, Homo sapiens
tgcggtacctgctgagtggatgacaccctcaactctttcccagaggcccagggtcccatggggcagggaaacargggaagatggagctcctcgagggcctgacaaggggctgagtcccagccagggcctcacccaagatgaggattctccatgggtttggagttgggtttccttttcctgccctggaggaggaggcaaaggtactaggatgggggctgagctccagctgagcagggttaagggaagtgtgtccaccaggcatctgtgcatgggggagttgttgggaaagcactggccactgcccagtgttctgccccagggcagctcagggggccctgagcacctagggtccaggaagtgccgtgcattgaggtttgttgagttggctcctctggtgttttgctg

SEQ ID NO: 616748 - DNA, 554 bp, Homo sapiens
tggccatgtagtccttcagcacccacccggttccctccactagccactggcctgccccagccctgcctcacagcctcaaaggcaggcctgccctcctggcacctttacctaagatgctgctgtgcagtgccttcagctagggcccatctccctagagctgataccacatgcagggtcacctgatggaaggggaggaagggctcaagggtccggggtccccctgccactggccaagctctttcaagttgatggctccaccatcttggggagtgggctctttatgcatggatggggcacggggcttcttaagtttttacagcccaaatactgcccagctccggaggctcctatcccaccaggagtaggtataacacaaatcctgcccaaagatcatgcggtacctgctgagtggatgacaccctcaactctttcccagaggcccagggtcccatggggcagggaaacaagggaagatggagctcctcragggcctgacaaggggctgagtcccagccagggcctcacccaagatgaggattctccatgggtttgga

SEQ ID NO: 616749 - DNA, 554 bp, Homo sapiens
tggccatgtagtccttcagcacccacccggttccctccactagccactggcctgccccagccctgcctcacagcctcaaaggcaggcctgccctcctggcacctttacctaagatgctgctgtgcagtgccttcagctagggcccatctccctagagctgataccacatgcagggtcacctgatggaaggggaggaagggctcaagggtccggggtccccctgccactggccaagctctttcaagttgatggctccaccatcttggggagtgggctctttatgcatggatggggcacggggcttcttaagtttttacagcccaaatactgcccagctccggaggctcctatcccaccaggagtaggtataacacaaatcctgcccaaagatcatgcggtacctgctgagtggatgacaccctcaactctttcccagaggcccagggtcccatggggcagggaaacaagggaagatggagctcctcgagggcctgacaaggrgctgagtcccagccagggcctcacccaagatgaggattctccatgggtttgga

SEQ ID NO: 616750 - DNA, 512 bp, Homo sapiens
tattcaaacttctcttctcttcttcagaggcaaacctgtataatttctttggtttgtttgtttgttttaagacgtagtcttactctgttacccaggctagagtgcattggtacaatgtgaggtcactgcaacctccgcctcccgggttcaagcgattctccggcttcagcatcccaaataactcrgattaaacccttataatttctatcatgattgattaattttgttcatcttcaaattccaataattagaattcctacaggatgtgtgtgtgagtgtgtatctggtttattttctttagcataaataaatatttgagatttagccaaatatttgtgtgtatcatttttttatttttcctcatatttctgagttgcctacgtatttgtcagagtttgcttattcattagtctgttagtgaatattcagattgctttcagaattagcttattacaaataaaggacttaggtgcattctcaaacaggtttttgggtaaatatatgcttttatt

SEQ ID NO: 616751 - DNA, 478 bp, Homo sapiens
cttattcaaacttctcttctcttcttcagaggcaaacctgtataatttctttggtttgtttgtttgttttaagacgtagtcttactctgttacccaggctagagtgcattggtacaatgtgaggtcactgcaacctccgcctcccgggttcaagcgattctccggcttcagcatcccaaataactcagattaaacccttataatttctatcatgattgattaattttgttcatcttcaaattccaataattagaattcctacaggatgtgtgtgtgagtgtgtatctggtttattttctttagcataaataaatatttgagatttagccaaatatttgtgtgtatcatttktttatttttcctcatatttctgagttgcctacgtatttgtcagagtttgcttattcattagtctgttagtgaatattcagattgctttcagaattagcttattacaaataaaggacttaggtgcatt

SEQ ID NO: 616752 - DNA, 573 bp, Homo sapiens
ttcaaacatgaattcttcattcatctgtcttgtcaaagaaacagagctcatattgcrtatgtgaaatatcacctagtgtctatttcaatcgtatatattttctgtttgtatctcagaaaaattatttcacctcaacaagcatattgcttgttggaattatctggatatagtgataaaataaatattttcatcaacatctgaagaaaatgcctatgtatctgttgggatggagggtggcatggagaggtgtccagttgtctagcaccacttgtggctgggaaggtatgtgtgtctacagtaacagaaaaatctattgtcaccacaaagattccccatagctcctttaaaaataaacctgccatcttgatctccatctgcgtgaatctttggtatctctcccttagttcaaaattctgacagagaatagaagcatatttatcaatccttcaagccccagtagaaacatcagagggagaaaacttaacctattttgaaatggttgaccaattctcagtgacaaagctacagttacagtctgattttcttgtccattgccaagaaaaaatgattcag

SEQ ID NO: 616753 - DNA, 326 bp, Homo sapiens
tgtttcttgcaaataatagcaaataaaagtggggtattattgccctataaaacagcagaaaaaattaatacttcacaaaattacatatttctcaactgaactgaaaatcttctccaggatgctttgaacttcaacatacaatatagaaaggaagtaaatgaaaagcagtcccttcattctcactcctctgtgctttctgatgtgctgtgctttgccttgcaaacaaccctcctctgtctcccyggattaactgtggtcattgccaaaactcactttaaacatttactagtaccaagaatccttgctttgatcacagcacttatcat

SEQ ID NO: 616754 - DNA, 554 bp, Homo sapiens
tgtccaataatcaagaaatctctttaatttcacctaatcccctttcacaatactatttgtggcaaacattaacatttgaggaattaagagtttcagagatacagttgccagagcttcccaatacaggtggcagttccctctgggtggtacaaacttgcttgattcacttytatgaatggtgtcaggatcccagatgccaatgtcaggcactcctgctccaaatgggtcaccatggaaatgagctttgaattaagagagattggcttcaaatgcatttattttccttattattaaatagtccatgggtttttcccctaatacaagagaagagatttttatctttactgttagaaagctcagtatattctgtgtaagagagataggtttaaaaaacttaagaacaaatattttaaaaaccaaaactcagtaagaaatactattctcaattataatggtaatcccgggaccctagtgcagctctactttttaaatccatttttactggcttccacttaaatggctacttaaaattattttttattttagacaaaata

SEQ ID NO: 616755 - DNA, 554 bp, Homo sapiens
tgtccaataatcaagaaatctctttaatttcacctaatcccctttcacaatactatttgtggcaaacattaacatttgaggaattaagagtttcagagatacagttgccagagcttcccaatacaggtggcagttccctctgggtggtacaaacttgcttgattcacttttatsaatggtgtcaggatcccagatgccaatgtcaggcactcctgctccaaatgggtcaccatggaaatgagctttgaattaagagagattggcttcaaatgcatttattttccttattattaaatagtccatgggtttttcccctaatacaagagaagagatttttatctttactgttagaaagctcagtatattctgtgtaagagagataggtttaaaaaacttaagaacaaatattttaaaaaccaaaactcagtaagaaatactattctcaattataatggtaatcccgggaccctagtgcagctctactttttaaatccatttttactggcttccacttaaatggctacttaaaattattttttattttagacaaaata

SEQ ID NO: 616756 - DNA, 577 bp, Homo sapiens
aggcactcctgctccaaatgggtcaccatggaaatgagctttgaattaagagagattggcttcaaatgcatttattttccttattattaaatagtccatgggtttttcccctaatacaagagaagagatttttatctttactgttagaaagctcagtatattctgtgtaagagagataggtttaaaaaacttaagaacaaatattttaaaaaccaaaactcagtaagaaatactattctcaattataatggtaatcccgggaccctagtgcagctctactttttaaatccatttttactggcttccacttaaatggctacttaaaattattttttattttagacaaaatataaatcrgaaataaaaacataatggcttatcaatagaagttctcatactgatccacatggattatttctggcataatacaagccaataagtcacttgcatccttaaggaagagcactgaggagaaggatgtactgtctgcaatattcataaattatccaactataaccaggaataacctaaaaaggcttctaggcattcttatgggcagagaattatttgtggtata

SEQ ID NO: 616757 - DNA, 577 bp, Homo sapiens
aggcactcctgctccaaatgggtcaccatggaaatgagctttgaattaagagagattggcttcaaatgcatttattttccttattattaaatagtccatgggtttttcccctaatacaagagaagagatttttatctttactgttagaaagctcagtatattctgtgtaagagagataggtttaaaaaacttaagaacaaatattttaaaaaccaaaactcagtaagaaatactattctcaattataatggtaatcccgggaccctagtgcagctctactttttaaatccatttttactggcttccacttaaatggctacttaaaattattttttattttagacaaaatataaatcagaaataaaaacataatggcttatcaatagaagttctcatactgatccayatggattatttctggcataatacaagccaataagtcacttgcatccttaaggaagagcactgaggagaaggatgtactgtctgcaatattcataaattatccaactataaccaggaataacctaaaaaggcttctaggcattcttatgggcagagaattatttgtggtata

SEQ ID NO: 616758 - DNA, 577 bp, Homo sapiens
aggcactcctgctccaaatgggtcaccatggaaatgagctttgaattaagagagattggcttcaaatgcatttattttccttattattaaatagtccatgggtttttcccctaatacaagagaagagatttttatctttactgttagaaagctcagtatattctgtgtaagagagataggtttaaaaaacttaagaacaaatattttaaaaaccaaaactcagtaagaaatactattctcaattataatggtaatcccgggaccctagtgcagctctactttttaaatccatttttactggcttccacttaaatggctacttaaaattattttttattttagacaaaatataaatcagaaataaaaacataatggcttatcaatagaagttctcatactgatccacatggattatttctggcataatacaagccaataagtcacttgcatccttaaggaagagcactgaggagaargatgtactgtctgcaatattcataaattatccaactataaccaggaataacctaaaaaggcttctaggcattcttatgggcagagaattatttgtggtata

SEQ ID NO: 616759 - DNA, 566 bp, Homo sapiens
  misc_feature 249: n = A,T,C or G
acataggagttgtaaactcagatacttacaaggacaaaggaaggttgcctgagtaagggaagtactaaggtgggcacagtagcaaactggagaatacctgccttctataaaggggcaacttctgcacagcagaccaaagaatgatagaaactcaggggacaccagatttgattttttaggataygcctgaagtccacatttcttcacgagtcttctaaattttacatgttgattcaacttatagaggcnaaccaacaaatctgtgtaccacattagaatatagcccttggtttttttatattcgctattaatggggtactaaaagggtgtgtataatccaagtctttgcatgtaaaaaattttctttctttgctatcatatgtgctaccaaaaaatcaggctctcatatataataaaaattgctaaaaagactcacaatacctgcttcaagaatttttctaacatgtattcatttaaaatatgtttgtatctaattttccacgagtgtgaaccaaatagataattggttcacaagactgctaaaactaaattattaaaagaattct

SEQ ID NO: 616760 - DNA, 632 bp, Homo sapiens
ttcttcattcatctgtcttgtcaaagaaacagagctcatattgcatatgtgaaatatcacctagtgtctatttcaatcgtatatattttctgtttgtatctcagaaaaattatttcacctcaacaagcatattgcttgttggaattatctggatatagtgataaaataaatattttcatcaacatctgaagaaaatgcctatgtatctgttgggatggagggtggcatggagaggtgtccagttgtctagcaccacttgtggctgggaaggtatgtgtgtctacagtaacagaaaaatctattgtcaccacaaagattccccatagctcctttaaaaataaacctgccatcttgatctccatctgcgtgaatctttggtatctctcccttagttcaaaattctgacagagaatakaagcatatttatcaatccttcaagccccagtagaaacatcagagggagaaaacttaacctattttgaaatggttgaccaattctcagtgacaaagctacagttacagtctgattttcttgtccattgccaagaaaaaatgattcagtctgactccaatttataagggcatgttgaaagcaagaatcctacttgtagagattcttcttctaggcatga

SEQ ID NO: 616761 - DNA, 632 bp, Homo sapiens
ttcttcattcatctgtcttgtcaaagaaacagagctcatattgcatatgtgaaatatcacctagtgtctatttcaatcgtatatattttctgtttgtatctcagaaaaattatttcacctcaacaagcatattgcttgttggaattatctggatatagtgataaaataaatattttcatcaacatctgaagaaaatgcctatgtatctgttgggatggagggtggcatggagaggtgtccagttgtctagcaccacttgtggctgggaaggtatgtgtgtctacagtaacagaaaaatctattgtcaccacaaagattccccatagctcctttaaaaataaacctgccatcttgatctccatctgcgtgaatctttggtatctctcccttagttcaaaattctgacagagaatagaagcatatttatcaatccttcaagccccagtagaaacatcagagggagaaaacttaacctattttgaaatggttgaccaattctcagtgacaaagctacagttacagtctgattttcttgtccattgccaagaaaaaatgattcagtctgactccaatttataagggcatgttgaaagcaagaatcctrcttgtagagattcttcttctaggcatga

SEQ ID NO: 616762 - DNA, 512 bp, Homo sapiens
gctttgcttatcatatacagaaagccaagagatttatattctaataatagaacacaagtccatctcttgcatgtgatttagccagattaagtcacctttccaccaatatcaatctggaagtgatatcatgaactaaatggtgtcaacctggggtgtgtattatatctcgacaaaggaaaagaagttgccatcattggcaaggtacatacaggatacatctctgtttgggcagatgggatgagatttccctaattctcctaccctgcagagggtagagggaggtatttatataatccacagaattttaatttaacaaccaaagaggaatggattaatgggattaatagtgtttatccaatacaagatraaaaacaacatattattgtttgtatcatgatggttctagaataaaacacatcatttctctaattttagttagatctttgctgaaagaaaaagataaataaaataccctacagtttatccatatccatgttcctctacactaaata

SEQ ID NO: 616763 - DNA, 512 bp, Homo sapiens
gctttgcttatcatatacagaaagccaagagatttatattctaataatagaacacaagtccatctcttgcatgtgatttagccagattaagtcacctttccaccaatatcaatctggaagtgatatcatgaactaaatggtgtcaacctggggtgtgtattatatctcgacaaaggaaaagaagttgccatcattggcaaggtacatacaggatacatctctgtttgggcagatgggatgagatttccctaattctcctaccctgcagagggtagagggaggtatttatataatccacagaattttaatttaacaaccaaagaggaatggattaatgggattaatagtgtttatccaatacaagataaaaaacaacatattattgtttgtatcrtgatggttctagaataaaacacatcatttctctaattttagttagatctttgctgaaagaaaaagataaataaaataccctacagtttatccatatccatgttcctctacactaaata

SEQ ID NO: 616764 - DNA, 591 bp, Homo sapiens
tacagtgataatattgtgaccagaaatatgcagtaggaacttatatcttgttgtatcaattggcctatggtaaaatttgtttcattgttcaccattttgctgatagttgcagtttccaataatctactgatattaaatgtggacttactatgtaaacaatagcaaggatcctaaatcctaggtcatatctaagtttaaatggcttgacaccaagtcagaattgccttatgaccatgctcttataagtgtttcattttttaaaacagtgcaaactgaattttgcatgagaattatcattaaaaaaatttttgttacagataggatcttgctatgttgcccaggttgaccttsaagttctgggttcaaatgatcctcttgcctcagcatccagtgtacctgggactacaactgtgtgccaccatacccagggctgcaggaaaagttgtgatttcataaagcagtgatttatgaaaataagactttatttgggcaacatagaaaacgtaaacaaaaagagttgctcaacataaaacttactcaagtcacaatttacctctgacatgacatatttccatccacttcagaaaaaaa

SEQ ID NO: 616765 - DNA, 591 bp, Homo sapiens
tacagtgataatattgtgaccagaaatatgcagtaggaacttatatcttgttgtatcaattggcctatggtaaaatttgtttcattgttcaccattttgctgatagttgcagtttccaataatctactgatattaaatgtggacttactatgtaaacaatagcaaggatcctaaatcctaggtcatatctaagtttaaatggcttgacaccaagtcagaattgccttatgaccatgctcttataagtgtttcattttttaaaacagtgcaaactgaattttgcatgagaattatcattaaaaaaatttttgttacagataggatcttgctatgttgcccaggttgaccttcaagttctgggttcaaatgatcctyttgcctcagcatccagtgtacctgggactacaactgtgtgccaccatacccagggctgcaggaaaagttgtgatttcataaagcagtgatttatgaaaataagactttatttgggcaacatagaaaacgtaaacaaaaagagttgctcaacataaaacttactcaagtcacaatttacctctgacatgacatatttccatccacttcagaaaaaaa

SEQ ID NO: 616766 - DNA, 591 bp, Homo sapiens
tacagtgataatattgtgaccagaaatatgcagtaggaacttatatcttgttgtatcaattggcctatggtaaaatttgtttcattgttcaccattttgctgatagttgcagtttccaataatctactgatattaaatgtggacttactatgtaaacaatagcaaggatcctaaatcctaggtcatatctaagtttaaatggcttgacaccaagtcagaattgccttatgaccatgctcttataagtgtttcattttttaaaacagtgcaaactgaattttgcatgagaattatcattaaaaaaatttttgttacagataggatcttgctatgttgcccaggttgaccttcaagttctgggttcaaatgatcctcttgcctcagcatccagtgtacctgggactacaactgtgtgccaccatacccagggctgcaggaaaagttgtgatttcataaagcagtgatttatgaaaataagactttatttgggcaacatagaaaaygtaaacaaaaagagttgctcaacataaaacttactcaagtcacaatttacctctgacatgacatatttccatccacttcagaaaaaaa

SEQ ID NO: 616767 - DNA, 533 bp, Homo sapiens
tattttctcccattccactggttttctcttcactcagttagctgggcagaagctctttatcttaatgtaataccatttgtctatcatttggtttttgcctatgcttctgatgtcttacccataaaaatctttgtgcagrctaatgtcctcaagcatttttcctccatttacttagagtggtttcataattttaggccttaaatgtcagtcttcaatcaattctgagtttatttcattatgtgctgttacataggaagctagtatcattcttctccatatggatatttagttttcccagtgccattcatttgaagagactgtccttcccccagtgtatgttcttggcacctttgtccaaaatcagttggctgtaaatatgtggatttatttctgggtgtgtattctatggcctttaccccaagaatcattacttcgtaaaatgcaattcaaattagcatgaaacatttgcagtctaaggaaaggcttatggcatcagaatccttatttacaggattcataatttgtgtttttgt

SEQ ID NO: 616768 - DNA, 533 bp, Homo sapiens
tattttctcccattccactggttttctcttcactcagttagctgggcagaagctctttatcttaatgtaataccatttgtctatcatttggtttttgcctatgcttctgatgtcttacccataaaaatctttgtgcagactaatgtcctcaagcatttttcctccatttacttagagtggtttcataattttaggccttaaatgtcagtcttcaatcaattctgagtttatttcattatgtgctgttacataggaagctagtatcattcttctccatatggatatttagttttcccagtgccattcatttgaagagactgtccttyccccagtgtatgttcttggcacctttgtccaaaatcagttggctgtaaatatgtggatttatttctgggtgtgtattctatggcctttaccccaagaatcattacttcgtaaaatgcaattcaaattagcatgaaacatttgcagtctaaggaaaggcttatggcatcagaatccttatttacaggattcataatttgtgtttttgt

SEQ ID NO: 616769 - DNA, 533 bp, Homo sapiens
tattttctcccattccactggttttctcttcactcagttagctgggcagaagctctttatcttaatgtaataccatttgtctatcatttggtttttgcctatgcttctgatgtcttacccataaaaatctttgtgcagactaatgtcctcaagcatttttcctccatttacttagagtggtttcataattttaggccttaaatgtcagtcttcaatcaattctgagtttatttcattatgtgctgttacataggaagctagtatcattcttctccatatggatatttagttttcccagtgccattcatttgaagagactgtccttcccccagtgtatgttcttggcacctttgtccaaaatcagttggctgtaaatatgtggatttatttctgggtgtgtattctatgrcctttaccccaagaatcattacttcgtaaaatgcaattcaaattagcatgaaacatttgcagtctaaggaaaggcttatggcatcagaatccttatttacaggattcataatttgtgtttttgt

SEQ ID NO: 616770 - DNA, 616 bp, Homo sapiens
cataatttgtgtttttgtgagatatggtctttgtctgtcatccaggcagaagtgccggtgatgtggtcataattcactgcagcccctgaactctgggtacaagccatccctttttgcctcagtctccaaactagctgggtctmgaggcatgagcccaccatgccaagctaatttaaaaaaaaaattttgtagacatgggggtctcactatgttgctctggctgatctcaaattctggcctcaagtgatcattctggcacaggcttttaaattgctacaattacaggaatgagccaccatgcctagtatagagtgttatattattttcaaagtcttattctgagagccatttattgactttggcctaaataactcaatatgatatctctgaaacttttttttgacatattatggggaatgataatgagggaaggtggttagacactttttactaagagataacttagtgccatctaaggaggaacaaaaatgaattatcagaaaaataaaagtaagatgaagtgcaaaagttctgtggcaaagatgatgatagcaaataatatatttttgtgactcatggtagctttaactttgttcttaaaattctgagtaattta

SEQ ID NO: 616771 - DNA, 616 bp, Homo sapiens
cataatttgtgtttttgtgagatatggtctttgtctgtcatccaggcagaagtgccggtgatgtggtcataattcactgcagcccctgaactctgggtacaagccatccctttttgcctcagtctccaaactagctgggtctasaggcatgagcccaccatgccaagctaatttaaaaaaaaaattttgtagacatgggggtctcactatgttgctctggctgatctcaaattctggcctcaagtgatcattctggcacaggcttttaaattgctacaattacaggaatgagccaccatgcctagtatagagtgttatattattttcaaagtcttattctgagagccatttattgactttggcctaaataactcaatatgatatctctgaaacttttttttgacatattatggggaatgataatgagggaaggtggttagacactttttactaagagataacttagtgccatctaaggaggaacaaaaatgaattatcagaaaaataaaagtaagatgaagtgcaaaagttctgtggcaaagatgatgatagcaaataatatatttttgtgactcatggtagctttaactttgttcttaaaattctgagtaattta

SEQ ID NO: 616772 - DNA, 610 bp, Homo sapiens
taaaatgcaattcaaattagcatgaaacatttgcagtctaaggaaaggcttatggcatcagaatccttatttacaggattcataatttgtgtttttgtgagatatggtctttgtctgtcatccaggcagaagtgccggtgatgtggtcataattcactgcagcccctgaactctgggtacaagccatccctttttgcctcagtctccaaactagctgggtctagaggcatgagcccaccatgccaagctaatttwaaaaaaaaattttgtagacatgggggtctcactatgttgctctggctgatctcaaattctggcctcaagtgatcattctggcacaggcttttaaattgctacaattacaggaatgagccaccatgcctagtatagagtgttatattattttcaaagtcttattctgagagccatttattgactttggcctaaataactcaatatgatatctctgaaacttttttttgacatattatggggaatgataatgagggaaggtggttagacactttttactaagagataacttagtgccatctaaggaggaacaaaaatgaattatcagaaaaataaaagtaagatgaagtgcaaaagt

SEQ ID NO: 616773 - DNA, 629 bp, Homo sapiens
ttcatttgaagagactgtccttcccccagtgtatgttcttggcacctttgtccaaaatcagttggctgtaaatatgtggatttatttctgggtgtgtattctatggcctttaccccaagaatcattacttcgtaaaatgcaattcaaattagcatgaaacatttgcagtctaaggaaaggcttatggcatcagaatccttatttacaggattcataatttgtgtttttgtgagatatggtctttgtctgtcatccaggcagaagtgccggtgatgtggtcataattcactgcagcccctgaactctgggtacaagccatccctttttgcctcagtctccaaactagctgggtctagaggcatgagcccaccatgccaagctaatttaaaaaaaawattttgtagacatgggggtctcactatgttgctctggctgatctcaaattctggcctcaagtgatcattctggcacaggcttttaaattgctacaattacaggaatgagccaccatgcctagtatagagtgttatattattttcaaagtcttattctgagagccatttattgactttggcctaaataactcaatatgatatctctgaaacttttttttgacatattatggggaa

SEQ ID NO: 616774 - DNA, 610 bp, Homo sapiens
caaattagcatgaaacatttgcagtctaaggaaaggcttatggcatcagaatccttatttacaggattcataatttgtgtttttgtgagatatggtctttgtctgtcatccaggcagaagtgccggtgatgtggtcataattcactgcagcccctgaactctgggtacaagccatccctttttgcctcagtctccaaactagctgggtctagaggcatgagcccaccatgccaagctaatttaaaaaaaaawttttgtagacatgggggtctcactatgttgctctggctgatctcaaattctggcctcaagtgatcattctggcacaggcttttaaattgctacaattacaggaatgagccaccatgcctagtatagagtgttatattattttcaaagtcttattctgagagccatttattgactttggcctaaataactcaatatgatatctctgaaacttttttttgacatattatggggaatgataatgagggaaggtggttagacactttttactaagagataacttagtgccatctaaggaggaacaaaaatgaattatcagaaaaataaaagtaagatgaagtgcaaaagttctgtggcaaag

SEQ ID NO: 616775 - DNA, 575 bp, Homo sapiens
ggaatgataatgagggaaggtggttagacactttttactaagagataacttagtgccatctaaggaggaacaaaaatgaattatcagaaaaataaaagtaagatgaagtgcaaaagttctgtggcaaagatgatgatagcaaataatatatttttgtgactcatggtagctttaactttgttcttaaaattctgagtaatttaagggttcacatttgaagaatccactgcattacrgataacattttattgcaagtaaatgcatttcaaaatttgctattggttttgtattagattattctcagcctacttcattatcaagctatattattttattcatgcagtttgatgatcttacggcagagaaggaagctttatcttcaaaatgtgtcaatttggctaaagacaatcaagttcttcaacaggagtttttatctatgaaaaaagtacaacagcaatgtgagaaacttgaggaggataaaaagatgttgaaagaagaaatattaaatcttaagacacatatggaaaacaatagggtagaacttactaaactacaagaatataaattggagctag

SEQ ID NO: 616776 - DNA, 587 bp, Homo sapiens
taggtccaaatgattctgcattttaatatttcattcagtacagggcacaaaactgaaattcaataagctatgagataaataattcggtatcagagaagcatataatgttcccttaaatattaaaatcctgataatgtgatttcattctaaaaatttaacaatgttcaatagcaatacattcaagggggaagatgccaagtacactgtcatgcaagagtaaaagaaggatatgagaaaaatgaccttaaaattrttcaaagacatgttttaagacaatcctacaacccagaactgaaaaaaagccatttcacttgaccaggttgacattacctacttagcacaaagaaacttttaaggtgttctggtttacatccacttgtaggaaaggctacccattgataatagcttacatttattaagcatgtatctccttgtttaatatctataactaccctgtaagataataaccattattatattatttcataggtgataaaactgaagcttagaggtgtcaagaaacttgaccacggtcattcagcttttgagataagagtggcaataccaatctattatcagttggtcat

SEQ ID NO: 616777 - DNA, 587 bp, Homo sapiens
taggtccaaatgattctgcattttaatatttcattcagtacagggcacaaaactgaaattcaataagctatgagataaataattcggtatcagagaagcatataatgttcccttaaatattaaaatcctgataatgtgatttcattctaaaaatttaacaatgttcaatagcaatacattcaagggggaagatgccaagtacactgtcatgcaagagtaaaagaaggatatgagaaaaatgaccttaaaattgttcaaagacatgttttaagacaatcctacaacccagaactgaaaaaaagccatttcacttgaccaggttgacattacctacttagcacaaagaaacttttaaggtgttctggtttacatccacttgtaggaaaggckacccattgataatagcttacatttattaagcatgtatctccttgtttaatatctataactaccctgtaagataataaccattattatattatttcataggtgataaaactgaagcttagaggtgtcaagaaacttgaccacggtcattcagcttttgagataagagtggcaataccaatctattatcagttggtcat

SEQ ID NO: 616778 - DNA, 587 bp, Homo sapiens
taggtccaaatgattctgcattttaatatttcattcagtacagggcacaaaactgaaattcaataagctatgagataaataattcggtatcagagaagcatataatgttcccttaaatattaaaatcctgataatgtgatttcattctaaaaatttaacaatgttcaatagcaatacattcaagggggaagatgccaagtacactgtcatgcaagagtaaaagaaggatatgagaaaaatgaccttaaaattgttcaaagacatgttttaagacaatcctacaacccagaactgaaaaaaagccatttcacttgaccaggttgacattacctacttagcacaaagaaacttttaaggtgttctggtttacatccacttgtaggaaaggctacccattgataatagcttacatttattaagcatgtatctccttgtttaatatctataactaccctgtaagataataaccattattatattatttcataggtgataaaactgaagcttagaggtgtcaagaaacttgaccacrgtcattcagcttttgagataagagtggcaataccaatctattatcagttggtcat

SEQ ID NO: 616779 - DNA, 623 bp, Homo sapiens
tctttaaataaagagcatccaaaatttatttcctggtcaatatagtttctctgrtttttattcatgaaaatgttttgatgtatagaatatgtgttcgatttcagagtatgtaaaccccgcccccctacatttatagcacacatttatgcttatacacaacacaagcataaaaccgaagttaccttgtcgcatcattactgtttcaatgtagttgggacaggaaggtttacgttaaacacaaaatgttcctcacatgtcacttgacttgaactgttcccatcagcaagaaaaattactgcaagaatgaaaggagttcacttttctctgtgactgttccaaagaagcggaagagcattttaagtttctccggtttccttgatgaatgtccctcaaacaacctaaaggacttaaaaaataagagaatggtagatgagttaaaatgccttaatgattcagaaaactacatccatattgctaccaagtaacaaaaagaaatgtttgttccagaagacaatttctgttatgataaagaactagaaaattggtttaaaattcaaattggcatctggagagaactgaaattcaactaaaaccagtccttctttcaagctgttcaaatcaga

SEQ ID NO: 616780 - DNA, 623 bp, Homo sapiens
tctttaaataaagagcatccaaaatttatttcctggtcaatatagtttctctggtttttattcatgaaaatgttttgatgtatagaatatgtgttcgatttcagagtatgtaaaccccgcccccctacatttatagcacacatttatgcttatacacaacacaagcataaaaccgaagttaccttgtygcatcattactgtttcaatgtagttgggacaggaaggtttacgttaaacacaaaatgttcctcacatgtcacttgacttgaactgttcccatcagcaagaaaaattactgcaagaatgaaaggagttcacttttctctgtgactgttccaaagaagcggaagagcattttaagtttctccggtttccttgatgaatgtccctcaaacaacctaaaggacttaaaaaataagagaatggtagatgagttaaaatgccttaatgattcagaaaactacatccatattgctaccaagtaacaaaaagaaatgtttgttccagaagacaatttctgttatgataaagaactagaaaattggtttaaaattcaaattggcatctggagagaactgaaattcaactaaaaccagtccttctttcaagctgttcaaatcaga

SEQ ID NO: 616781 - DNA, 623 bp, Homo sapiens
tctttaaataaagagcatccaaaatttatttcctggtcaatatagtttctctggtttttattcatgaaaatgttttgatgtatagaatatgtgttcgatttcagagtatgtaaaccccgcccccctacatttatagcacacatttatgcttatacacaacacaagcataaaaccgaagttaccttgtcgcatcattactgtttcaatgtagttgggayaggaaggtttacgttaaacacaaaatgttcctcacatgtcacttgacttgaactgttcccatcagcaagaaaaattactgcaagaatgaaaggagttcacttttctctgtgactgttccaaagaagcggaagagcattttaagtttctccggtttccttgatgaatgtccctcaaacaacctaaaggacttaaaaaataagagaatggtagatgagttaaaatgccttaatgattcagaaaactacatccatattgctaccaagtaacaaaaagaaatgtttgttccagaagacaatttctgttatgataaagaactagaaaattggtttaaaattcaaattggcatctggagagaactgaaattcaactaaaaccagtccttctttcaagctgttcaaatcaga

SEQ ID NO: 616782 - DNA, 623 bp, Homo sapiens
tctttaaataaagagcatccaaaatttatttcctggtcaatatagtttctctggtttttattcatgaaaatgttttgatgtatagaatatgtgttcgatttcagagtatgtaaaccccgcccccctacatttatagcacacatttatgcttatacacaacacaagcataaaaccgaagttaccttgtcgcatcattactgtttcaatgtagttgggacaggaaggtttacgttaaacacaaaatgttcctcacatgtcacttgacttgaactgttcccatcagcaagaaaaattactgcaagaatgaaaggagttcacttttctctgtgactgttccaaagaagcggaagagcattttaagtttctccggtttccttgatsaatgtccctcaaacaacctaaaggacttaaaaaataagagaatggtagatgagttaaaatgccttaatgattcagaaaactacatccatattgctaccaagtaacaaaaagaaatgtttgttccagaagacaatttctgttatgataaagaactagaaaattggtttaaaattcaaattggcatctggagagaactgaaattcaactaaaaccagtccttctttcaagctgttcaaatcaga

SEQ ID NO: 616783 - DNA, 479 bp, Homo sapiens
tgcccaggccccaggtggatataaggcctcaggcaaacaccaggccccaggtagacattagacacgagatggacactcaagccacaagygaacatctgtccccaggtggacatccacccaaggtggacatcaggccagagatgtacacccaggccccaggagaaccccaggccccaggaggacactcaagtgccagaaggacacccagtccctaggtaactacaaggccccaagtggacatgatgttccagatggatatgatgccccaagtggatactaggcccaggtggacccagatctcaggggcacaccaggccccaggggaacaccaggccctaggtaagcatgcagtcccaggtggacatcagttgccaggaggacaccaggacccagttgctcatcaagccacagctgaacaccagttcccatgaacaccagtccttaggtgggcacctagttctcttgtgtgcatcaggtgc

SEQ ID NO: 616784 - DNA, 576 bp, Homo sapiens
gaaagccctcatcaggaaccgaagcagcagcaccttgatctacagcttctagcctccagaaccgtgagaaaattaagccacccagttctatggtattttattatggcagcccaagctgactaatagagatcctttgcacggtaaccaaaacartgcctaccctgtgtcatctagttttcagcaacccggacttggattacttaattcagtttcctttgaaatgatgtggcattgttattggtaacatgtaattcagtttattctgaggaaagaaaaacagggctttaaaagcattatgacctgagtaagtagttcactaaaagatttgtaacacaaaagcatgcttttgagtatgagatctagctttccaaaggcatttaaaaattatagagactcagtggctatgaatgatgaagtactcttcatctgcctctagccatgtgctctgactttaaaaccagagacccttcaagtaaggtccacgttagtaagtgctgaaatgggtaattatttttcatgattacaacagcaagcttatgtaactacgctgagagggaaaagttaattccatgagaa

SEQ ID NO: 616785 - DNA, 576 bp, Homo sapiens
gaaagccctcatcaggaaccgaagcagcagcaccttgatctacagcttctagcctccagaaccgtgagaaaattaagccacccagttctatggtattttattatggcagcccaagctgactaatagagatcctttgcacggtaaccaaaacagtgcctaccctgtgtcatctagttttcagcaacccggacttggattacttaattcagtttcctttgaaatgatgtggcattgttattggtaacatgtaattcagtttattctgaggaaagaaaaacagggctttaaaagcattatgacctgagtaagtagttcactaaaagatttgtaacacaaaagcatgcttttgagyatgagatctagctttccaaaggcatttaaaaattatagagactcagtggctatgaatgatgaagtactcttcatctgcctctagccatgtgctctgactttaaaaccagagacccttcaagtaaggtccacgttagtaagtgctgaaatgggtaattatttttcatgattacaacagcaagcttatgtaactacgctgagagggaaaagttaattccatgagaa

SEQ ID NO: 616786 - DNA, 576 bp, Homo sapiens
gaaagccctcatcaggaaccgaagcagcagcaccttgatctacagcttctagcctccagaaccgtgagaaaattaagccacccagttctatggtattttattatggcagcccaagctgactaatagagatcctttgcacggtaaccaaaacagtgcctaccctgtgtcatctagttttcagcaacccggacttggattacttaattcagtttcctttgaaatgatgtggcattgttattggtaacatgtaattcagtttattctgaggaaagaaaaacagggctttaaaagcattatgacctgagtaagtagttcactaaaagatttgtaacacaaaagcatgcttttgagtatgagatctagctttccaaaggcatttaaaaattatagagactcagtggctatgaatgatgargtactcttcatctgcctctagccatgtgctctgactttaaaaccagagacccttcaagtaaggtccacgttagtaagtgctgaaatgggtaattatttttcatgattacaacagcaagcttatgtaactacgctgagagggaaaagttaattccatgagaa

SEQ ID NO: 616787 - DNA, 576 bp, Homo sapiens
gaaagccctcatcaggaaccgaagcagcagcaccttgatctacagcttctagcctccagaaccgtgagaaaattaagccacccagttctatggtattttattatggcagcccaagctgactaatagagatcctttgcacggtaaccaaaacagtgcctaccctgtgtcatctagttttcagcaacccggacttggattacttaattcagtttcctttgaaatgatgtggcattgttattggtaacatgtaattcagtttattctgaggaaagaaaaacagggctttaaaagcattatgacctgagtaagtagttcactaaaagatttgtaacacaaaagcatgcttttgagtatgagatctagctttccaaaggcatttaaaaattatagagactcagtggctatgaatgatgaagtactcttcatctgcctctagccatgtgctctgactttaaaaccagagacccttcaagtaaggtccacgwtagtaagtgctgaaatgggtaattatttttcatgattacaacagcaagcttatgtaactacgctgagagggaaaagttaattccatgagaa

SEQ ID NO: 616788 - DNA, 579 bp, Homo sapiens
tatacttgtatatatatttgtatgtatgtatgtatacgtggcactgaagaaagagttagacaatcagaagatcaatctaagacattatctagaattcaggtatacaactagacaaaaatgttaaacggaaatcaggatacagagagaaaaattagaacacgcagcatgcatatactagtttcaggagtaataaatagtattcattaagagcaagatacaaaatgtcccacagagctgcatatcctcctaacatgaccccacactttccctgctgtaacactgccttataggacaagtgaaagaatctctytgtgattccacagagctgtttgtgatcccaaagattcatcttcccttggtataccctcgtgtgctccatcctaagcagaatttcaggtggaacacaagactctgggtgccacacagctatttcacccttgacagccctcagagatcaatgtgcccctgaatttaatcaagatggcaagaatgccatgtatttggcagaatgtatgggtattgatttggctacataagaagatatctgaatacaaaggctctataaaatatgcttgcgtg

SEQ ID NO: 616789 - DNA, 579 bp, Homo sapiens
tatacttgtatatatatttgtatgtatgtatgtatacgtggcactgaagaaagagttagacaatcagaagatcaatctaagacattatctagaattcaggtatacaactagacaaaaatgttaaacggaaatcaggatacagagagaaaaattagaacacgcagcatgcatatactagtttcaggagtaataaatagtattcattaagagcaagatacaaaatgtcccacagagctgcatatcctcctaacatgaccccacactttccctgctgtaacactgccttataggacaagtgaaagaatctctctgtgattccacagagctgtttgtgatcccaaagattcatcttcccttggtataccctcgtgtgctccatcctaagcagaatttcaggtggaacacaagactctgggtgccacacagcyatttcacccttgacagccctcagagatcaatgtgcccctgaatttaatcaagatggcaagaatgccatgtatttggcagaatgtatgggtattgatttggctacataagaagatatctgaatacaaaggctctataaaatatgcttgcgtg

SEQ ID NO: 616790 - DNA, 493 bp, Homo sapiens
tgtctttgtgtggattttggaaaattctccttattctgtatctccctgtgtatcacaagcctctgtgactttcactttgttgtttttcctccttgtcgcgtaaaaggcattcactgctcttttattttggtgctctgtggatgttcgaagggtggggaaaaagtggtccacgaatstgattggtttcatgagagacacgagagacaaaagaacatatgatgattacttcgctaaatgccctgtttattctttcaactgcactcatacaagtaaggacgcagttggtgggttgagagatctctgtgtagtcatgactctgcaattatacttgacgagagcggtgatgatgaacgggcggcatggaaacctgcccttctttggtgtcagttgagcacagtgagaagagattcacaatggcctgtatctcaacctgatggtactgtgtttctgctctgatctttaggaatgagagaagcattcccgtgcattcctg

SEQ ID NO: 616791 - DNA, 238 bp, Homo sapiens
tacggcagcgccgcggagcctcggttggcctcggatagccggtcccccgcctgtccccgccggcgggccgcccccccctccacgcgccccgcgcgcgcgggagggcgcgtgccccsccgcgcgccgggaccggggtccggtgcggagtgcccttcgtcctgggaaacggggcgcggctggaaaggcggccgccccctcgcccgtcacgcaccgcacgttcgtggggaacctggcgcta

SEQ ID NO: 616792 - DNA, 323 bp, Homo sapiens
acctccggggtcgaccagctgccgcccgcgagctccggacttagccggcgcctgcacgtgtcccgggtcgaccagcaggcggccgccggacgctgcggcgcaccgacgcgagggcgycgattcccgttcgcgcgcccgcgacctccaccggcctcggcccgcggtggagctgggaccacgcggaactccctctctcacatttttttcagccccaccgcgagtttgcgtccgcgggacttttaagagggagtcactgctgccgtcagccagtaatgcttcctccttttttgcttttaggttttgtcttgccttttttttttttt

SEQ ID NO: 616793 - DNA, 323 bp, Homo sapiens
acctccggggtcgaccagctgccgcccgcgagctccggacttagccggcgcctgcacgtgtcccgggtcgaccagcaggcggccgccggacgctgcggcgcaccgacgcgagggcgtygattcccgttcgcgcgcccgcgacctccaccggcctcggcccgcggtggagctgggaccacgcggaactccctctctcacatttttttcagccccaccgcgagtttgcgtccgcgggacttttaagagggagtcactgctgccgtcagccagtaatgcttcctccttttttgcttttaggttttgtcttgccttttttttttttt

SEQ ID NO: 616794 - DNA, 323 bp, Homo sapiens
acctccggggtcgaccagctgccgcccgcgagctccggacttagccggcgcctgcacgtgtcccgggtcgaccagcaggcggccgccggacgctgcggcgcaccgacgcgagggcgtcgattcccgttcrcgcgcccgcgacctccaccggcctcggcccgcggtggagctgggaccacgcggaactccctctctcacatttttttcagccccaccgcgagtttgcgtccgcgggacttttaagagggagtcactgctgccgtcagccagtaatgcttcctccttttttgcttttaggttttgtcttgccttttttttttttt

SEQ ID NO: 616795 - DNA, 323 bp, Homo sapiens
acctccggggtcgaccagctgccgcccgcgagctccggacttagccggcgcctgcacgtgtcccgggtcgaccagcaggcggccgccggacgctgcggcgcaccgacgcgagggcgtcgattcccgttcgcgcgcccgcgacctccaccggcctcggcccgcsgtggagctgggaccacgcggaactccctctctcacatttttttcagccccaccgcgagtttgcgtccgcgggacttttaagagggagtcactgctgccgtcagccagtaatgcttcctccttttttgcttttaggttttgtcttgccttttttttttttt

SEQ ID NO: 616796 - DNA, 539 bp, Homo sapiens
gggggccatcgctggaaaccrttaagagaccataactcccagcatccctggccagggacgcgcctctctatccttccctccagcgttacacaccgccccaatcccggtgcatgctggcattgtagttcggtagccttgcgatcaacgtgctggaaactgtttaaggactatgactcccaggacgccttgcgagggacccaccctgttgacccttcctccagggctgggaacctcccttaagcccagcgcatgctgggatcatagtccgactgccgcgacagaaaggctgggagtggatctgagactacagttccaacactacggggaaaatttcatcttctctgagactacagttccaacactgaggggataatttcatcttctcctccgcccctccatgtttccagtgcaattccgccctgctgaggggagcctatctgttcccaaacttctgcgtgcgaggagacagcgtggccagggcaggtggtctcacttgtaattgtggcacagtctccccacgtgccagttgtacgactatt

SEQ ID NO: 616797 - DNA, 361 bp, Homo sapiens
ctctctctctctctctctgtctttgtctttctttactatctctgtctctctctctctctstgtgtgtctgtcttctgtcttactgtctttctctgcctgtctgtctgtctgtctctctctgtctgtctctctctctctctcccccctgtcggctgtttctctgtctctgtctgtgtctctctttctgtctgtttctctctgtctgtctttctctctctgtctctttctctctgtctctctgtctgtctctgtctctctctctgtctctctctctctgtgggggtgtgtgtgtgtgtgtgtatgtgtgtgtgtgtgtgtgtgtgtgtgtctgccttctgtcttactctctttctctgcctgt

SEQ ID NO: 616798 - DNA, 361 bp, Homo sapiens
ctctctctctctctctctgtctttgtctttctttactatctctgtctctctctctctctctgtgtgtctgtcttctgtcttactgtctttctctgcctgtctgtctgtctgtctctctctgtctgtctctctctctctctcccccctgtcggctgtttctctgtctctgtctgtgtctctctttctgtctgtttctctctgtctgtctttctctctctgtctctttctctctgtctctctgtctgtctctgtctctctctctgtctctctctctctgtgggggtgtgtgtgtgtgtgtgtrtgtgtgtgtgtgtgtgtgtgtgtgtgtctgccttctgtcttactctctttctctgcctgt

SEQ ID NO: 616799 - DNA, 405 bp, Homo sapiens
tgggatgacaggcgtgagccaccgcgcccagcctctctctctctctctctctctctctcgctcgcttgcttgctttcgtgctttcttgctttgcccgttttcattgctttctttctttctttcgtttctttcwtgcttgctttcttgcttgcttgcttgctttcgtgctttcttgctttcctgttttctttctttctttctttcttttgttttgtttcttgcttgcttgcttgcttgcttgcttgcttgctttcgtgctttcttgctttcctgttttctttctttctttctttcttttctttctttcttgcttgctttcctgcttgcttgctttcgtgctttcttgttttctcgatttctttctttcttttgtttctttcctgcttgctttcttgcttgcttgct

SEQ ID NO: 616800 - DNA, 575 bp, Homo sapiens
ttcactcttgtttccacggctagagtgcaatggcgcgatcttggctcaccgcaccttccgcctcccgggttcgagcgcttctcctgcctcagcctcccgattagcggggatgacagggaggcacccccacgcctggcttggctgatgtttgtgtttttagtaggcacgccgtgtctctccatgttgctcaggctggtctccaactcccgacctcctgtgatgcgcccacctcggcctctcgaagtgctgggatgacgggcgtgagccaccgtgcccggcctgttgactcatttcgcttttttatttctttcgtttccacgcgtttacttatatgtattaatgtaaacgtttctgtacgcttatatgcaaacaacgacaacgtgtatctctgcgttgaatactcttgcgtatggtaaatacgtatcggttgtatggaaatagacttctgtatgatagatgtaggtgtytgtgttatacaaataaatacacatcgctctataaagaagggatcgtcgataaagacgtttattttacgtgtgaaaagcgtctatttatgtgtgtaaatgaacgagcgt

SEQ ID NO: 616801 - DNA, 531 bp, Homo sapiens
tttaaactttttgtacttttttttttccagactggataatttctattgctgtgtcttctgttttaaatctatggctaaactcaaaagatttttttcatttccttatctataatttttttatatatatgttcatttctctgctgaagttccacatctgtttgtttatgaatagaatattttcttttttccccatgaacatattcataaaaactgccttcaaattcttgtctgctgattgcaacatcctgggatagcttctactgcctgcttttgatattgtgtatggatgacattttcacgtttctttacaagtcttatgaattttaaaattgtgcactasaaactataaatgataattatagaatagaaactctggattttgctgttttaccttgaagacttttgttttataaacagggttcattgggctagtgtcaaaccaatgcttatgtccgctacagtgggtatagctgaaatcttcattcagttgttaaacacacatatcatatatgtattatgcataggcgtttt

SEQ ID NO: 616802 - DNA, 226 bp, Homo sapiens
gcgggccgggagaagacgagagaccacgggcgaggccggggcgacggggaaggcgcgagaaaggcggccggcggggaaggggacgccacggggacccctcgagcgcggccgaccgcrgccgggacacacgcgcggggcctcaccgccgccggcggcaccgcgcggcacccggggcggccgaccggccctcggcgatccccgcggctccccccaccaccgccgccgc

SEQ ID NO: 616803 - DNA, 618 bp, Homo sapiens
cattttcacgtttctttacaagtcttatgaattttaaaattgtgcactagaaactataaatgataattatagaatagaaactctggattttgytgttttaccttgaagacttttgttttataaacagggttcattgggctagtgtcaaaccaatgcttatgtccgctacagtgggtatagctgaaatcttcattcagttgttaaacacacatatcatatatgtattatgcataggcgtttttctataataatatattttattcaagtttcatcattgttatttgtgagagttcaacaagctagtccacacttagtggaagtcagaacctcagttttatttgattgtagcattttatataaacaaaattatatagtatgtatacttgtacatctgttttctttatttccttttctgttttctttctttctttccttttctgtcttctttctttctctctttctttccttctttctttctctcttcttttttctttctttcttttccccaggttggtgtgcagtggcatgatctcactgcaacctctgcctaccaggcttaagatatccttccacttcagccttttgagtcactgggaccgcagccttgcaccaccatgc

SEQ ID NO: 616804 - DNA, 618 bp, Homo sapiens
cattttcacgtttctttacaagtcttatgaattttaaaattgtgcactagaaactataaatgataattatagaatagaaactctggattttgctgttttaccttgaagacttttgttttataaacagggttcattgggctagtgtcaaaccaatgcttrtgtccgctacagtgggtatagctgaaatcttcattcagttgttaaacacacatatcatatatgtattatgcataggcgtttttctataataatatattttattcaagtttcatcattgttatttgtgagagttcaacaagctagtccacacttagtggaagtcagaacctcagttttatttgattgtagcattttatataaacaaaattatatagtatgtatacttgtacatctgttttctttatttccttttctgttttctttctttctttccttttctgtcttctttctttctctctttctttccttctttctttctctcttcttttttctttctttcttttccccaggttggtgtgcagtggcatgatctcactgcaacctctgcctaccaggcttaagatatccttccacttcagccttttgagtcactgggaccgcagccttgcaccaccatgc

SEQ ID NO: 616805 - DNA, 638 bp, Homo sapiens
atggagagacacggcgtgcctactaaaaacacaaacatcagccaagccaggcgtgggggtgcctccctgtcatccccgctaatcgggaggctgaggcaggagaagcgctcgaacccgggaggcggaaggtgcggtgagccaagaycgcgccattgcactctagccgtggaaacaagagtgaaactctgtctcaaaaggacgaaacagaaagaaagaaagaaaggaaggaaggaaggaaggaaggaaggaagaaagaaagaaaagaaagaaggaatgaatgaaagaaaagaaagcaagaaagaaagaaagaaagaaaaagaaaagaaagaaagaaaagaaagcaagaaagcacgaaagcaagcaagcaagaaagcaagaaaacaaggaagcaagaaagcaagcaagaaagaaacaaaagaaagaaagcaagaaaacaagaaagcacgaaagcaagcaagcaagaaagcaagaaaacaaggaagcaagaaagaaagaaacaaaagaaagaaagaaaacaagaaagcaagaaagcacgaaagcaatcaagcaagaaagcaagcaggaaagaaacaaaagaaagaaagaaagcgagaaaacaagaaagcacgaaagcaagcaagcaagaaagcaagcaagaa

SEQ ID NO: 616806 - DNA, 670 bp, Homo sapiens
aaatcttcattcagttgttaaacacacatatcatatatgtattatgcataggcgtttttctataataatatattttattcaagtttcatcattgttatttgtgagagttcaacaagctagtccacacttagtggaagtcagaacctcagttttatttgattgtagcattttatataaacaaaattatatagtatgtatacttgtacatctgttttctttatttccttttctgttttctttctttctttccttttctgtcttctttctttctctctttctttccttctttctttctctcttcttttttctttctttcttttccccaggttggtgtgcagtggcatgatctcactgcaacctctgcctaccaggcttaagatatccttccacttcagccttttgagtcactgggaccgcagccttgcaccaccatgcccggctaattgttttgtatttttggtagagacagggtttcacyatgttgcccaaactggcatgtctgctttcttttatgcaacattacatttgtgatattcacccaccagttgcaaatagctatagtctgttcattttagaaagtagtttttaccttttagtaaaatataaaaatacatgaaattaaccattttattattttttttgtgtgcagtttaaagaaattaaatacatt

SEQ ID NO: 616807 - DNA, 541 bp, Homo sapiens
ccccgccgcaaaccagcaacacgacacgcgcacaccaacgacacgcccttctttctctttttctctctctctctctctctctctcccccgtctccctcccgagttctccggctctcgcggccggcggggccgggcggcgaacgaacgagcgagcgaacgaacgggcacgcgggccccgcccgcgcacgygccgcgtcgcggtgggggggtgggtgtgcggagggaagcgcgcggcggcggcgccgccgcgggcctcgccctccgggctccgttaatgatccttccgcaggttcacctacggaaaccttgttacgacttttacttcctctagatagtcaagttcgaccgtcttctcagcgctccgccagggccgtgggccgacccacggcggggccgatccgagggcctcactaaaccatccaatcggtagtagcgacgggcggtgtgtacaaagggcagggacttaatcaacgcaagcttatgacccgcacttactgggaattcctcgttcatggggaataattgcaatccccgatcccca

SEQ ID NO: 616808 - DNA, 600 bp, Homo sapiens
gacctctcctcatctgtgcatggacasgtggctgactctggagcccaggctgttgcttcccagtctggtaatgaatcctccatagtctggtgcgtgtaaatatacatatacatatatgtatatttatatacatgtatatgtatataaatatacatatatatattttctttctgtccttcccattgcaatttgcttattatattatttgcttatcaagtctgtattgccatacacttgggataaaggctatttatccttaaaactattgtgggtgccttttcttttcccctcgttcatttcccgcaccggagcccaggtgatggaatctcgaagtgacctcacttccttagttacaaactcaaagaaagtttagaactctggtaacctggagccctaattctagagacagctttgtatttactaaggagactctgaagacagcaagatgttctcctgctatgtcttgaatttctgaggctctcatctcaggaaggcttgaacagagagacttttttttatgatggagacagtgctcattctgcactgctggctcttctggccatttggaaagggttacccatagataacacaaggccaccc

SEQ ID NO: 616809 - DNA, 600 bp, Homo sapiens
gacctctcctcatctgtgcatggacacgtggctgactctggagcccaggctgttgcttcccagtctggtaatgaatcctccatagtctggtgcgtgtaaatatacatatacatatatgtatatttatatacatgtatatgtatataaatatacatatatatwttttctttctgtccttcccattgcaatttgcttattatattatttgcttatcaagtctgtattgccatacacttgggataaaggctatttatccttaaaactattgtgggtgccttttcttttcccctcgttcatttcccgcaccggagcccaggtgatggaatctcgaagtgacctcacttccttagttacaaactcaaagaaagtttagaactctggtaacctggagccctaattctagagacagctttgtatttactaaggagactctgaagacagcaagatgttctcctgctatgtcttgaatttctgaggctctcatctcaggaaggcttgaacagagagacttttttttatgatggagacagtgctcattctgcactgctggctcttctggccatttggaaagggttacccatagataacacaaggccaccc

SEQ ID NO: 616810 - DNA, 600 bp, Homo sapiens
gacctctcctcatctgtgcatggacacgtggctgactctggagcccaggctgttgcttcccagtctggtaatgaatcctccatagtctggtgcgtgtaaatatacatatacatatatgtatatttatatacatgtatatgtatataaatatacatatatatattttctttctgtccttcccattgcaatttgcttattatattatttgcttatcawgtctgtattgccatacacttgggataaaggctatttatccttaaaactattgtgggtgccttttcttttcccctcgttcatttcccgcaccggagcccaggtgatggaatctcgaagtgacctcacttccttagttacaaactcaaagaaagtttagaactctggtaacctggagccctaattctagagacagctttgtatttactaaggagactctgaagacagcaagatgttctcctgctatgtcttgaatttctgaggctctcatctcaggaaggcttgaacagagagacttttttttatgatggagacagtgctcattctgcactgctggctcttctggccatttggaaagggttacccatagataacacaaggccaccc

SEQ ID NO: 616811 - DNA, 600 bp, Homo sapiens
gacctctcctcatctgtgcatggacacgtggctgactctggagcccaggctgttgcttcccagtctggtaatgaatcctccatagtctggtgcgtgtaaatatacatatacatatatgtatatttatatacatgtatatgtatataaatatacatatatatattttctttctgtccttcccattgcaatttgcttattatattatttgcttatcaagtctgtattgccatacacttgggataaasgctatttatccttaaaactattgtgggtgccttttcttttcccctcgttcatttcccgcaccggagcccaggtgatggaatctcgaagtgacctcacttccttagttacaaactcaaagaaagtttagaactctggtaacctggagccctaattctagagacagctttgtatttactaaggagactctgaagacagcaagatgttctcctgctatgtcttgaatttctgaggctctcatctcaggaaggcttgaacagagagacttttttttatgatggagacagtgctcattctgcactgctggctcttctggccatttggaaagggttacccatagataacacaaggccaccc

SEQ ID NO: 616812 - DNA, 556 bp, Homo sapiens
ttgactgtattcatggattaattattctctacctccacattaaatttgatatcagaggcctaaaacctttttcaccataaacacccatgtcctccacatgcccaagtctctgaaggatggagatttcctcatccaagctccacattccaagcctctggtgtttcatggtcttgccatgaaaagtyttgtcccctccccaagaggaaatgagtctattcttaacctagaggtgtgaatgatgccaatgcgccaaaccaggcacaacggagaagctgacgaagtccctgacagcagccttccagggtcaaactctcttctttttatcatttttctcaagttttaccaggacttcctcaccactctgtagttcctggaccagctgtctagtagttgagcatatgtcttctccaaggcacagtggtgactctgccagctactaactgtgtcttagcataccagtgcatctttatcagcctcaatttgcatctttatagagaattgtaaaatgaacctctgttctgtacgagagacatgcaaggggagaagaaaacacacc

SEQ ID NO: 616813 - DNA, 515 bp, Homo sapiens
tatgtttcactggtttcttttagatgtaatagcttttttgactcaggcaatacatgcaagtatgaagtataaaaattatagtctcaatccttaagctgagtaaaaacttggctatttattgattttaacaaagctacattatcccacataatacrtaaaactttcacaaagctacattatcccacataacaggcataccagctgcctatatctggaaacatggattgttacaaattagaagtaaataacttgataggcccaatttaacaaatgaagctcaagaagtgggagatatgagacctataatgaaagattaaattattttaaaaatcttaccacaaagaaaaatcagagtcaaatactttaactgttaaattatacaaaatatttcataaaaataccaatcctttacaaatacacaccatacatagataagagataaacaacccctaactactttatgaggccaatattactataccaaagccagacaaacccatcatgtgttaggatta

SEQ ID NO: 616814 - DNA, 515 bp, Homo sapiens
tatgtttcactggtttcttttagatgtaatagcttttttgactcaggcaatacatgcaagtatgaagtataaaaattatagtctcaatccttaagctgagtaaaaacttggctatttattgattttaacaaagctacattatcccacataatacgtaaaactttcacaaagctacattatcccacataacaggcataccagctgcctatatctggaaacatggattgttacaaattagaagtaaataacttgataggcccaatttaacaaatgaagctcaagaagtggragatatgagacctataatgaaagattaaattattttaaaaatcttaccacaaagaaaaatcagagtcaaatactttaactgttaaattatacaaaatatttcataaaaataccaatcctttacaaatacacaccatacatagataagagataaacaacccctaactactttatgaggccaatattactataccaaagccagacaaacccatcatgtgttaggatta

SEQ ID NO: 616815 - DNA, 641 bp, Homo sapiens
cagttcttagtttctttctgtctttggtcagggcactctctctattctctgtcacacaagcctgtaaaaatgaaagcttaaaacactgaagctcgcttctccagagcaaagtatgcgacagacagagagaaagacaggaaaaaaggaagtaaacaatatcacaagagagagaaagtaagaagcaagtgacaatcttttcataatcaaatattggcagtgacattccctattttccaatgtattctactgccatgaagtgagtcactaaccacttactgtttacatttgggtgtgtatagttggaaataaaaattattatgagccatcatgaaggctgtgcactacgtatgccaaggtgagacaaatgggcctgattctaaatataacgagaaggtactacaatgtgtgttgttgttattgttgttgttctggccaaagaataacaacatctaaattttattcaatttcaatgttttcatggtggagtttgaaaaataaattcaagaggggacatgactttctcaagattcaagttataaaacccaggcatgtttgagagatattcaagcaatgtcccatcccttgtagtttctttctctaagtttaygcagtagctgtgtttaatatcaaacccaacagtc

SEQ ID NO: 616816 - DNA, 546 bp, Homo sapiens
gaatcaccttgctgaggtcaccgtctgaattttcactgcctgtttcatcacaactccccttcagtttgcccatgasatccatgaggaggcaatgagcttgagagtaacgtttcagtataaaattgctttctcttaaaaacctgatgtcatagtattggcttctagcacttcaagaagtgagctccttttactcaataacaatgttatctatatcttagagacagtcaacaggagataatctcttctgggaccaaagaaggtgactaataaaccatttaatcaacacattacctaaccaaaagctgtggaccctgatgaggaaaataagttaaaatgagactattggctcattttaatagatatggtgataaaagcaaaaaaaaaaaaaaaaaaagagagaatttaagcggtctcaaatacctaaaagatgacatggattagcttcaagtaacacataatgtggctggagtcagctgatctttatgctgaaagtgtcaacagtagtgacaaatacttcaagtaacgggtcaaaagtctaagacagtc

SEQ ID NO: 616817 - DNA, 546 bp, Homo sapiens
gaatcaccttgctgaggtcaccgtctgaattttcactgcctgtttcatcacaactccccttcagtttgcccatgacatccatgaggaggcaatgagcttgagagtaacgtttcagtataaaattgctttctcttaaaaacctgatgtcatagtattggcttctagcacttcaagaagtgagctccttttactcaataacaatgttatctatatcttagagacagtcaacaggagataatctcttctgggaccaaagaaggtgactaataaaccatttaatcaacacattacctaaccaaaagctgtggaccctgatgaggaaaataagttaaaatgagactattggctcattttaatagatatggtgataaaagcaaaaaaaaaaaaaaaaaaagagagaatttaagcggtctcaaatacctaaaagatgacatggattagcttcaagtaacacataatgtggctggagtcagctgatctttatgctgaaagtgtcaacagtartgacaaatacttcaagtaacgggtcaaaagtctaagacagtc

SEQ ID NO: 616818 - DNA, 593 bp, Homo sapiens
cttacattcccaccaacagcatatgagggttcccttttctcggcatgcttgtcagcatttgttattgccttttagctaaaacccactttaactggggtgmggtaatagctcattgtaattttgatttgcatttctctgatgattcatgatgttgatcatcttttcatatacctatttgccatttgcgtgtctttattggagtaatgtctgtttacatattttgcctattttttaaaataggattattagattttattttctatagagttatttgagcgccttctatgttttggttacaaatccattttcagataggtagtttgaaaatattttctttcattctgtgggttgttttctgactttgttgattcttttctgtgccatgcaaaattttataacttggtgtgataccaattttccattttgctttggttgcctgtgcttgtgaggtgttactcaagaaatctttgcttaatccaaggttttttagaatttccccaatgttttctttcagaagtttcatagtttgcagttttacatttaaatatttaatccattttgatttagtttttgcacatggcaaaagatagagg

SEQ ID NO: 616819 - DNA, 593 bp, Homo sapiens
cttacattcccaccaacagcatatgagggttcccttttctcggcatgcttgtcagcatttgttattgccttttagctaaaacccactttaactggggtgaggtaatagctcattgtaattttgatttgcatttctctgatgattcatgatgttgatcatcttttcatatacctatttgccatttgcgtgtctttattggagtaatgtctgtttacatattttgcctattttttaaaataggattattagattttattttctatagagttatttgagcgccttctatgttttggttacaaatccattttcagataggtagtttgaaaatattttctttcattctgtgggttgttttctsactttgttgattcttttctgtgccatgcaaaattttataacttggtgtgataccaattttccattttgctttggttgcctgtgcttgtgaggtgttactcaagaaatctttgcttaatccaaggttttttagaatttccccaatgttttctttcagaagtttcatagtttgcagttttacatttaaatatttaatccattttgatttagtttttgcacatggcaaaagatagagg

SEQ ID NO: 616820 - DNA, 593 bp, Homo sapiens
cttacattcccaccaacagcatatgagggttcccttttctcggcatgcttgtcagcatttgttattgccttttagctaaaacccactttaactggggtgaggtaatagctcattgtaattttgatttgcatttctctgatgattcatgatgttgatcatcttttcatatacctatttgccatttgcgtgtctttattggagtaatgtctgtttacatattttgcctattttttaaaataggattattagattttattttctatagagttatttgagcgccttctatgttttggttacaaatccattttcagataggtagtttgaaaatattttctttcattctgtgggttgttttctgactttgttgattcttttctgtgccatgcaaaattttataacttggtgtgataccaattttccattttgctttggttgcctgtgcttgtgaggtgttactcaagaaatctttgcttaatccaaggttttttagaatttccccaatgttttctttcagaagtttyatagtttgcagttttacatttaaatatttaatccattttgatttagtttttgcacatggcaaaagatagagg

SEQ ID NO: 616821 - DNA, 509 bp, Homo sapiens
cctggagtacactcctaccaacagcagtgccagggcagaatgcatatgcacatgtgcactgacaggacagggaaagcaagatccttccatgcacacacacacacacacacacacacaccagcatagtgatgtgtggggtggcaatgggccttggggggaagctgcagtgaggagaggcagcaggcaggctgatgcctggatggggtcaccccactggagctgtctactagtcagacatgatctgccagttcaggatctatgatgcaggcccccagggtactcaaggctgcactgcaagcatgcagggccgaattggggtcgcaggagaggccagcacaccaacgcaagctcaggtcaaaacagccccatctgatgggccaccaccctgcagactttttstccaaaatttcccctagggctaacgtctcttatgggagcaagttaagcttattggtgtgggcatccctggacatgcttcactacacatgttcccacaataaaccctcttg

SEQ ID NO: 616822 - DNA, 601 bp, Homo sapiens
catgtccttgtcttacaatctggtttttaggattatgaacatacgtggcatggcagtcatcaaagaagaaataggccctttttagaagggtgggatttctttggtttgagctataagctttccttctgtttctccctctgatttaatatktacctcaaaatagaattaatagggtaagagcccaggctcataacatacatatagctgattatttcctcagtcacagactgaataggtggtctggttgtatgtgcatattcctaatttgcttcctgtacattcatagtaggtatggtacagtagagttttaactgtggtattttttatccaggtaatgtgtacacagcgtggacatccttcaagagatttatcccctttcagtataagcataaatggtaacaacattgttgtatgtaatagaaacatgcttacactacacatgggcacaaaaactttcctctgggcatagacatttgcagcatttgcagtaataacataacaatggaacaatcagtattgacagaattgtaactatggttataaattgtattcacatttacttatctggacatggtcctcttagcttcggctgtgtgtacac

SEQ ID NO: 616823 - DNA, 601 bp, Homo sapiens
catgtccttgtcttacaatctggtttttaggattatgaacatacgtggcatggcagtcatcaaagaagaaataggccctttttagaagggtgggatttctttggtttgagctataagctttccttctgtttctccctctgatttaatatgtacctcaaaatagaattaatagggtaagagcccaggctcataacatacatatagctgattatttcctcagtcacagactgaataggtggtctggttgtatrtgcatattcctaatttgcttcctgtacattcatagtaggtatggtacagtagagttttaactgtggtattttttatccaggtaatgtgtacacagcgtggacatccttcaagagatttatcccctttcagtataagcataaatggtaacaacattgttgtatgtaatagaaacatgcttacactacacatgggcacaaaaactttcctctgggcatagacatttgcagcatttgcagtaataacataacaatggaacaatcagtattgacagaattgtaactatggttataaattgtattcacatttacttatctggacatggtcctcttagcttcggctgtgtgtacac

SEQ ID NO: 616824 - DNA, 601 bp, Homo sapiens
catgtccttgtcttacaatctggtttttaggattatgaacatacgtggcatggcagtcatcaaagaagaaataggccctttttagaagggtgggatttctttggtttgagctataagctttccttctgtttctccctctgatttaatatgtacctcaaaatagaattaatagggtaagagcccaggctcataacatacatatagctgattatttcctcagtcacagactgaataggtggtctggttgtatgtgcatattcctaatttgcttcctgtacattcatagtaggtatggtacagtagagttttaactgtggtattttttatccaggtaatgtgtacacagcrtggacatccttcaagagatttatcccctttcagtataagcataaatggtaacaacattgttgtatgtaatagaaacatgcttacactacacatgggcacaaaaactttcctctgggcatagacatttgcagcatttgcagtaataacataacaatggaacaatcagtattgacagaattgtaactatggttataaattgtattcacatttacttatctggacatggtcctcttagcttcggctgtgtgtacac

SEQ ID NO: 616825 - DNA, 601 bp, Homo sapiens
catgtccttgtcttacaatctggtttttaggattatgaacatacgtggcatggcagtcatcaaagaagaaataggccctttttagaagggtgggatttctttggtttgagctataagctttccttctgtttctccctctgatttaatatgtacctcaaaatagaattaatagggtaagagcccaggctcataacatacatatagctgattatttcctcagtcacagactgaataggtggtctggttgtatgtgcatattcctaatttgcttcctgtacattcatagtaggtatggtacagtagagttttaactgtggtattttttatccaggtaatgtgtacacagcgtggacatccttcaagagatttatcccctttcagtataagcataaatggtaacaacattgttgtatgtaatagaaacatgcttacactacacatgggcacaaaaactttcctctgggcatagacatttgcagcatttgcagtaataacataacaayggaacaatcagtattgacagaattgtaactatggttataaattgtattcacatttacttatctggacatggtcctcttagcttcggctgtgtgtacac

SEQ ID NO: 616826 - DNA, 630 bp, Homo sapiens
cttctttttttctttgtaaataaccttatgaacatgcaaagtggcagaagcatatttggaacctgtataaatattggtcttttggtcttttgctagccagagaactcttgtcagagctcttagttctgctttctaatcagaagtttctgtagatgaagactgcacctctactgttgagtctaaagtcaccactgcatacgcagcttggcgggctccttttagtatgaaactgcttccatcagtagaatattcaatgtttgggtccctgagggactgatctgtcaaatctctctggcttgagaacacttcatctaccacgtccacaccacaatgaaacggtcctcctggcactgactcgatsagagtgaggtagccggatttagggtattcacagtctctaaagttagtttactagcttcctgcaccagtacggcagtggctgctagtgctttaagacaaggaggccatccaagtgcaacagaatctaattgcctggataaatatgccaccaggcgatgccatgaccttatggcttgagtcagaacccctatggcctccctttcacttgtgcacatacaagaagaaaagcttgattggttagatctggcagtcctaaagctggggcctgag

SEQ ID NO: 616827 - DNA, 630 bp, Homo sapiens
cttctttttttctttgtaaataaccttatgaacatgcaaagtggcagaagcatatttggaacctgtataaatattggtcttttggtcttttgctagccagagaactcttgtcagagctcttagttctgctttctaatcagaagtttctgtagatgaagactgcacctctactgttgagtctaaagtcaccactgcatacgcagcttggcgggctccttttagtatgaaactgcttccatcagtagaatattcaatgtttgggtccctgagggactgatctgtcaaatctctctggcttgagaacacttcatctaccacgtccacaccacaatgaaacggtcctcctggcactgactcgatgagagtraggtagccggatttagggtattcacagtctctaaagttagtttactagcttcctgcaccagtacggcagtggctgctagtgctttaagacaaggaggccatccaagtgcaacagaatctaattgcctggataaatatgccaccaggcgatgccatgaccttatggcttgagtcagaacccctatggcctccctttcacttgtgcacatacaagaagaaaagcttgattggttagatctggcagtcctaaagctggggcctgag

SEQ ID NO: 616828 - DNA, 485 bp, Homo sapiens
atttttctatattcccaaccagtgataatccttgckctctttatttctaattaaaagaaatccaaaatggagatagttatttgagaggtctctaaagacaactaggaggacatgaggagttgaattaatactcatacacacccaggtggaattttacctgttcgaactgggaaaattacagatgtcctaaaaaggcaactgcatttgacttggattgtttatactgagcctgatcacaaacctcctgaagagaaagctgtgctgaattaagctgatgattgcctagatacagtctaagctggcaatcaaacattgtccatcatagactgtgctaaaatctttcacttgtgtaaacttgcagtaaaactttataagtccctccctaacctcatctgaatggaacatgatatagcttcttgctaaatttgtgtctcccaaatagcaatttataaaaaatcatgattaaaatgccttttattttattt

SEQ ID NO: 616829 - DNA, 592 bp, Homo sapiens
aaagacagacaataacaagtgctgacgaggatgtggagaaaactttagtgcactcttggtgggaatgtaaattagtataaccastataaaaaagtgtggaggttcctcaaaaagctaaaaattgagctgccacagctacaatgcaacctaacaatcccagtgatgggcattgacacaaaagaaagaaaatcggcttgttgctgcactgtttacaatagctaagatttgaaagcaaactgtctacaaatgaatgaatgtataaaaaaagtagtacatatatacattggagtagtattcagccataaaaatgagattttgtcttttacgacaacatggataaaagagaagagtatgttaagtgaaataagccaggcacagaaagataaacactgtgcgttctcacttattcgtgggatggaagaattaatacaactgaattcacggacatagagagcagaaggatggttttcagaggctaagaaagacagtggaggctgggggaaaggtggggactgttaacgtgtacaaaaaaatagaataaataagacatattatttgatagcacaacgagatgactctggtcaataataat

SEQ ID NO: 616830 - DNA, 592 bp, Homo sapiens
aaagacagacaataacaagtgctgacgaggatgtggagaaaactttagtgcactcttggtgggaatgtaaattagtataaccagtataaaaaagtgtggaggttcctcaaaaagctaaaaattgagctgccacagctacaatgcaaccyaacaatcccagtgatgggcattgacacaaaagaaagaaaatcggcttgttgctgcactgtttacaatagctaagatttgaaagcaaactgtctacaaatgaatgaatgtataaaaaaagtagtacatatatacattggagtagtattcagccataaaaatgagattttgtcttttacgacaacatggataaaagagaagagtatgttaagtgaaataagccaggcacagaaagataaacactgtgcgttctcacttattcgtgggatggaagaattaatacaactgaattcacggacatagagagcagaaggatggttttcagaggctaagaaagacagtggaggctgggggaaaggtggggactgttaacgtgtacaaaaaaatagaataaataagacatattatttgatagcacaacgagatgactctggtcaataataat

SEQ ID NO: 616831 - DNA, 592 bp, Homo sapiens
aaagacagacaataacaagtgctgacgaggatgtggagaaaactttagtgcactcttggtgggaatgtaaattagtataaccagtataaaaaagtgtggaggttcctcaaaaagctaaaaattgagctgccacagctacaatgcaacctaacaatcccagtgatgggcattgacacaaaagaaagaaaatcggcttgttgctgcactgtttacaatagytaagatttgaaagcaaactgtctacaaatgaatgaatgtataaaaaaagtagtacatatatacattggagtagtattcagccataaaaatgagattttgtcttttacgacaacatggataaaagagaagagtatgttaagtgaaataagccaggcacagaaagataaacactgtgcgttctcacttattcgtgggatggaagaattaatacaactgaattcacggacatagagagcagaaggatggttttcagaggctaagaaagacagtggaggctgggggaaaggtggggactgttaacgtgtacaaaaaaatagaataaataagacatattatttgatagcacaacgagatgactctggtcaataataat

SEQ ID NO: 616832 - DNA, 592 bp, Homo sapiens
aaagacagacaataacaagtgctgacgaggatgtggagaaaactttagtgcactcttggtgggaatgtaaattagtataaccagtataaaaaagtgtggaggttcctcaaaaagctaaaaattgagctgccacagctacaatgcaacctaacaatcccagtgatgggcattgacacaaaagaaagaaaatcggcttgttgctgcactgtttacaatagctaagatttgaaagcaaactgtctacaaatgaatgaatgtataaaaaaagtagtacatatatacattggagtagtattcagccataaaaatgagattttgtcttttacgacaacatggataaaagagaagagtatgttaagtgaaataagccaggcacagaaagataaacactgtgcgttctcacttattcgtgggatggaagaattaatacaactgaattcacggacatagagagcagaaggatggttttcagaggctaagaaagacagtggaggctgggggaaaggtggggactgttaaygtgtacaaaaaaatagaataaataagacatattatttgatagcacaacgagatgactctggtcaataataat

SEQ ID NO: 616833 - DNA, 573 bp, Homo sapiens
attgaaaaacatttgataaaataccaaaggaggaagaggaactttttatagcagaagcctggttacaggttggctaaggacttaaatatcaaagaaagggaatcacgatattagtagacataagggatatgtggatttttactaaacagtattagcaggatttatgaaagtgagcctctcaaaccaggagcagggcaagaagtcaaggttggcttagtcaaaaagagggttcagttaagcttgactaacatttggtcataaaggtagtgcttamaagaacccagatttttttcccatctgatctcaaaataaataatcaccaaaaaaggctttgtttgaaaaatgagtgcccacttcacctgagaaaacctccatcttcttctgtttacctttgaatttagtgtagaaaaagagcacttgtcattgccacagttttaattttgctttcactcttaaaaacagagagtcagggctgggtgtggtggttcatgcctgtaatcccagcattttgggcatggtgatgcaagcacacctgtaatcccagctacttgaaaggctgaggcaggagaatca

SEQ ID NO: 616834 - DNA, 573 bp, Homo sapiens
attgaaaaacatttgataaaataccaaaggaggaagaggaactttttatagcagaagcctggttacaggttggctaaggacttaaatatcaaagaaagggaatcacgatattagtagacataagggatatgtggatttttactaaacagtattagcaggatttatgaaagtgagcctctcaaaccaggagcagggcaagaagtcaaggttggcttagtcaaaaagagggttcagttaagcttgactaacatttggtcataaaggtagtgcttaaaagaacccagatttttttcccatctgatctsaaaataaataatcaccaaaaaaggctttgtttgaaaaatgagtgcccacttcacctgagaaaacctccatcttcttctgtttacctttgaatttagtgtagaaaaagagcacttgtcattgccacagttttaattttgctttcactcttaaaaacagagagtcagggctgggtgtggtggttcatgcctgtaatcccagcattttgggcatggtgatgcaagcacacctgtaatcccagctacttgaaaggctgaggcaggagaatca

SEQ ID NO: 616835 - DNA, 573 bp, Homo sapiens
attgaaaaacatttgataaaataccaaaggaggaagaggaactttttatagcagaagcctggttacaggttggctaaggacttaaatatcaaagaaagggaatcacgatattagtagacataagggatatgtggatttttactaaacagtattagcaggatttatgaaagtgagcctctcaaaccaggagcagggcaagaagtcaaggttggcttagtcaaaaagagggttcagttaagcttgactaacatttggtcataaaggtagtgcttaaaagaacccagatttttttcccatctgatctcaaaataaataatcaccaaaaaaggctttgtttgaaaaatgagtgcccacttcacctgagaaaacctccatcttcttctgtttacctttgaatttagtgtagaaaaagagcacttgtcattgccacagttttaattttgctttcactcttaaaaacagagagtcagggctgggtgtggtggttcatgcctgtaatcccagcatkttgggcatggtgatgcaagcacacctgtaatcccagctacttgaaaggctgaggcaggagaatca

SEQ ID NO: 616836 - DNA, 358 bp, Homo sapiens
aggtataatggttaccatgaaaaaatcaaaaaatcacagatgctgacaaagttgtggagaaaaagcaacatttttaccctgttggtcgagttcaaacgttgtggaagacagtgtggtgattcttcaaagacctaaagaaaagaataccatttgacctagcaatctcattaytgggtatatacccaaacaaatataagtcattctattataaagatacctgcacgctcaagttcatcacagccctattcacaatagcaaagacatcaaatcagcctacatgttcatcaataatagactggttgaagaaaacgtagttcatatacaacatggagtactatgcagccataaaaaagcacaa

SEQ ID NO: 616837 - DNA, 557 bp, Homo sapiens
acgcaccagggcctatcaggaggtagggggtgagaggagggagagaatcagaaaaaataactaatagttagtagacttaatacctgggtgataaaacaatctgcacaaccaaacttcgggacgtatgtttccatatttaaagaacctgcacatcctgcccatatacccctgaacttaaaacaaagttcaaaaaagaaaaacattttagcaaaatgacagactatttttgactaccttcgtgtacrgttcagagtcagactgcccagctctaacatccttatttatgagaaagaaagcattctctctcttatctgcactattatattgggttttcttttttaatttttttgagacggagtttcactcttattgcccagactggagtgcaatggcgcgatctcggttcaccacaatctctacctcccgggttcaagcgattctcctgcctcagcctctcaagaagcagggattacaggcatgcaccactacgcctggaaaattttgtatttttggtagagactgggtttctctatgttggtcaggctggtcttaaactc

SEQ ID NO: 616838 - DNA, 583 bp, Homo sapiens
ctatatacccaaaaaattaaaaacataaaagaaaaaaggaaacaaaaaaattttaagacaactagagaaaaattagcaacatgaatatgtaacaaacctgcacattgtgcacatgtaccctaaaacttaaagtataataatagtaaaataaaaaaataacaacatgaaagaaacaaaatctcacatattgatatcaaccttgaaaatgaatgaattaaatgctccaattaaaatatatagatctgcagaataaatttttaaaatgacccaactatatgctgcttacaagaaacttacctttcctgtaaagacacttacagactaaaaggaaagaaatgggaaaaagatattccatatagatgaaacccaaaattgagaagtagctatactcatatcagattaaaaacmcttatttcattaaaccagtaaatataagacaaagagtcaggtgtggtggctcatgcctgtaatcccagcactttgggaggctgaggtggatggattgcttgagctcaggagttcaagaccaacctgggcagcatggtgaaaccccatctctacaaaaaatacaaaaattagccag

SEQ ID NO: 616839 - DNA, 540 bp, Homo sapiens
gacagtccttcaaaatatccctttctcagagtaagggagttaaaaaaataataaactttccaagaacaacaatattgcctatggcatagaaaaagctatgaaacaaagaatccaacaactcccatgtcagctcagaggctgggcctaggcgagctgcccaatgaacgagagctgaaactgccacacgactcttttctttgactacagagttcgtgatcctggcagctgtctgctgcccagcacagacggrgccttctccctggtgctccttctttttctcttcctcactcttcgtccacatcgagcactgccaacttgtttggagatggtccttgtgacttttccagtgagtgatcctcatcttctagctcaccagctaagtgggtctgagtggccagtccctcacaggtgagtacagtataccaaccataccaactctgtttgtagagcagagcgcatgcaaaatgagacttctgtcaattacattggctagaacatcaatggccaaaagaaaaaaaaaatcctcctcctttcatccat

SEQ ID NO: 616840 - DNA, 536 bp, Homo sapiens
taagctacttaacaagattgtcatggagctgcagattccattgcccaccaaagactagaacacacacatatccatacaccaaaggaaagacaattctgaaatgctgtttctctggtggttccctctctggctgctgcctcacagtatgggaacctgtactctgcagaggtgacaggccagatttgcattatctcacaaccttagcycttggtgctaactgtcctacagtgaagtgcctggggggttgtcctatcccataagccacttggatgctgacagcagccaccatcagaatgacccacgcaaaaaaaagaaaaaaaaaattaaaaagtcccctcacaacccagtgacacctttctgctttcctctagactggaacattgattagggagtgcctcagacatgacattcttgtgctgtccttggaattaatctggcagcaggagggagcagactatgtaaacagagataaaaattaattttcaatattgaaggaaaaaagaaataagaagagagagagaaagaaagcatcacac

SEQ ID NO: 616841 - DNA, 580 bp, Homo sapiens
aaaaaagaagacaaaaaggaaaaaaaagaaggcagagaagacaacaaaacaaccagaaaacaaataacaaaatggaaaaagtaagaccttacttatcaataataacatattgaatgtaaatgggctaaactctccaatcaaaagacatagactaaaaggataaaaaacacactacagctataaagacacacatagactaaaagtaaagagattgaaaaagatattccttaccaagsacactaaaacaaaagcaggagtagctacacttatatgagaaaaatatacatttcaagacaaaaactataagaagagataaataaggtcgatatataatgataaaagatcaattcagcaagaggatataaaaattttaaatatatgttcaccaaatactggagaattcagacatctaaaacaaataatattagagctaaaaagagatacaggccccaatacaataatagctagagacttcaaaaacccactttcagcattaagcagatctcacagacagaaactgaacaaagaaacactggatttaatctgcactacagaacaaatggacctaatagatatttac

SEQ ID NO: 616842 - DNA, 585 bp, Homo sapiens
aaagccaaatacttacaaccaactgatctttgacaaagcatatgaaaacataatgtggggaaacgacaccctctttaataaatggtgttggraaaactggatagccacatgtagaagaatgaaagtggagccctgtctctcaccatatacaaaaattaactctaaatggattaaagactttattctaagtactgaaactataaaaattctacaagaaaatccaggcaaactcttctggacattggcctaggcaaagaatttatgactaagaccccaaaagcaaattcgacaaaaacaaaaataaataaatgggacctaatgaaactaaaaaacatctttacagcaaaagaaataatcatcagagtaaatagataacctagagaatgggagaaaatatttgcaaactatgtatccaacagaagactaacatccagaatctacaaggaatacaaacaaatcagcaagaaaaaaaaatcctttaaaaaatgggtagatgtcatgaataaacatttctcaaaataatatatacaaatggccaagaaacataaaaaaatgctcactacatcaaacattactacattttct

SEQ ID NO: 616843 - DNA, 222 bp, Homo sapiens
gatagtacctgataggtagtatttttgtaactgccagatgggtttaccttgtctgctgcctagacagagccartttatcaagacaaaggaatttcaatagagaaagagtaattcacacagagctggctgttgggggaggccagagttttgttattactcaaatcaatgtccctgagagttcatgaatggagtttttaaggataatttggtgggtagggggcc

SEQ ID NO: 616844 - DNA, 609 bp, Homo sapiens
tataatgtcaagtcaagtaatatgattcctccagtttcgttatttttgcttaggatagctttggttgttctgtttttctttttttttttgtggtttcacgtaaattttagaattttttttctatttctgtgaaaagtgtaactgatattttgatagaaattgcattgaatctgtagattgctttggctaatatggacattttaacaacactgattcttccaatctgtggacatgaactatttttccattttttggggtcctcttcaattttttcatcaatgttttatagttttcaytatagaggtctttcatttctttggttaatttctaggtatttaatttttttgtttggttattgtcaatagaattacttttttatttcttttgtagattcttcactgttggcatatagaaatgctactgattcttgtatgttgattttgtgtcctgcaactcattgaatttgtttatcacttctaatagtttttttgtgaggagtcattaggtttttctaaatatatgatcatatcttctgcacaccatattaatttcacttgttcctttccaatttggatccctttatttctttatcttgtctggtttttatat

SEQ ID NO: 616845 - DNA, 537 bp, Homo sapiens
ccactgtggtttttatttgtatttccttgatggctaatattgtggagcatattttcatgtgcctattggcactttgtatatcttctttggagaaattcccattcagataattcgcccatttccaraatgggttatttatcttttttattatcaagtttagcatctttttgtattcaagaaagaagaccattatgtgatttgaaaaaaatttcctccattctgtaggatatcttttcactttcttcatgatgtcctttgaagtacaaagtttttcattttgataatgttcactttgttattattttttgctgcttttgcctttggagtcatagctaagaaaccattgctaatctaaggtcacagaaattgacacctatgttttcttgtaagaatttttcacttttagctgtttacatttagtttttgacccattttgaattaatttttatatattgtgtaaaatagaggtccaactttattcttttgcacgtggatatcaagttgtctcagcattatgtgttgaaagattattctatc

SEQ ID NO: 616846 - DNA, 537 bp, Homo sapiens
ccactgtggtttttatttgtatttccttgatggctaatattgtggagcatattttcatgtgcctattggcactttgtatatcttctttggagaaattcccattcagataattcgcccatttccaaaatgggttatttatcttttttattatcaagtttagcatctttttgtattcaagaaagaagaccattatgtgatttgaaaaaaatttcctccattctgtaggatatcttttcactttcttcatgatgtcctttgaagtacaaagtttttcattttgataatgttcactttgttattatkttttgctgcttttgcctttggagtcatagctaagaaaccattgctaatctaaggtcacagaaattgacacctatgttttcttgtaagaatttttcacttttagctgtttacatttagtttttgacccattttgaattaatttttatatattgtgtaaaatagaggtccaactttattcttttgcacgtggatatcaagttgtctcagcattatgtgttgaaagattattctatc

SEQ ID NO: 616847 - DNA, 624 bp, Homo sapiens
gctctgacacttcctagctgtggtaacttgggctaccctctgtgcctcagtttctttgtatataaaatgaagataataatagtacgtaactcattgatgccttgtgaggattaaatagcttcatccatttctagcacttagaatattccaggtccatagaaaaatgtttaataaatattaggtattattattttgcctacctctctgagcctcataagcctggcatacaataggcgcttcctagacctcaagtcctttctacctcttcctaccttctttagtgctctctttcatgcaggaactttggtctcaaactttttgccatttgttgtgatctccagtacatggacttcctactgccccacctttattgtgtgtgtgcatgcatacacacacagagagagagagagagaaaaagaagaaagaaagaaagaaagaaagaaagaaagaaagaaagaaagaaagraagaaagaaaggaagaaaatagaacaaatcagcttatattcagtatttttttagtattttctgtgtcagctctctgaggggcactgagaccataaagatgaacatgacatggtctccaccctcaaagggatcactttctagcagaggagacattcaca

SEQ ID NO: 616848 - DNA, 609 bp, Homo sapiens
agtgccaccctacaatgtggtcttgagtaccacgaccaggtggctggatgcaggtggagaaagtcatcagtgttagcctggctttctctgagggaaagctacctaggttctcatacaaggaagagggcctcaagtcttctgctatggctggaaaaaaatattttttccagaatgttcatggttgttatccatggttgttatccgcaagttttggtatttcagggacttaagcaggaataagttttcatgatataattatagagcagttaaacaaagacttttggtttggggtcttgtcctaaaaacggcccatcaaaagagtcttagttggctttactgagaaggtacaagtactaagccctcagcagatgtttatctgcctccctcactccttcaaccttttgtagctggatgagaagccctctcagtagccccggagtccagctactcagagatgaagtcagaktccctagatccaggcattataaacctgctgctagttaggctcataatcactgacctggggtgtgggtggggggctggctttagaggactgaaggcacaagataggcaacccaggcagaaactcagatttggggccccgggaca

SEQ ID NO: 616849 - DNA, 595 bp, Homo sapiens
gagcaggagcctgggtcctctgcagcacatcccttcacacatctctctcttggatcaggggcgaaggcagacytgccagaagcacaggcagagagtttgagatgcgatgatgaaaaggagtgacagctctcttctgagtccttcagtgtcctctgtaatgtgtgaggcaaagttgttcactgagtgtgaggcaggaagaggggatgtgggtggtatgaagagagaagtgatatcaggggaacccacccccagtatttcaacgtaggttctattttccataagtgttggccagctgagaaataaagagagacagtataaagagaggaatttttacagctgggtggctgggggtgacatcacatattggtaggaccatgatgcccacctgagcctcaaaccagcaagctttttattaagggtttcaaaaggggagggggtgtaataatagacaaagatcacatgcttcaaagggcaaaaagcagaacaaagatcacatgcttctgaaggaacaggacaaagggcaaaaacagaactaccgataagggtcgaacaaagatcacaaggcaaagggcaaaagcagaactactgataaggg

SEQ ID NO: 616850 - DNA, 539 bp, Homo sapiens
gtcacctacaaacggaagctcattagactaacagcagacctctcagcagaaaccctgcagaccaaaagagattaggggcctatatccaaaattctttaaaaacagaaactccaaccaagaattctatatccggccaaactaagcttcataagcaaaaaagaaataagatccttttcagacaagcaaatgctgagggaatttgttaccactagacttgcctgagaagagctcttaaagaagcacaaaatgtggaaaggaaagactattactagccactacaaaaacacacttaagcacacagaccagtgacactataaagcaaccacacaaacaactcagcataataaacagctaaaatcacaatgacaggatcaaatctgcacatatcaatactaaccttgaatgcaaataggctaaatgccccatttaaaaggcacagtgtagcaagctggataaagaataaaaacccaatggtatactttcttcaagagacccatcgcacrtgcaatgaggcctataggctcaaaataaagggatag

SEQ ID NO: 616851 - DNA, 589 bp, Homo sapiens
tgattcctaacatccagggctgtcatgaggatttaattggataaactacacaaattctttggtgcctggattataataggtgctcagtattagttttccctaaaatccattcaacctcaactatatatcagtcttccttgctactgtgttaacaaagtttattcattattaatggatttaatcaacaaaggattgtatgcaaattgtctatgatastgttataaccattatcaaaggcaataagtgaaatatactttaatattatttttccagccagagagtacttaattaacccttcttcaaatcctaatatgcataaaacagcatggcactggtataaaaatagatacatcaagcaatggaacagaatagagagctcataaataaactcacacagtatggccaactgattattgacaatgatgccaagaatatacaatggaaaaaaggcagtctcttcaataaatggtgttggtaaaactggatgtccacatgcagaagaataaaattggacacatctcacagcatatgcaaaaatcaacccaaaatggattaaaagatttaaatgtaaaactcaaaactgtaaaac

SEQ ID NO: 616852 - DNA, 603 bp, Homo sapiens
gccaggttgatgggagtcctccagccaaagtgcaagaagacctgcatctcacaggaatggcatctgtgctcagccactgggaaagagcagtttggaggaagtgtggttctgacaaggaggttggggatccagaagttagcggctgggccagcattcaggtgagctccctgcagcaggacacctgagcaacacaccatgcatttgactgataccaacagaaaattcagctgacacttgccacaataaagagttaacaaactttctctgtaaaggggcagatagtaaatcttttaggctytgtgggccttgtaactcttgcagcccaagagataccattgacatgaatgaataggcctgattgtattccaataaaactttatttacaaaaacagacagcgggccagaatttgcctgtggggcatagtttgctgacacctagtttaagtgaataaggtgttgttttccttacacaatgggatgtctggaggtaagagagtgtaggtgaaacttcagtggctcaatatgacataagacttccttctatacttttgcttatgtattctcagcatttctaaagacaggaatgactcctctgatgcctgt

SEQ ID NO: 616853 - DNA, 498 bp, Homo sapiens
gaaatatttattgagaagctattacaggccaggtatttttctaagtgctccggcagcacttagaatttttaacagaacagaaaaaaatcttcgttgaaatgaaagtgacactctagtgggaagggggagaaagacrgtaaacaacataaatagtgaaaaatgtagtagtagatgatgatagatgctatagacaaaataaatccaggaagaagggaggctgttccaggtggtggtagcggggagaggttccttttttaatggaatgaaaagctgttactgagaaggtgacattggaataaagacaagaaggtgttaagagtaaaccatgcaaataaattgggcaaatattttcctgggaggaggacagtgtatcaaatgcaaaggtctgatgcaaggagattagcgtagctgaagcagagggagctggggcatgggagaggagaaagtgaggggccaggtcctgtagagccttctgagcttctgaatgattttggcttc

SEQ ID NO: 616854 - DNA, 642 bp, Homo sapiens
gatgctatagacaaaataaatccaggaagaagggaggctgttccaggtggtggtagcggggagaggttccttttttaatggaatgaaaagctgttactgagaaggtgacattggaataaagacaagaaggtgttaagagtaaaccatgcaaataaattgggcaaatattttcctgggaggaggacagtgtatcaaatgcaaaggtctgatgcaaggagattagcgtagctgaagcagagggagctggggcatgggagaggagaaagtgaggggccaggtcctgtagagccttctgagcttctgaatgattttggcttctactttgagtgagatgagaagccatgagwctgttgtgagcagagaagggacaccatctgatttacatttaacagactcactctgggtactgtgctgagaccatgtggaagggagtggcaggatggaaacgtggagacccattaggaggcttctaagctagaaatgctggtgacttggaccagtatggcagcagtagagctagcagagaccaaggattgattgatgatatagaacaagctgctgcccagtctggtctcaaataccggtccacagcctgcatgtggcccaggatggctttgaatgcagcccaacacaaattcataa

SEQ ID NO: 616855 - DNA, 473 bp, Homo sapiens
gaattctcttttgataaatttctttcttagattattgaaagaactctatataraaaatgcatagaaagggaagttcaaggaagtggaattaaaaatagcatatttaaggaagtgatttcattgactctactgcatagaaaagtcactagaagggtctatggccatactacctgaatgtgcccagtcttgcctgatcttggaaaagtcacaaaaaggaaattcacccatgggatcatcgaggctccagatctttggaaaaattaaaagtccatggaataatccagggagcaacatgactgggtgagttcatagaggaaagaagacaattttgtgggtaagagtggagaggagaaacagcattagagtaacatccactttagaaagcagtgagtgttgggaataatttccttcttacaaaacagtctgtccatcttttggaggggagctaaccgagggaatgcctgaagagcagg

SEQ ID NO: 616856 - DNA, 493 bp, Homo sapiens
atgcctggttttaggcaaggttttaggtgatacatgcactgttcataaagtgtcagctttgtagcagaagcctcaggaaggcaaagttccttccaaatcaaggatccctaattgctgctaatggaccctagaggtctttatatgtgacctgatgatacccaaagaggatgagaaaatggatggagatggcagagcctaagcaggagctcaaactcagaacaggcgtcctggcttatttgatgcaccctgaatcccagagcccagcaaaatctggaggtctaccactactgcatgctgtattcttagagcaagtctctttttgtctttgagttttgattttcctgtgaaatgaagataattctcctttccttgtcagagatagcttgatgttgtrcaaaacaaatttcaaaaataatggaaatactatctaatagcacctatgggatacagctaaagcagtgtgtctaggagaattcatagcctttagtaccta

SEQ ID NO: 616857 - DNA, 564 bp, Homo sapiens
aattactttttctcctcttactctctgtaagcccttcactgacccctccttagtcaccccagccacagatactctcattggaatttcagttgcatggtgttagtttctttctgatgatacctaccatcattgcctttttgttatggatatttataacatattttatatcacaaactcttaacagtaatcactttttttgtgtaataaatacccaagtatttgaataattttaaattctgtgaaggaaaactaaaattggataatatttattttgcccttttaataaaaattgtggtatttttattactcaaacattagaatttattccagctaattttagtctttgctttctagaattagtaaatrttctttttcccttcttgatagttcctttatacctcacataacctttcacttaatggccgattatggaaacaccttagttcaattataaaagtgttagggataaaatatatcattaaagtggaattagggaacataggtaccataattcatttcctcagatccttatttgaatagtatttcacatccaaatatgcaaag

SEQ ID NO: 616858 - DNA, 616 bp, Homo sapiens
tgattattattttgagaccaagtttcactctgtcccccaggctagagcatatcgggatgatctcacctctctacaacctccacctcgcgggttcaagtgattctcttgcctcagcctttgcagtagctgggactacagacatgcaccaacacactcagctaatttctgtatttacagtagagatggtggttcaccatgttggccaggctggtctcaaacttctgacctcaagtcatccatccgcctcggacgccaaaktgctgggattacaaacatgagccaccgcacccagcctccttgattattttcttccctccatttgctctgttctttccttgtagaacatctacaaatcagatgttgaacctcttggactgaacctctttgtttcttaactgttcaaagtttcacatttctgtttatttgtctttttaatgtattttcttaatttttactcttgccattctattgaagtgtttgacaattatattttttaatgttcaagaacacttttttgatctctgatttattcttttgcttagcagctgttcttgtgttattatgccatattttctatttgaagatacatattacatatatttaacatttttctttt

SEQ ID NO: 616859 - DNA, 209 bp, Homo sapiens
agtgctgggatgtaagaaggctcagggagctaaggcagccagatggatggggacatggggagcagacccactgcccattcctgggcacctcctaggtggtgggtgggagctttgtggagtgggccagctgctcagtccyaccaggaagcctgcgtggtggaccctcctgtggcctccctccacccttcagtgccaggctttgctgcttt

SEQ ID NO: 616860 - DNA, 594 bp, Homo sapiens
tctcactgtgtcacttaggctggagtgcagtggtatgatctcggctcactgcaacctccgcctcctgggttcaagtgattctcatgcctcagcctcccaagtagctgagattacaggtgtgtgctaccatgcccagctaattttttttgtagttttagtagagacagggtttcaccatgttggccaggctggtctagaactcctgacctcaaatgatctgcccacctcagcctcccaaagtgctgggattacaggcgtgagccaccacgtccagcctaaactccttctttaactggttgaataaacacctcggacttgagagcaggctaagtgtttcccacaaaaagtgtagagaagtcagtggggtgcacagagtaggcatccagtgtgcccttggatctgactcacaggctggctttgtcrtaactaaagggatctcctcgttgcccttgttaccacagttagggtaccctaactctaaccctagttttatgatcgttttctaacacaaatccttctgtagtaactctcactgcaactcacagacatgaagatacaagacaggctggaaggttgttctttaggaagggaaaa

SEQ ID NO: 616861 - DNA, 423 bp, Homo sapiens
atagccaaaccatatcaagcagtcactttgagtttttagaaaacctatgaaaatgcttccccattttacagatggagcaagtaaggtccatagtgaagaaaggattccaggtaaggtggtgtaggcaactatgagatgagagcataatgtgggkaagtggtaggagatggatagatgtggagtgaaggctcactttggagaaatggttggtctcctgggtagggaggttgcatcatagaaatagaatttggaggcagcacttcctcatcatcatgtggtgttagaggaagagaacctgaccaaatggccagctatgccagcctggagttttcctgcatgaccttctctttgtagggcacagagttagtattaaaaatcatctgagaacaagactttgtcacacagcatttaggaatagctcac

SEQ ID NO: 616862 - DNA, 423 bp, Homo sapiens
atagccaaaccatatcaagcagtcactttgagtttttagaaaacctatgaaaatgcttccccattttacagatggagcaagtaaggtccatagtgaagaaaggattccaggtaaggtggtgtaggcaactatgagatgagagcataatgtggggaagtggtaggagatggatagatgtggagtgaaggctcactttggagaaatggttggtctcctgggtagggaggttgcatcatagaaatagaatttggaggcagcacttcctcatcatcatgtggtgttagaggaagagaacctgaccaaatggccagctatgccagcctggagttttcytgcatgaccttctctttgtagggcacagagttagtattaaaaatcatctgagaacaagactttgtcacacagcatttaggaatagctcac

SEQ ID NO: 616863 - DNA, 460 bp, Homo sapiens
atacttgagagagagaggtgggaggaatatgacaagccatgctgagatcatgtgcttatccctggatggttggggcagttgaaccttgagtgccaatgtcctgaaggccacagggggaatggagaaggagcaattactcaaaggaaaagtgagagttccattaccagaagaaaagggtgaatgatggctaggctgaaccaaccaacgtattctccccgttttcagctgactaattcaggcctcgtcccctggtgcctttcttgtatacccggctctcttagcatctgccagttccataacacttagctaatgccttgtgcatattgtctgttatcactagactatgaattccctgagggcaagaattaggattttcatctttgaatctccaggaccatagttcaataaaygtttaatatggcaagatgaactttgtcttatgaaaaatgacaattttcag

SEQ ID NO: 616864 - DNA, 480 bp, Homo sapiens
gataatgactctaaatatgctgaatggaagtatgtacatatattttttcatgacacaaaatcatctttttcctaatttgggtgtgtgatttgtgagtcattacacatcagtttccttcaatatcccattatactatccagttttcactttaataaaatgaaagatctactgttcagccacacctggcagacacaaaaggtaggcctagatggggtcagccttgagcaagacagaccacctgatctagagcccaatatgaacagtggtcataagccgattcacactttccaggaccttttaggacattttagcttggaaaacccagagaagccccttagggcatgatgccatccakaatattttctcactgaggctaataacaaagaacagcttcttcctgcacttcttccaaaggaagttaaaaggtgatctctgctctaatggtgacccaacagatgagaaaagggttgttgcttgctt

SEQ ID NO: 616865 - DNA, 338 bp, Homo sapiens
acttctgtggttaaatttattcctatttttttttaaatcctgttttaaatgggattgcttttttggtttctttttcagattgttcactattggcaaacagaagtgcacctgctttttgtwtgttgattttgtatcctgcaactttactgaatttgttgatcatttccagcatttcgtgtgtgtaggtagtctttaggtttttctaaatataagattatatcatctgctaacaaggataatttgatttcttccttttcaatatggataccctttatttcattctcttgcctaaattgctctggctagaacatgcagtactacactgaacataagtggta

SEQ ID NO: 616866 - DNA, 428 bp, Homo sapiens
gaattctatcagataaatttaacaaagagattgaaataatttaaaggaatcaagcgaaaattctagagttggcacatgcaattaacagactgaagaatacatcagagttctyttaatagcagaactgatccagcagaaaaaagaattagtgaccctgaagacagctatttgaaaatatatggtcagaaaacaaaaaagtaaaaagaataaaaaacaatgaagcacacctacaatatctagaaaatagcctcaaaaaggcaaatttaagagttattggccttgaacaggaggtagggaaatagataagggtagaaagtttattcaaagggataataacggagaacttcccaaacctagagaaagccagcccagtactgggtctcactcagtgcccacggtggccaatacctggatcctatataagaata

SEQ ID NO: 616867 - DNA, 428 bp, Homo sapiens
gaattctatcagataaatttaacaaagagattgaaataatttaaaggaatcaagcgaaaattctagagttggcacatgcaattaacagactgaagaatacatcagagttctcttaatagcagaactgatccagcagaaaaaagaattagwgaccctgaagacagctatttgaaaatatatggtcagaaaacaaaaaagtaaaaagaataaaaaacaatgaagcacacctacaatatctagaaaatagcctcaaaaaggcaaatttaagagttattggccttgaacaggaggtagggaaatagataagggtagaaagtttattcaaagggataataacggagaacttcccaaacctagagaaagccagcccagtactgggtctcactcagtgcccacggtggccaatacctggatcctatataagaata

SEQ ID NO: 616868 - DNA, 469 bp, Homo sapiens
aggcacactgtcatcagattatctaaagttaaagggaggaaagaattttaagarctatgagataaaagcaccaggtaacctataaaagaaaacctatcagaactaaaagaattaaaagtagaactgccgtttgatccagcaatccactactggatatctacccagaggaaaataagtcatcacacaaaaaagatacttgcacatgcatgtttatcgtggcacaattcacaactgcaaaaatgtagaaccaaccaaatgcctatcaatcaatgagcaggtaaactgtggtataaatatgatggattactactcagccataaaagggaatgaattaatggcattcacagcgacctggatgagattggaaactattattctaattgaagtaactcaggaatggaaaaccaaacaccatatgttctcattcataagtgagagctaagctatgaggatgcaaaggaaaaagaat

SEQ ID NO: 616869 - DNA, 469 bp, Homo sapiens
aggcacactgtcatcagattatctaaagttaaagggaggaaagaattttaagaactatgagayaaaagcaccaggtaacctataaaagaaaacctatcagaactaaaagaattaaaagtagaactgccgtttgatccagcaatccactactggatatctacccagaggaaaataagtcatcacacaaaaaagatacttgcacatgcatgtttatcgtggcacaattcacaactgcaaaaatgtagaaccaaccaaatgcctatcaatcaatgagcaggtaaactgtggtataaatatgatggattactactcagccataaaagggaatgaattaatggcattcacagcgacctggatgagattggaaactattattctaattgaagtaactcaggaatggaaaaccaaacaccatatgttctcattcataagtgagagctaagctatgaggatgcaaaggaaaaagaat

SEQ ID NO: 616870 - DNA, 469 bp, Homo sapiens
aggcacactgtcatcagattatctaaagttaaagggaggaaagaattttaagaactatgagataaaagcaccaggtaacctataaaagaaaacctatcagaactaaaagaattaaaagtagaactgccgtttgatccagcaatccactactggatatctacccagaggaaaataagtcatcayacaaaaaagatacttgcacatgcatgtttatcgtggcacaattcacaactgcaaaaatgtagaaccaaccaaatgcctatcaatcaatgagcaggtaaactgtggtataaatatgatggattactactcagccataaaagggaatgaattaatggcattcacagcgacctggatgagattggaaactattattctaattgaagtaactcaggaatggaaaaccaaacaccatatgttctcattcataagtgagagctaagctatgaggatgcaaaggaaaaagaat

SEQ ID NO: 616871 - DNA, 528 bp, Homo sapiens
gattatcatgcctcagccacctgagtagctgggactacaggtgtgtacmacaacacccgtataattttggtatttttagtagagacagtgtttcagccatattggccaagctggtcttgaactcctggcctcaagtgatttgcctgcctcagcctcccaaagtgctgggtcagctgatatttaagaatggcccccggatgggcagtttggaaaccttgaatgaataaggtgacactgtcagtgaggagcctgaataaagggtaattccagagggccagatgagatttgggggaaaacagctgatgacatcaatgtcttcaaaatttttatttttgctggtcacattccaaccagggaataatctccagtttttacctgaatgatataagcctccctaacagcattataataaacaagaggagaaggaaagctgaacatctcagattcagagtaaattttcacttaatggcccaatttcaaccagtaatcttgccatcaaatctgcctgccactccccatcccaaagac

SEQ ID NO: 616872 - DNA, 569 bp, Homo sapiens
gatctctgctcactccaatctctgcctcccgggttcaagcgattctcctacctcagcctcctgagcagctgggacaacaggtgcatgccaccacccctggctaatcttttgtatttttagtagagacggggtttcacaaaatctattttcttaatcttagacactcaacaacacatgcacacacacatagaaactgcacrtacactgcatacctgcacatcctttacagtaccattaagggcatatttaggaggagaggtgcctgtgtgtccctaaattaaatctttctaaaagttgaagcctgtttttgtgcattcacccccatcttatggacacagttattctatcacaccccgctaaaacacagatgaagggaatttcccagaaagaccaggaaaagatgccgtaccagctaggggatctctgggcaagtgggagggtcagcttctactccaattcaatcttgagggacgctttcccaccgtcagagtccgtcaacatctgtagaatgatgtattttccttcgcactcacgcttttttcgtatatcaagtgtttcttactcagtat

SEQ ID NO: 616873 - DNA, 639 bp, Homo sapiens
tgagctgaatgagtttgctcatatgtgataatggtttatttgttttagcagttccaaattccaatcacttggggccttgtttaaaaattatcttgcaaagaaattatcaccatctctcactttgcatacccataatgtaatatatgttattgaggggtggagagcatatgctctggtacctgctcagagatctttttaaaaatacaattaagaacatgtgtctgggtgcagtggctcgcccctgtaataccagcactttgggaggtgaggcgggaggattgcttgatctcaggagtttgagcccagcctgggcaacatagtgagacttcatctctactaaaaataaaaaaaaattagccaggcatggtggtgtgcccctgtagtcccagctactcccagctactcaggaggctgagggaggaggattgcttgagcctgggagattgagactacagtgagctgtgattacgccactacgctccagcctgggtgacagagcaagactctgtctcaaaacaaaaaacaaacaaacaaaaccccatgtttaggtaaatacagtgattctacattagagtacatattgktgaattttttttttggtctaacagtgttgatgattatgtatccaaactgtagata

SEQ ID NO: 616874 - DNA, 538 bp, Homo sapiens
cccagatttctggcccgtgaagcaccctatgctaggattgcctctccagactgtccaacaactccttcccctctgcccccacattctagctggagccacaggggtttggcatcttagcccctgttctggagccaagagagaagaaaacaaggaagaggctacccagcccatggcctcggaaagctggccctgggaactcacttgagtgccctctctatctccagtccggttgccatgtcatcttctagcccaggcacacgttccctttcctcamaatgccagcagcaagagcagtacttggtttcttccaactcactctacccctgtgaatcaggcctgaggaagttccagcaatgccaagttaccattaggctccttctgctctaagcacctcttggatccagacagacagatggatcaacatcaggcacagcagagcccaggggtctctgctccatgctttgggtagcagctgctcctaaactgacaggctcacccgagaggagcctacttctggtggcagtggtgtgcccgatgc

SEQ ID NO: 616875 - DNA, 509 bp, Homo sapiens
tttattttttacatttttatacaaatgcctgcttcccctctctccccaaacccaccaaaccaattaaatcttaatctccaggaaaaggactcagatattgatgttttcagtagaactccaggtgattttaatatttagctagatttgaggaccactggattaattatataagactatgggttttgtaatcagctttagattaaatgtcaactcagcttctgctgactgtgtgacttctctgaggctcaatttctttaccaagtaaggataataacagtatcttctccacttgatttcaggaagaattaaatgatgtaaagtatgtgaaacacttggcatggccctgtctattattggttgttgttgttactgtttatactattaaakcagacaactgatcaccctagttctccagctctttggaacatatctctgtgtgtgtgtgtgtgtgtgtgtgtgtgtgtgtgtgtgtttgtgtgtgtgtatgatatatattatctctatggtga

SEQ ID NO: 616876 - DNA, 391 bp, Homo sapiens
ctgttttctgtctttgtctttgacttttgacaatttactataatgtactttggaggaggattttttaggttgaatttatttggggacctttgatcttcctggatctggatgtccacattccacctccctgccccgcccccacccccccrcccccacaagacttgaaaagttttcaactatcattttattaaataggtattctatacttcctctcttgtttttcccttctggaactcccataatatgaatatttgttaccttaataatgtctcataagtcttgtaggctttctttactcttttccatttttatttattttttcttttgtatcagtaattacaaacaatctatcagcaattccaatgattctttgttctgtttgataaagtct

SEQ ID NO: 616877 - DNA, 582 bp, Homo sapiens
aaaatgaccctgcggcatcccactggggtggagccggaaacgagatggcaggaatgaaggctgacacatgaggcagagctaaggatatggaccayttctccgttctccttcccagctccaacatgtgtgaagagaggaggacacagaggactggggatggtgtgagccagggaggagggaggcgatgtgcatctgtttgaagagagaggtctctcactcaagagaggtttctctccctttgacacatttagttgaaggaatctgacaacaaaccacagctttctttgtcaggctgagtaggcaagagccatgtgaaatattttcccacgctgcttccacctcctcacaaaatgctgcctaagtagtttccattttccttctgttttctccacgctccaggtcaaacagtaactgaaaaaccaacgtcatgttcggtcattgtttggttttgccgtttagtggataaattggaaaagtgcttctcctgataatttgtttgttgcaagattgtaccaggaggcaagctctgtacctgttattgaaagttattcaggcacatgcaagttccaggtctgtggagat

SEQ ID NO: 616878 - DNA, 582 bp, Homo sapiens
aaaatgaccctgcggcatcccactggggtggagccggaaacgagatggcaggaatgaaggctgacacatgaggcagagctaaggatatggaccacttctccgttctccttcccagctccaacatgtgtgaagagaggaggacacagaggactggggatggtgtgagccagggaggagggaggcgatgtgcatctgtttgaagagagaggtctctcactcaagagaggtttctctccctttgacacatttagttgaaggaatctgacaacaaaccacagctttctttgtcaggctgagtaggcaagagccatgtgaaatattttcccacgctgcttccacctcctcacaaaatgctgcctaagtagtttccattttccttctgttttcyccacgctccaggtcaaacagtaactgaaaaaccaacgtcatgttcggtcattgtttggttttgccgtttagtggataaattggaaaagtgcttctcctgataatttgtttgttgcaagattgtaccaggaggcaagctctgtacctgttattgaaagttattcaggcacatgcaagttccaggtctgtggagat

SEQ ID NO: 616879 - DNA, 531 bp, Homo sapiens
gaaattcaattagtaaaataaaatttatttctcagctgatgggcccaatgattccacaataccactgagtcctttagttctattagtttggtcattaatttctgctccacaataattagatatgaggggacctcttttgctgtgtaaattttcctagcaatgaaaggtagaaaattgggcatgccattcttgctacaatgaccagccaaatcaaascaatatgcaatagctccaagccacatggcttactaataagaccatgtcaagtatgagaacagtcaagattgattaataagtaaaattgagctataggcattttaggtaaaagtaaagttctggaattacatttgcatcaagtttgtaaagtttttttaagtgttttgttattcaataattcagaaattattttcattttggtataattatcagaaaaaaagtatgaatttaaatttactgatatagttagtaagctacagttagatattaatcttattctgtcttgaggaggtagggggaaatgccttaccccaa

SEQ ID NO: 616880 - DNA, 578 bp, Homo sapiens
aaaataaaatttatttctcagctgatgggcccaatgattccacaataccactgagtcctttagttctattagtttggtcattaatttctgctccacaataattagatatgaggggacctcttttgctgtgtaaattttcctagcaatgaaaggtagaaaattgggcatgccattcttgctacaatgaccagccaaatcaaagcaatatgcaatagctccaagccacatggcttactaataagaccatgtcaagtatgagaacagtcaagattgattaataagtaaaattgagctataggcattttaggtaaaagtaaagttctggaattacatttgcrtcaagtttgtaaagtttttttaagtgttttgttattcaataattcagaaattattttcattttggtataattatcagaaaaaaagtatgaatttaaatttactgatatagttagtaagctacagttagatattaatcttattctgtcttgaggaggtagggggaaatgccttaccccaaatcttacaattttaagttttttctcctccaaagatattttaaaatatgggaattttggaga

SEQ ID NO: 616881 - DNA, 578 bp, Homo sapiens
aaaataaaatttatttctcagctgatgggcccaatgattccacaataccactgagtcctttagttctattagtttggtcattaatttctgctccacaataattagatatgaggggacctcttttgctgtgtaaattttcctagcaatgaaaggtagaaaattgggcatgccattcttgctacaatgaccagccaaatcaaagcaatatgcaatagctccaagccacatggcttactaataagaccatgtcaagtatgagaacagtcaagattgattaataagtaaaattgagctataggcattttaggtaaaagtaaagttctggaattacatttgcatcaagtttgtaaagtttttttaagtgttttgttattcaataattcagaaattattttcattttggtataattatcagaaaaaaagtatgaatttaaatttactgatatagttagtaagctacagytagatattaatcttattctgtcttgaggaggtagggggaaatgccttaccccaaatcttacaattttaagttttttctcctccaaagatattttaaaatatgggaattttggaga

SEQ ID NO: 616882 - DNA, 578 bp, Homo sapiens
aaaataaaatttatttctcagctgatgggcccaatgattccacaataccactgagtcctttagttctattagtttggtcattaatttctgctccacaataattagatatgaggggacctcttttgctgtgtaaattttcctagcaatgaaaggtagaaaattgggcatgccattcttgctacaatgaccagccaaatcaaagcaatatgcaatagctccaagccacatggcttactaataagaccatgtcaagtatgagaacagtcaagattgattaataagtaaaattgagctataggcattttaggtaaaagtaaagttctggaattacatttgcatcaagtttgtaaagtttttttaagtgttttgttattcaataattcagaaattattttcattttggtataattatcagaaaaaaagtatgaatttaaatttactgatatagttagtaagctacagttagatattaatcttattctgtcttgaggaggtagggggaaatgccttaccccaaatcttacaattttaagttttttytcctccaaagatattttaaaatatgggaattttggaga

SEQ ID NO: 616883 - DNA, 631 bp, Homo sapiens
ctcttcctagttcaaccctcaggaatagaagtgagaagatctttaaaacttcaccattttccttgacttgtttataattctgaatgtaaatgtgaattgatatggtctatcgcttaacaccacaactcttaatctatgtgcagggtcgtagctcaaaactactgccaggaccacatcaatttcatattcaccctgatcaatgtgtattaatggtgataactatgagaatgaaatgtacagttatcagtatcatttttgactcactaggtatatcctcagaaatatatgaaaaaactaaacacagmttttagtttgacataatttttaaacaactggagttaccttgggagaaaaatcctaccaaatatctataatattgaaagagtaaaaaagagttaaatgtccttaacatcattaatcattagggacatgcaaatcaaaaccacagtgaaataccatctcacaccctttaggatggtggtgataagaagaaaaacagagcataacaagtgttggccaggatgtggaaaagctggaaccattgtgcactgctgattggaaagtacaatggtgcagctgctaagggaaatagtatggtagttcttcaaaaaataaacagttataccatttg

SEQ ID NO: 616884 - DNA, 563 bp, Homo sapiens
ccttccactggatgaggtcacaccaagaagttaccatctacatgtcaggaaataggccctcaccagacaccaaatctattggcaccttgatcttggacttcccagcctgcaaagctgtgagaaataagttcctgttgtttataaaccacccagtttatggtattttgttatagcagctcaaacagattaagatggcttgctacaacatagatgaactttaaagattatgcttttctatgattccacttagatggggtaccwagagtagtcaagttcattgagacagaaaatagagtggttggcaggggctagggggagggaactctggggagttagtgtttaatggatacagagtttcagttttgcaaaatgaaaaagttctgaagatggatggtgctgatggctgcacaatatgaatgtatcaacactactcaactgtacacttaaaataaggttcaaatgatacattttatttcatgtgtgtgtcaatctcaacaaacagatttgttcaggcaaggaaactggttagatgcgaataatactattagagcatcatcaattga

SEQ ID NO: 616885 - DNA, 563 bp, Homo sapiens
ccttccactggatgaggtcacaccaagaagttaccatctacatgtcaggaaataggccctcaccagacaccaaatctattggcaccttgatcttggacttcccagcctgcaaagctgtgagaaataagttcctgttgtttataaaccacccagtttatggtattttgttatagcagctcaaacagattaagatggcttgctacaacatagatgaactttaaagattatgcttttctatgattccacttagatggggtaccaagagtagtcaagttcattgagacagaaaatagagtggttggcaggggctagggggagggaactctggggagttagtgtttaatggatacagagtttcagttttgcaaaatgaaaaagttctgaagatggatggtgctgatggctgcacaatatgaatgtatcaacactactcaactgtacacttaaaataaggttcaaatgatacattttatttcatgtgtgtgtcaatctcaacaaacagatttgttcaggcaagraaactggttagatgcgaataatactattagagcatcatcaattga

SEQ ID NO: 616886 - DNA, 559 bp, Homo sapiens
actattagagcatcatcaattgaatattaacaaagtgctcatagtttaactttctagctcaakgaagaatggaccattttgaaactatgacagaacattacttatatagctgatgtctttgggaattggaaggaggcatattccttcaccagctgtggctccccttcagcaacctcatatactctccaagcttctctttcctgggtcacctgtttaatcactcccgggacttaatcttccacctatatgttgaccactcacaaatctatgtctccatctcacaagcttattcttgactccagacccaagtattcaactgcctgctgaatacgtgtggtcagatgtcatagaacttcagcttcagtatatcaaatgcaaacccctgttccccccaactgcctcctactccccactggccttcctctggcattccctcctcagttatgagcaccaccgtctcactagccagccagtcaagccccaaactccatctagctgacttctgcctcttcctcaccaccctcttccagtaactcatcaggcactgctgtgtctcatt

SEQ ID NO: 616887 - DNA, 560 bp, Homo sapiens
aactaagttcacagggacacacaggatggggctcatggagcagctgaagccagaccccaggttaatagcctttacattaaaatgtttttctacctaccactaatatgcattctttastaagcggtctcaatatacaccgattcttccttaactctgtttatgaagtattcagcatcctccctgcccccttcagcatcctccctgcccctgagcacaggatccaatggcgtgaggaccacaggcctgggcagctgctggggcatacaggcatctcttagtggctgagagactgggccctggctctatgttggctcctaacttgctgccatttaaaggaaatcttagcctgccatccgtaaaatcgagaaaataagacttgtcctacacagctcatgaaatagaaatgaaattcacattagagaagagatggaaaaacactttgaacaaaaagcattttgctcttataaaagcacagcctcttttgagaggccctttgctccccatttttccttcttcaaacccccccagactaggagaaggtctgtctcatggagtgacct

SEQ ID NO: 616888 - DNA, 636 bp, Homo sapiens
aaccggtatgtccactcaaatacttattatctcctctataaatgcaagaaaagtttcctctcctctcacttgcctcatttctgtaattaactgttgccacccctccaaataccttcacagcagcaaagataactttacatttttatggacttaaaatgtgaaggcattaactcaggtatactagttcgcttgtccttcacaattgccctgtcatgcaggtattattctcatttcaaagattaggaaacaccctcaaaaaggctggatgacctgccaaaatcatgtagcatgcmaatagaaaagttggggtggaaacacaggctttttcattctttcccatcacatgagtctttgacaaagcaggaaataaatggttgaatcttcctttgacttatatctccccttcctggtacacaatgtcatcagcttctgcaaaaagttgaccagtgcatgtatgagtagggaggcatcccattttccatggataccaatgcaggaagcagttgttagttcttcattctagactgccactgggcagttgtggttttatcccttttatttaaaacagggaaacaggcagctgtaattcagcatttgttaaaaaggaaaactgagtcatttgtttttcgctgattt

SEQ ID NO: 616889 - DNA, 636 bp, Homo sapiens
aaccggtatgtccactcaaatacttattatctcctctataaatgcaagaaaagtttcctctcctctcacttgcctcatttctgtaattaactgttgccacccctccaaataccttcacagcagcaaagataactttacatttttatggacttaaaatgtgaaggcattaactcaggtatactagttcgcttgtccttcacaattgccctgtcatgcaggtattattctcatttcaaagattaggaaacaccctcaaaaaggctggatgacctgccaaaatcatgtagcatgccaatagaaaagttggggtggaaacacaggctttttcattctttcccaycacatgagtctttgacaaagcaggaaataaatggttgaatcttcctttgacttatatctccccttcctggtacacaatgtcatcagcttctgcaaaaagttgaccagtgcatgtatgagtagggaggcatcccattttccatggataccaatgcaggaagcagttgttagttcttcattctagactgccactgggcagttgtggttttatcccttttatttaaaacagggaaacaggcagctgtaattcagcatttgttaaaaaggaaaactgagtcatttgtttttcgctgattt

SEQ ID NO: 616890 - DNA, 636 bp, Homo sapiens
aaccggtatgtccactcaaatacttattatctcctctataaatgcaagaaaagtttcctctcctctcacttgcctcatttctgtaattaactgttgccacccctccaaataccttcacagcagcaaagataactttacatttttatggacttaaaatgtgaaggcattaactcaggtatactagttcgcttgtccttcacaattgccctgtcatgcaggtattattctcatttcaaagattaggaaacaccctcaaaaaggctggatgacctgccaaaatcatgtagcatgccaatagaaaagttggggtggaaacacaggctttttcattctttcccatcacatgagtctttgacaaagcaggaaataaatggttgaatcttcctttgacttatatctccccttcctggtacacaatgtcatcagmttctgcaaaaagttgaccagtgcatgtatgagtagggaggcatcccattttccatggataccaatgcaggaagcagttgttagttcttcattctagactgccactgggcagttgtggttttatcccttttatttaaaacagggaaacaggcagctgtaattcagcatttgttaaaaaggaaaactgagtcatttgtttttcgctgattt

SEQ ID NO: 616891 - DNA, 636 bp, Homo sapiens
aaccggtatgtccactcaaatacttattatctcctctataaatgcaagaaaagtttcctctcctctcacttgcctcatttctgtaattaactgttgccacccctccaaataccttcacagcagcaaagataactttacatttttatggacttaaaatgtgaaggcattaactcaggtatactagttcgcttgtccttcacaattgccctgtcatgcaggtattattctcatttcaaagattaggaaacaccctcaaaaaggctggatgacctgccaaaatcatgtagcatgccaatagaaaagttggggtggaaacacaggctttttcattctttcccatcacatgagtctttgacaaagcaggaaataaatggttgaatcttcctttgacttatatctccccttcctggtacacaatgtcatcagcttctgcaaaaagttgaccagtgcatgtatgagtagggaggcatcccattttccatggataccaatgcaggaagcagttgttagttcttcattctagactgccactgggcagttgtggttttatcscttttatttaaaacagggaaacaggcagctgtaattcagcatttgttaaaaaggaaaactgagtcatttgtttttcgctgattt

SEQ ID NO: 616892 - DNA, 575 bp, Homo sapiens
aatcttttatgtgatgttgtcatttgactgcacagttatttatccatttttaactcaaggaaaaagacttcataaatataaagaatgttttatgacaacaaaggcatattctttctgcaatcttagattgttagtaaccagaatctccttacaaaatatatacacatatatttttaarttacaaaatagactgggcctgtctgggttaagtcaataatttggtgggctcaaatgacacaactcaagcaagtgcagctgtggctttgccagcattttatttactcagtctctttggacttacctgatgcaatgactctgtcaaggctgctccagtgaaggaagacatctcataaagcttcatctcaaaccagtttaccaattatgtaaacagtttttgagggttgtctatgtgccaggcaattatgctgggtacttatggatagaattaagcatggtattaaaagagcgcctctcagcttttagctgtgtgtcacaactacctgtgaagctttttgagaatactaaagtataggccttaccacacacccactgaactagaaccttcaggagcagca

SEQ ID NO: 616893 - DNA, 603 bp, Homo sapiens
acaagttgaaaagtctcaggtaggaccagcactgtcacaggagaggggacaaaccgagtacagctggtggctttcagatgataaacatgccaaaaattccatcgagttttttttttttaatatgctgcttaggaaaaatgcttaagtagcttactatattctttatattggttcaggaagattccgttggataatctgaggacatggtcttgaagagaatattcagagttgggaggataaacatatcatttgaaaatcagaaaatctaaaccagttaattgtgtggttagtcctcaccagagacaattatcaagaggagggccggggagactgtttcaagatggctgcttggtgctactcgtcaacttgggaccctatgtgtacaccagcattttcctgagttctctaattgtttgtagtttgtcagtgattctctttgggtttttatgtttattcatttccaagtttttttgcctctacattctttcacttgtttaatggtattggctgatatttcsaatacagtgttaaatagtaaattgtaggagcagcgggcattcttgttacgtttctctctatcaggatgctgccagtgttgtttgc

SEQ ID NO: 616894 - DNA, 523 bp, Homo sapiens
tggaagagagaaattagactgtagctagggagacataagcgatcagaggtagattctttctctcctgtgggagaatcttgcacgtatacacagcatgacgacagtgatggaagggctggcgaagcctcagggagactcttgraggtaaaccccatgaagggaggactttgtttcattcactgccgtgtccccagcacctggcacaatagcagacactcaatacatatttgtcaaatgtgggattttatcatttagaaactgcacctggctgtgagtaacaaaagtcagagaaaccgtgggtttcatttttctccccaggcagagtctggagctgggtcctccaagaggggtttggagcaccacaggtttcctcaagacccccaggctgccctgtgtttccctccttcatccccagcatatgcctgtcatctggtgacctccaaacacctgtgctgcctcctccagcacatccatgttgcaggcagggaccaggcaaagggcagaggggcctacttcaaaagac

SEQ ID NO: 616895 - DNA, 523 bp, Homo sapiens
tggaagagagaaattagactgtagctagggagacataagcgatcagaggtagattctttctctcctgtgggagaatcttgcacgtatacacagcatgacgacagtgatggaagggctggcgaagcctcagggagactcttggaggtaaaccccatgaagggaggactttgtttcattcactgccgtgtccccagcacctggcacaatagcagacactcaatacatatttgtcaaatgtgggattttatcatttagaaactgcacctggctgtgagtaacaaaagtcagagaaaccgtgggtttcatttttctccccaggcagagtctggagctgggtcctccaagaggggtttggagcaccacaggtttcctcaagacccccaggctgccctgtgtttccctccttcatccccagcatatgcctgtcatctggtgacctccaaacacctgtgctgcctcctccagcacatccatgttgcaggcagggrccaggcaaagggcagaggggcctacttcaaaagac

SEQ ID NO: 616896 - DNA, 507 bp, Homo sapiens
tgaaattcctccttctttcccatttatggcctccatttacagaagcgtgtactgtctctcttagctgtttgccaggccgccagtctcttgctgttcagctctcaactgcttccagcaagatctttctaaaatcccaggcttgccaagacttagcgcccacagctccacagtgactcctcattgctgttaaggtaaaggccttcccagtctagcccttcatgcttcttccatgttctatgggactgccccaggcttcccacctggtaccactgagcctttccatccttcccccactcgactgccwggtcaacacccacacccacgcttcaggactcaggtcctatgtttcgggccttcttctgtgcaccattcccttccctgtagcccttgatcatgatttgtttatacgcctccgcaccttcatggccctgaacccctcaagggccgaaactgccttacttttctttttgacttcccaacttaccttagtggagctgtagtcacata

SEQ ID NO: 616897 - DNA, 588 bp, Homo sapiens
taaagtccttggaccagttttggccgtatagtaagccttcagcaagcatctgcttttattcctacagggaggcaattgtaagcccttcacaaacagcgtctaatgtgatccttagaacaaacctatgagatagggcatatctcaattttgtaggtagggaaacagaagccacacaattaggaaatggcaacagatctgttagactcttaaacactatgctacaccaatttgcaaggcaaggaagacaaagcacctttgaaaatgggtcagatgttttagggtaaatgaacgtttgagaatcttttaagttttttttcccccagagattatcarggtatcattgtagggggatgcatcaggaaacatgactatgaatcagctgcctgataaaccagccaggatggagcccacgtcatcacagcagtcagcaatgccactgaaaaacatcagctgcttattcccgtatagatttccccttaagacatgaaaagggagttcaaagagaatgggccagatatctctgagagtcatattactaaaatatatttatttttactagcttttttgttttaagaggtatactgtcat

SEQ ID NO: 616898 - DNA, 564 bp, Homo sapiens
cttctttttttgcttaccgatcctactacagttttgtccattgcattgatctttacaaagaaccagctttttgtctcactgttttttttttttaattttattgctttttgatttttattacttctttctgcttgctttgggtttattttgctccttgtttactgttgttttaatacacaattcagaattttgatctgagaccttcttttctagcacaagcatttaatgctataaattcccctctatacagtgttttagggacactccacagattttgatgttttttatttccctttttgatccatagattctctctaaatcagtttattaatttccagtgttttggagattttcttatctttttcctattgacatctggtcattatgatcatagaacatactttatagaatttmaatcctttaaaatttgttttgttttatgatcttggaagtggtgtgtctacatgaatattttgtgtacatttgaaaagaatgtgaatttcgtcattggggtgtgttctataaatctataaatgttatttggatctagttgttaatgttgcc

SEQ ID NO: 616899 - DNA, 600 bp, Homo sapiens
taggaaagactttatttctctttcatttatgaaggataattttgctgggtatgatattcttggctggcagggtttttttctttcaatactttgaataaatatatcatttctttctctccttgcctataaagtttctgctgataaactgctattagtcgtatggaggttcccttacaagtgattggacacttttctcgtgttgtttttagaatatctctttgtcttttacttttgacagtgaatataatgtgccatggagaagatctttttgaattgtatctatttgggggtgcgctgagctttctgtatctggatgtctaaatcctttgctagacttgggaaatttttggatattatttcattaaataggttttctatcccttttgtttcctctttgccttataacacatcaaaaattcgaatatttggttactttatagtttcttatatgtcacacaggctttgttcattgttyttttattcttttttctcttactaggttattttaaaagacctgtcttcaagttctaaaattcttcttctgcttgacctaatctattgctgaagctttcagttgtcttttgtctttcattcggtgaa

SEQ ID NO: 616900 - DNA, 561 bp, Homo sapiens
agcatttagcatttattataccaagactttgtgacattttactatattttataaaatattggtccacagtagattggaaacttaaaaaagaaccaaacaaagccaaytggtcattcaccacaaatagtttgaaaagctctgcctagggtatctaataatggaagagctgaatatcttttaggaaacctccataactttcttttcacatgacttttgaaaagatgttgagaatcaggatccaaaattatactctctaaaattacctatattgttgctaaatactggtacccaaaaaattttgatcatgaccctatgcagaaccgtgtgtgttaataattagttgattctacctgtaggaattgagctatcatgaggaaaaggctaccagacctccactcagattagagacaaaagaacacctgcatatggctgtggtccacccccaaaaataattttccatggtcttagtaatttttgcctggaaaatttttgtatcagatgcagccaaacacccaccttagccattaaaaaaaaaaaaaagtcagtatacatagtataccg

SEQ ID NO: 616901 - DNA, 476 bp, Homo sapiens
ttttaatgcagtaaattaaaatggggaaattaaaacacgttaaatactttccctttatttcactatttactgatacggtatttaagagataatcctgaaaagtatatcagttgggttgattatataaccagagatagtggctattttatcaattccgtggctttcagtaaaaggacagctcaattgcctttttagatacagaatgtttctgaatatgctatttcaagtagaaattccttcctatttttggacaggcatatgtctrctttctgcagaatacaaagaattttcaatgtgtccagcttcagtcctgaaatttgacttacctggatcatatttaatcttttgcacaactgtttaaagcaggagtcaacaaattatatatagcccatgggccaaatccagccctcaaacctatttttgtatggcctatgacctaagaattgtttttacattttaaaattgttaaatttaaa

SEQ ID NO: 616902 - DNA, 559 bp, Homo sapiens
ttacctgtattgatgcaaaaagcctcctgtaattggtcttcctgttttttcctgttgacttaacttcagtccattcttaatatagcaggtaaagtagttatatttaaatataagccatattatgtcactcttttgatgaaaatcctccattgacttttcatctcaaccagaataaaaactaaagttcttaaaatagcctaccaggctctgtgctctgggctgtcattcccagacagccactgccaaccactcctgcctgctcacacccactttgctctagtcatccacactggcttctttgctgttcttagaacatgccaggcaagttcttgctttagagcctttgcactggttgttctctgtaatactctttccctgtatatctacagggatcaatctctcattacttgagatttgtacttaaatgtcaatttaatgaagctttctttagccacttgatctaaaattgcagatttcccctrcttcaccccaattctccttcctgctttatgtttcttttcttgaagacctgttaccatctaccatcccatatatttta

SEQ ID NO: 616903 - DNA, 559 bp, Homo sapiens
ggaaaaagaattttagagggagggaggctgaggtagtgtcttcaacgaggmggctgtaataatcaggcagtgttaagggtttttgagttaaagtagttgcccatgggatgggaatagaagggagataattgaaagacagaaaggagatagaatatataagaattggaaagggctgtttttagatacagtcccaggtttctagaaagtgagactcagagaagttgacttgctcacttatggcagctggttaattgtagagctatgaacctgttaatgttaatactaagctcaaacatttttggagcaagggtttcttatgtatttcttatctgtggcctgaattacgtagttgatccagagtcttaataggtaatcaagaaggaaatgatctgtctggggaaaaaagggggcaataagaataaggtagatgaagggagaaaggaaggtgaaaaaatcagtgaacaggttctgcttctgagaatatgttgggttcgattatttgaactaaccctttttactgaaaacaactaatggtgctagattaaaaacaaaaacaaaa

SEQ ID NO: 616904 - DNA, 622 bp, Homo sapiens
aatgaaaggggaagtaaaaaatatcttgaaacaaacaaaaatggaaacataacataccaaaacatggaatgcagcaaaagcagttctaaaagagaattttatagcaataaatgcctacattaagaataaggaatgatcttaaataaacaacttaatattggacctcatggaactagaaaaataagaacaaagtaaaaccaaagttagaagaaggaatgaaataataaagattagagcacaaataaatgaaataaagagtagaaaaacaatacaaaagatcaacaaaactgagttagttttttgagaagataaaatcaacaaacatttagctagaatttaaaaaaggagggaatatccaaatagaataataaatgaaaaatgaggagagggattaaagatggcsaactagctggatctgggatgcacctcttctacagagaggaaccaaaatattgagtaaaccttcacactttcaacagatcttttgagagaaaacactgaaatttaatatataggccatgacagacatgattgaagaagtaggaagcaacactgctggctcagtattgccagacaccttaggaccagaatggacccaaggaaggtgtgagtgaagaaaccc

SEQ ID NO: 616905 - DNA, 622 bp, Homo sapiens
aatgaaaggggaagtaaaaaatatcttgaaacaaacaaaaatggaaacataacataccaaaacatggaatgcagcaaaagcagttctaaaagagaattttatagcaataaatgcctacattaagaataaggaatgatcttaaataaacaacttaatattggacctcatggaactagaaaaataagaacaaagtaaaaccaaagttagaagaaggaatgaaataataaagattagagcacaaataaatgaaataaagagtagaaaaacaatacaaaagatcaacaaaactgagttagttttttgagaagataaaatcaacaaacatttagctagaatttaaaaaaggagggaatatccaaatagaataataaatgaaaaatgaggagagggattaaagatggcgaactagctggatctgggatgcacctcttctacagagaggaaccaaaatattgagtaaaccytcacactttcaacagatcttttgagagaaaacactgaaatttaatatataggccatgacagacatgattgaagaagtaggaagcaacactgctggctcagtattgccagacaccttaggaccagaatggacccaaggaaggtgtgagtgaagaaaccc

SEQ ID NO: 616906 - DNA, 536 bp, Homo sapiens
cataaatgtaagatgtgaaacttaaaatcytgaaagaaaacctaggaaaaactattctggacattggcttaggcaaagaatttatgactaagaccccaaaagcaaataaaacaagaacaaaagtacacaggtgggacttaattaaaccaaaaagcctgttcacagcaaaagaaataacagagtaagcagacaacctacagaatgagagaaaacatttgcaagtcatacctccgacaaagaactaatatccagaatctacaatgaacccaaataactcagcaagagaaaaacaaccccattaaatattggtcaaaggacatggacagacatttcttaaaagaagacataaagttgccaacaaacattttaaaaatgcttaatatcactaatcatcagagaagtgcaaattgaagccacaatgagatattatcttataccagtcagaatggctatgattaaaagtcagaaaacaacagatgttggcatggatgcagagagaagggtattcttatacactgttggtgggaatgcaaatt

SEQ ID NO: 616907 - DNA, 536 bp, Homo sapiens
cataaatgtaagatgtgaaacttaaaatcctgaaagaaaacctaggaaaaactattctggacattggcttaggcaaagaatttatgactaagaccccaaaagmaaataaaacaagaacaaaagtacacaggtgggacttaattaaaccaaaaagcctgttcacagcaaaagaaataacagagtaagcagacaacctacagaatgagagaaaacatttgcaagtcatacctccgacaaagaactaatatccagaatctacaatgaacccaaataactcagcaagagaaaaacaaccccattaaatattggtcaaaggacatggacagacatttcttaaaagaagacataaagttgccaacaaacattttaaaaatgcttaatatcactaatcatcagagaagtgcaaattgaagccacaatgagatattatcttataccagtcagaatggctatgattaaaagtcagaaaacaacagatgttggcatggatgcagagagaagggtattcttatacactgttggtgggaatgcaaatt

SEQ ID NO: 616908 - DNA, 544 bp, Homo sapiens
agttcattgtcctccttgcagggattctgattcagagggctcaggtggggcctggaatgtgtttgttaacatgactcagatgtgcagtcaatttggggactcactgacagcattgaccttacagtttatgggatgattctttctgttttgctgatgaagaaactgaggcacacagagtctgtaacttgcccaagttccccttgttgtaagtcctggagccagatctcaggtggaccagtgcttctctcccctatacctcatttctgagaaaaaggaaatcttctgsaatttgacttctttcatctaacacatttcctcacaacatgcagccagcatcatattttggccacttactattaaagtgagatgcttttttttttttttttttttgagacagggtcttattctgtcacccagggtggagtgcactggtgattatagatcacggcaatcttgaacttctgggctcaagcgatcctcctgcctcagctttccaagtagttggaactctaggcacacatcaccatttctggctaattttata

SEQ ID NO: 616909 - DNA, 556 bp, Homo sapiens
acagtcaccctgaaatcaggacggaaacttttcttctttactttgctgatatatttccataaagcaaggctggaccctggttctccaccctgtcaatgcaatggctgatccaatgtttctttgtagcatcggggattttttttttttttttttttttttttttttttttgcgatggagtcttgctctgtcacccaggctagagtgcagttgcaccatcttggcttggtgcaacctctgcctcccagattcaagtgattctcctgcctcagcctcctgagttgctgggaccacaggtgcacaacatcacatctggctaatttttgtatttttagtagagacagggtttccccatattggccagggtagtcctgaactcatgacctcaaatgattcacctgtcttggcctcccaaatcacagattctttttaaagcaagagttgttcaaatttatctatcagtcgtgtttcatgtatagatgcctctaaacatttaatgtccatgttatctggtgatataagtccgtatygcagcaacactcttagaaaatggaccaa

SEQ ID NO: 616910 - DNA, 629 bp, Homo sapiens
ggggtctacctgggccatgaactggagctttatcaccttcacaatggagtactcaccgcctatgtcaacagccatgcagacttgctgttcctctaatgagtgaaatgtgccgctgtaagactggtacgaggccaacatttcaggaggaattgagagagtcgaataaccttcatcccaggactcctgggggacttcctcctcttcagactcctgcagattcctgatgagccaggcaggacagggatgatagaagatttaaccaacagacattagacaacaaaacctcccagatgatctgatgggagacagaatggagtggtcacagaaaccaaaggcatttttccttcaagagaaataaaactagccttctaaatacagggtggagggtgactgctctggggacagagcaaaaatgggcagcatgtgctcagtacatttgccacagatgagccaactcagggcacccagmctctccctgtaaactaccatcatgacttgcagcacagagaactgacacagggcttcaactactttgcataaattgggttgaattttacatgcagcattcaagtgaagagagttcttgacgcagtgcagacacagatcttgtgtattaagggccccatttt

SEQ ID NO: 616911 - DNA, 594 bp, Homo sapiens
tggaaactcacagcattgtctctgcagtgttcccggcaaaacgtttaggctgaatttaatcatgaagacattttcagacaacttcagaatgtagatcattgagccagasagctgacctgtcctctataaacaagtccatgtcaccaccatcaatgacaacaacaaaaagatgaggaaatatttggggttcaaaataactaaagaaatgcagctatattatctttttactttttttgaacccaaaatatctcttctcctttttgttgtgtgatttgtggtgatatggactatgtgaaggagacaggtcagttgtcctgctcagtgttctacattctgcagttgtctggtaattacctcctatgaaactcaggctaagcgttttctgcaagaacatggcgttgttcatattctgcaccggcagagtcctgggtgacatgctgtctcctgccagcggctcctgactcctgttctctacaggatggaatcgagaggagcagggctaaggcctcccaatgctgtttgtccatctagctgtggtcttcctaagtactgacaccaattggaggctgaaggactgtggcttctctaaccaaa

SEQ ID NO: 616912 - DNA, 629 bp, Homo sapiens
ttcattataagtaaggtgtctctaaaagggacagatctcctagacccctccttaaccaagtaaccagtcctgatatcatgataatgctgatggacaaactagaccttctctgcccgcagatgggctaaggttggaaactcacagcattgtctctgcagtgttcccggcaaaacgtttaggctgaatttaatcatgaagacattttcagacaacttcagaatgtagatcattgagccagagagctgacctgtcctctataaacaagtccatgtcaccaccatcaatgacaacaacaaaaagatgaggaaatatttggggttcaaaataactaaagaaatgcagctayattatctttttactttttttgaacccaaaatatctcttctcctttttgttgtgtgatttgtggtgatatggactatgtgaaggagacaggtcagttgtcctgctcagtgttctacattctgcagttgtctggtaattacctcctatgaaactcaggctaagcgttttctgcaagaacatggcgttgttcatattctgcaccggcagagtcctgggtgacatgctgtctcctgccagcggctcctgactcctgttctctacaggatggaatcgagaggagcagg

SEQ ID NO: 616913 - DNA, 594 bp, Homo sapiens
tggaaactcacagcattgtctctgcagtgttcccggcaaaacgtttaggctgaatttaatcatgaagacattttcagacaacttcagaatgtagatcattgagccagagagctgacctgtcctctataaacaagtccatgtcaccaccatcaatgacaacaacaaaaagatgaggaaatatttggggttcaaaataactaaagaaatgcagctatattatctttttactttttttgaacccaaaatatctcttctcctttttgttgtgtgatttgtggtgatatggactatgtgaaggagacaggtcagttgtcctgctcagtgttctacattctgcagttgtctggtrattacctcctatgaaactcaggctaagcgttttctgcaagaacatggcgttgttcatattctgcaccggcagagtcctgggtgacatgctgtctcctgccagcggctcctgactcctgttctctacaggatggaatcgagaggagcagggctaaggcctcccaatgctgtttgtccatctagctgtggtcttcctaagtactgacaccaattggaggctgaaggactgtggcttctctaaccaaa

SEQ ID NO: 616914 - DNA, 583 bp, Homo sapiens
tgtggcttctctaaccaaaggagcctagcgggttaacaattgtcaagagcagttggtggttctgaaatacaatcctcagccaaggatccctcctgtgttaaagatggatcagctaaaacaattcaacactgaagatacaaagaatgaggttaggttcattgaaaccagggtaacacctttggatgagctaaacacaaagatgacactgaccttgagcaggtatagaagctcagagacatgmctgcaaaatgaaatccctgaggaactttgtagctacccagagataagtggttcaaattaaaatgtctgactgatcactcccggcatgtgctgcacagttatgtgaacgtgtcacacctaacttgggtccattgtcttcagactgagcacagggtgccactggcatggtctgagaataggaatagagccatgcccactgacccatcctatgtctgggcttccaaatggaactatagtttcattcaaatcttcacgtgcctataggtcctgcctgcaggaatgacatctctcggcttagtaagggctgcttactgtgggaatatgactcccatctggaagacca

SEQ ID NO: 616915 - DNA, 583 bp, Homo sapiens
tgtggcttctctaaccaaaggagcctagcgggttaacaattgtcaagagcagttggtggttctgaaatacaatcctcagccaaggatccctcctgtgttaaagatggatcagctaaaacaattcaacactgaagatacaaagaatgaggttaggttcattgaaaccagggtaacacctttggatgagctaaacacaaagatgacactgaccttgagcaggtatagaagctcagagacatgactgcaaaatgaaatccctgaggaactttgtagctacccagagatamgtggttcaaattaaaatgtctgactgatcactcccggcatgtgctgcacagttatgtgaacgtgtcacacctaacttgggtccattgtcttcagactgagcacagggtgccactggcatggtctgagaataggaatagagccatgcccactgacccatcctatgtctgggcttccaaatggaactatagtttcattcaaatcttcacgtgcctataggtcctgcctgcaggaatgacatctctcggcttagtaagggctgcttactgtgggaatatgactcccatctggaagacca

SEQ ID NO: 616916 - DNA, 583 bp, Homo sapiens
tgtggcttctctaaccaaaggagcctagcgggttaacaattgtcaagagcagttggtggttctgaaatacaatcctcagccaaggatccctcctgtgttaaagatggatcagctaaaacaattcaacactgaagatacaaagaatgaggttaggttcattgaaaccagggtaacacctttggatgagctaaacacaaagatgacactgaccttgagcaggtatagaagctcagagacatgactgcaaaatgaaatccctgaggaactttgtagctacccagagataagtggttcaaattaaaatgtctgactgatcactcccggcatgtgctgcacagttatgtgaacgtgtcacacctaacttgggtccattgtcttcagactgagcacaggktgccactggcatggtctgagaataggaatagagccatgcccactgacccatcctatgtctgggcttccaaatggaactatagtttcattcaaatcttcacgtgcctataggtcctgcctgcaggaatgacatctctcggcttagtaagggctgcttactgtgggaatatgactcccatctggaagacca

SEQ ID NO: 616917 - DNA, 586 bp, Homo sapiens
atgaggtaatgaattattgcctttatgttgggatagaccagggccaggtagaaaagaatgaaagagaaagacagggagagggagagggagagagagacagaggagaaagtgagctcagcgaattggccgggtgacacactgaygaaggggtcaaaggacactctgagttagtgccctcgggacacacagagaacagtgatcatgaaaagagtgggctcaataattttccataaacttgcttaagattccatgcagttgccatacagcctttgaggtatggtcaacctacagtaagttagtaaatgataagggggaggaagaaatggaaacctaaacatctactgcaaggaaaaccaacagcaatgtcagtaggagtaattcaaccttcgttgaaaacatgaaattgaacatactcttgttttccctggacctggcatctccaggtgtcaacacagaattaagcatccataattgctcaaagttacctggggcatgatgggtcttggtcttcttccacttcttggtacttttcaatttctgcaataagttcagacatggacagacatattaagctggttctcctaca

SEQ ID NO: 616918 - DNA, 602 bp, Homo sapiens
gacatggacagacatattaagctggttctcctacacacataacaatccactgtctaatcctcacrcagggacttcaggctcctcagcatgagaataggacactgtgagagatcttcttcaggaggcctgaaggctgatcatgatagagattcctgggtttttgtcccagaaactgtgggtaaaattccctattctggtagatcgttatcccaagatcatttgtcccaagtttgtgcaaatggttatgccatatttttccaatcgatttaaagcaaatgcccccaaatggttgctgggagaaaaactgcaatattcagccctgtctcatcaaatactcagattcttcatggtagcgaggattttagatgctgaaattagagtgaaggatgaaatctacaagatctacaaaattgagacaaaatcagagttgtgtgaatttgtcacatctgcccagatccaacatcttgagagtgggattagggtgccacaggcatggcctgagactaggaagagagccctgctcactgacccatcccttgcctgggcttccaagtggaactagagtttcattcaacctacatgtgcctataggtcctccctgt

SEQ ID NO: 616919 - DNA, 423 bp, Homo sapiens
gtgaattccaatgccaggtctccggggagagcacactcaggaggaagatgagagtccgggtccctgtgggatggacgtggagccctccaggggcattgaactctatagatctgccagtcaggggcagaggggtccagggcagaggagacagagatctgggcaccacccacgaaggcacagtgggcaggggatggagccctctggagggagccagcgcaagggtgcgagaaggagcttgcaaaggaagcagagcrgcagccaggacaagggaaggcacccgcgaggaacttgcctgcagaccccagggttgagtaggctttaaggaggagtgcatggggagcgttgggccgctcacagactgaacacacagaggctggcgtggatgcctgtggcctctgcccttgcaacaacctctgtcttggg

SEQ ID NO: 616920 - DNA, 410 bp, Homo sapiens
tgaattccaatgccaggtctccggggagagcacactcaggaggaagatgagagtccgggtccctgtgggatggacgtggagccctccaggggcattgaactctatagatctgccagtcaggggcagaggggtccagggcagaggagacagagatctgggcaccacccacgaaggcacagtgggcaggggatggagccctctggagggagccagcgcaagggtgcgagaaggagcttgcaaaggaagcagagcagcagccaggacaagggaaggcacccgcraggaacttgcctgcagaccccagggttgagtaggctttaaggaggagtgcatggggagcgttgggccgctcacagactgaacacacagaggctggcgtggatgcctgtggcctctgcccttgcaacaac

SEQ ID NO: 616921 - DNA, 410 bp, Homo sapiens
tgaattccaatgccaggtctccggggagagcacactcaggaggaagatgagagtccgggtccctgtgggatggacgtggagccctccaggggcattgaactctatagatctgccagtcaggggcagaggggtccagggcagaggagacagagatctgggcaccacccacgaaggcacagtgggcaggggatggagccctctggagggagccagcgcaagggtgcgagaaggagcttgcaaaggaagcagagcagcagccaggacaagggaaggcacccgcgaggaacttgcctgcagaccccagggttgagtaggctttaaggaggagtgcatggggagcgytgggccgctcacagactgaacacacagaggctggcgtggatgcctgtggcctctgcccttgcaacaac

SEQ ID NO: 616922 - DNA, 410 bp, Homo sapiens
tgaattccaatgccaggtctccggggagagcacactcaggaggaagatgagagtccgggtccctgtgggatggacgtggagccctccaggggcattgaactctatagatctgccagtcaggggcagaggggtccagggcagaggagacagagatctgggcaccacccacgaaggcacagtgggcaggggatggagccctctggagggagccagcgcaagggtgcgagaaggagcttgcaaaggaagcagagcagcagccaggacaagggaaggcacccgcgaggaacttgcctgcagaccccagggttgagtaggctttaaggaggagtgcatggggagcgttggrccgctcacagactgaacacacagaggctggcgtggatgcctgtggcctctgcccttgcaacaac

SEQ ID NO: 616923 - DNA, 491 bp, Homo sapiens
catccccaagctcttcttattggctttcagtgagacgaggtcgcgcactgcactccagcccgggctacagagtgagactctgtatccaaaaaaaaaaaaaaaaaatagtgaatgaatatctattgatgcatgaagtggctgcattaaaggaaaactagccaagaaaatacaaggcaaaaaaaagtcaaggatcagtatgaaaaataaatatattttaaaagatttgtttttaaagcaacaacacggrtttaaattttaaagtgaaagaagtagctccaagatagaggaaacaggatggcttctgaagaagggaatgttattctttgaaatggaaagaaattatgacaagagggtagcacagactgaagaggtggaggtaaaagggggttctcggccagacacagtggctcacacctgtaataccagcactttcggaggccaaggcaggtggatcacctgacgtcaggagttcaaggccagcctagccaaca

SEQ ID NO: 616924 - DNA, 491 bp, Homo sapiens
catccccaagctcttcttattggctttcagtgagacgaggtcgcgcactgcactccagcccgggctacagagtgagactctgtatccaaaaaaaaaaaaaaaaaatagtgaatgaatatctattgatgcatgaagtggctgcattaaaggaaaactagccaagaaaatacaaggcaaaaaaaagtcaaggatcagtatgaaaaataaatatattttaaaagatttgtttttaaagcaacaacacgggtttaaattttaaagtgaaagaagtagctccaagatagaggaaacaggatggcttctgaaraagggaatgttattctttgaaatggaaagaaattatgacaagagggtagcacagactgaagaggtggaggtaaaagggggttctcggccagacacagtggctcacacctgtaataccagcactttcggaggccaaggcaggtggatcacctgacgtcaggagttcaaggccagcctagccaaca

SEQ ID NO: 616925 - DNA, 333 bp, Homo sapiens
agtgtaacttcaacaaagtacctccatgttcatgaatattcctgttgtggccrgcaaacctccttcatagaaagggacattcccagtattccatggttagagctgggaatgaataaatacattgatatatgatttcccaaataaatgaaatagagttgaaaagcacacagcaagctgtaggcctggcaaggcttcaagaatattacagtaaacatctgatatgcaagttactatttacaacaaaagcttaataaataggcacttcccccttaccattttctttcttgttttttttttctcttgtttcatttttttgtttttgtttttgttttc

SEQ ID NO: 616926 - DNA, 482 bp, Homo sapiens
ccttgtctcttttcttaaaggaagactgtatctttcaaaaatatctacaaaaagtttgaaaacctctattggccgggcacagtggctcacacctgcaaacccagcactttggkaggccaaggcggatggatcgcctgaggtcaggagttcaagaccagactgaccaacatggagagaccattttagtctctactaaaaatataaaattagctgggtgtggtggcacatgtctgtaatcccagctacttgggaggctgaggcaggagaatcgcttgaacctgggaggtggaggttgcagtgagccgagattgcaccactgcactccagcctgggcaataagagtgaaactctgtctcaaaagaaaaacaacaacaacaacaacaacaaaacctctattgcactttgataattagtacttccataaaatagtatagatagtactttgataattaaatgtacattggctgggtgtggtaacccac

SEQ ID NO: 616927 - DNA, 482 bp, Homo sapiens
ccttgtctcttttcttaaaggaagactgtatctttcaaaaatatctacaaaaagtttgaaaacctctattggccgggcacagtggctcacacctgcaaacccagcactttggtaggccaaggyggatggatcgcctgaggtcaggagttcaagaccagactgaccaacatggagagaccattttagtctctactaaaaatataaaattagctgggtgtggtggcacatgtctgtaatcccagctacttgggaggctgaggcaggagaatcgcttgaacctgggaggtggaggttgcagtgagccgagattgcaccactgcactccagcctgggcaataagagtgaaactctgtctcaaaagaaaaacaacaacaacaacaacaacaaaacctctattgcactttgataattagtacttccataaaatagtatagatagtactttgataattaaatgtacattggctgggtgtggtaacccac

SEQ ID NO: 616928 - DNA, 323 bp, Homo sapiens
acaacaacaacaaaacctctattgcactttgataattagtacttccataaaatagtatagatagtactttgataattaaatgtacattggctgggtgtggtaacccacacctgtaatcaaagcactttgggaggccaaggcaggtgaattgcttcagctcaggagttcaagatcaacctgggcaacatggcaaaaccctacctctacaaaaacatatgtcatatacaaattagccagatgtagtgggacatgcctctagtcccagctactygggaggctgaggtgggaggattgcttgagcctaggaggttaaggctgtggtg

SEQ ID NO: 616929 - DNA, 358 bp, Homo sapiens
agagtttatagccattctcctgagagacctcaagacccaattagaagaaaactataacatttgttatatagamggcattttccaaagactagttcaaagatgaaagatatagtcttcctttggatataaaacaaaatctcaagatacaccaaaactgttttgcttttactgaataatttttgtgcatatgtgtttagctgcaagtggctaacaagctgtgattttctttcctttcctttccctttttttttttcttgagacagccttgctctgtcaaccaggctgaagtgcagtggcctgattttggctcactgcaacctcagcctcccatagctgggattacaggtgcctgccacca

SEQ ID NO: 616930 - DNA, 517 bp, Homo sapiens
gctatcatcaggttccaggcttttcttttttcattttaatccatttgctgctgccagaaaatttaatttcatttttagttagtaggccactgactagtttagtgygtagacttcatgtttccatggttctttagtttgtttaattgtctcaaagtggtaaccaataaaagtttccaaatttaaaacctttcatttgtaaatggatttctatgaaacttgtaagtacaaaatctcagaaagatacaattaaattatactacatgatatctacatgtcacagaatcatgatcagaagttttcactcctgctcccaaataaaatgttggcctgacagatattttcaagtaaaatacttggctattcttgaatctgtaagaacatgagtcttttaaattacagcatctgaacaaaaaattcagggaaaaagaaataaataggcccttgactatggcctgccagaatccagtttggagataaaaagggcttaatttggaggcacagataacattgtactatt

SEQ ID NO: 616931 - DNA, 506 bp, Homo sapiens
tgtttggaagtattccctcctcttcaattttttggaatagtttgagtaggattggtattagttcttctttaaatgtctggcaatattcagcagtaaagctatcatcaggttccaggcttttcttttttcattttaatccatttgctgctgccagaaaatttaatttcatttttagttagtaggccactgactagtttagtgtrtagacttcatgtttccatggttctttagtttgtttaattgtctcaaagtggtaaccaataaaagtttccaaatttaaaacctttcatttgtaaatggatttctatgaaacttgtaagtacaaaatctcagaaagatacaattaaattatactacatgatatctacatgtcacagaatcatgatcagaagttttcactcctgctcccaaataaaatgttggcctgacagatattttcaagtaaaatacttggctattcttgaatctgtaagaacatgagtcttttaaattacagcatctgaaca

SEQ ID NO: 616932 - DNA, 454 bp, Homo sapiens
cctgctgagcccagctctgtggggctgtggctgctaagatgttgtctccatcctctggggtaggagcaacatatgttccctctgtcacagcacctgtgagggtggcagagggatggcaacccccaagagggcagagttccatctctccaactgactttgaagcatctttttatcctgcttttctgggaggcttaaagtgaaggcggrgggagatatcacacagtcccaaagcccccactaaatggggagctactgtctttcatctttcatgcagggtaaaagaagacaccttggctacagcaagaggaaagaaggtcaaaccacaggcagaactttcaggttgaatgttagagcagactgtgatcccaagagatcatccaagacccttggtctcagaggatgcctatgaggccctggtccctggctggggtgggaacaataatctcaacagccc

SEQ ID NO: 616933 - DNA, 553 bp, Homo sapiens
ttcaacaacacaaacaaaaacataaattggggaaaggacactctcttcaataagtggtgcygggaaaactgggaagccacacatagaagaatgaaactgaatcctcatctctcacttatacaaaagtcaactcaaaatagcttaaatctaagaaaacttagacttaaatctaagacctgaagccataaaaattttagaagataacatcagaaaaagtcttctagacattggcttaggcaaagaattcttgactatgaccccaaaagcaatgcaacaaaaacaaaaataaatacatgacacctaattaaactaaaaagcttctacaaagtaaaagaaataatcagcagagtaaacagacaacctacagattgggagaaagtatttgcaaattatgcatttgacaaaggactgatatccaaaatctacaagaactcaaacaaatcaacagtaaaaaataataatagttccatgaaaaagtgggcaaaggacatgaatagacaattgtcaaaagaaaatatacaaacatccaacaaagtgaaaaaaatgctcaaca

SEQ ID NO: 616934 - DNA, 553 bp, Homo sapiens
ttcaacaacacaaacaaaaacataaattggggaaaggacactctcttcaataagtggtgccgggaaaactgggaagccacacatagaagaatgaaactgaatcctcatctctcacttatacaaaagtcaactcaaaatrgcttaaatctaagaaaacttagacttaaatctaagacctgaagccataaaaattttagaagataacatcagaaaaagtcttctagacattggcttaggcaaagaattcttgactatgaccccaaaagcaatgcaacaaaaacaaaaataaatacatgacacctaattaaactaaaaagcttctacaaagtaaaagaaataatcagcagagtaaacagacaacctacagattgggagaaagtatttgcaaattatgcatttgacaaaggactgatatccaaaatctacaagaactcaaacaaatcaacagtaaaaaataataatagttccatgaaaaagtgggcaaaggacatgaatagacaattgtcaaaagaaaatatacaaacatccaacaaagtgaaaaaaatgctcaaca

SEQ ID NO: 616935 - DNA, 453 bp, Homo sapiens
tagaaacccaatgtattatatgacattaataggataaaggtgtgtgggggcgaggagaaattcaggatcatctcaactgcagaaaatgcattcaacaaaatctgccacactttcatgataaaaatcctcargccgggcatggtggctcacatctgtaatcccagcactttgggagcctgaggtgggtggatcatgaggtcaggagtttgagaccaggctggtcaacatggtgaaacctcgtctgtactaaaaaaaaaaaaaaaaaaaaaaaatgagctgggcttggtggcaggtgcctgtagtcccagctactcaggaggctgaggcagaagaatcacttgaacccgagatgcggaggttgcagtaagccaagatcgagccactgtactccaacctgggcgacaaagctagacttcgtctcaaaagaaaaaaaaaatcctcgtataaaattag

SEQ ID NO: 616936 - DNA, 453 bp, Homo sapiens
tagaaacccaatgtattatatgacattaataggataaaggtgtgtgggggcgaggagaaattcaggatcatctcaactgcagaaaatgcattcaacaaaatctgccacactttcatgataaaaatcctcaagccgggcatggtggctcacatctgtaatcccagcactttgggagcckgaggtgggtggatcatgaggtcaggagtttgagaccaggctggtcaacatggtgaaacctcgtctgtactaaaaaaaaaaaaaaaaaaaaaaaatgagctgggcttggtggcaggtgcctgtagtcccagctactcaggaggctgaggcagaagaatcacttgaacccgagatgcggaggttgcagtaagccaagatcgagccactgtactccaacctgggcgacaaagctagacttcgtctcaaaagaaaaaaaaaatcctcgtataaaattag

SEQ ID NO: 616937 - DNA, 453 bp, Homo sapiens
tagaaacccaatgtattatatgacattaataggataaaggtgtgtgggggcgaggagaaattcaggatcatctcaactgcagaaaatgcattcaacaaaatctgccacactttcatgataaaaatcctcaagccgggcatggtggctcacatctgtaatcccagcactttgggagcctgaggtgggtggatcatgaggtcaggagtttgagaccaggctggtcaacatggtgaaaccycgtctgtactaaaaaaaaaaaaaaaaaaaaaaaatgagctgggcttggtggcaggtgcctgtagtcccagctactcaggaggctgaggcagaagaatcacttgaacccgagatgcggaggttgcagtaagccaagatcgagccactgtactccaacctgggcgacaaagctagacttcgtctcaaaagaaaaaaaaaatcctcgtataaaattag

SEQ ID NO: 616938 - DNA, 492 bp, Homo sapiens
gggaggcagagcttgcagtgagctgaggtcacaccactgcactccagcctgggcaacagagcgagattccgtctaaaaaaaaaactaataaataaaagtctaaaagttagccatgttaccatcccctagaaatggttataactatttaaatatttaaacttctaatggtatattttgagacagattatattacaaaaatcagtacagagttgcctggttttctgcctcacccttttaacttaattataaacatttgtaaatgtgacattgaaaaagtagaataaaatcataaagcatcatatatttttttctcaaaaatgtcctaacaaaagtgcttttgaggycgattttgggagactcttttgcataaaacttgagccagttcataactgatcttgggtgacatttaaaagaggtgacaattgaggaagttgctgttcccataaggatcacatgaggacaatcccaggaagcccggctgcaaaaccagag

SEQ ID NO: 616939 - DNA, 351 bp, Homo sapiens
ggagaggagtccttgagtatcctgtcccagggccaaacccccaggagtccartcttcaagacatccttgagccgacttccgccgatggagggggatcttcagggtgcctgctgggttctcaggactcctcttcagatcctagttttgacccctccgggttagaaaagatgggctcagcacatctggtgaggcaggcaggtcgtcgctgcagcacagaatgatcccatggccctcaaggcgtggtgtcagctgaaagttcactgatctgtgagccctctgcctccctcctccgttgaaagagcagtggcgtgccccacttctaaaagccctggggctcctgcaagcggacac

SEQ ID NO: 616940 - DNA, 351 bp, Homo sapiens
ggagaggagtccttgagtatcctgtcccagggccaaacccccaggagtccaatcttcaagacatccttgagccgacttccrccgatggagggggatcttcagggtgcctgctgggttctcaggactcctcttcagatcctagttttgacccctccgggttagaaaagatgggctcagcacatctggtgaggcaggcaggtcgtcgctgcagcacagaatgatcccatggccctcaaggcgtggtgtcagctgaaagttcactgatctgtgagccctctgcctccctcctccgttgaaagagcagtggcgtgccccacttctaaaagccctggggctcctgcaagcggacac

SEQ ID NO: 616941 - DNA, 351 bp, Homo sapiens
ggagaggagtccttgagtatcctgtcccagggccaaacccccaggagtccaatcttcaagacatccttgagccgacttccgccgatggagggggatcttcagggtgcctgctgggttctcaggactcctcttcagatcctagttttgacccctccgggttagaaargatgggctcagcacatctggtgaggcaggcaggtcgtcgctgcagcacagaatgatcccatggccctcaaggcgtggtgtcagctgaaagttcactgatctgtgagccctctgcctccctcctccgttgaaagagcagtggcgtgccccacttctaaaagccctggggctcctgcaagcggacac

SEQ ID NO: 616942 - DNA, 351 bp, Homo sapiens
ggagaggagtccttgagtatcctgtcccagggccaaacccccaggagtccaatcttcaagacatccttgagccgacttccgccgatggagggggatcttcagggtgcctgctgggttctcaggactcctcttcagatcctagttttgacccctccgggttagaaaagatgggctcagcacatctggtgaggcaggcaggtcstcgctgcagcacagaatgatcccatggccctcaaggcgtggtgtcagctgaaagttcactgatctgtgagccctctgcctccctcctccgttgaaagagcagtggcgtgccccacttctaaaagccctggggctcctgcaagcggacac

SEQ ID NO: 616943 - DNA, 552 bp, Homo sapiens
ttgcaacaagtaattatttactgtaaacctattttataggattttaaacttaaactactttcaccctatttccaaaaaaaagtattgcataactttaaatagattctcagtttgaaatcatcatacaaactgcagtagcatctgctggtgaaatactgctttgtatctattagaatagtccaaacaattgkgagacaactgcattattagagctgtaaaagttattgtctagaaatctcagagaagaagaggaagttctatggtagatgaataagatgacatctaaactgttctcttcagctactgaagttctgtggatatctcacagcacaaagttcaagtgtatgcccacagctcctcatgccacaagatgtgacacctttccaatctctttttgcaaaagtttccaattatgtctcttttaagagtactttttatacccacatattccagattttgtggtgcacgcaaagacaagatgggaaggggcttccatttattgatgccagctgctccatggaccaggccctgcccatgcatccatgttggttc

SEQ ID NO: 616944 - DNA, 397 bp, Homo sapiens
gcaggaagaagaaaacaaaatctacattctcttttttatattttaracacaagccaacaaataatttggaaagacccatgattagacagggaggattttatgctccttcaagagtaattgagattgtttaattgtatggaggaatgagcatatctcaaggggaattgagaaggtataatatttggatgacagaatcattaagaactggctttgcaccctggctacaccattgcacataggaaatattagggtgcaggggtgcatgcctgtaatcccagcattttaggaggctgaggcaggtggatcacctgaggtcaggagttcaagaccagcctgacaaacgtggtgaaaccccatctctactaaatacaaaaaaattagctgggtgtggtggcac

SEQ ID NO: 616945 - DNA, 397 bp, Homo sapiens
gcaggaagaagaaaacaaaatctacattctcttttttatattttagacacaagccaacaaataatttggaaagacccatgattagacagggaggattttatgctccttcaagagtaattgagattgtttaattgtatggaggaatgagcatatctcaaggggaattgagaaggtataatatttggatgacagaatcattaagaactggctttgcaccctggctacaccattgcacataggaaatattagggtgcaggggtgcatgcctgtaatcccagcaytttaggaggctgaggcaggtggatcacctgaggtcaggagttcaagaccagcctgacaaacgtggtgaaaccccatctctactaaatacaaaaaaattagctgggtgtggtggcac

SEQ ID NO: 616946 - DNA, 368 bp, Homo sapiens
aaaccccatctctactaaatacaaaaaaattagctgggtgtggtggcacatgcttctaatcccagctacttgggaggctgaggcaggagaatcacttgaacttgggaggyggaggttgcagtgagctgagatagtgtcattgcactccagcctgggcaacaagagcgaaattctgtctcaaaaaaaaaaaaaaaaaaaaaaaaaatcacggccccaccaactttttcacataggatgattaaggattccagagcccatgctacctctaggggctcctacccctgccacaccacacatatatcttgacagggcctgttatagagaagaaaaggcccagtaaattaatatcacaatcattgccacatacc

SEQ ID NO: 616947 - DNA, 368 bp, Homo sapiens
aaaccccatctctactaaatacaaaaaaattagctgggtgtggtggcacatgcttctaatcccagctacttgggaggctgaggcaggagaatcacttgaacttgggaggtggaggttgcagtgagctgagatagtgtcattgcactccagcctgggcaacaagagcgaaattctgtctcaaaaaaaaaaaaaaaaaaaaaaaaaatcackgccccaccaactttttcacataggatgattaaggattccagagcccatgctacctctaggggctcctacccctgccacaccacacatatatcttgacagggcctgttatagagaagaaaaggcccagtaaattaatatcacaatcattgccacatacc

SEQ ID NO: 616948 - DNA, 490 bp, Homo sapiens
tattgaattccaattcatttcaaaatatatttcacagattatcacaaaccaggaaataagttgtgtgtatttttctttgttttgttttgtttgtttgtttgtttgtttkttagagagagttttactcttgttgcccaggctgcagtgcaatgccacgatcttggctcacctcaacctccacctccccaaaacctctgcctcccaggttcaagcgattctcttgcctcagcctcccaagtagctgggattacaggcatgtgccaccatgcctggctaattttgtatttttagtagagatggagtttccccattttttttttttttttgagacagattctcactctattgcccaggctggagtgcagtggtgagatctcagctcactgcaacctctgcctcctgggttgaagcgattctcctgcctcagcctcccaagtagctaggatcacaggtgcctgccaccgtgcctggataatttttgtatttttta

SEQ ID NO: 616949 - DNA, 490 bp, Homo sapiens
tattgaattccaattcatttcaaaatatatttcacagattatcacaaaccaggaaataagttgtgtgtatttttctttgttttgttttgtttgtttgtttgtttgtttgttagagagagttttactcttgttgcccaggctgcagtgcaatgccacgatcttggctcacctcaacctccacctccccaaaacctctgcctcccaggttcaagcgattctcttgcctcagcctcycaagtagctgggattacaggcatgtgccaccatgcctggctaattttgtatttttagtagagatggagtttccccattttttttttttttttgagacagattctcactctattgcccaggctggagtgcagtggtgagatctcagctcactgcaacctctgcctcctgggttgaagcgattctcctgcctcagcctcccaagtagctaggatcacaggtgcctgccaccgtgcctggataatttttgtatttttta

SEQ ID NO: 616950 - DNA, 510 bp, Homo sapiens
aatatatttcacagattatcacaaaccaggaaataagttgtgtgtatttttctttgttttgttttgtttgtttgtttgtttgtttgttagagagagttttactcttgttgcccaggctgcagtgcaatgccacgatcttggctcacctcaacctccacctccccaaaacctctgcctcccaggttcaagcgattctcttgcctcagcctcccaagtagctgggattacaggcatgtgccaccatgcctggctaattttgtatttttagtagagatggagtttccccattttttttttttttttgagacagattctcactctattgcccaggctggagtgcagtggtgagatctcagctcactgcmacctctgcctcctgggttgaagcgattctcctgcctcagcctcccaagtagctaggatcacaggtgcctgccaccgtgcctggataatttttgtattttttagtagagttggggattagccatcttggccaggctggtgttgaat

SEQ ID NO: 616951 - DNA, 510 bp, Homo sapiens
aatatatttcacagattatcacaaaccaggaaataagttgtgtgtatttttctttgttttgttttgtttgtttgtttgtttgtttgttagagagagttttactcttgttgcccaggctgcagtgcaatgccacgatcttggctcacctcaacctccacctccccaaaacctctgcctcccaggttcaagcgattctcttgcctcagcctcccaagtagctgggattacaggcatgtgccaccatgcctggctaattttgtatttttagtagagatggagtttccccattttttttttttttttgagacagattctcactctattgcccaggctggagtgcagtggtgagatctcagctcactgcaacctctgcctcctgggttsaagcgattctcctgcctcagcctcccaagtagctaggatcacaggtgcctgccaccgtgcctggataatttttgtattttttagtagagttggggattagccatcttggccaggctggtgttgaat

SEQ ID NO: 616952 - DNA, 510 bp, Homo sapiens
aatatatttcacagattatcacaaaccaggaaataagttgtgtgtatttttctttgttttgttttgtttgtttgtttgtttgtttgttagagagagttttactcttgttgcccaggctgcagtgcaatgccacgatcttggctcacctcaacctccacctccccaaaacctctgcctcccaggttcaagcgattctcttgcctcagcctcccaagtagctgggattacaggcatgtgccaccatgcctggctaattttgtatttttagtagagatggagtttccccattttttttttttttttgagacagattctcactctattgcccaggctggagtgcagtggtgagatctcagctcactgcaacctctgcctcctgggttgaagcgattctcctgcctcagcctcccaagtagctaggatcacaggtgcctgccacmgtgcctggataatttttgtattttttagtagagttggggattagccatcttggccaggctggtgttgaat

SEQ ID NO: 616953 - DNA, 510 bp, Homo sapiens
aatatatttcacagattatcacaaaccaggaaataagttgtgtgtatttttctttgttttgttttgtttgtttgtttgtttgtttgttagagagagttttactcttgttgcccaggctgcagtgcaatgccacgatcttggctcacctcaacctccacctccccaaaacctctgcctcccaggttcaagcgattctcttgcctcagcctcccaagtagctgggattacaggcatgtgccaccatgcctggctaattttgtatttttagtagagatggagtttccccattttttttttttttttgagacagattctcactctattgcccaggctggagtgcagtggtgagatctcagctcactgcaacctctgcctcctgggttgaagcgattctcctgcctcagcctcccaagtagctaggatcacaggtgcctgccaccgtgcctggataatttttgtattttttagtagagttggggattmgccatcttggccaggctggtgttgaat

SEQ ID NO: 616954 - DNA, 523 bp, Homo sapiens
  misc_feature 521, 522, 523: n = A,T,C or G
ccattttgcgttcctactagcagtgtatgagagttctgatttttctacatcctcatcaacactagtcattatttgactttttgatttagtcaccatagtgtgtatgtaatggtatttccttgtgtttttgctttgcatttttttctgacaactaatggtgatgagtatccttttttgtgcttattgaccawttttatatcttccctggagaaatttctattcacatcctcctcccacttgttaattggtttatttattttttattattgagttgtaggaattctttatatattctaaatacacgttctttatcacatatatgatttacagttttcccccattctgtattttccatgttcttgatgctatcctttaagcatagaagctattaatcagatgaagttcatttatctgttttatcctttgatgctgatgctttttgtgtgatatctgagactctttggccaaattcaaaagcatgaagatttactcttgtatttttgctctgagaattctatagnnn

SEQ ID NO: 616955 - DNA, 570 bp, Homo sapiens
gtattgatatatttttgtttatgaagaaatgtgtaggtgtgtaatacaatgtctctctaatctcgaagtcattatcccaacaaactaagcactctaaaatatagattttacccagagaaaagtatamaagtgtcaagtgttgcaaaacccctgaatatcttcccacaggaagggcattcattcaaagaccatcatcagcctttaattttcaccaaattatacttctattaatcatccacagactatctgatctagagcccaacgattgcacaaaagacatataaacttaccatactaatttgtaaattaggaggaaagcaaaatcaaataaaaaatgactcccccattttattattcattccattagtgaaagtagtgagaaatgaaaactgtcagttttcaacttgatatggcacatattagacaatagcctgagatttaaatgaaaactgcatattttgaagttatcaaacaagatactaacaaatttctggtctctctaaacacaactgtacatagtgttaatctccatgtccgtaggcaagactatttgtttatcactgtaagttt

SEQ ID NO: 616956 - DNA, 570 bp, Homo sapiens
gtattgatatatttttgtttatgaagaaatgtgtaggtgtgtaatacaatgtctctctaatctcgaagtcattatcccaacaaactaagcactctaaaatatagattttacccagagaaaagtatacaagtgtcaagtgttgcaaaacccctgaatatcttcccacaggaagggcattcattcaaagaccatcatcagcctttaattttcaccaaattatacttctattaatcatccacagactatctgatctagagcccaacgattgcacaaaagacatataaacttaccatactaatttgtaaattaggaggaaagcaaaatcaaataaaaaatgactcccccattttattattcattccatyagtgaaagtagtgagaaatgaaaactgtcagttttcaacttgatatggcacatattagacaatagcctgagatttaaatgaaaactgcatattttgaagttatcaaacaagatactaacaaatttctggtctctctaaacacaactgtacatagtgttaatctccatgtccgtaggcaagactatttgtttatcactgtaagttt

SEQ ID NO: 616957 - DNA, 605 bp, Homo sapiens
atttatttgcttactagaatgtaagctcgataacaaagcattatggctcttttgttcactgcaatatccctagcactttatgacagtgcctggcatgcttgttgatacttgatgaaaaattttgaatgaattatactttgatttctattcacataataccttaaatgtacaggtgccttaaaaacatcacagaaaacaggcakaagtccacaagaggatttagatatatctgggttacctgacttgcaattaccttgagaaaactaaaatctaaatttctccactaatatttatgttttgccaaaattggtaagatcgaaaatcagtgatatgttatgatgtttaagggatacgggaaatatgtaatatgaactaaatgtgaacattttatttttggttcaatgtactttgactcagccaataaaaacttaataataccttaaatggtgtgtcacaatccaagctaagatagagtataaatacctccttccagcctagtaccttttggcagaaattccacaaagacctttcccctaactgactcctataaacttaatacggtcagctcattttcatgatttttaagggatatgtaggatttatgg

SEQ ID NO: 616958 - DNA, 540 bp, Homo sapiens
cctttctgggggccatagctgtgactgccattaacatagaatggtattttatttctgcaactctaggaacagaaggacatattaaacatttttaccattttgatccgtgataaaagcatctcctccaactcctagctcatgggatcataagttcatatattttttcttttttttttttatgccacaagacaatctagatgttttgtagaaactgcgaatgttagtcccattaaaatgtacacatttactagcccacaatttttgcatataattctaggggcatgtgcaacccctgaagcccatcaacattagagctgtttgggctgyttttatttcagtgcagaaaaatgaaccttaggaagaaaccacagtgatgccctgtttcctggtttctcgcttgctccttgtagttcgttccactctacagtgtggcagagatcttaggcagcgatctagaccattcttgtgttgcttctttagcatgacttacctggacatcccacatgactcccagaatactacattggcaaaacggccaaa

SEQ ID NO: 616959 - DNA, 540 bp, Homo sapiens
cctttctgggggccatagctgtgactgccattaacatagaatggtattttatttctgcaactctaggaacagaaggacatattaaacatttttaccattttgatccgtgataaaagcatctcctccaactcctagctcatgggatcataagttcatatattttttcttttttttttttatgccacaagacaatctagatgttttgtagaaactgcgaatgttagtcccattaaaatgtacacatttactagcccacaatttttgcatataattctaggggcatgtgcaacccctgaagcccatcaacattagagctgtttgggctgcttttatttcartgcagaaaaatgaaccttaggaagaaaccacagtgatgccctgtttcctggtttctcgcttgctccttgtagttcgttccactctacagtgtggcagagatcttaggcagcgatctagaccattcttgtgttgcttctttagcatgacttacctggacatcccacatgactcccagaatactacattggcaaaacggccaaa

SEQ ID NO: 616960 - DNA, 548 bp, Homo sapiens
gatcttctcccattaatcatgaatgtatttaatggtatctagaatggtgaattctatccagaaggattttaatttacattgcccagattattcagagaaattacaatctgtggcagctatagccttacaaaatttatttctttatatacatatacatatatacacacatatatatgtcttcttactaaatatatatcttaactaataagacttgaatgtcaaaatgactcctaatcaatgggctgccgaaaggatgttgtgttagcagcataaaaaacaacagtaatcttttgatacagctccattagagctcttaaatgaccaggtgtgctgtcaattagcagtaatagtttgaaagaaattattttttttctgagcagtaggtctcaactgtaggcttaaaatatttagcaagctatgmtgtaaacagatgttctgttttccaggctttgccgatccatttatagagcacaggcagaacaaatttagcataattcttaaaggccctaggactttcagaatgtaaatgaacactggctttaacttaa

SEQ ID NO: 616961 - DNA, 548 bp, Homo sapiens
gatcttctcccattaatcatgaatgtatttaatggtatctagaatggtgaattctatccagaaggattttaatttacattgcccagattattcagagaaattacaatctgtggcagctatagccttacaaaatttatttctttatatacatatacatatatacacacatatatatgtcttcttactaaatatatatcttaactaataagacttgaatgtcaaaatgactcctaatcaatgggctgccraaaggatgttgtgttagcagcataaaaaacaacagtaatcttttgatacagctccattagagctcttaaatgaccaggtgtgctgtcaattagcagtaatagtttgaaagaaattattttttttctgagcagtaggtctcaactgtaggcttaaaatatttagcaagctatgctgtaaacagatgttctgttttccaggctttgccgatccatttatagagcacaggcagaacaaatttagcataattcttaaaggccctaggactttcagaatgtaaatgaacactggctttaacttaa

SEQ ID NO: 616962 - DNA, 618 bp, Homo sapiens
atctcagctgtccagacttgaaacctcggaaaactttactctttaccacatacctcacaagtcactggttacaaaccctttcaataatccccagtactgttccatatgattcagtaatgcaytcactcaacaaaattcaaaatttgatactaacaaaatatcaaaattagatatctatatactatttatttactattttccaggcactattgcaacagctgagatatggcaacaaatctactaaccatatcttttccctcatggattttctagttatgagagataaagaataacatgtagtggttgaagtagtatatacttctctttaacacattctgaacataaaacacatttccttcatctcaaaaaaagaggcactcatttcaaaactttgtttatagaagttccacttaaaaacaagttttacctagagttgcagtccattaaagtttctgaatgcactaattgacatcattttaatattattcaatcaatcatcaagtatctctgagcacttagagcgcatactttacgaaaagctttgtatggcagggctgagaggttggtgcaaatttggaggtggattttacactacagcaatgtctaaaatgagatttt

SEQ ID NO: 616963 - DNA, 329 bp, Homo sapiens
tgacacctttcctttctattaatgttgacttcccttggttggattcccttctcttcccagcccgagacatgaggctacatcccacatggcaggcagcgttgggtccacatctctgcacacctgcatgctctggtccttggcgtgtcacacagtccacttcaattctcattatcacactccctgtgtgctttactgagcctccatctcttcagttcagagttccacacctgaaccagtaactaaatccatgggagaagatcagatgccctccaggaaaagataaatccaaaatggcgtcctaacctcytgtctgtagccttcaagcccca

SEQ ID NO: 616964 - DNA, 587 bp, Homo sapiens
aagcttccccaggactggtgagaagactggccatggtaggttccccacaagggtgtgtttatgggtgagctgaaggagagagkgaaaccccacgaggagtctctgagaggaaggaagaaccctccgttgccttcacctggaagggaccaactcaggaaggcaccacgtccatttgcagctacgtcccggccctcaatgagacgaggacatgtcaggcagacagtgaaaggagatcaggagagatgccatgcgtgtctgaaatatcagcagaaagcctggtgcctgtctcaaaggatggttcaatatatgcaagtcaataaaggtgactcacgacataaactaagaacaaaaagcatgtgataatctcaagcgatgcagataaagcattcgagaaaggccaagtcctgggaaaacatgagccagcggggtccgggacagctcaccacccatggagatgctggtgggaaaatcctgtaagtgggagtaaggaaggagaccactactactcctgctgccctcctccccccaccttgcctagttcacaaaacaggaagagagaaaaagccaaaagttggaaaaatacaaaa

SEQ ID NO: 616965 - DNA, 587 bp, Homo sapiens
aagcttccccaggactggtgagaagactggccatggtaggttccccacaagggtgtgtttatgggtgagctgaaggagagagggaaaccccacgaggagtctctgagaggaaggaagaaccctccgttgccttcacctggaagggaccaactcaggaaggcaccacgtccatttgcagctacgtcccggccctcaatgagacgaggacatgtcaggcagacagtgaaaggagatcaggagagatgccatgcgtgtctgaaatatcagcagaaagcctggtgcctgtctcaaaggatggttcaatatatgcaagtcaataaaggtgactcacgacataaactaagaacaaaaagcatgtgatmatctcaagcgatgcagataaagcattcgagaaaggccaagtcctgggaaaacatgagccagcggggtccgggacagctcaccacccatggagatgctggtgggaaaatcctgtaagtgggagtaaggaaggagaccactactactcctgctgccctcctccccccaccttgcctagttcacaaaacaggaagagagaaaaagccaaaagttggaaaaatacaaaa

SEQ ID NO: 616966 - DNA, 486 bp, Homo sapiens
gaattccatcaaaggagtgcaccaaaccgtccagtgatagagctgctgggattccaaagaaagaagcactaaacaccagggtgttcatagagcatttgttagagggacttctgcacagtgggtcaccctcgtctccttgcccagtgtctccttgtggatctcaaggatgtgcttccacatagcagcatcttcttcagatggacaaggagacactgggtgttctacccgaagctttaacttaaaataaaaataaaaacaaaaataaacccctagagaatatgatctctcagtagagttgtttcttgggatacacaggcaattcgtttcagtaccccctacatgcaccaacacctgctcgtactccagccccgacattgtctctgctgggcctgcatataggaaaagtctgccgttcatatacacaagtcttgcatcccacaaatgctatagttttgacccccrtttggttgaaaaaagtgtgcatat

SEQ ID NO: 616967 - DNA, 604 bp, Homo sapiens
gacagagcaagagagagagaaaaaaaagagaggagagagagaaaacagaaacaaggtctgtcaaacaggatttgtaagtatttattgtgcatttaaaacacaggttttgattcaacaggtctggattgtggcctgagatactgcgttttcacmaagatcacagggaaatctgaggatgctttgtagtctattttttttgtggaccacactttgaggagcaagatggtaaacatttgaaagaaaatgtgtgttggatccattggatccattcccttatatccttataggcaacatagaaatatcgtgctcagacacagaaatatcatatatacagcaggagagatgaggaaaaccatcacattttcctcaaaggtacaattagtcattattagcaaaggttgttttaccagacattggcttgagtgagccatgaatctacatatgatgctgcatgatttataaacatatgattagatgtctaggggaaaaaagaacaaaacaattcattggcattaaaaatttaaatttaactgacattaaaaatttaaatttaactgatgctagaattacacagtatttctgttttacactaggaccaccaaag

SEQ ID NO: 616968 - DNA, 557 bp, Homo sapiens
ttcccttgggcaatgattggagatgaagaaatcatatgttcatattacatgaaagaatgtttatattgtctatcacattcaaaaaatcttaaagttgtagcatcggtcaaatgttagaatcattttatctaacgaagctgtagactgtaaaaaaaatagaatttcttaacttttattctaacrtccagtcataatttttaaaaataagcatatagaatgcacttgtaaatgaacagcacattctataaataaaccagttgtcaaaaacaagagcaataacagagattttctaaaaatctaactaggatttggactttaaaatgataactttaacatttcctttctaagccatttagcttgttcataagtttaggagtgtgacaatagtcatgcaactaattaataaacattgttttcttaactctcaggaagaaagtgtcttttaaacaaaaattaggaataaaaaatgcatacttctctatttacggtcggaaatatttagtaaattttatgaaatgttatttttctgagcccgataaaaaatgttgaaaagcttc

SEQ ID NO: 616969 - DNA, 566 bp, Homo sapiens
tgttgtgttttcatttttactcatccttaaatatattctagtttcttttgtgatttaatttttgttacattggttgtttaagggtatgttgttttattttcacatacttgtgagttttccttctattattatttttagtttcattttattgttgtcagaaaatataatttgtatgatttcaaactatttaaatgtatttagtcttgttttgtgggttaacgtatctaatcactgcatttatttatttatttaawttattattattattattattttagagacagggtattgctctatcacccaggctggagtgcagtggcaaaattatggctcattgcaactgctgccccctgccccgggctcaagtgtgtccttccaccacagcctcccgagtagctgggaccacaggtgcacacaaccatgcctggctgtttttttgtatttttagtagatatggggttttgccacacttctcaggctggtgttgaactcctgagctcaagtgatccacctgccttggcctcccaaagtggtaagattacaagcatgagccaccgtacctgggc

SEQ ID NO: 616970 - DNA, 595 bp, Homo sapiens
ttatacaggtttttacgtttcttgtttcctccaaatctcatttattcttttatatttccatctctttgtttcttcctcaggccttctttmagagttcttcaatctgattttctaactctttagtgttcccccccccccgccccccgcaggatcttgatctgtcaccaggctggagtgcagtggcatgaacgcgactcactgccgactcagcttgggctcaagtgatcctcccacatcagcctcccgagtagctgggaccacaggtgtgcaccaccatgcctggctcatttttgtattttctgtaaagaaaaggtctcactatccagaatctacaaataaacaaatttacaagaaaaaatcaaacaaccccatcaaaaaatgggctaaggatatgaaaagaagacgtttatgcagccaacagacacatgaaaaaatgctcatcatcactggtcatcagagaaatgcaaatcaaaaccacaatgagataccatcttacaccagttagaatggtgatcattaaaaagtcaggaaacaacaggtgctggagaggatatggagaattaggaacacttttacactgttggtgggactgtaa

SEQ ID NO: 616971 - DNA, 590 bp, Homo sapiens
gggtaatttataaaggaaagaggcttaattgattcacagttccacatggctggggaggcctcacaatcatggtggaaggcaatgaggarcaaatttatgtcttacctggatggcagcagtcaaaagagcttgtgtaggggaattcccctttataaaaccatcagatcccatgagacttattcactatcacaagaacagcacgggaaagacccacccccatgattcaattatctcccaccaggtacctcccgcaacacttggcacttgtgggagctacagtttcaagatgagatttgggtggggacacagccaatatccacccaaccccataatcagtttctcagagtaggaacaagaatattcaagaagctgctttcaagtagtgagtagttctctgctatagagaacatttattttttcagaaatgtagaggtctgtactgtgactcttctactggaacttgctaaagattccaaacacaacattttccatcacagatattcctagcactgctatatttgctctattatgtgacctaagcagcaggacagcctgcagtccaacctgtcctgctgcagttctctcttgct

SEQ ID NO: 616972 - DNA, 590 bp, Homo sapiens
gggtaatttataaaggaaagaggcttaattgattcacagttccacatggctggggaggcctcacaatcatggtggaaggcaatgaggaacaaatttatgtcttacctggatggcagcagtcaaaagagcttgtgtaggggaattcccctttataaaaccatcagatcccatgagacttattcactatcacaagaacagcacgggaaagacccacccccatgattcaattatctcccaccaggtacctcccgcaacacttggcacttgtgggagctacagtttcaagatgagatttgggtggggacacagccaatatccacccaaccccataatcagtttctcagagtaggaacaagaatattcaagaagctgctttcaagtagtgagtagttctctgctatagagaacatttattttttcagaaatgtagaggtctgtactgtgactcttctactggaacttgctaaagattccamacacaacattttccatcacagatattcctagcactgctatatttgctctattatgtgacctaagcagcaggacagcctgcagtccaacctgtcctgctgcagttctctcttgct

SEQ ID NO: 616973 - DNA, 442 bp, Homo sapiens
gaattcatgcctttcaagcattttaaatatgacaatatttataaatgtatggtttggaggaatcgtttaaattctctttcctaattttctttcttttgaagatagattctttcaacaagtaatttgtagtaatgactgtgttkacttcaattttggagcgcagtagctatgttaaagatgaactatttggtctcattgaagccaacacagaacttgctgctgtgttttttcttcagtgataaataaaatacttacagaatttgttttagtgttgatttgtggttatagtattttgtttataatggtaagtttgcatattcagttgagttttttttacttgaatttttatcagtgccattaaatgtctgtgtttagtatcaatgaaaatgaacctaaatataacaaagaaagcatatgtggctaggatgtccccctaacatgt

SEQ ID NO: 616974 - DNA, 568 bp, Homo sapiens
atctctttaaatattacttctctgcctggcacagtggctcacgcctataatcccagcactttgagagactgaggtgggcagatcacttgatgtcaggagttcgagaccagcctggccaacatggtgaaaccccgtctctaytaaaaatacaaaatttagccaggtgtggtggtgcatgcctgttaatcccactacttgggaggctgaggcaggagaatcgcttgaacccgggaggcagaggttgcagtgagctgatatcacaccactgcactccagcctaggcaacagagcaagactctgtctcaaaaaataaataaaatattacttctccctgagttgctccatgctgtgcttcctagaatacctattagatgcatgttggactttctcaccctatcttctatatctcttaacctctcttttatagtctcctttttatcattatgtattgcatttgggagaatctcatcactgattttctcctggtgtctaacctgctatttaacctatctactgagtgtcttcatttccttgttttaagctatctcttacagaaggatgaatggct

SEQ ID NO: 616975 - DNA, 470 bp, Homo sapiens
tggtgacaggcattagaaccacccagggagcttgttagccatacaggatcctggggctcacacattccctgattcagcaggtctggagctagcccaggaaatcaggtggctggctagtcccccagggggttctgatgctcagtcaggctagggaacccctggcttaaaggaagacatccccagcccagaatctggacacctgaggttgagcaccactttgkacaatgacctgaggggctcttttgggcataccttctcctcggggtccatttatctccacccccaattgagaggcttggccccagctctgggttcttagtgttctggtggtcacaaatccctttgtgaatctgatgaaagcaatgaacactctttctagggaacatgaacacacacacacacacacacatacacacgtaagcacaacttaacctataatttaggagcctatagaccccatgtgaagatct

SEQ ID NO: 616976 - DNA, 585 bp, Homo sapiens
gttttctgtattagcagatggggcaagagccaaaaaaaaacaaggaattaccctgaaagtggccccttctgtacctgaggccagtctaaggaatctctgttggcatacaaatagactgtgtgtatcactgggctttacagatacaatctcaaacgctgcgttattactgtgataggtacaatctatgtcttgtctctctaaccacatacgataagtgatggagataagtctrtctgagcaccttggccactgttcaaggagctttaaggaatggcatgagcacatggtattattttgagcgtacagcacaaaggaaggcattactcatcagtttttacccctctgagggtgttaaacttggaaaatgcaaatgggctttctgcctttcaaggacacagggccagaaccccaatttcttgataatcttgctatgtaaacatgctcgtctcgcctttacatctattctcttcattatctacccacctctttcccagaggaaattagagaagaagggtgtgaagagtgagtgttgaaggagtatgtgggcaagtaattatgataaaacggtccctctcttcaacaacg

SEQ ID NO: 616977 - DNA, 585 bp, Homo sapiens
gttttctgtattagcagatggggcaagagccaaaaaaaaacaaggaattaccctgaaagtggccccttctgtacctgaggccagtctaaggaatctctgttggcatacaaatagactgtgtgtatcactgggctttacagatacaatctcaaacgctgcgttattactgtgataggtacaatctatgtcttgtctctctaaccacatacgataagtgatggagataagtctatctgagcaccttggccactgttcaaggagctttaaggaatggcatgagcacatggtattattttgagsgtacagcacaaaggaaggcattactcatcagtttttacccctctgagggtgttaaacttggaaaatgcaaatgggctttctgcctttcaaggacacagggccagaaccccaatttcttgataatcttgctatgtaaacatgctcgtctcgcctttacatctattctcttcattatctacccacctctttcccagaggaaattagagaagaagggtgtgaagagtgagtgttgaaggagtatgtgggcaagtaattatgataaaacggtccctctcttcaacaacg

SEQ ID NO: 616978 - DNA, 487 bp, Homo sapiens
gttatataaccttctaatgatggatttatttattctcttccagaagtgctcaagcctattgcagacaaatttctacaaatttatttttcctttttaatttttcttctgtctggttgacctaactcttcacaggtttccatctagcgttttgtataagtagtcatttaagtatgatttaagaagttcatctgakaatggatactttccctttgtaggggccaagggaaaacttccctgtcaccctctgaaaggttcactgaaaatcattgacaagaggtagattaatgagaggaaaggcatacaaatttgtttgatcacatttttatatcacatgagagccttcagaatgaagacccaaagatacaggataaactgtccatttttatgcttaggttcaacaaagtatggtcagctgtgcagaaatatgattggactaggccaagatgggcagatcacacggtctctatcgagaccatcctggccaaca

SEQ ID NO: 616979 - DNA, 487 bp, Homo sapiens
gttatataaccttctaatgatggatttatttattctcttccagaagtgctcaagcctattgcagacaaatttctacaaatttatttttcctttttaatttttcttctgtctggttgacctaactcttcacaggtttccatctagcgttttgtataagtagtcatttaagtatgatttaagaagttcatctgagaatggatactttccctttgtaggggccaagggaaaacttccctgtcaccctctgaaaggttcactgaaaatcaytgacaagaggtagattaatgagaggaaaggcatacaaatttgtttgatcacatttttatatcacatgagagccttcagaatgaagacccaaagatacaggataaactgtccatttttatgcttaggttcaacaaagtatggtcagctgtgcagaaatatgattggactaggccaagatgggcagatcacacggtctctatcgagaccatcctggccaaca

SEQ ID NO: 616980 - DNA, 487 bp, Homo sapiens
gttatataaccttctaatgatggatttatttattctcttccagaagtgctcaagcctattgcagacaaatttctacaaatttatttttcctttttaatttttcttctgtctggttgacctaactcttcacaggtttccatctagcgttttgtataagtagtcatttaagtatgatttaagaagttcatctgagaatggatactttccctttgtaggggccaagggaaaacttccctgtcaccctctgaaaggttcactgaaaatcattgacaagaggtagattaatgagaggaaaggcatacaaatttgtttgatcacatttttatatcacatgagagccttcagaatgaagacccaaagatacaggataaactgtccatttttatgcttaggttcaacaaagtatggtcagctgtgcagaaatatgattggactaggccaagatgggcagatcacayggtctctatcgagaccatcctggccaaca

SEQ ID NO: 616981 - DNA, 594 bp, Homo sapiens
gattgaaaaacaagatccaactatcatctacaagaaacccacttgtaatatgaagacacatttagattaaaagtaaagaggtagagaaagatatacaacgctaacactaattaaaagaaagcaagagtaactatattttctttagacagtacagacatgagagcaagtaaagtgatcagggataaagaagatactacatattgatacaaaagagtcaatactccaataaaacataacaatccttatgtatccaacaatagagcatcaaactatatgtgaaaagaactgatagaacttcatggagaaatagatgaatccactattacagttggagaataaacatccctctatcagaaattgacagatccaacagccaaaaaaaatcaatgaggatatagctgaagttaycagtactatcactcaagtggatatagttgacatctatacactacttcacccaagcacaccaggttacacattttttttttttttttgcacagagaacattcactaaaatgcatcacatttcagtacataaaatacacttaaggtattatgatctattttttaaataaataattgtttgccatttaa

SEQ ID NO: 616982 - DNA, 394 bp, Homo sapiens
gcacactttcgcgtctatctctcctttagctttcccttcacagttcakttttggtagctggggtttgcttaaattttcacatttcactaaaagctgacttgctcaactatgccagtgcttcacaaaaactattagtgatcctgtctcaaatccttcaactcatttccgacctttacctctccagctccagccacagatctgacatctaaaataaatctcttaatcccataatactgtactctgcctccatgattaaagattcagaagattcagatattggtattagaagtgtttccatagaaagagatgcttaagggtagaaatctagaattggtttgtagatctaatgagatttgacaggactaattacactgctgcaaggcaaaaacagaat

SEQ ID NO: 616983 - DNA, 627 bp, Homo sapiens
tccgtaatctgccctgcttcccaactttccaaatgaaattktactgctgcctctaaattctaaaacatatatattgccagtttagacaggttcagaaatgtacagacttgctccataaaaatatcagatggatttcaaaaatcccatatgagaaaagtttattgttttaacttaaattcagtgtctatttgtggtccaattaactataataggttcggtatagaaacaatgacttctagaacttcagtgatcagattaggggccaattggagatatgtaactattttaaaactattttaacataataaagaaaaactgactatagggaaatatgctggagatagtcattatcaagaagtcaccaagtcctgttttccttcacatttattagggcatagtaatagagacctttccatcatttattctgtattttcattgcaaacctgaaaatacccaattattaatttagattaagaatttatctcaaagatcatagtaatataacccaaagattatgccctgaaatcaagttgcctaaaattcgatgttatttctcttttgttctgtaatctttccttaagactttattgatctcctcataagtgattgaagaaatgggatagtatt

SEQ ID NO: 616984 - DNA, 388 bp, Homo sapiens
gcataattgacttcttcattcaccccatcttttcacacattttatcttatataaaatgtggatttactgagcccaagataaatgcataattgacttttcctctaacccttcttttcacatgtaaaatgtagatttactaggtgttgatcaaagccttacaagaatataactacttgccttactgcctaccctttcccacctttaaaataaatttctttcttcgcctctggtttgctctttctcctttaatactgaagtcctcaaaaccctcttaggaaaaagcatggattacaaaagctccagtgatttgtgtttctttcccaggtgyaacctcaactttggcaaaataaacctctaaattgattgagacttgtttcaatcaattttt

SEQ ID NO: 616985 - DNA, 546 bp, Homo sapiens
tgaattttcaggctgctttttgttagaaaagaaaatgttttgggggctgcttttcattaaaagggaaagcttaccgaggacttccttaccctatctgcctaaataatttctttttaactcctatatcaattgcaatgttccaaaaagataaaatttatttacagaaacagttatttttgcctacctgctgtagtttgtttattttcttggattcatctgagaatagaggtttcaagataaactatcactctaaaagctggggagacaggcaagttgagggagttacagcggagagcttctttctgcttctgtggaacagaagccaatgcagccatgtgcttgtatcaaaatttcagtggtaattttgatgaaattccataggctgggtgtggactatgtcaaaattgagaaactgccgatagctgcatatttagataaatccaattggtcttacctactggawccccaccaagttctaattgtgaacatttgagaaagttcccgagtggttctggtggggtaaggaaagataaatcattgtaaaat

SEQ ID NO: 616986 - DNA, 629 bp, Homo sapiens
atcatttcataggaatacagcagtcttttcaacaaatagtgctgggaaagctgattatttcaattcaagagattgaagttggactcttactgtcttagtcagtttgagctgctccaacaaaatgccacaaactgggtggcttatagacaacataaatttacttctcattttactggaggctggaagtctgagatcaaattgctagcatggtcggcttctggtgagggccctctttcaggttgcaggctgcaaagttattatatccacacatgataacaagagaaattgttagatccttgcttgtktgcttcttaataaagacactaattcatgaggcctccactggcatggcctaattacttctaaaaggcctctcttctaaatattctcacattgggtttagggtttcaacatgtaaattttgaggggacaaaaacttgtggttctttgtaattacctaacaccatatacaaatattaactcaaaatacattcatgaactaaatataagaccttaaactataaaaatctttaaaaaacataggccaaaatcttcattacattagatttggcaatgtggtttattgtatatgacaccaaacatacaggcaataatgacaacaaaaaaag

SEQ ID NO: 616987 - DNA, 629 bp, Homo sapiens
atcatttcataggaatacagcagtcttttcaacaaatagtgctgggaaagctgattatttcaattcaagagattgaagttggactcttactgtcttagtcagtttgagctgctccaacaaaatgccacaaactgggtggcttatagacaacataaatttacttctcattttactggaggctggaagtctgagatcaaattgctagcatggtcggcttctggtgagggccctctttcaggttgcaggctgcaaagttattatatccacacatgataacaagagaaattgttagatccttgcttgtgtgcttcttaataaagacactaattcatgaggcctccactggcatggcctaattacttctaaaaggcctctcttctaaatattctcacattgggtttagggtttcaacatgtaaattttgaggggacaaaaacttgtggttctttgtaattacctaacaccatatacaaatattaactcaaaatacattcatgaactaaatataagaccttaaactataaaaatctttaaaaaacataggccaaaakcttcattacattagatttggcaatgtggtttattgtatatgacaccaaacatacaggcaataatgacaacaaaaaaag

SEQ ID NO: 616988 - DNA, 621 bp, Homo sapiens
ggctggttttgactcagaccatctggatacaaattcgcagtgggacacattaatttcaccaccttggcaaagttatttaatatcactgcactcctattttctcatctataaaatgggataatgacataaactttctcatgttgttaaagaaattaagtaagataatatatgtaaaaaacctagatgagtgtcaggcgtgtattaatcatttagtaaatgccagataaaattatcattattactataatttctgccataaagataaaaatgcattttgcttaccagtaaatatcagcttggaaactatagactttgaaaaactgagatctttcagttaaaatgtcataaaggaaaagacaaaaattattactacagagaaaatgtctctcttctaaataaaagtcacaagaccctcttaagctatttccgatattgttattgacamtctgacctccaaataccaaacagagttttcttaatgtgcaacccaattgttctctctggagccttactttgaggcagaagcagtcaccccaaagtttcagggtgggaggacaacctggttatggcttcacatgtatctattggatttgcaatttttaaatataaaagtttctaaat

SEQ ID NO: 616989 - DNA, 585 bp, Homo sapiens
gtttaacaggtagttaggagacaaggaagtacaaagaagttggtcttgaaaaacaaagaacaggaaactaaagctttttgaagaggaatttatcatctgtgatactttcaatggtaaaaaccacagttacttttgcaccaagctagtaatagtagcagtgctatggtttgaatgtgtcttcttcaaaaytcaagggttgctaatgtgataatattaagaggtgaagcatttaaggggtgattgggtcatgaggacacaagaatgggattacaaaagaggcttcacgcagcattcagtgcacttacctttccaccttctgtcatgtgaggacccagcgttccttcccattggagaatgcagcaacaaggtgccgccttggaagcagagagcagctctcaccaagcaactgaatatctttgtgttgctcttcccagtctccagaactgtgagaaaatattcaagttctttataaattatccagtctgtggcattatgccacagcagcacaaaatggacaagtaataatagcaataattatcataatgttgttattagccctctttcatcaagtaccatgtattgtgg

SEQ ID NO: 616990 - DNA, 602 bp, Homo sapiens
tggccatagttatcttcctgtaattccatcataggagattattattgttaggtaaaatgacacacagatatgttaacttagtcacaacaattttagggatgagaacgggtggacataaatggggaagtttctagtggattgccttccttgactcagtggagctctttcacttaatcagcctaaaaaatgcagttggatacagaatcctgccactgaagctctaagtaacatgaagaaggtaccttagacatcccataaggaatgtgaatccaaagaactaggaactagccaaacctcaccttcatcaacaagtagcttgtttctagtctattttgctggttgtaaatttgctgtagtgcaagtaaccaatcctgtatgaatgaaaaaaaaacatatcaattaataacgaaggctttyatggcaaagaagccaatattttagacagatttaagatgtcttcatcaaaaagatgaaaacaatgtaaaaggtttgcctttactgactctgcttttttttaaaattctgtcattccaaacagttcaaatgtaaaagtgatactattttccattttttcatctaggaattcataccacctcccactg

SEQ ID NO: 616991 - DNA, 551 bp, Homo sapiens
aaatacccatgattcatggaaaaaatgatggcgaaaagtcattccttttctttttgtatggcccacttttgaatttttgcattgctttttctaattactctttctcttgatcacaggggacaaagatattcttgtctagacactgccataaatctaaaattttggctttggggaacaggtaaaaacattagagcaacctgctgtcagacccacttcatgcataaggcaactaagatcctgcaaaggtgatgtgatgttttggaagtttatataaataatgctattccctgcyttctagtgcaagtaacaataacactgcgtttttgtaatgcagctatatcaagccagcagcttatagactttctggtgatgagcatattctttttgagacaatattttaaaatcagaaggcttcacatagaactatgtagaaacaattgagagatactgtggatcttagccctgtgttccatgtaacacttaaaatgctattgctttgggttcctgtcaatagctcggtggtacctattgttttgatgtcagataactct

SEQ ID NO: 616992 - DNA, 579 bp, Homo sapiens
ggcctaccatcctattaatcattttctgattgttcctccgttttttgttactttcttttttgccgtgttgtatgtttctctgaatattttagtacaccattttaatacatccattgaatttctttctccattttttcatattttatttacaatatgaattataaattatatacttaaatttgaacaatttatttagacttaatgttaactgacttcacctaagttagagataattcataacatttgcttaaatagtggtcataatataataaataaattgaaggggaaaatacttttttgcatttacctagatattatcgtttgagatactgttgcttcatttaaagattcaagttttctttggatatcatttttttcyatcctgtagaaattattatacagcgaatctgctggtagcagtatctgttagtacccccttctcttaaatatatgtgttttacttttatttgaaggatatttttgccatatatagaattcttgatttacagtgttttatttcattttctcttttcaggcttttctacatgttgaggcacattagtttttatctctataatt

SEQ ID NO: 616993 - DNA, 598 bp, Homo sapiens
tgtgtcatctcagggaatactttttttgtcttttatcttgaaaccatgtcacatttcccttgctctttgtttgttgagtacataatgtatataaagttacattataacaatgttattatataacatatataatatatataacatatataatataatatwatattatatataatatatatattttgttaataacaatataatataatgttattatattataacattatagacattatgacttttttctgtggttttaaaatttctgtgtaatactttgctaaataataatgtattaccagatcatcaatgcaagttcagacaagttctgtctcatctctgcgagtgttgttgaaatctcaattcacttccagagtgtttgctattttggtttgagtctgtgctatgtaggcatagttcagatatttgcttgatatatatgagaattgtttaaatctcaattcagttctcatgcttttgccatgttttctggcttgagtctgctctgcgcatgcctgttttagtaagctcacactcctgcaagtgcaaccatacttagtaagccttttctcagctgatttgcatgaatgcagaactgcct

SEQ ID NO: 616994 - DNA, 590 bp, Homo sapiens
tagagaaccacaaaccaatgcaaaagccagatagtttcaacattcctttcttttcataattgttgcacagttatatccgttcttatgacgcttttatcatgagtcctgtgcttgtccctcaaatgaaacaagaaggtgcttgcaggtagaaaggatttttactgggcttagtgtcagctccattccatggcactttgctgaccatgctaacaattggtgcttgatgccctacagaatggctttgttcaatactgacttaagacagttaaaagagttgcagatgatattacttctggtgagcagtggagtcacagattaggagaataagaatataaagtagacataggttgtaatagtggaacctgaagttacagtgagaagtcagacaatctggagattggcttcttttctgatactttactgcatagatagcttaattaacaaagtgaaggtgatgyttgttctcactatgccactgagaagttggaaggatgcaagagatgagcaatgtcaacaagtttagtgtcacagaaatgttcaatcagaccctagattaaccatgctggtttctataagatatgaaacagaaa

SEQ ID NO: 616995 - DNA, 364 bp, Homo sapiens
atgggagcatttgtcaagtcaatggatttcattgcatcttgaaaagaaaaattaagaactcagtgaaaggatttatattctgtgcttgcagagttagttttgcctcacacacattatttcccccatccacagacacatcgtggaaggcagggtttttttatacttttgtttcatgttctatctcgatttcagacagttttatccactactaaatgcttacactatagtgtaactgctactatgtgtcttccagataagctataattctattgagaacaagaactacagtcatgtgscacataatgatgttttggtcatcaatgcgctacatatacaatggtggtcctatatgattataatattt

SEQ ID NO: 616996 - DNA, 459 bp, Homo sapiens
gaattcttagccttttgagtaaaatacaagaagatagtctttgctcctgagcttgctcaaggagctacatctcaaagcacccaagaaacttcatgtttgtccaattgaaggaaatgaacccaccacggtcagaatgaatttcaattccaattctcaacttgaagatactgtggtgttcagttgccacagtcaaacattttctttctccttttcctcaactgtctctagcccattccttatatatacaggttctggcataattgaaagttatcattaatgacaaaaaatggttacatttatccaaatgtgatcagtgttagcaggactgatcgtgtccctattcacctgctcccactcttcctgtgttctaagagcctyagtatccttttacattatgctgtgcattaacagcattacagggtggacaacatggctgctgaggtgctaaggttgttataa

SEQ ID NO: 616997 - DNA, 258 bp, Homo sapiens
cttaacatggcggcaggagttggggacggaactgccacacacttttaaaacatcagctctcataagaattcactcactatcatgggaacagcaaaggagaaactgtccccatattccagtcagctcccgccaggtgtgtcgacacttggggattacaacttgagatgmgatttgggtggggacacagagccaaaccatatcacagtataatttagaaaaagatacaggtaggagggatttatcctagaattgaagttc

SEQ ID NO: 616998 - DNA, 536 bp, Homo sapiens
aaatttttatttcagttatttctttttatttcttttacatttgatttttctttatctcttctatttctttgcctaggctttctaatttatcatttgtttgaaacacatttgtaattgattattggagtattttcataaaagccactttaaaatctttgtcaggaaattctaacatctctgtcttcttggtggtggagtctactgattgtcttttttaatttgagaacttcttggttatttgtagagtgagtgatttttttattgaagtctggacattttcagaattccrttataagactctcagtcttacagcataaatcttctgttttagctgttttttcttttttttttttttttatcagacactgctccaacagagagatcatgcttcattatcgtcaggtagagtagaagttcaggctttcctttcatcctctattgatactggggtcctcattattgccagagggagatggaagttgccaatccccatggtgttggtggccttgttagcactggacaatggtgaaaggact

SEQ ID NO: 616999 - DNA, 626 bp, Homo sapiens
atcgaagaaggaaggaagttcatttggctaaaatgagttccttgacagtgcagtaggtagcaggatggcagacaaatgtagacaataagaatacccaggtcactggtcaggccatgtctaagaactgtattcagggtcgggtactacattttaagtagagaatgtgataaatcagaaaagcgggacaaggaacgataaagggtctgaaaatcacatcctacgaggaaaggttgatgtctagcytgcaaaagaaggtaaaccgaattgggagcttcatgtctataagcatataagaggcgtccacatctctagtctatcaaatgggtaaacaaggaggaaaatggtgccaattatggagtatccatatttgctccaaatgaggaacattataacaattataaaatgaaagagttgacttatggagctatcgagaacccttatctggatgtgtctaagcagagattggtaaagattgtcttgttttttattctttaaaaatccatgtaattttttttattatactttaagttctagggtacatgtgcacaacgtgcaggtttgttacatatgtatacatgtgccgtgttggtgtgctgcacctattaacttgtcatttacattaggta

SEQ ID NO: 617000 - DNA, 626 bp, Homo sapiens
atcgaagaaggaaggaagttcatttggctaaaatgagttccttgacagtgcagtaggtagcaggatggcagacaaatgtagacaataagaatacccaggtcactggtcaggccatgtctaagaactgtattcagggtcgggtactacattttaagtagagaatgtgataaatcagaaaagcgggacaaggaacgataaagggtctgaaaatcacatcctacgaggaaaggttgatgtctagcttgcaaaagaaggtaaaccgaattgggagcttcatgtctataagcatataagaggcgtccacatctctagtctatcaaatgggtaaacaaggaggaaaatggtgccaattatggagtatccatatttgctccaaatgaggaacattataacaattataaaatgaaaragttgacttatggagctatcgagaacccttatctggatgtgtctaagcagagattggtaaagattgtcttgttttttattctttaaaaatccatgtaattttttttattatactttaagttctagggtacatgtgcacaacgtgcaggtttgttacatatgtatacatgtgccgtgttggtgtgctgcacctattaacttgtcatttacattaggta

SEQ ID NO: 617001 - DNA, 590 bp, Homo sapiens
atgagtacttgattactgtttatggctgaataatgttccatttggatataacgtattttgtttatccactcatcagttgatgaatatttgggttgttttcacttaatgactattatgagtaatgctgctatgaacatgcatgcataagtttttgtatggacrtaagctttcaattctcttgggtacatgtttaggagtagaattgctgaatcttattattaaactctatgtttagttttgaggacctgccaaattgttttccacagtggctatgctgtttttacattcccaccagcaatatatgatggttctaattttttcacatcttccactgtgcttacatttgttcatttttcttgattctagacatcctagtgggtgtgaagttgtatgacattgtggtttgatttgcatttctcctagagataatgatattaggcattttttcatgtgcttattggccatctgtatatcttatgtggagaaatgtctattcagatcctttgcccattttaaaactggattatttatcatcttgttattgagttataagggttctgtatatattctaaataaaagtacctattagc

SEQ ID NO: 617002 - DNA, 420 bp, Homo sapiens
aatggacacaacttgtagtcttttaggtctgttatctttcacttagcatagtgtttccaaggtttttgtatgttgtatcatgtatgagtacttgattactgtttatggctgaataatgttccatttggatataacgtattttgtttatccactcatcagttgatgaatatttgggttgttttcacttaatgactattatgagtaatgctgctatgaacatgcatgcataagtttttgtatggacataagctttcaattctcttgggtacatgtttaggagtagaattgctgaatcttattattaaactctatgtttagttttgaggacctgccaaattgttttccacagyggctatgctgtttttacattcccaccagcaatatatgatggttctaattttttcacatcttccactgtgc

SEQ ID NO: 617003 - DNA, 590 bp, Homo sapiens
atgagtacttgattactgtttatggctgaataatgttccatttggatataacgtattttgtttatccactcatcagttgatgaatatttgggttgttttcacttaatgactattatgagtaatgctgctatgaacatgcatgcataagtttttgtatggacataagctttcaattctcttgggtacatgtttaggagtagaattgctgaatcttattattaaactctatgtttagttttgaggacctgccaaattgttttccacagtggctatgctgtttttacattcccaccagcaatrtatgatggttctaattttttcacatcttccactgtgcttacatttgttcatttttcttgattctagacatcctagtgggtgtgaagttgtatgacattgtggtttgatttgcatttctcctagagataatgatattaggcattttttcatgtgcttattggccatctgtatatcttatgtggagaaatgtctattcagatcctttgcccattttaaaactggattatttatcatcttgttattgagttataagggttctgtatatattctaaataaaagtacctattagc

SEQ ID NO: 617004 - DNA, 590 bp, Homo sapiens
atgagtacttgattactgtttatggctgaataatgttccatttggatataacgtattttgtttatccactcatcagttgatgaatatttgggttgttttcacttaatgactattatgagtaatgctgctatgaacatgcatgcataagtttttgtatggacataagctttcaattctcttgggtacatgtttaggagtagaattgctgaatcttattattaaactctatgtttagttttgaggacctgccaaattgttttccacagtggctatgctgtttttacattcccaccagcaatatatgatggttctaattttttcacatcttccactgtgcttacatttgttcatttttcttgattctagacatcctagtgggtgtgaagttgtatgacattgtggtttgatttgcatttctcctagagataatgatattaggcattttttcatgtgcttattggccatctgtatatcttaygtggagaaatgtctattcagatcctttgcccattttaaaactggattatttatcatcttgttattgagttataagggttctgtatatattctaaataaaagtacctattagc

SEQ ID NO: 617005 - DNA, 552 bp, Homo sapiens
aagtcaaattagccttgtttccaggtgacacggtctcacacttagaaaagcctaaaaactccaccaaaaaactgttagaactggtaaacaaattcagtaaagttgcaggcacaaaatcgaygtacaaaaatctatagcatttatatatgtcaactatctgaataatctgaaaaagaaatcaagaaagcaatctcatttatagtagttacaaataatataaaatactttgaaatccatctaaccaaagtgaaaattctatccaagcaaggcaataaaacactgatgaaagaaactgaagaggacaccaaaaaaaatggaaatatattccatgctcatggatagaaagaattaatattgttaaaatgacaattgtacccaaaataatgtacagattcaatgcaatccctatcaatatatgaatggcatttttcacaaaactaaaaagaagttctaaaatttatatggaactacacaaaccctaaatagccaaagctggaggcatcacactacctaacttcaaaatatactacaaacctataataaccaaaccag

SEQ ID NO: 617006 - DNA, 601 bp, Homo sapiens
aatgattttacataaaataaaaaatttcatatagtagttctgttgaaatagaatgacatcttcacctctttctgaaagcaagtttaaaaggtcaagtgtgattttgggtaaagtattacataggttttattcacaggactgctgtaaamcattgtttacttttccaagcaaacttaaaccagatttgaaatggttccagagaagtaggctgcctgttgtctatcaccttcatttccatgggagttgcaaagtactcacctaagtccattttccagggcagtatttacagggatcagaagcaattctaattctagtgacgcagacaccttataacctccacgtggagacctcagatccagacacttgcttgtcctcgagttgagttctccctctctcataggcattgctgcttaatctccctctctcataggcatttatcagtgggtagagaatatatgagataggcagcacgtgaaactttgtccatgactgcactttttggaatggccaggcatttactgcatgattcttcaatgccaactacttttcatgtattattccttttaatcccacaagcctataagataggaactactattat

SEQ ID NO: 617007 - DNA, 615 bp, Homo sapiens
ccgttttctgacttggtgaacacagtgacggggcagttcacttttgaacacgttaggtttgagctgcctgttaaatgttcaaggagagatgctgaataggcagtggctattagatactggagtctccagttcaggggagggatgcatcagcatgtagctgtcacttaaagccacgaggcttcttgaaggggtgtrcttggctaagcgctgatttggaagcactcctgccttcagaggcaatgaaaatgaatgcaacaagccatggaaagagaggtttggagagttgtaaatcagagttcacaaatcttaccctaaggtggcagctacctctcagatccagctgatttctgcagtgctaaatgcacaagctggcccagtgggatcagaactccccagcaaaagatatttttcagccccctaattggtgacctctgccctacaggctggaatttggaaatgtggttttgtgtttattcctcaagcctatagtgccatttgatcagcctcttctctgctcacaggctcagggttttcacagtatctaatgcttgatgttgtgcctgggttctcctttaattcataaatctgggcttcaccttccagaggaccagttgt

SEQ ID NO: 617008 - DNA, 615 bp, Homo sapiens
ccgttttctgacttggtgaacacagtgacggggcagttcacttttgaacacgttaggtttgagctgcctgttaaatgttcaaggagagatgctgaataggcagtggctattagatactggagtctccagttcaggggagggatgcatcagcatgtagctgtcacttaaagccacgaggcttcttgaaggggtgtgcttggctaagcgctgatttggaagcactcctgccttcagaggcaatgaaaatgaaygcaacaagccatggaaagagaggtttggagagttgtaaatcagagttcacaaatcttaccctaaggtggcagctacctctcagatccagctgatttctgcagtgctaaatgcacaagctggcccagtgggatcagaactccccagcaaaagatatttttcagccccctaattggtgacctctgccctacaggctggaatttggaaatgtggttttgtgtttattcctcaagcctatagtgccatttgatcagcctcttctctgctcacaggctcagggttttcacagtatctaatgcttgatgttgtgcctgggttctcctttaattcataaatctgggcttcaccttccagaggaccagttgt

SEQ ID NO: 617009 - DNA, 605 bp, Homo sapiens
tggaacaccctcagtgcccaggggtctcttgtccttggtcctggttctccctgggctgccttggtaagttactcttgattcatacacatatttcttagaaatgtggaaaatttttagtgaaaaaaacatgtctgggaagagttacaatctcaataatcctgtatatgtgtttgtgaatttatgtatctttctacaaagagtttcagacaactactaaaacttggatgaactgggtcactgcacatatgaagatgtgaataaaggtttaaatcttaatacattaatattaaatgcattttatagtttctgtgggattaatacttactaggtattaaaatatttttttctcgatttactaacatttgctttgaagagccaataataataataataataatgctgtttcatattgcagagactttgcagtgtgccaataagaggatgtatatgagacccttactcatgtayttttctcttgtgaagctgatcacactggacttttaagtcctttcttcctgacattcagtctttgactctgaattagctgaggcatgagaagttcaccacaggaaggtcctgccctttgtttgctcctaaaggttcct

SEQ ID NO: 617010 - DNA, 527 bp, Homo sapiens
taataatataccagtggatctgggcaaaaatattgaaacaggacattcacttgtgctgagaaccaatcttaacatctcactggcaaactgagttagaaactgcctaaaattccagcatatcaatgatgaaaatcaggtcaggcatggtgctcatgtctgtaatcccagaactttggaaagctgagtcaggaggatcacttgaggccaggagttggagagtagcctgggcaacatagcgagaccctgcctctaaaggaaaattggcrgagcatggcggtgtgcactatgtctcagctgctcaagaagttgaggcgggaggaccacttgagcccagaaattctaaggggtcaatgacatttctgaaggtgagaagtccaggggataggaaagccaagttgggtggaaacctaagcaggcaggcagcatagggagaggaaggaactggcctcagcatcagtgagctggcttttattctcatgacttatcctctggagctaatgactccagcaatcttaaacaagtggact

SEQ ID NO: 617011 - DNA, 527 bp, Homo sapiens
taataatataccagtggatctgggcaaaaatattgaaacaggacattcacttgtgctgagaaccaatcttaacatctcactggcaaactgagttagaaactgcctaaaattccagcatatcaatgatgaaaatcaggtcaggcatggtgctcatgtctgtaatcccagaactttggaaagctgagtcaggaggatcacttgaggccaggagttggagagtagcctgggcaacatagcgagaccctgcctctaaaggaaaattggcagagcatggcggtgtgcactatgtctcagctgctcaagawgttgaggcgggaggaccacttgagcccagaaattctaaggggtcaatgacatttctgaaggtgagaagtccaggggataggaaagccaagttgggtggaaacctaagcaggcaggcagcatagggagaggaaggaactggcctcagcatcagtgagctggcttttattctcatgacttatcctctggagctaatgactccagcaatcttaaacaagtggact

SEQ ID NO: 617012 - DNA, 527 bp, Homo sapiens
taataatataccagtggatctgggcaaaaatattgaaacaggacattcacttgtgctgagaaccaatcttaacatctcactggcaaactgagttagaaactgcctaaaattccagcatatcaatgatgaaaatcaggtcaggcatggtgctcatgtctgtaatcccagaactttggaaagctgagtcaggaggatcacttgaggccaggagttggagagtagcctgggcaacatagcgagaccctgcctctaaaggaaaattggcagagcatggcggtgtgcactatgtctcagctgctcaagaagttgaggcgggaggaccacttgagcccagaaattctaaggggtcaatgacakttctgaaggtgagaagtccaggggataggaaagccaagttgggtggaaacctaagcaggcaggcagcatagggagaggaaggaactggcctcagcatcagtgagctggcttttattctcatgacttatcctctggagctaatgactccagcaatcttaaacaagtggact

SEQ ID NO: 617013 - DNA, 476 bp, Homo sapiens
gacataaaccatagctgatgagaatgtttgttttaatctgctttgagggctgaaatatgacattctcttggttgttaatgctttccggaagaatcataaatggaaggagaggcttagaaatttctttttcttttctactacatttccaatgataccttataaagcttcttccccattaaaattcaaataaagaatataaacccatcttgattaaaacaaaagagatgaagtaatacagttatagagtgaaaagaacaaaagctttakaatcagacagacttactggagttgacatcccatatctgtcactttacaaactgtgaactgtatcaaattcttgacctctttgagcctcagatttctcatctgtgaaatggagattgtgatacttattttgaagaattgttttagagaattaaaagagataatgtattagagaccctagaataggaactgataattaatcactcaactaa

SEQ ID NO: 617014 - DNA, 619 bp, Homo sapiens
gtacgtgtgcatatatatacatacttgttatacattttacatataaagtttataaatgtaatataataaagcataacacaaatttataagtagtaaaatatataatacccttttgtaaattccacgtatccaattgattcttacagtatacttttgttattttttgtagaactcttgtatgcataaccaacttatggttgcaatgctaccatgatttcacaaatgattagaccccaatctgctacctctttttccaataaatttgttgccattaaatcctataagtgatttattgttgagctattgctaacgcttgtrcaaagttacgttcattaaattgaaatagcttttggctttaatattaagcacaacacactgttaagtttaattagcattattaacattttctccatcattttctttagtctaaacaatcaacagaatactaaaccaagtcctgatttgtagtgttggctcctttctttcatgaagcattgccatcatgaccattttcaagctactagggtgacgtcaccgaacacagagtggggaagagaagcacagtagtacaccatcatacagtatttctgccatgctgatacgattgagttaaatagcc

SEQ ID NO: 617015 - DNA, 447 bp, Homo sapiens
gtaacagtggagtctctgtttagagcctgagaaagcatatgataccactaaggtttatggaaaatatgtcaagcaagagagaggcaagtgatttttccattgtctctgggaagggccgtgtgttgtcccctaaatcaggtcagacacaggcaaggtcacatataaatcttgaagactacattggggygaggcaagtggtgatgggagtagtcagcagtggcaatatgtcagagagctggggtgaggcagatcccctcataggcatcctgatcagtcctggaaggtcaggggtgtggtgccagcatgaaggcaacagaatgatttaggctgcaaacaaagtgttatggatgtcaagcagcagctgagctttcactgacaggtaaaagtaaagttttaatgaaagacgcttttccaggggaactaaaaaattggaactcaagggaataa

SEQ ID NO: 617016 - DNA, 564 bp, Homo sapiens
gggttactcatgtcatgcatttgtacttgccagttgtgctggagtgtgatgatatacactgtaggtaggtagcataggcaggggagtacaggaaggagggaaaaattgaggcataatttttggggagtctttgatgatgcaatctttcttcatgtatgttctagatagatggtagtgaaaattgaagcatattttataacaagaatgtatttatgcatatttatgcaatttggaatgatatataactttggcggtyggagaaaatgatgtgtatttatatgttttcataagaaaagatgtctgccttttaaatttttatcttttctatttttaattttttagaagcctagattacagaataagatgaatagaaaagactttaatttgtattaaaagaaacacccacacaaccacctacccacccatacaccaaacacacacacacacacacagatgcctcataaaaacatgcgaaataacacacattaaaccatttcttaatagttgttataccacaggaccagagaaatgagattggtattggggaatcagaaagtttttact

SEQ ID NO: 617017 - DNA, 583 bp, Homo sapiens
agtctttgacatagagcccacagaggtcagccatccttggaacagagttaaatgaagaaggatgtagagtatatctggactgggaaatagccagcgcacattttttttaaagtatttccccctctacattttcacygttgtataaataagattgtgagaaatgctgttgcacaaaatacttcctagctagtgagaattagatagtaagtttaattacaatattaggtaagtatcttgaatgaatgaacaatcagcctgctctgttgatcatgagatataatggaaaaataaacctgcttcgagcatcccatgaatgattaaaatcatgtcatctaatcaagaatcagtagtccttgttttgctccatagctgacattaataaggcccatagggtaggaattttgatttcctatctaggaatccattccatacagccacacccaaatggcattttatatctgttagcaaaatgaggcaaagtcacagactactgacctcaagctgtttctgctgtccaaagaaaatcagagttaaaataaacaagtcaagacttctaggaggacaaaagaaataacccaggttt

SEQ ID NO: 617018 - DNA, 563 bp, Homo sapiens
cctttgtgttaccccttaacagtaacactcttctacccaattctaacccctgatctcttctccacmtttatacttttgtcatttcaagaatgtcatataaatagaatcaaataatatgctaccttctgtgattggcttttttatttaggataacaccatgatgacccatctaagtagttgtacctactaacagttcattgttttaaactgctgaatggtatttcattgtatgggtaagtcacagtttgttcatctattcacctgttggaagaaattttgtatgtttccagtacttggcgattacaaaaaaaaaaaagctgctatgaatgtatacaggtttttgtgtgtaaatgtgtttttatttctctaggacaaacacacccaagagcgtaattcctgggacataggggaagtgcatgtttagaggtgatattttaataaatttgcagttcttaaccaatataaacatccttatatatctattgtttgtgagttttcacaattttttatttataataagaattagatctgctatgccaaggctataggcatatttaaaatgc

SEQ ID NO: 617019 - DNA, 563 bp, Homo sapiens
cctttgtgttaccccttaacagtaacactcttctacccaattctaacccctgatctcttctccacatttatacttttgtcatttcaagaatgtcatataaatagaatcaaataatatgctaccttctgtgattggcttttttatttaggataacaccatgatgacccatctaagtagttgtacctactaacagttcattgttttaaactgctgaatggtatttcattgtatggrtaagtcacagtttgttcatctattcacctgttggaagaaattttgtatgtttccagtacttggcgattacaaaaaaaaaaaagctgctatgaatgtatacaggtttttgtgtgtaaatgtgtttttatttctctaggacaaacacacccaagagcgtaattcctgggacataggggaagtgcatgtttagaggtgatattttaataaatttgcagttcttaaccaatataaacatccttatatatctattgtttgtgagttttcacaattttttatttataataagaattagatctgctatgccaaggctataggcatatttaaaatgc

SEQ ID NO: 617020 - DNA, 491 bp, Homo sapiens
agagtttgttaaaatgcggattctgacccagtagctctggagtaagccctgaagagactgggtttctaacaagctcgcagttaatatccatgctggtggacaattttagaaccccatttgagaagcaaggctcttgktcataagacactatattggggagtatgagcggggagaggaataaaaagatctagtgccttagaaaatggagttaaaaagaatatttacttagtttgcatttctaagaattctccaattttgggctatcagtattgacatcttttatcagatttcagaaactcggtatgctttcctttttaatataaacaacatttttcttgttttgctgacttctagcatttgagaccagttagttcctcaaatggtaagtctgtgtttatgtaacaaaaaatgaatttagatttctactttcaagggttcaataggattctttttttctcttatggatgaatctgtgaagccacaaaaatcaa

SEQ ID NO: 617021 - DNA, 497 bp, Homo sapiens
taaatagtttactggctcaacttaagcaaaaagaaagtctaattttgccagaatattgcagtagaaacttcgtgaagggtattggggctgagtctacaaacatttagcctaactagattggaaaggaaacaaaaatttaaaacaaagaaaccaaaaaaaaaaaaaagtgtgtttgattaatcacagcttggcaatagctcctccacccaatagaaccccagaagcattttcctctgctgatcccctaccatcttctcaactcattcttcttaagaggccccagtgaaagtcagttccactagatgtgtgctgactcagtcaggccakccaacctcgattgagaactcacctgaatgcaggagccatgagccagtcagctcatctctgaagtgagagaaagaacagttcacatcttcgttaattagatactagcaaactaaatgagtagattcataggagtaggctatcattttaccacctgaatgagaaaaggagag

SEQ ID NO: 617022 - DNA, 390 bp, Homo sapiens
tggcacagatatgattcttcagcaaattggctacagctgccaaattgcacattcagacagcccaagacagtaactatttaacagagtatctgtgctgggcctaaaattttcctaagacatgtttttatatatcttatcatcagttgggttgaggtataggctatgaagtatagatgagacattcgtttatctttctaactgaattaagttcttgaaagtgcacagaaaagatggattcatttaacactcatgacttggatttattttgcctcagtgcatttrtctacaagatgagacagacaaatatctgtttaaaggcacctcctagtattgagctgaaagtaacataaataagaaatgcattttaaaagctaaaaattcaagtgtaat

SEQ ID NO: 617023 - DNA, 606 bp, Homo sapiens
agaattgaaaggaagaagtcrctataataaggacttaaatttagaattcccggaatatttacctcaaagagaaatctgaaatcaaaatagactgtttaaatcagaggaggcaaagaaaccattgaatgacattatttttatttttccttgctacccagaggggtaaggtagagatggggagaagagagcttgagtttaaggaacattatatagaatgtagaaaaagaagataatctttgtttatctaagcagtatatgaatagctttctatatttggggatctctgaaagaagaaatcacatctttttcttgtagttatccccctttagaaattatatagttatacaataaatggcactgaatgaataaatcacaagacttgaagcgatgagagaggttttctaattcatcatcccaatttcaggtagactaccataattcagcacagaaacctttttcttgaggacctggagtatttatcgtgagtttgttcttggcctgtgcagtaagcaggcagaacagtcactctccaccagccctacctttcctttcctgtcctttcttcctttcattacaatttgcaggctgtttttctttacttgctga

SEQ ID NO: 617024 - DNA, 606 bp, Homo sapiens
agaattgaaaggaagaagtcgctataataaggacttaaatttagaattcccggaatatttacctcaaagagaaatctgaaatcaaaatagactgtttaaatcagaggaggcaaagaaaccattgaatgacattatttttatttttccttgctacccagaggggtaaggtagagatggggagaagagagcttgagtttaaggaacattatatagaatgtagaaaaagaagataatctttgtttatctaagcagtatatgaatagctttctatatttggggatctctgaaagaagaaatcacatctttttcttgtagttatccccctttagaaattatatagttatacaataaatggcactgaatgaataaatcacaagacttgaagcgatgagagaggttttctaattcatcatcccaatttcaggtagactaycataattcagcacagaaacctttttcttgaggacctggagtatttatcgtgagtttgttcttggcctgtgcagtaagcaggcagaacagtcactctccaccagccctacctttcctttcctgtcctttcttcctttcattacaatttgcaggctgtttttctttacttgctga

SEQ ID NO: 617025 - DNA, 601 bp, Homo sapiens
ctttcttcctttcattacaatttgcaggctgtttttctttacttgctgattgttaataaatttctgcccttcctctccccacccctcatatcagcttacttttccaactaacaaaacaccagtcttgttgaaccatctattacaaacactggagcagaatagcaaagggawtttttaatcaaggaaaaacttgaggttaaattattactatcttgattatgtgggttgttcaaaagaactttaatttttttctccaatgagaaattcctccagataacctattgagtatttgagtcctctgagtcctcctgaggcactagcacactcaattttttatattgattaaattataaaacacaccatacatgcaatttgttagcttgactaagttttgttttgcttttgttctttttggttttgtttgttgttttcctgtttcctttttttaaaaaaaggaaacctctagttctatctactttagggacatttatttggaatgaaataaaagtgacttgtaattatagtttaatgcctcaaaatagaaaaatgtgccaaattgcttaaccaaatacatatttggttgggatttcagagttactcc

SEQ ID NO: 617026 - DNA, 601 bp, Homo sapiens
ctttcttcctttcattacaatttgcaggctgtttttctttacttgctgattgttaataaatttctgcccttcctctccccacccctcatatcagcttacttttccaactaacaaaacaccagtcttgttgaaccatctattacaaacactggagcagaatagcaaagggattttttaatcaaggaaaaacttgaggttaaattattactatcttgattatgtgggttgttcaaaagaactttaatttttttctccaatgagaaattcctccagataacctattgagtatttgagtcctctgagtcctcctgaggcactagcacactcaattttttatattgatyaaattataaaacacaccatacatgcaatttgttagcttgactaagttttgttttgcttttgttctttttggttttgtttgttgttttcctgtttcctttttttaaaaaaaggaaacctctagttctatctactttagggacatttatttggaatgaaataaaagtgacttgtaattatagtttaatgcctcaaaatagaaaaatgtgccaaattgcttaaccaaatacatatttggttgggatttcagagttactcc

SEQ ID NO: 617027 - DNA, 604 bp, Homo sapiens
tattaggatgatgctggcctcataaaatgagatagggagaagtccctctttttctattgtttggaatagtttcagaaggaatggcaccagctcctctttgtacctcccacagctcttacatcatgaatatccaagttaaattaygcctgatctctatatttttcaaacacattagtcaatacatttcctttagtttgtaagtcagccacagttgaattttcttttgcttgcaaacagggattcatatttcttattgacctttcctttgtggacaacttaaagctttttagcttcctcattatttgaaccatacgggacaaggaagatttttttaaaattgattctaaccaaactacattttcaactcaaaccagattgatttcaatcattcctgtaagtctatccttactgatgtacatgtagaagtgaaagtacctgcaaaattattgaacaggtttcaggtcatgttttctttctgacaccttctttagcataattgcaatgaaagtatcttttatcatctcttcaaacaattgtatttgcatttgtcaaaaaatgctccctctgagtggatatctgcccaagacatccttttcatacccac

SEQ ID NO: 617028 - DNA, 604 bp, Homo sapiens
tattaggatgatgctggcctcataaaatgagatagggagaagtccctctttttctattgtttggaatagtttcagaaggaatggcaccagctcctctttgtacctcccacagctcttacatcatgaatatccaagttaaattacgcctgatctctatatttttcaawcacattagtcaatacatttcctttagtttgtaagtcagccacagttgaattttcttttgcttgcaaacagggattcatatttcttattgacctttcctttgtggacaacttaaagctttttagcttcctcattatttgaaccatacgggacaaggaagatttttttaaaattgattctaaccaaactacattttcaactcaaaccagattgatttcaatcattcctgtaagtctatccttactgatgtacatgtagaagtgaaagtacctgcaaaattattgaacaggtttcaggtcatgttttctttctgacaccttctttagcataattgcaatgaaagtatcttttatcatctcttcaaacaattgtatttgcatttgtcaaaaaatgctccctctgagtggatatctgcccaagacatccttttcatacccac

SEQ ID NO: 617029 - DNA, 604 bp, Homo sapiens
tattaggatgatgctggcctcataaaatgagatagggagaagtccctctttttctattgtttggaatagtttcagaaggaatggcaccagctcctctttgtacctcccacagctcttacatcatgaatatccaagttaaattacgcctgatctctatatttttcaaacacattagtcaatacatttcctttagtttgtaagtcagccacagttgaattttcttttgcttgcaaacagggattcatatttcttattgacctttcctttgtggacaacttaaagctttttagcttcctcattatttgaaccataygggacaaggaagatttttttaaaattgattctaaccaaactacattttcaactcaaaccagattgatttcaatcattcctgtaagtctatccttactgatgtacatgtagaagtgaaagtacctgcaaaattattgaacaggtttcaggtcatgttttctttctgacaccttctttagcataattgcaatgaaagtatcttttatcatctcttcaaacaattgtatttgcatttgtcaaaaaatgctccctctgagtggatatctgcccaagacatccttttcatacccac

SEQ ID NO: 617030 - DNA, 578 bp, Homo sapiens
tctctatctgaactgttagaattgccacctataatgctggtgattgttcacaaacactacgcacatatctgtagcagcttcagcattgtgcaggtgcagtaacacacacagactgcccgaaaatatttgttaagctctacaaaagagcaaccactgacaagagataatactataaactgaggaattctctcactcactgtagaaaatctcatagaaacaattagcatcaaagtttgagactttgggaccctggctataaaagtataatacttttttttctgtttctcatactttgaccaactttcagcagagaaygaaaagtatggaagctttaaaacaatctacagaaatgtgataacctgctgaatagccacaactagaagggggaagaaaagaagaaaagaaaacttctacacataatattggatgaagttcaatatgccacacagaaatccatcaatagattctgacaaactagtattaagcaaagaaaattcatggttccttttcccagtgacttggttcagataaaaaaaaccctaggactaaggtcacatatatagcatgacagtcagttg

SEQ ID NO: 617031 - DNA, 466 bp, Homo sapiens
acatcggttcatgataaagtagtaagtaggacttttgtggaaaaatacatggtagagaaaacaacacagaagcttacatcctttgaaaattggacattgcatagggttcaggaattgtctagccacaggttgtttacatgtggtctgagcattttcttaatgtgatcctgtacttaagtgtatataggttcagccagaaaagagaaagatraacatcaaattgttgcaatgccagaagaaaattatagggtgttcccatgtttgaaagatcactagttttcaccattggtttggagcaatgaattatccataaataaaaaccttagagatctctgaccaaaaacatatactttgtttacaaaaagtacaagttcaatgagtagccactcctatcaaaaagattaagtgtattcaatttgaaaaaaaagttagagaaagtaaaagcatgaagtagctttggaaattt

SEQ ID NO: 617032 - DNA, 653 bp, Homo sapiens
aagtgctcaattagtaagtatggattggttgattgactgaaacaattttcagcttcccattaatactttccatttggactagttatttgtattttcaccttctaatggcagaggtaaaatatcctaaataaagccaaagacttttctggaaaaagaagagagttatttattctaatttttctagatttacctgatgattttcaacttgggtaaagaaaaaagcactttaaagttattgaaagctgacacataccacagagtagcggaaaagaaaacattgttaccagccaatcattatgattttatatgatttggttgtcttctttttaacacattattttcagtttctaggacagccataattttgcatgagtttrtaccagatttcttgctctgcctttatgtattttttaaactttctattctttttaatattcttctatcctcttattttgtttttgaaagtttcttcatctctcttctggtatgttatttatcttttaaaataatgtccaatttagtatttatatgctattttgttgagggtttttgttgttaactgtttctttcttcttgattgtccagatgttttcactttacagctttaactggacctccttttacctctaatatccctgacactgttcttagca

SEQ ID NO: 617033 - DNA, 598 bp, Homo sapiens
cccctagggagccctgcaatctaagatccactggcttgaaattctcgctgccagcacagcagtctgaagttgacctgggatgctcgagcctggtggagggaggaacgactgccattactgaggcttgagtaggcagttttcctctcayagtgtaaacaaaaccacgaggaagttcatactggctggggtccactgcagcaccacaaagctgctgtagccagaatgcctttctagattcctcctccctgggcagggtatctctgaaagaaaggcagcagccccattaaggggcttatagataaaactcccatctccctgggacagagcacgtgggggaaggggtgactgtgggtgcagcttcagcagacttaaacattcctgcctgctggctctaaagagagcagtggatctcccagcacagaactggagctctgctaagggacagactgcctcctcaaatgggtccccgacccccgtgcctcccgacccggagacacctcccagcaggggtcaacagacacgtcatacaggagagctcgggctggcatctggcaggtgcccctctgaaatgaagcttccagaggaaggaacaggcagc

SEQ ID NO: 617034 - DNA, 467 bp, Homo sapiens
aggtcaggagtttaagaccagcctgggccacatagtgagaccctgtctctgcagaacatttttaaaaaatgagccagatatagtggtgtgtgcctgtggtcctagctactcaggaggctgaggcaggaggatcacttgagtcaagtggttcgatgttacatgagctgtaattgtgccactgyacttcagcctgagcaacagagcaacactccatctctaaaatatatatataaaataaaaataactctgaaaggcaaaaatctcataaatctagtttaaaacacagcaaaacctggggggtggggagaagctggcaaaatgcatataaggcattaatagataatacagaaagacctccaagaaatcaatacaaaacatttttagaagtccattttaacttctgtcaacattagcaggacatctaatttgaatgcccactactgtgctcattcgagaaagttcaataa

SEQ ID NO: 617035 - DNA, 584 bp, Homo sapiens
taaggaaaggacatggaggcttctgggttgatggtggtaamatttcataaaatctctgggtttcagccaagtgaagaaggggaggggcctcctcagcagagggactagaaagtgccaaggcaggagtgaagcaacatgatgtgcctggaaaacctctagaaagtgaagtgtttatgacaatcaggggcagtagataaggttagaaggcagacaaggaagctctgctgaggatttaaaaattattctgaaagctatggggagccactgaagaaatttaagcaggggtttaaattcctttaaatttaataatgactaccctgaaaacagtgtggaaaagataattagggccgggcgcggtggctcacgcctgtaatcccagcactttgggaggccgaggcgggcggatcacgaggtcaggagatcgagaccatcctggctaacacggtgaaaccccgtctctactaaaaatacaaaatattagccgggcgtggtagcgggcgcctgtagtcccagctactctcgggaggctgaggcaggagaatggggtgaacccgggaggcggagcttgcagtgagccgagatcg

SEQ ID NO: 617036 - DNA, 584 bp, Homo sapiens
taaggaaaggacatggaggcttctgggttgatggtggtaaaatttcataaaatctctgggtttcagccaagtgaagaaggggaggggcctcctcagcagagggactagaaagtgccaaggcaggagtgaagcaacatgatgtgcctggaaaayctctagaaagtgaagtgtttatgacaatcaggggcagtagataaggttagaaggcagacaaggaagctctgctgaggatttaaaaattattctgaaagctatggggagccactgaagaaatttaagcaggggtttaaattcctttaaatttaataatgactaccctgaaaacagtgtggaaaagataattagggccgggcgcggtggctcacgcctgtaatcccagcactttgggaggccgaggcgggcggatcacgaggtcaggagatcgagaccatcctggctaacacggtgaaaccccgtctctactaaaaatacaaaatattagccgggcgtggtagcgggcgcctgtagtcccagctactctcgggaggctgaggcaggagaatggggtgaacccgggaggcggagcttgcagtgagccgagatcg

SEQ ID NO: 617037 - DNA, 584 bp, Homo sapiens
agaataaaacctggattccttcccacaggtgtgagggttacaggaatccacctcccctcttaagactcttctactctctcccggattcattgkcttccttttggacccagatactccaaaccaggttctaccttgggcttgaaccactggtccctctgcttggaatgctcttccctgagtcttcagatagctggcttcttcttggcctggaggtctcaacttaaataacatctcgaagagaactttcctgaccacccaaactaaaggaacctattctttcatatcctttcatcatggggtagttctctcacagcacttttcactacctggaatatttttctggatttggtagtctatatcaattgatggattctttctctagatgacaaactccaggagggcagaattcttggctggcttggtccaatctttatccccaactaggacccacaactggatgtggcacacaaatattcactgaatgaattattttcaggttactgaaccatttagggttttcttttatccctcaaaggccaagtaattggactggagtaaggctggataagcctttggaagatttg

SEQ ID NO: 617038 - DNA, 584 bp, Homo sapiens
agaataaaacctggattccttcccacaggtgtgagggttacaggaatccacctcccctcttaagactcttctactctctcccggattcattggcttccttttgkacccagatactccaaaccaggttctaccttgggcttgaaccactggtccctctgcttggaatgctcttccctgagtcttcagatagctggcttcttcttggcctggaggtctcaacttaaataacatctcgaagagaactttcctgaccacccaaactaaaggaacctattctttcatatcctttcatcatggggtagttctctcacagcacttttcactacctggaatatttttctggatttggtagtctatatcaattgatggattctttctctagatgacaaactccaggagggcagaattcttggctggcttggtccaatctttatccccaactaggacccacaactggatgtggcacacaaatattcactgaatgaattattttcaggttactgaaccatttagggttttcttttatccctcaaaggccaagtaattggactggagtaaggctggataagcctttggaagatttg

SEQ ID NO: 617039 - DNA, 584 bp, Homo sapiens
agaataaaacctggattccttcccacaggtgtgagggttacaggaatccacctcccctcttaagactcttctactctctcccggattcattggcttccttttggacccagatactccaaaccagkttctaccttgggcttgaaccactggtccctctgcttggaatgctcttccctgagtcttcagatagctggcttcttcttggcctggaggtctcaacttaaataacatctcgaagagaactttcctgaccacccaaactaaaggaacctattctttcatatcctttcatcatggggtagttctctcacagcacttttcactacctggaatatttttctggatttggtagtctatatcaattgatggattctttctctagatgacaaactccaggagggcagaattcttggctggcttggtccaatctttatccccaactaggacccacaactggatgtggcacacaaatattcactgaatgaattattttcaggttactgaaccatttagggttttcttttatccctcaaaggccaagtaattggactggagtaaggctggataagcctttggaagatttg

SEQ ID NO: 617040 - DNA, 641 bp, Homo sapiens
acatttagaataaaacctggattccttcccacaggtgtgagggttacaggaatccacctcccctcttaagactcttctactctctcccggattcattggcttccttttggacccagatactccaaaccaggttctaccttgggcttgaaccactggtccctctgcttggaatgctcttccctgagtcttcagatagctggcttcttcttggcctggaggtctcaacttaaataacatctcgaagagaactttcctgaccacccaaactaaaggaacctattctttcatatcctttcatcatggggtagttctctcacagcacttttcactacctggaatatttttctggatttggtagtctatatcaattgatggattctttctctagatgacaaactccaggagggcagaattcttggctggcttggtccaatctttatccccaactaggacccacaactggatgtggcacacaaatattcactgaatgaattattttcaggttactgaaccatttaggkttttcttttatccctcaaaggccaagtaattggactggagtaaggctggataagcctttggaagatttgcttaattttataggtcagaaaactgggacaaaaagatgcataactggccaa

SEQ ID NO: 617041 - DNA, 540 bp, Homo sapiens
gctacattgcgtaaagtcacaattccaaagttttaagtccttgatcctaagatgaacatatccagccctaaaagacttcactatctcttgctgtgagtcctccacccacccccatcctgcctgttatttggtcagttttctagctgtcatattttctttccatctttccaagtgtggtaagtgttcaaacaatgggttgaaataaaaaataagaaggaatgatccactgtaactgggatggttaaaaaaggtgtctttgtagagaaaagaccagrctaaagagtaaacaccagccagtcatgagaagttgagaaaagagtgttcctggcagagggagcaacttgtacctgggcaggcaagaatctcttgtactggaggaactcaaatgtgttctatggaaccagagcatgcagaggaagggagagatggcatgagattaggctgaacagaatgtcaaagttcagatcatgtaggttgtggtgaggagtttgaaagattttagattttttgtgtaagtgttagaagctattgaaggctttg

SEQ ID NO: 617042 - DNA, 458 bp, Homo sapiens
tgggtttagggggaaaatggtattgcctgtacctgacatctaatatcattttccatctggctttatgtgaccctaagtaacaaatatcaggggttaagaggaagtcttagagctccaacacgttctactttccactcacccacagttaagaatctaagagaaatccccaaacctcaatgactcagaataagacagccctgtccaggcctctgcagcagggcaaatggagccccagggctctgcagtgttcttcattccacaacctatgacaccctcttcacatcaaaatttatcactgaaacacatttgcccctttatcccagaggaagattcaaggctcccggtgcattcctcattaccaagtatagttgccagataaaatataggatgacygatcaaatttaactggacaccctgtatttttatttgctaattctggaaactctagcccaggcctc

SEQ ID NO: 617043 - DNA, 567 bp, Homo sapiens
agacacatttcaagcactcagtagcaatgtgtgattattgccttctctactggacagcacagctttggaaaattccagccttcagccatcaagttctcctccactcccacagcagctatggagtcttcccagttaagcactaaacaatgtagaggtctccccataatcttgacacacaagatacaggttttaagctgctaaattttgggataatgattggcactgatagtggaacytaggtactactagaaaggtgggttacgagaacagatgtgttttttgtcctctgtttaagcttaattatttttgagaaagattaaatcatagaatcttagaggcccttagaaaaggtcttaaagagtgtttatttcaacctcctacctagtgctaatcatgtctatatcatcctcagaaaatggtctactcatctttgcttgatcatttacaagttacacctcacaagaaaatgtattgaattttttagtgatttttactttttgaaattttcctttatattgaatttttaaatggcctttttataacttctcttcaccagtgctattttgg

SEQ ID NO: 617044 - DNA, 567 bp, Homo sapiens
agacacatttcaagcactcagtagcaatgtgtgattattgccttctctactggacagcacagctttggaaaattccagccttcagccatcaagttctcctccactcccacagcagctatggagtcttcccagttaagcactaaacaatgtagaggtctccccataatcttgacacacaagatacaggttttaagctgctaaattttgggataatgattggcactgatagtggaacctaggtactactagaaaggtgggttacgagaacagatgtgttttttgtcctctgtttaagcttaattatttttgagaaagattaaatcatagaatcttagaggccyttagaaaaggtcttaaagagtgtttatttcaacctcctacctagtgctaatcatgtctatatcatcctcagaaaatggtctactcatctttgcttgatcatttacaagttacacctcacaagaaaatgtattgaattttttagtgatttttactttttgaaattttcctttatattgaatttttaaatggcctttttataacttctcttcaccagtgctattttgg

SEQ ID NO: 617045 - DNA, 617 bp, Homo sapiens
taatatgatacatattatatagtatataatatgatacatattatatagtatataatatgwtacatattatatactatataatatgatacatattatatagtatataatatgatacatattatatagtatataatatgatacatattatatagtatataatatgatacatattatatagtatataatatgttttttatgtatatactaaaaacttttttttctgaaattcatatgcaactgagagtcctgtattttttcaggcaatcctaaaacctagctaggcttacacaataaagctcaaaaagtttcctatagcttaagtaatgaacattttataatttgttaatacctaacctttaggtatcattaagtactacattgacatagagtacccatagcagcaaaccctttgaaacatggttcatttattaaatatttgctgaatgcctttatgtgtttagacttatgctagctctaaggggcactccaaaaaagtgaaaagcaagtctgtatcctttgaccaacttgcttttcacataagatgaataagttcgagaaacctaacgtgaagcttggtaactataatatcttgcatacttgaaatttgctaagagaat

SEQ ID NO: 617046 - DNA, 617 bp, Homo sapiens
taatatgatacatattatatagtatataatatgatacatattatatagtatataatatgawacatattatatactatataatatgatacatattatatagtatataatatgatacatattatatagtatataatatgatacatattatatagtatataatatgatacatattatatagtatataatatgttttttatgtatatactaaaaacttttttttctgaaattcatatgcaactgagagtcctgtattttttcaggcaatcctaaaacctagctaggcttacacaataaagctcaaaaagtttcctatagcttaagtaatgaacattttataatttgttaatacctaacctttaggtatcattaagtactacattgacatagagtacccatagcagcaaaccctttgaaacatggttcatttattaaatatttgctgaatgcctttatgtgtttagacttatgctagctctaaggggcactccaaaaaagtgaaaagcaagtctgtatcctttgaccaacttgcttttcacataagatgaataagttcgagaaacctaacgtgaagcttggtaactataatatcttgcatacttgaaatttgctaagagaat

SEQ ID NO: 617047 - DNA, 617 bp, Homo sapiens
taatatgatacatattatatagtatataatatgatacatattatatagtatataatatgatacatattatatastatataatatgatacatattatatagtatataatatgatacatattatatagtatataatatgatacatattatatagtatataatatgatacatattatatagtatataatatgttttttatgtatatactaaaaacttttttttctgaaattcatatgcaactgagagtcctgtattttttcaggcaatcctaaaacctagctaggcttacacaataaagctcaaaaagtttcctatagcttaagtaatgaacattttataatttgttaatacctaacctttaggtatcattaagtactacattgacatagagtacccatagcagcaaaccctttgaaacatggttcatttattaaatatttgctgaatgcctttatgtgtttagacttatgctagctctaaggggcactccaaaaaagtgaaaagcaagtctgtatcctttgaccaacttgcttttcacataagatgaataagttcgagaaacctaacgtgaagcttggtaactataatatcttgcatacttgaaatttgctaagagaat

SEQ ID NO: 617048 - DNA, 452 bp, Homo sapiens
actcctcaccacccccagaaaataaagtccaggaactcactaggaataggatagctcctcacacagcctcctaagaccgtaaatacattttaccttcagggcagtgggtttgttattgctgtttgtcttggtttctttctttataaaacactataaagagatatgtgtattcgagatattaaaagggaggatggcttggaaaagcctcagatgccctctgaattccttcactgscatctcttgggtttctgcagctatatcctctggccctggcaacagcttcctggccaggagaccctggcacaaacctgtgccaccagagtcaaatcagctctggggattacaggtgagttctaatctttcacactcggtccgatggtgggggcttataaactggctggctcacacacctctatgctattacctgaattctcaggctcttcactcttgct

SEQ ID NO: 617049 - DNA, 515 bp, Homo sapiens
tgccctctgaattccttcactggcatctcttgggtttctgcagctatatcctctggccctggcaacagcttcctggccaggagaccctggcacaaacctgtgccaccagagtcaaatcagctctggggattacaggtgagttctaatctttcacactcggtccgatggtgggggcttataaactggctggctcacacacctctatgctattacctgaattctcaggctcttcactcttgctttagggcttagctgaatatgctggcctaagccagacttctcatggktggggtcctggtacctcatagcaccctctattcctgggagggactacctgccttactgggcagcatgtggccactgatggctacatctcctggcatgtgcccaactggttgggcttttacccattatagcctgattctcagccctgctacacatatgactcacaacagagcttttaagaaatacttatgccagggccccacccttaagaattcagaggcaggtggtct

SEQ ID NO: 617050 - DNA, 515 bp, Homo sapiens
tgccctctgaattccttcactggcatctcttgggtttctgcagctatatcctctggccctggcaacagcttcctggccaggagaccctggcacaaacctgtgccaccagagtcaaatcagctctggggattacaggtgagttctaatctttcacactcggtccgatggtgggggcttataaactggctggctcacacacctctatgctattacctgaattctcaggctcttcactcttgctttagggcttagctgaatatgctggcctaagccagacttctcatgggtgggktcctggtacctcatagcaccctctattcctgggagggactacctgccttactgggcagcatgtggccactgatggctacatctcctggcatgtgcccaactggttgggcttttacccattatagcctgattctcagccctgctacacatatgactcacaacagagcttttaagaaatacttatgccagggccccacccttaagaattcagaggcaggtggtct

SEQ ID NO: 617051 - DNA, 590 bp, Homo sapiens
tggagagactagtatgttgtcaacaaagaggaacatggattttgctctgctcggcaagggcccaactaattttagggaacctgaatgtgcaattgactaagttaacaaatcctataaaactatccagcaatgcaaagtgacctgggaagattaaggccttgagcatgtcctggggctggagattagttagacagaatgaacatttacgaatcctcataaataaataattatattggagctgcccatcttaaacttccttcatccaaaratgaattatgtaatagcttgacctggaataaaggtcaaaagctgattttaagggaagaagagtggcagagtagagctagacagatcagagatctaggaaagaaacaaaagtaaacaaacatttcagaatactgaccatcagaggttggtcactgttagtcttgaacacatagaagatcctataatataaattgagatacctagaaatatcataaaaatatgaaacatgataatgctggaagactgtctgttttgttcacagatctatctctagagcagtggtggtgcccagcagatttaaataaatatctgttaaattaatg

SEQ ID NO: 617052 - DNA, 558 bp, Homo sapiens
cagaatgatgaaagttacggcgaaaaaggttgtgaatttattatccagcttaagattttaatgacaaaatgacataaaatattacttttgatgtgccttgacattttcctttattagaaaatattttcaaatagctaagtaacagcaccattagcaaaaatattgaattttgcagaatattactctcagtgtcacctggcatgggatgagacatactactcagtgtgaattcctaagactgaatgagggctttgaatttgaataaaggttcacaaacttcacaaaaatgtgtctttccttctggcatgaactttgagaaatacttctgccagtgtttatacagttttaggagggcttcgtggtttatgawcagattagtctattttccccctagtgcatggctcccaattccacatgtggaaatgtttctctgagagcagtaatgagtgaagcctgtgcttcaagagttcctgcagtcaggaataatcaaaatctaataaaggcagtcggtttgagagacactagatttcaaatgtggtcttattttagcaagctaga

SEQ ID NO: 617053 - DNA, 508 bp, Homo sapiens
ttaggaataaaagggaaagaaggtttgcctgatgtactttccaacttgacttttcccttggcttagtgatttttggggtcctgagatttattttcctttcacactcatattcatctttctgtcaagaatcaactcacttcaaagtaaattcaatgtttgcaagaagtttctctgtaaatgtgatgggatttaatttttgratcatgacagtttagcatttttcctcaaaagtaccaactttactgaaaaatagaagatatttcatagggtaatacaagatactttttcaatatttatctcactttccagatacttggatattttctatagcaaaaatgtggtcattggtacctcacgtatgggaaaattctgtagtctaatccccacccccagcctccaaaaaaaaaaggattcctgcattgaattttgtttcagtaacacattttacataataacttataatcattgccgttttatagatcatttattaataatatatttacatatg

SEQ ID NO: 617054 - DNA, 482 bp, Homo sapiens
agctgggcctggtggcaggcacctatagtcccagctacttgggaggctgaggcaggagaatggcgtgaacccagggggcggagcttgcactgagctgagatggaaccactgcactccagcctgggtgacagaataagactctgtctcaaaaaaaaaaaaagttatgtgaatgtggtctctctcaaaatatcttacagtagtactctcctattttgggaccatagttgaccacaagtaagtgaaatcatggaaagcaaaaccatagatgaagtgggacttctgtacttagaaagaagttaagcattaaccaatcctggacctgccatcctacctcttttctgctcagggtccatgaatcrcatgcatactgcgagtttgaatatcccagtcatcagcacagtccaggccttggtttccaacttcttggagtgattctttctccacccagtcaagctgatgaaaagtcttgtgcccttgacaaa

SEQ ID NO: 617055 - DNA, 585 bp, Homo sapiens
ccccttcctaataaaccatgttgaccctgctcaaaatcctcttcaggccacctgtacactgagatgcactggtcctgtgttgtgtaaatatatttaaatatgtgtttttattttcccagaaagccagcaacattgccatttagctacttacttcatgtctgaagtatatagacttccacctaacacttagcaatcacttagaagtttcattgataccaatgtgtatgctatctggtttttatctgaaagtcacctaaaatagttgatattccagaaaagaaagcaaaggaacatattatatagtttgaagtcacatcttcagaaagctatatacctaaactctattactttacacccctgtaaaatatatcttcattasatgtattgattttaaaaacatggctatatattggttttgtaagacatctttttaaaagttcgtacttgtaaagtcagcacattttataagtttttctacgaaaataatcagaaatgcccacaaacaaatacactaggatattaatcactacaatatagtagagaaaacatggaaaactctaaacgctgaatggtagagattagtta

SEQ ID NO: 617056 - DNA, 535 bp, Homo sapiens
aaatatctgtttgagtccccgctttcatgttttaagggtatatatccatgtggcatttatattttgtgataattctatgttaaaattttttgaggaactgccataccattttcyacagtgctacaccatttacatttccaccaacaatgcagaagcgtcccaatttctccacatccttgccaatacttgttactttctgtatttgttttgttttggttttgataatagctatcctaatgggtgtaacatggtatcccattgtgggtttgatttgcatatccctaatgactagtgatgttgagcatcttttcatgggattgctatttgtatatcttttttgaagaaatgtccatttaagtcctttgcccatttttaattgggttatttggtttcttgttcttgagttgttaaaaactactatagtttgaatgtgtcccctccaaaatccatattgaaactccattcccatttggcggtgttaagaggtggggcctttcagaaagtgacaaagtcatgaaggatccaccttcaagaa

SEQ ID NO: 617057 - DNA, 620 bp, Homo sapiens
atctgattagatgtaaaggtactaatcgccctgtgacgatagccaagggacattggtagcctgtgacatgcaagggcaaaatattcactaaattgtaatttgtaatcaagtgtctgaaagacaaggctttaggggaccaagtagttgctgctataatgcttttggtgaaaataaggactctaatggagttggttgcttttaagagcagtgcagaacttagcaaaagaaaatgaagagattggggcttctaatcctcagctcaaagtctggggaaagaacaacacgaagtttccaggccttccctaaaggatctcttgtcttctgtagccaaaatctctgaaaaacaatcctaaattcaatcctaaggactgctgaatgacaaagcrcattgaattcacaacctttcaaaaatcttatatgttaaaaccagggcatggattgggcccctgaaaatgtgagatcatttctgccaagccttttttgtcagtggaaatagtgcttcttcctcatccaagcttcctttttctgaggtcttcctgtgcctgagaaacttgtcatggtctccactgaggtcgctaccttgcaggggaccaattctcctctgaccttacccaactgcc

SEQ ID NO: 617058 - DNA, 617 bp, Homo sapiens
tctgtcctaaaacaaacaaacaaagcgaaacaaaaacaaaatgcaaaagcagccagtaaacgcccacaatgtctctgtatgaaagaagacatccaaccaagtcttttccttctggctttgtaatccaaaaatgtccttctaacgtgtgcatcctctcaggatgacacgtggcaccagccagcagtcttcttgggtggattctaggatggcagaacataaaggaatggcctttgtttgtttgtttatttagagacagagtcttgctctgttgcccaggttggagtgtggtggtgcgatctcggctcactgcaacctctgcctcctaggttcaagcgattctcacgcctcagcctccagggtagctgggaccacagccgtgcgccgccgcacccggctaattttttgtatttttagtagagatggggttkcgccatattggccaagctggtctcaaactcctgatctcaagtgatccgcctgcctcaacctcccaaagtgcggggattataggcgtgaaccaccacgcccggccaggaatagcctttgaatttagaccaattcgctttcagatattgactctggacaattttcttaacctcacatttatattaagattt

SEQ ID NO: 617059 - DNA, 330 bp, Homo sapiens
taaataaaaaacagaaatgtttttatgtgtacacacacacacatttatacacacacatgcacctgtttgatataaataagcatttaaatgaattcagttcctcagacgatcattctcccaaactgcttctctcaggagtatcatgcctctatactatataaatwttccaacaagatgaaagtatgacaagtctcgatgttatttatatggggtatttaaatagattgagtcaaaattcaacaacaatttaaaatcaaacaattaatttaaaccatgttttattcaacaaaattaaattactttctgggatctagctttctctttgacagg

SEQ ID NO: 617060 - DNA, 610 bp, Homo sapiens
atttcaaaaccacattcagagttaactccaaggagctaagctagctgttttcatagaaaagtcttctgattagcttcaaagggtgatttaaattaatgtttcttttgaaattgaattgtatatgagaaacatttggactttctacatgttattccttacttccaaaaaatgataccacatccacctttaacaaattagaaaaacatatgagataaactaagtacatttcataacaaagttgatataaaaacaaggtttatctaaatccacatttgaaacatgtatgtacctggttagagagactcttgctaccagagacatctgaaaagttgtttattttttcctcccaatatcacaaactatagctttttttcactatattctaactcagcatttctatagcccttatcacaaagcaatgaaattatatccaagattttaaaatatgcaaagacctttatctkcaagaaggctaagaggaatagtttggaagaattgttgagggcatatatccgtggaatggttttaaacatttatgtattcacagtacaacaaccattgtttgagtcccttggttgaaagcaagcagtaaaatgacaccgatgtattt

SEQ ID NO: 617061 - DNA, 610 bp, Homo sapiens
atttcaaaaccacattcagagttaactccaaggagctaagctagctgttttcatagaaaagtcttctgattagcttcaaagggtgatttaaattaatgtttcttttgaaattgaattgtatatgagaaacatttggactttctacatgttattccttacttccaaaaaatgataccacatccacctttaacaaattagaaaaacatatgagataaactaagtacatttcataacaaagttgatataaaaacaaggtttatctaaatccacatttgaaacatgtatgtacctggttagagagactcttgctaccagagacatctgaaaagttgtttattttttcctcccaatatcacaaactatagctttttttcactatattctaactcagcatttctatagcccttatcacaaagcaatgaaattatatccaagattttaaaatatgcaaagacctttatcttcaagaaggctaagaggaatagtttggaagaattgttgagggcatatatccgtggaatggttttaaacatttatgtattcacagtacaacaaccattgtttgagtcccttggttgaaagcaagcagtaraatgacaccgatgtattt

SEQ ID NO: 617062 - DNA, 559 bp, Homo sapiens
aatgggcatttaggttgattccatgtctttgctattgtgaatagcaatgaacattcacatgtgtgtgtctttatggaagaatgctttatattccactgggtatatagtcagtaatgggattgctgggccaaattgtatttctgtttttagctctttgaggaattgccatactgctttccacaatggttgaactaatttaactcccaccatcagtctataagtgttccctttttgccacaacctcgctagcatctgttattttttggctttttaaaaatagccattctgattggtgtgagatatatcaatgtggtttttatttgcatttctttaatgctccatgacattgagctttttttcatatgcttgtatgctgcatttgtgtcttattttgaaaagtgactgttcatgtcctttgtccactttttaatgaaatttttttytcttgtaaatttaagttccttagagatgctggatattagatctttgtcaaatgcatagtttgcaaatattttctcccattctatagattgtctgtttactccgttgatagtttctt

SEQ ID NO: 617063 - DNA, 602 bp, Homo sapiens
aaagacaaataaaaaagaatttaaaaaaaattgaacaaagcctccaggaagtttgggactatgttaaatatccaaacctaagaataattggttttcccaaggaagaagagaaatctaaaggtttggaaaacatatttgaggraataattgaggaaaaatttcctagacttgctagagatctagacatccaaatccaagaagctcaaagaacacctggggaattcattgcaaaaggatcattgcctagggacatagtcatcaggttatctaaagtcaagatgaaagaaagaaacttaagagctgtgaggtgaaaagcatcaggtagcctataaaggaaaaacctattagattacagaagacttctcagcagaaaccctacgagctagaagggattgggttcctattttagcctccttaacaaaacaattgtcagccaaaaattttgtatccagcaaaactaagcttaaaaatgaaggaaagatacaatcttttccagacaaacaaatgctgagagaatttgccactaccaagccagcactacaagaactgctaaaaggagctctaaatcttgaaacaaatgctgaaaatacaccaaaatagaa

SEQ ID NO: 617064 - DNA, 371 bp, Homo sapiens
gaagcccaaattaataaacccccttctttgagccctctcacctgtggcccctgcactgagcaagatccttcctcctccactaccgggggctgagctgatttaccaggctggctacagagggccaggaatgggagggggagccttctgagtcctcatgctccttctcgggtcatgaattttgttttgttttaacatccatgttccagaccaaacctttcttgggggccttcaagtacctggaggcctcccagttgagtcaaataacatgacaggatgaagagccagagtccgggggcwtaaatgtgctaagtcattggttcaagacaggtggtaagtcatatgcagccaagggctggcacccctgtgcaccg

SEQ ID NO: 617065 - DNA, 536 bp, Homo sapiens
gtaacagagggacccaggacctcattttaagactgttgaagcataatcccagccagaggccaatgctcagagaagtacttgaacacccctggatcacagcaaattcatcaaaaccattaaattcccaaaacaaagaatcaactagcaaacagtcttaggaatcgtgcagggggagaaatccttgaaccagggctgctgtataasctttcaggaacatgctactaaaatttattttaccattgactgctgccctcaatctagagcgctacaagaaatatttgttttactgagcacctggcaatgcctgaacctccctattcagaaagctccacatcaataaacatgacactctgaagtgaaagtagccacaagaattgtgctacttatactggttcgtaatctggaggcaaggttccgctgcagctgccccctcagcctgggccaggcatggtttcttcccaggagacaaatccagagtgtggctgtggggaaagtgaccactttgccctgactcgatcggttaaggagctgtgcaa

SEQ ID NO: 617066 - DNA, 596 bp, Homo sapiens
cttcctttctttgttaatacatcatcttcctaactaggcagataagaggcttagtttttgtgccttatggatcctttactccagaagccaagcaagcaatacagagaggtggagaaacagtgaaagtctgtccactttggagaactgaacggtgaacacagaggacgtattttaggccctccaggcctggggcaagtttgagccatttggatggcagcatcctggarcatccttggctgaggccagtgagaaggaggcttgagggagagagggacaatctgatgtgaagaacaggagttgctgatatttgaggttaaggctccaggcctgcttcggggtgtccagcctcttagtcttgctgggttaagtcaggctcttggtgagtcctgcaacgtccagcggcccctcctttgcagacatcacctccgcccggcacccctggcaaagtggtgtatcttctctctttccttccagtgctacaagtcctccaaggaccacagccctcagctggacgtgaacctactgggcagcagcgtcattcacaaggagaagcaagtgcggaagaaggagcacaagctgaagatcacgccgatgaa

SEQ ID NO: 617067 - DNA, 504 bp, Homo sapiens
acatgtgttggtcatgatttaccaaggtgagaaggctctaaaaaaggaaagttctctcctcaggaaaacagctgtgccctggatgaaaaaaatgtggttactccgtgcaggctgtactttgtttacatgaacaagagccagttattcatcacagaaatattctaaattaaacccttgaagcccyattatataaacaagctaaaggtatcacagagttttgagttggaccattgtttttctttaatgtttcagccaaaatttgtcaaaagaaactgctgatgtacaatttcagactcttccagagcatttcatttggggaatagtttgcatttggctctttaatcaaatcctctcttccctttctggccagtctcaaaaggacgcctcggatcctcacctccctgccctgcctatgctccttgctataatttctccaacactgtggcctccaacttcaaacacccttaaatttctttagctactctttctctggtgtaaccacat

SEQ ID NO: 617068 - DNA, 548 bp, Homo sapiens
catgatatttactaacaacaagaaattattgctacaatttcaagtggtataaaagtattctggcaatgtttatttaaagatttagagatttttaaaatattttacaaaacattttcagatacaatgatatcatgtctgcttcaaaataatacagaggtagaattatctaygtaacatgtttggttgtgagataattattgcttaagtgtgatgatgggtacataaaaagaaaatgattataacatgaggggatattcaaaaaattgattgaaaatgtgcattatgaaaaaaccatacatggatttcaaaaaaaaatgctccaaaataaacttgtactaatttgttatgatgtgtctgaacaggatctagtttgaggcattgagaaagataaaacaactcccctatcagaaaaacatgaattcagctaaattgaagtaagaacaaaaatcaaatttattgtgaagcatgggtggaagaatggtgaaattattgactctttacacaaaatatatgggcaaaatcccccaaagaaatcagaagttcacaaa

SEQ ID NO: 617069 - DNA, 545 bp, Homo sapiens
gtatatagtcctaccgcaaatagtagagtgagtgaagcatttctcacgagggtagcatagtaaataatttccattaaaaaaagttgtaatatttagcttaaaaggagaggtagaaaaaataaaatgtatttggtgaggtagggttgaggctgagtaagatgagtaattttcacttagttacttactktttatcattttcagcttaagatttcttatttgttgacaatgatatttaggacatttttgggctgtcaggggttgcttccttagctttccaggttttgactcgagtgtgatgtatttaggagttgattcctgtaacaggtaccgtcttaattaccctgggttccatggactcactagacatgggggcaaaggattctggacacccttagttattagttgttggcaccagcagtgaagagatttcctcctgtgatggtcgggggactcagaggcagtgcctgctgaaacatctggttttcggtttacaggactttaggaaagcatagcttattttagaaacttgtagcaagaaaaattag

SEQ ID NO: 617070 - DNA, 524 bp, Homo sapiens
agaactactttccttttggagtaaaaggaggaattcattttcagtagccacaagaaaagttttttttttttccagggtggctggcaaaatggccaaatagtaacagctccagtctgcagctcccagtaagatctacacacaaggcgggtgatttctgcatttccaactgaggtacgtggctcatctcactgggacttgttagacagtgggtacagcccacagagggcaagcaagcagggtggggtgttgcctcasctgggaagtgcaaggggtctgggaactccctcccttagccaagggaatctggtagggactgtaccttcaggaatggtgcattctggcccagatactacacttttcccaccgtctttgcaacccacagaccaggagattccctcgggtgcccaagacactagggccctgggtttcaagcacaaaactgggcagccaattgggcagacactgagctagctgcagtttttttcataccccagtggtgtctagaataccagcgagactgaacc

SEQ ID NO: 617071 - DNA, 561 bp, Homo sapiens
agtggtgtctagaataccagcgagactgaaccgttcactcccctggaaagggggctgaagccagggagctgagtggtctagctcagtggatcccaccccccagagcccagcaagctaagatccactggcttgaaattcccactgccaacaacagcagtctgaagtcaacctgggatgctcgaccttggtggaggaaggggcatccaccattactgaggcttgagtaggcagttttcccctcagtgtaaaacaaagccactgggaagttcaaactgggcagagcccactacagcttggcaaagccactatagccagactgcctctctagattcctcctctctgggcagggcatctcagaggcagcagccccaktcaggggctcatagataaaactcccatctctctggagacagagaacctgggaaaaggggctgctataggtgcagtttcagcagacttgaaagttcctgcctgccggctctgaagcgagcagatctcccagcacagtgcttgagctctactaagggtcagactgcctcaaatgggtccctgactcccatg

SEQ ID NO: 617072 - DNA, 561 bp, Homo sapiens
agtggtgtctagaataccagcgagactgaaccgttcactcccctggaaagggggctgaagccagggagctgagtggtctagctcagtggatcccaccccccagagcccagcaagctaagatccactggcttgaaattcccactgccaacaacagcagtctgaagtcaacctgggatgctcgaccttggtggaggaaggggcatccaccattactgaggcttgagtaggcagttttcccctcagtgtaaaacaaagccactgggaagttcaaactgggcagagcccactacagcttggcaaagccactatagccagactgcctctctagattcctcctctctgggcagggcatctcagaggcagcagccccagtcaggggctcatagataaaactcccatctctctggagacagagaacctgggraaaggggctgctataggtgcagtttcagcagacttgaaagttcctgcctgccggctctgaagcgagcagatctcccagcacagtgcttgagctctactaagggtcagactgcctcaaatgggtccctgactcccatg

SEQ ID NO: 617073 - DNA, 561 bp, Homo sapiens
agtggtgtctagaataccagcgagactgaaccgttcactcccctggaaagggggctgaagccagggagctgagtggtctagctcagtggatcccaccccccagagcccagcaagctaagatccactggcttgaaattcccactgccaacaacagcagtctgaagtcaacctgggatgctcgaccttggtggaggaaggggcatccaccattactgaggcttgagtaggcagttttcccctcagtgtaaaacaaagccactgggaagttcaaactgggcagagcccactacagcttggcaaagccactatagccagactgcctctctagattcctcctctctgggcagggcatctcagaggcagcagccccagtcaggggctcatagataaaactcccatctctctggagacagagaacctgggaaaaggggctgctataggtgcagtttcagcagacttgaaagttcctgcctgccggctctgaagmgagcagatctcccagcacagtgcttgagctctactaagggtcagactgcctcaaatgggtccctgactcccatg

SEQ ID NO: 617074 - DNA, 577 bp, Homo sapiens
gcttgttcaatgcagggttgctacaaatgttcaattccttttttaaaaaaatacrgtatctttgaaggacaaaaaagtgagtcataacaaaatgaggtgtactgtgttcataaatgggttaatttataaggaatatatcaagtgtaaccgttaattttaggtgccaactggattggattaagcagtatgccaatacatggtagggcatcatttctgggtgtacctgtgaggatgactctgcatgatattgacatttgaatcaagggaccaacttaaaaaaattgccctaattcaatatgggaaacaacccttctattagctgacgtttctgataaacaagcagaggaaaagtcagcttgctctctctctcctgaagctgggtcacccatcttctacccgtggacatcagaactccaagccttctgatctttgaacttgttcacgagtgccttctacccctggacgtcagaaacatcagaactccaggccttctgatctttgcactctaggactttcaccagtggccctcagcttctcaggctttcagccttagactggaggatactttgatgactcc

SEQ ID NO: 617075 - DNA, 555 bp, Homo sapiens
aacaaaaaaaaaattatgaggagcgaaaaggcatataagtttatttttatgtgtatagaatggaagaattgcagaagaatcatgacctaataacccaggtgaggtccaggtgcttatatacctcacttcatgggagaaggggaggtgaggaaataggcggtatgggagtcaatgattttcaggagagatgaatggacctgggakgcaaagatcatcctgtagtctatttactttggatgttgggagcacagaacaaataacaatttgggacaaagttggtttaggctgtaaatgttggtgtttaattttcagtctcttcctctgttacataagttctaatcctctttggttaatgaaatttcagggagagattgaaagcaattgtgttcctctttgtgagtccagtttctaggtaaagaaacttcagaaaagagcctaatcttgcacttcttgggagacaaagggaggaaaggtgggaggaggggaggggtatggtgggggagaccctgagcctgctgtctcagttcagcctgtcaaagcctcctaccttggggt

SEQ ID NO: 617076 - DNA, 555 bp, Homo sapiens
aacaaaaaaaaaattatgaggagcgaaaaggcatataagtttatttttatgtgtatagaatggaagaattgcagaagaatcatgacctaataacccaggtgaggtccaggtgcttatatacctcacttcatgggagaaggggaggtgaggaaataggcggtatgggagtcaatgattttcaggagagatgaatggacctgggaggcaaagatcatcctgtagtctatttactttggatgttgggagcacagaacaaataacaatttgggacaaagttggtttaggctgtaaatgttggtgttyaattttcagtctcttcctctgttacataagttctaatcctctttggttaatgaaatttcagggagagattgaaagcaattgtgttcctctttgtgagtccagtttctaggtaaagaaacttcagaaaagagcctaatcttgcacttcttgggagacaaagggaggaaaggtgggaggaggggaggggtatggtgggggagaccctgagcctgctgtctcagttcagcctgtcaaagcctcctaccttggggt

SEQ ID NO: 617077 - DNA, 549 bp, Homo sapiens
gggagacaaagggaggaaaggtgggaggaggggaggggtatggtgggggagaccctgagcctgctgtctcagttcagcctgtcaaagcctcctaccttggggtatcattttccactttgtagtatgatgttgtgagccttaacacagggatgattgcagaactctagacatttgctaaaactcatagagctgtatgttaaaaattggtgagtttcatgatatataaattacacttcaataaaggcgctggcamacagcagtaagtattgttgttgttactgttctgataacctcagcatttgtctaacttcctgcggcatgaaaaacaggaatggagacaattttaggcaggaggagctgcacagcagagttcatttggtctggaggatggtgggtaggggtgccctggggctgagagcaggaggatctgctgtctttagtgggttctgagtactccctactgctctcttacatgctgggtgtctcctcttttcctacagttcacacacgtagaacacccaaggctaggaaaggagaaaacttggggtg

SEQ ID NO: 617078 - DNA, 539 bp, Homo sapiens
aacatgtatttaaaatttatgtatttggtaatataatacaaaatcatgattttcaattaaaaaggaattaatgtggttttaatattagttttactcaattattattatgacaactttcaaattttagagaaatttgaagggataatacaggacatctacatgttatcatctatttccaaaattgttgacaytttgccaacctggcaagtatataggcatatatgagtatatctgcatcaatacaggtagtatttgttgaatctcttcaaaatatattccaatgatcacaattcacctctacagacctttcaaagcatggcataggaatgaagatattctcccagtaacagtgcaattattatatctaaggaaataacaataatgccctcatatcattgattatccagtcagtattcatatttcccattgttttattgaaagatctcttatacctctattttaaccataaatagaagatgaaaaaatttaaagataccataagatattaagtacctgaaattatacctaataaaagatgt

SEQ ID NO: 617079 - DNA, 517 bp, Homo sapiens
gcctctacagttcattttaattgtaacttctaaggttctaagtagacatagaggcacctttggccttgagatcaggttgaggatgtgagccctataaggggtcagcatagagaagcacaaaaggagtyagcatgttatctttggatagaaacacatcatggaggagggacagctgcggactgactcagcaggagggtggaaggtgcaggacagtgaacctgcccttgaaaaacccatttgattgattttttttcatttttttttcccattctagaacagaggtagcagaaaaccctctactaacagaaaacccaagagtctcctttgcttatgactctggtataatttgttaaggaactattgcatatctcaagccagataggtagtattgaaataagtgggagacaacaaatatgtctacttgctgttatgagtatgcttgtaatagaatcaaggagacaaacatatatgcatagcaaggtaatgcattaggaaattgtatattcaagtgataaaa

SEQ ID NO: 617080 - DNA, 543 bp, Homo sapiens
agaaatgatgctaaagtcagtacttcaggctgaaataaaagacagtaactcaaacccataaagatgtataaagactgcttgtctctctatataggataaaatatgaaaaaaatgtatttttgaagttcacatttttactccatttatctcaagatttgaaatataaatgtatgcaaataacactaaattaatatgtacataatgtgtaatctcactgacaaaagtaatgtgagatgaagagaaagaaaccctgtggaaaggtttatgaaatactggtagattggtattgattcacagtaaattggtattgattctaagcaaattgttataactttataaagttgtatgtcatcctcacagcaaccacaaagaaaataactatagaatatacttaagaggaaatgatatgggaatcccaatgtcacttctaaaagtcatgcaaacacaccaaaaaaatagtaactgtggatatgaaggacaaaaaagctatggacagaaaggaaagackgaaaatagcaaaagtcacattttccctgtcactaa

SEQ ID NO: 617081 - DNA, 657 bp, Homo sapiens
aactggcctgaagtgaatatttcttttaaattgtgttgagcatagaccatagggaagcaagggtggaagcagagagactggttaggaaactaaagtaataatccaggtgacagaatctggatacattttgatagtatagccaacagactttgctgacagattgtgtgagagtaagagtcaaaaatggcttcaaagtttctaacctgagtaactagaatggaggaagtgccatttactrttatgggaaaatctgcagatttgtgaatgggagagagaggaaaggttggtattttagcttggccacgttaagtttgagatgcctctaagaaattcacattgagatgtggaggtggaggaggcagttgaataaatgagtccagaagtgaggagaaagatctggcaatagatataattttggattttatagtagtgttttgataggagttgttgatatcaccaaaagtgatattctatggagtttgggtggatttggagttctctgcaaaggtgactgaaggagcagccagtgagcagagaaaaacccactgttcagtaggtgttctagaagcaaaatgaagaaagtaattaaggaggaaggaaaaataagttatgttaaatgttgctgtaggtcaaatgagatgaggattcataattgac

SEQ ID NO: 617082 - DNA, 518 bp, Homo sapiens
ctattaaggagttagatgttcaacacttaggagaatttgaacaaaactaaatatctaaaagtagacagtttgggggtaatgttctaattgtcatttcaaatatgtattttttttgttgttgttggtcaacttgatttcaaccaaattgctctaaaccaaaaatatccagagctctgtcactrtaaatattaacagtgttgccatctcatccaatgccaagttagttagtagaaacaatgtatgttgctaccaataaatacattatattgagatatgagaacaaacaaaaaactttgaatccacctataaaagagtagcaggaaagctacatgatgagtgtgtgtgaaaatgacaaagtagcggtggagaccaggcttgcgtggtaaaattaagttttgccattattgctgttgtagtcttgaaaaaataattatttcaattttctttctttctttctttctttctttctttctttctttctttctttctttctttctttctttctttctttctttctt

SEQ ID NO: 617083 - DNA, 518 bp, Homo sapiens
ctattaaggagttagatgttcaacacttaggagaatttgaacaaaactaaatatctaaaagtagacagtttgggggtaatgttctaattgtcatttcaaatatgtattttttttgttgttgttggtcaacttgatttcaaccaaattgctctaaaccaaaaatatccagagctctgtcactgtaaatattaacagtgytgccatctcatccaatgccaagttagttagtagaaacaatgtatgttgctaccaataaatacattatattgagatatgagaacaaacaaaaaactttgaatccacctataaaagagtagcaggaaagctacatgatgagtgtgtgtgaaaatgacaaagtagcggtggagaccaggcttgcgtggtaaaattaagttttgccattattgctgttgtagtcttgaaaaaataattatttcaattttctttctttctttctttctttctttctttctttctttctttctttctttctttctttctttctttctttctttctt

SEQ ID NO: 617084 - DNA, 266 bp, Homo sapiens
cttcttttttaaaggctgaatagtgttcaattttgtatatataatacattttttaaactcattcatccattgatgaacacaatatgrcaggcaaaaataaaaaaaatagataaattaaatcaaaccaaaaatcttttgcaccacaaaggaacctatcaacaaagtaaaggaacaacctacagaatgggaaaaaatacttgctaaccatacatctgaataaggggttaatatactaactatataaggaactcaaacaactcaatagc

SEQ ID NO: 617085 - DNA, 578 bp, Homo sapiens
aaaaatgagtcaactaactttttttgcattaatgattgacattttgaattgggttttgatagaaaaaaatagatattttcagrgtaaattcatcatctgacttaaaggtgtaaatttctattttattttatattttggagaggtgcaaaagttgattattgaacctttgtgaagaggggtagatatatttgccacagagggtgtgttgaaaataagattaaaaaaaaaaaagaaaagaaatgtagctttgagaatgtgacttctgagatcactgataggaaatgtagcttcgagaatgtgacttctgagatcactgatagaatgcctataggcgttttgaaggttgcactcatatgatcaagtgactcccagtggaaaacaatgttgtacttcccttttttgtaattttttaagaaatttaagtaaaataaaataagtattcatgaaatttgttcttcctttaaaatcaaattatatttactttgctaagtttgagctacagatgatgtgcaaaatcagaattgtcactggaaatttgcttcaaaatttgctctacttaaccttacttgaaagatgta

SEQ ID NO: 617086 - DNA, 578 bp, Homo sapiens
aaaaatgagtcaactaactttttttgcattaatgattgacattttgaattgggttttgatagaaaaaaatagatattttcagagtaaattcatcatctgacttaaaggtgtaaatttctattttattttatattttggagaggtgcaaaagttgattattgaacctttgtgaaraggggtagatatatttgccacagagggtgtgttgaaaataagattaaaaaaaaaaaagaaaagaaatgtagctttgagaatgtgacttctgagatcactgataggaaatgtagcttcgagaatgtgacttctgagatcactgatagaatgcctataggcgttttgaaggttgcactcatatgatcaagtgactcccagtggaaaacaatgttgtacttcccttttttgtaattttttaagaaatttaagtaaaataaaataagtattcatgaaatttgttcttcctttaaaatcaaattatatttactttgctaagtttgagctacagatgatgtgcaaaatcagaattgtcactggaaatttgcttcaaaatttgctctacttaaccttacttgaaagatgta

SEQ ID NO: 617087 - DNA, 419 bp, Homo sapiens
atttcccaagtatttaaatcttagcaatgatttggttttctgatacgaatacagaatccatttggcattctgactaaggcactcgtttgtttatttttgtcttgattaaattaacatgaattgagattcaaattctcaaattggagaaagaaggagaggcaggggtttgtgggggwcattattcttagtctctaaagacaactgattttggtatttgtcagtagattctgtagctttcccatgtttaatattttgcattgaatgacctagaagagcaaaatatcacaatatttaaccagaaagatttagtcctttttttttcctaacagaaaaggaaataaggaaaaaaagaaaaagaggagaaataagggacatgagaaaggagacagagcaataattgaggagtttgaaagtatctg

SEQ ID NO: 617088 - DNA, 419 bp, Homo sapiens
atttcccaagtatttaaatcttagcaatgatttggttttctgatacgaatacagaatccatttggcattctgactaaggcactcgtttgtttatttttgtcttgattaaattaacatgaattgagattcaaattctcaaattggagaaagaaggagaggcaggggtttgtgggggtcattattcttastctctaaagacaactgattttggtatttgtcagtagattctgtagctttcccatgtttaatattttgcattgaatgacctagaagagcaaaatatcacaatatttaaccagaaagatttagtcctttttttttcctaacagaaaaggaaataaggaaaaaaagaaaaagaggagaaataagggacatgagaaaggagacagagcaataattgaggagtttgaaagtatctg

SEQ ID NO: 617089 - DNA, 478 bp, Homo sapiens
aattagaattagatttttttgtcccttgacctcacaagagtcccaatctccaaacaagactttccatagattaggcagtaaaatcttaacagggaaaaagtcttcagaaggaattagaaaatgacgaacatgaaacatttaagtatatcaggtggacaattcttaattgttgaaaaataatagtgataatcacaattaggtctaattttaattatgaggagggttactcactcagagaggcagaaaactataaatctgccaccttctctcatttcctgacaagctcctcaaggtggaagagytctgaaggggcacatatttgcataattgggttccttttgttcttttgcttgctccaactaagtgtcttagcaaactacagttattgtttccactgaattataaaataaagataactttatatagcaggccatttaaatgatatttgccattacttggcttagaatagcaaacgtac

SEQ ID NO: 617090 - DNA, 478 bp, Homo sapiens
aattagaattagatttttttgtcccttgacctcacaagagtcccaatctccaaacaagactttccatagattaggcagtaaaatcttaacagggaaaaagtcttcagaaggaattagaaaatgacgaacatgaaacatttaagtatatcaggtggacaattcttaattgttgaaaaataatagtgataatcacaattaggtctaattttaattatgaggagggttactcactcagagaggcagaaaactataaatctgccaccttctctcatttcctgacaagctcctcaaggtggaagagctytgaaggggcacatatttgcataattgggttccttttgttcttttgcttgctccaactaagtgtcttagcaaactacagttattgtttccactgaattataaaataaagataactttatatagcaggccatttaaatgatatttgccattacttggcttagaatagcaaacgtac

SEQ ID NO: 617091 - DNA, 548 bp, Homo sapiens
tatttatagagtagatacagtcataactcccttaagggctgttgtgaagatttactttgtctaccataaaaataacataatcgtttttacaaactgtaagtgcaaacttaatgcaaccaactgtaaatgttgtttaaaactacagggttcaagctgggcgctgtggctcaggcctgtaatcccagcagtttgggagactgaggcaggaggattgcttgagcccaggagattgaggygagcctgggcaatataatgagaccccatctctatttagaaaatgaatttaaaaaaaaactacaaggttcaaattgtaatcctgttgctatcaccatgacttcagagacttttctccagccattgtgtactgtgtgcctccatgtctctatctttttgtttgttttgttctgttttgttttgttttgagacagaatctcactctgttgcccaggatggagtgcagtggtacaatctcagcttcttgcaacctctgcctctcaggttcaagcgattctcctgcctcggcctcccaagtagctggaattacaggc

SEQ ID NO: 617092 - DNA, 550 bp, Homo sapiens
aggacccatcactgggaagggccctagcaatgtgttcacatggtcatgtgtcattgtaaaatttgtaaaagtaagatatttttgtattattttacttagagagccccctccttctcccaaaattataaatactttaggcaccacacaatctggtttcatccctgctcaggaaactctgcyaataaacaccgatctaggttacacagatgcctcatgcactgaagacctttttaaagtcagctaaacagaggtcaggtcaagccatacatgaccttcgtcagaatttaaatctgcaatagctaggcgcagtggctcatgcctgtaatcccagcactttaggaggctgtggcaagataatcactttaggccaggagttagagactagcctgggcaacataatgagaccctatctctacaaaaaaaaaaaaattgtttttaattagtcacggtggcgcacacctgtagtcccagctacttgagaggctgaagtgggaggactgcttgaacccaggaggtcaagactgcagtgagccgtgattgtgccaatgca

SEQ ID NO: 617093 - DNA, 617 bp, Homo sapiens
aaatttgcctgttttggacatttcatagagatagaatatgtggtcttttgtgtctggcttttaacttagcacaatgttttcaaggtttatccatgttgtagcatttttcaaaagaagacgtacatgtggccaagaagcatatgaaaaartgttcaacatcactgatcattggagaaatgcaagtcaaaaatcacaatgagataacatctcatactggtcagaatggctattattaaaaattcaaaaagataacagatgctggcaaggttgcagagaaaaggaaatgcttacacactactggtgggaatgtaaattaattcagacactgtaagtagcagttggaaatttctggatagcagaaaactagatagcagtttggatatttttcaaagtacttacaacagaactatcattcgacccaacgatcccattactgggtatataccgagcaggttataaattattctaccataaagacacatgcatacattatgttaatcacagcactattcacaatagcaaagacatggaatcaacataaatgcccatcaacagtggattggataaagaaaatttggcacatatacaccatggaatactatgcagctataaaaaag

SEQ ID NO: 617094 - DNA, 586 bp, Homo sapiens
gaacacattcttgtaaccagcacccagatcaagaaacagaacatgaccaatactccagaggcaccttcacttccccttcccactcactgcctcccctgcccccctacactgcccgcaggttaatcagattaattttgcctggttttggacttcatagaaatggcatcttgtaagatgctccttttttgtgtcaggcttctttcactcaacattgtgtttgggagatctgtccctgttattgccatgtgaccgtgtacatagaccatttgggaagcacagtttcatggyggttgcatgtagttatcatgtgtcaggaacacatgaaatcatccactcactgctccagggaacaatcagatggaatatacagcagagaagaaatgaatgaagcaaggggaagaagagatagacagggcttctatagcctggtcctcaaggaaaattggcaattaggtgaaaggtgaaggggataagaggtctgagtggcagacctgattgagattaacataaaccattaggttaacccagagacaaacaggagtggcacttgaaatttacataaatgctatacccagctgcaatcaag

SEQ ID NO: 617095 - DNA, 537 bp, Homo sapiens
aatgagaacatgcagtgtttggcatgattctgagaaaactatcgcaaggacagaaaaccaatcatccatcttcttaatagagcatttaatatttattaagygatgatttggtatgtgacagacacagttttaagcccttataaactcagtattattgatccattctacagatgctgcatatgtaaggtagttgtgaggatttgatgagtgactttgggtaagtcaccttatatatcaccatcagtctaatggggtcaggagaaggtatacatttctacttcatctactggaagaaggaaaaaaatgtataatgtgctatgagagatacatatataatataaagtttttatctattatagatattatagatataaacattacaatactatatatatgtttagatgagctgaaactttgaattgagtgtacagtgagacttgtaataatctaacctcactaaatctaataatctatagatttagctatatatgatgtttaattcaccagttgtttgacaaaaaataattggttgagtta

SEQ ID NO: 617096 - DNA, 591 bp, Homo sapiens
gctgggtgtggtgaccctcaactgcaatcccagtactttaggaggctgaggcaggtggatcccctgaggtcaggtgttcgagaccagcctgggcaacatggtgaaacccagtctctactaaaaatacaaaaattagttgggtgtggtggcaggtaactgtaatcccagctactcgagagactgaggcaggagaatcgcttgaacccaggaggcagaggttgcagtgagctgagatcatgccactgcactccagcctgggtgacaagarcgagactccttctcaaaaaataaaaaataaataaatattcaatccatcttgagttgatttttgtatatagtgaaagttaagggtccagtttcatttttctgcatataaatagccagctatcccagcaccatttattgaatagggaataccttttcccattgcttatttgtgtcagttttgtcaaagatcagatggctgcagatgtgcagctttatttctgggttttctgttccagccattatcctaagtgaattatgcaggaacagaaaaccaaatacttcatgttctcactatgtactagtaccatgttgttttggttactg

SEQ ID NO: 617097 - DNA, 585 bp, Homo sapiens
gtttatagtattttcaaatgattttttgtatttctgtgctgtcagttgtaatgtctccyttttttttctaattgagcttatttgaatcttctctcttcttggttaatttagttaatgatcttttaactttgtttcctcatcttcaaagaaccaactctttgtttcattacctttgtatgttttttctttcaatttcatgaagttctgctctgatctttgttatttcatttcttctgctagctttagatttggtttcttcttgtttctctagttcttgaggtgtgatattagttgtcaatttgtgatctttcagacttcttgatgtaggcatttagcactctaaacttctctcttagcgctgcttttgctgtatcccagatgttttgataatttgtatcactgttattcattcaaataatttttcaatttctatcttgatttcattgttaacccaaaaatcatttaagagcagattgtttaatttccatgtatttgtatagctttgaggattctttctgaaattgatctctagttttatttcactgtggtctgagaagacccttgatatgattttgatttttaaaa

SEQ ID NO: 617098 - DNA, 597 bp, Homo sapiens
tgtatagtataatttaataattttgttttacattacaaacttcatatataattgtaagattttacagtattatgtatttttaaaatcttatgtcttaatataccatgtaatctgatacacaaatgtattagaaaaccactttacttgaaaagtacatttttgcaattgtgggaaagacattagggaacatattctcaacctttgtttgagtatttgttccctgtagtacatttacaaaaattttgccctttctgattttagtcatgcttttaggttctgttgttttacatgctaacgagttctattgttttacactrtatataaactacaatcttctctgtacctcttcatatgtaagtattgcattcatcttatctccctattgattccaactttttgtttttatcacagtcaatagcagaagcagagccagcattctctcctgagacagactattacaaggttctatttactgtccttttctcctgggttttggcatttatgcattttgttttgatacttaagacttcatcatattaaaggttctcttgagattgaaagaatcagtctgactcaggtttttacaggacaatgcta

SEQ ID NO: 617099 - DNA, 626 bp, Homo sapiens
acaataagcaacagaaataaataatttttaagtaataaatgttttaatataggttaacaaagtatttctctgtgaaagacactagatgctcaataaatgaactacactttaaaaaaatgttttccaagatcttctcaacaaacaagccatgatataccaactataaaggacagataatctgctgaccaattccatcaagcaaatcacatccacatcagtcaaagtaggccataatgggggcaccaaaaatctcacgtggggagattaatcacactttatgggaggcttttgtgtataaaggttaatttgaggtcgtcttttctgaagggacatcacagtagcttcacagttatatgactaatgagttttgcttttattcctctgtccagttacttctttaacatgactatatctagtcttaactgtcctcaattcatcaactctggggcccttaaacacggttgaaattatctttgtaaacaaatgcaaaaaatatttatgaacatgttctttcgcctttcttcaaaggcattaaaaacccttacggtgcagactagtactagatctctaagasaaaaacgcaaaggaatcacgtgaaagataatatttaattaaaatttcagttt

SEQ ID NO: 617100 - DNA, 667 bp, Homo sapiens
agcataaaagtttggagaatttgctgcctgacagtgcaacagaaaagaaaatcccattttctgaggagaaattcaagccagctgcaaaaatttgcataagtaatgaggagccaaatattaatccttaagacaatgggggaaatgtctctgcattgtgtacagcctagggacttggtgctctgcatcccagctgctccagccatgactgaaaggggccaatgtggagctcgggctatggcttcagagggtgcaagcctcaagccttggcagcttccacatggtgttgagcctgcgagtgcacagaagtcaagaattgaggtttgggaacytctgcctagatttcagaagaaccaaggaaaatacctaaatgcccaggtagaagtttgctctaggggtggggtcctcatggagaatctctgctaaggcagtgcagaagagaaaggtggagtgggaggccccacacagagtccctactggggcactgcctagaggagctgtgagaagagggccactatcctactgaccctagaatggtagatccactgacagcttgcaccatgggcctggaaaagccacaggcactcaacatcagcttgtgaaggcagctgggagggcggctgtaccctgcaaagccacagagccagaactgtccaagactttgagatcc

SEQ ID NO: 617101 - DNA, 667 bp, Homo sapiens
agcataaaagtttggagaatttgctgcctgacagtgcaacagaaaagaaaatcccattttctgaggagaaattcaagccagctgcaaaaatttgcataagtaatgaggagccaaatattaatccttaagacaatgggggaaatgtctctgcattgtgtacagcctagggacttggtgctctgcatcccagctgctccagccatgactgaaaggggccaatgtggagctcgggctatggcttcagagggtgcaagcctcaagccttggcagcttccacatggtgttgagcctgcgagtgcacagaagtcaagaattgaggtttgggaacttctgcctagatttcagaagaaccaaggaaaatacctaaatgcccaggtagaagtttgctctaggggtggggtcctcatggagaatctctgctaaggcagtgcagaagagaaaggtggagtgggaggccccacacagagtccctactggggcactgcctagaggagctgtgagaagagggccactatcctactgaccctagaatggtagatccactgacagcttgcaccatgggcctggaaaagccacagrcactcaacatcagcttgtgaaggcagctgggagggcggctgtaccctgcaaagccacagagccagaactgtccaagactttgagatcc

SEQ ID NO: 617102 - DNA, 642 bp, Homo sapiens
ttgctatacatctcattatcaaggagaattgtggctaaaactaatcaatattcaacctctgtagcttgggagaggttttataatcacatagacatgaaatatctaacacaaaatcagagctcagtgaggagagatgaggtggaaagagtggaagtaaattctgtcatagtaggtcctattctaatttacatgagttcaatttttgaaaattaaaatatatgtgtcctcacacacaggggaacaacacacatgggggcctttcagagggtagacagtggagggagagaatcaggaaaaatcactaatgcgtactaggcttaatacytgggtgacgaaataatctatagaacaaacctccatgacacagtttacctatgtaacaaacctgcatgtgtacccctgaacttaaaagttaaaaaaaaaataaaatatatgtatcctcaaaataatttttaaaaagtaaaattgctgtgaagggccaggcacggtggctcacacctgtaatcccagcactttgggagcctgaggtgggtggattatctgaggtcaggagtttgaaaccagcctggccaacatggcaaaaccccatcactaataaaaataaataaattagccgggcatggtggcaggtgcttgtagtcc

SEQ ID NO: 617103 - DNA, 492 bp, Homo sapiens
acaactagacagaagcattctcagaaacttatttgagatgtgtgtactcaactaagagaattgaaccaccgttttgaaggagcagttttgaaacactctttttctggaatctgcaagtggatatttggctagctttggggatttcgctggaagcgggaatacatataaaaagcacacagcagcgttctgagaaactgctttctgatgtttgcattcaagtcaaaagttgaacactccctttcatagagcagtcctgaaacactccttttktagtatctggacctggacttttggagcgctttcagggctaaggtgaaaaaggaaatatcttcccataaaaactggacagaagcattctcagaaacttgtttatgctgtatctactcaactaacaaagttgaacctttcttttgatagagcagttttgaaatgctctttttgtggaatctgcaagtggatatttggctagttttgaggatttcgttggaagcg

SEQ ID NO: 617104 - DNA, 449 bp, Homo sapiens
agagcagttttgaaacactctttttgtagaatctgcaagaggatatttgcatagctttgaggatttcgtgggaaacgggattgtcttcaggtaaaatctagacagaagcattctcagaaacttctttgggatgtttgcattcaagtcacagagtagaacattccctttggtagagcaggtttsaaacactctttttgtagtatctggaagtggacatttggagcgctttcaggcctatgttggaaagggaaatatcttcccgtaacaactaggcagaagcattctcagaaacttatttgagatgtgtgtactcaactaagagaattgaaccaccgttttgaaggagcagttttgaaacactctttttctggaatctgcaagagtatatttgcctagccttgaggatttcgttggaaacgggattgtcttcagatcaaatctagacagaa

SEQ ID NO: 617105 - DNA, 523 bp, Homo sapiens
agtggatatttggctagtttggaggatttcgttggaagcgggaattcatacaaattgcagactgcagcgttctgagaaacatctttgtgatgtttgtattcaggacacagagttgaacattccctatcatagagcaggtttgaatcactccttttgtagtatctggaagtggacayttggagcgctttcaggcctatgttggaaaaggaaatatcttcccataacaactagacagaagcattctcagaaacttatttgagatgtgtgtactcaactaagagaattgaaccaccgttttgaaggagcagttttgaaacactctttttctggaatctgcaagtggatatttggctagctttggggatttcgctggaagcgggaatacatataaaaagcacacagcagcgttctgagaaactgctttctgatgtttgcattcaagtcaaaagttgaacactccctttcatagagcagtcttgaaacaccccttttgtagtatctggaactggacttttggagcgat

SEQ ID NO: 617106 - DNA, 523 bp, Homo sapiens
agtggatatttggctagtttggaggatttcgttggaagcgggaattcatacaaattgcagactgcagcgttctgagaaacatctttgtgatgtttgtattcaggacacagagttgaacattccctatcatagagcaggtttgaatcactccttttgtagtatctggaagtggacatttggagcgctttcaggcctawgttggaaaaggaaatatcttcccataacaactagacagaagcattctcagaaacttatttgagatgtgtgtactcaactaagagaattgaaccaccgttttgaaggagcagttttgaaacactctttttctggaatctgcaagtggatatttggctagctttggggatttcgctggaagcgggaatacatataaaaagcacacagcagcgttctgagaaactgctttctgatgtttgcattcaagtcaaaagttgaacactccctttcatagagcagtcttgaaacaccccttttgtagtatctggaactggacttttggagcgat

SEQ ID NO: 617107 - DNA, 523 bp, Homo sapiens
agtggatatttggctagtttggaggatttcgttggaagcgggaattcatacaaattgcagactgcagcgttctgagaaacatctttgtgatgtttgtattcaggacacagagttgaacattccctatcatagagcaggtttgaatcactccttttgtagtatctggaagtggacatttggagcgctttcaggcctatgttggaaaaggaaatatcttcccataacaactagacagaagcattctcagaaacttrtttgagatgtgtgtactcaactaagagaattgaaccaccgttttgaaggagcagttttgaaacactctttttctggaatctgcaagtggatatttggctagctttggggatttcgctggaagcgggaatacatataaaaagcacacagcagcgttctgagaaactgctttctgatgtttgcattcaagtcaaaagttgaacactccctttcatagagcagtcttgaaacaccccttttgtagtatctggaactggacttttggagcgat

SEQ ID NO: 617108 - DNA, 550 bp, Homo sapiens
tagtatctggaagtggacatttggagcgctttcaggcctatgttggaaaaggaaatatcttcccataacaactagacagaagcattctcagaaacttatttgagatgtgtgtactcaactaagagaattgaaccaccgttttgaaggagcagttttgaaacactctttttctggaatctgcaagtggatatttggctagctttggggatttcgctggaagcgggaatacatataaaaagcacacagcagcgttctgagaaactgctttctgatgtttgcattcaagtcaaaagttgaacactccctttcatagagcagtcytgaaacaccccttttgtagtatctggaactggacttttggagcgatttcagggctaaggtgaaaaaggaaatatcttcccataaaaactggacagaagcattctcagaaacttgtttatgctgtatctactcaactaacaaagttgaacctttcttttgatagagcagttttgaaatggtctttttgtggaatctgcaagtggatatttggctagttttgaggatttcg

SEQ ID NO: 617109 - DNA, 464 bp, Homo sapiens
agcgttctgagaaacatctttgtgatgtttgtattcaggacacagagttgaacattccctatcatagagcaggtttgaatcactccttttgtagtatctggaagtggacatttggagcgctttcaggcctatgttggaaaaggaaatatcttcccataacaactagacagaagcattctcagaaacttatttgagatgtgtgtactcaactaagagaattgaaccaccgttttgaaggagcagttttgaaacactctttttctggaatctgcaagtggatatttggctagctttggggatttcgctggaagcgggaatacatataaaaagcacacagcagcgttctgagaaactgctttctgatgtttgcattcaagtcaaaagttgaacactccctttcatagagcagtcttgaaacacyccttttgtagtatctggaactggacttttggagcgatttcagg

SEQ ID NO: 617110 - DNA, 344 bp, Homo sapiens
aaaggaaatatcttcccataaaaactggacagaagcattctcagaaacttgtttatgctgtatctactcaactaacaaagttgaacctttcttttgatagagcagttttgaaatgstctttttgtggaatctgcaagtggatatttggctagttttgaggatttcgttggaagcgggaattcatacaaattgcagactgcagcgttctgagaaacatctttgtgatgtttgtattcaggacacagagttgaacattccctatcatagagcaggttggaatcactccttttgtagtatctggaagtggacatttggagcgctttcaggcctattttggaaaggga

SEQ ID NO: 617111 - DNA, 456 bp, Homo sapiens
tttgtggaatctgcaagtggatatttggctagttttgaggatttcgttggaagcgggaattcatacaaattgcagactgcagcgttctgagaaacatctttgtgatgtttgtattcaggacacagagttgaacattccctatcatagagcaggttggaatcactccttttgtagtatctggaagtggacatttggagcgctttcaggcctatkttggaaagggaaatatcttcccgtaacaactatgcagaagcattctcagaaacttgtttgtgatgtgtgccctctactgacagagttgaaccttgcttttcatagagcagttttgaaacactctttttgtagaatcagcaagaggatatttgcatagctttgaggatttcgtgggaaacgggattgtcttcaggtaaaatctagacagaagcattctcagaaacttctttgggatgtttgcat

SEQ ID NO: 617112 - DNA, 456 bp, Homo sapiens
tttgtggaatctgcaagtggatatttggctagttttgaggatttcgttggaagcgggaattcatacaaattgcagactgcagcgttctgagaaacatctttgtgatgtttgtattcaggacacagagttgaacattccctatcatagagcaggttggaatcactccttttgtagtatctggaagtggacatttggagcgctttcaggcctattttggaaarggaaatatcttcccgtaacaactatgcagaagcattctcagaaacttgtttgtgatgtgtgccctctactgacagagttgaaccttgcttttcatagagcagttttgaaacactctttttgtagaatcagcaagaggatatttgcatagctttgaggatttcgtgggaaacgggattgtcttcaggtaaaatctagacagaagcattctcagaaacttctttgggatgtttgcat

SEQ ID NO: 617113 - DNA, 456 bp, Homo sapiens
tttgtggaatctgcaagtggatatttggctagttttgaggatttcgttggaagcgggaattcatacaaattgcagactgcagcgttctgagaaacatctttgtgatgtttgtattcaggacacagagttgaacattccctatcatagagcaggttggaatcactccttttgtagtatctggaagtggacatttggagcgctttcaggcctattttggaaagggaaatatcttcccrtaacaactatgcagaagcattctcagaaacttgtttgtgatgtgtgccctctactgacagagttgaaccttgcttttcatagagcagttttgaaacactctttttgtagaatcagcaagaggatatttgcatagctttgaggatttcgtgggaaacgggattgtcttcaggtaaaatctagacagaagcattctcagaaacttctttgggatgtttgcat

SEQ ID NO: 617114 - DNA, 456 bp, Homo sapiens
tttgtggaatctgcaagtggatatttggctagttttgaggatttcgttggaagcgggaattcatacaaattgcagactgcagcgttctgagaaacatctttgtgatgtttgtattcaggacacagagttgaacattccctatcatagagcaggttggaatcactccttttgtagtatctggaagtggacatttggagcgctttcaggcctattttggaaagggaaatatcttcccgtaacaactatgcagaagcattctcagaaacttgtttgtgatgtgtgccctctactgacagagttgaaccttkcttttcatagagcagttttgaaacactctttttgtagaatcagcaagaggatatttgcatagctttgaggatttcgtgggaaacgggattgtcttcaggtaaaatctagacagaagcattctcagaaacttctttgggatgtttgcat

SEQ ID NO: 617115 - DNA, 562 bp, Homo sapiens
gtttgcagatgacatgatcctatatctagaaaacctcatcatctcagcctcagagcttcttacactgataagttctacaagtagaactgcaaatctctggtaaaataaatcatacatgacacaaacagaagcaaaaaacattccatgatcataggcaggaaaatmgataacattacaatgacatactacccaaagcaatttatagattcaatgtttttctcattaaactaccattgacattcttcacagactggaagaaactattaaaaaattcatatggaaccaaaaaagagcctgaataaccaaggcaatcctaagcaaaaagaacaaagctgttaaatttattcttacaggtcttttgcagctattgtaaatgagattaatctcttgatttctttgtcatgtagtttgttactggcatatataaatgctactaattattgtatggtgagtttgtatcctgtaactttactgaattcatttattagtcttgaccctttttttggtggaatctgtagggtattctatacatataaagatcatgctgtctgcaaagagggat

SEQ ID NO: 617116 - DNA, 620 bp, Homo sapiens
cacacaccaccacagtatgtgtctttataatagrataatttatattcctttgggtatatatgtggtaatgggattgctgtgttgaatgatatttcagtctttagatctttgaggaattgccacactgtcttctacaatggctgaactaatttacactcccaccaacaatgtataagtgtattccttgtgtattcctttttctccacaatctcactagcatctgttatttttttatttttaatgaccattctgactggcgttagatggcatcacattgtggctttcatttgtgtttctctaataaacagtaatgttgagcttttctaaatataattattagctgcttgtaaatctccttttgaagagtctgtttatgtactttgcccacttttttatggatttttttttgtaaaaatttatttaagttacttatagattatggacattagacctttgatgcataatttgcaaaaattttcttctgttcttcaggttgtctgtttattctgttgacagtttcttttgctgtgcagaaactctttaattagatatcatttgtcaatttttcttttgttaacaattgcttttggcaactttataatgaaatctttgcccatgct

SEQ ID NO: 617117 - DNA, 551 bp, Homo sapiens
gctgcagtgggccctggggttagcatctggtagaaaacagaactcacagctctaaagctccctagtgacctcagctggcaatgaccaagcccggggcagacgcctaggcaggtctggggtagtaggagaaagggtgatatctggcctcacctccccaggaaaagaagggcaataaggatcatgtagcagcagctgcctcggggaggaaatggcttggagcctgacttcccaacaacctctcccaggatggcaaggctttgactccacagcttcagcgagctgcgagtcacaaacataccaagaaaccctcagggagagtytgagcctccagcctcaaccctccttgaaccttagggagggcctagcacctccagattttgaggcccctcactctttttactcttttttttttttttttttgaggcggagtctcactctgtcacccacgctggagtgcagtggcgcaatctcagctcactgcaacctctgcctccaaggttcaagcaattttcttgcctcaacaacctcccaagtagctgggattacaggtg

SEQ ID NO: 617118 - DNA, 543 bp, Homo sapiens
taggggaaaactccaaaagagactcatcagtaaaaatgtccatttttctctctttaatataaaagaaaacaaattatctttaagagtctcaacaaggtttgagaaaatatcctgccttaatgattattcctccgtttgaaaacggctattttttccagtttactttaaaaatcaattgtacttccccttggcttatttaaagcaacagccacagtgactgctatggctaatgacttcatgtcatacgactgtggattttcctgtggaaagagatgggaagctgggtggctggtcggcgtgttagactttgcttagtgaatctctccaggtgataactgcargggtgactgcaggggcctggcttggcttcgaaagcagtagcagcagcagcggagacggtcctgtggcacccagctgtttaacttccaccgaggcagggggcccgagcagggacagaagaggccggggtgaacatcaccctttctacagtggctcgatgccttgcttcacactccagttttagtgttcgtgtgatacttgcta

SEQ ID NO: 617119 - DNA, 543 bp, Homo sapiens
taggggaaaactccaaaagagactcatcagtaaaaatgtccatttttctctctttaatataaaagaaaacaaattatctttaagagtctcaacaaggtttgagaaaatatcctgccttaatgattattcctccgtttgaaaacggctattttttccagtttactttaaaaatcaattgtacttccccttggcttatttaaagcaacagccacagtgactgctatggctaatgacttcatgtcatacgactgtggattttcctgtggaaagagatgggaagctgggtggctggtcggcgtgttagactttgcttagtgaatctctccaggtgataactgcaggggtgactgcaggggcctggctkggcttcgaaagcagtagcagcagcagcggagacggtcctgtggcacccagctgtttaacttccaccgaggcagggggcccgagcagggacagaagaggccggggtgaacatcaccctttctacagtggctcgatgccttgcttcacactccagttttagtgttcgtgtgatacttgcta

SEQ ID NO: 617120 - DNA, 543 bp, Homo sapiens
taggggaaaactccaaaagagactcatcagtaaaaatgtccatttttctctctttaatataaaagaaaacaaattatctttaagagtctcaacaaggtttgagaaaatatcctgccttaatgattattcctccgtttgaaaacggctattttttccagtttactttaaaaatcaattgtacttccccttggcttatttaaagcaacagccacagtgactgctatggctaatgacttcatgtcatacgactgtggattttcctgtggaaagagatgggaagctgggtggctggtcggcgtgttagactttgcttagtgaatctctccaggtgataactgcaggggtgactgcaggggcctggcttggcttcgaaagcagtagcagcagcagcggagacggtcctgtggcacccagctgtttaacttccaccgaggcagggggcccgagcagggacagaagaggccggggtgaacatcaccctttctacagtggctcgatgccttgcttcacactccagttttartgttcgtgtgatacttgcta

SEQ ID NO: 617121 - DNA, 586 bp, Homo sapiens
tgaggggtgattcagaaagtgtctcaaacactttagcattgacaaatgagaagcaaaagtcaaaaacaaaaaggaaagaaagaaagaaagaaattgctcactcttggtctcacactgatgttaggaggaaacgtgtgaagagggcttgggtractctaagacagttacctcatgacaaagaagagggtcaacgttccatgagaagtctggcaaattccaggatggagctgggtgctgaccttcgcttttggtgtggacagttggtctttgcacattctaattgcaccctaaatactcattgtagacatcacacatcagaagtagcaccaagagatggtccagtgccaggcaaaccctcatgatcttgtaccagacagaatccttttgaggttcctgacactccgttcccatttctaccctccatcgtgtgtgacaggtagtcacctatgattttaaacatccagagcacagttttctttctctcctccccacaattaaaacctggttgaaagaaatatcttgcattagtcatttgcagcagagggtgacgctgctgatggttgggacgttctgatcctagacccta

SEQ ID NO: 617122 - DNA, 586 bp, Homo sapiens
tgaggggtgattcagaaagtgtctcaaacactttagcattgacaaatgagaagcaaaagtcaaaaacaaaaaggaaagaaagaaagaaagaaattgctcactcttggtctcacactgatgttaggaggaaacgtgtgaagagggcttgggtgactctaagacagttacctcatgacaaagaagagggtcaacgttccatgagaagtctggcaaattccaggatggagctgggtgctgaccttcgcttttggtgtggacagttggtctttgcacattctaattgcaccctaaatactcattgtagacatcacacatcagaagtagcaccaagagatggtccagtgccaggcaaaccctcatgatcttgtaccagacagaatccttttgaggttcctgacactccgttcccatttctrccctccatcgtgtgtgacaggtagtcacctatgattttaaacatccagagcacagttttctttctctcctccccacaattaaaacctggttgaaagaaatatcttgcattagtcatttgcagcagagggtgacgctgctgatggttgggacgttctgatcctagacccta

SEQ ID NO: 617123 - DNA, 393 bp, Homo sapiens
cagtccctttgtgctcttaggccctttgtctcctaatatccacactatgtcccataagaacactgatcaaagtagtttggatcacttcctcagcccctcaacttggctctaatcytgtgagcttggttctcttgagagtccaggtcatctgcttttccttgtgatggcaaactgtgactgtatgattgacagctacataaaaatcatgcaaatggcagttccccaaagaaagaaatgcagtgccaacaaattggcagcaactgtcccagacacagggcagctttgtcctccaaaaggtgctgatctcgaggaggcacggattatccttggttgctttgtattcaaaaactgttggcatcatctcagaaacactagttatccaagcagaaagca

SEQ ID NO: 617124 - DNA, 393 bp, Homo sapiens
cagtccctttgtgctcttaggccctttgtctcctaatatccacactatgtcccataagaacactgatcaaagtagtttggatcacttcctcagcccctcaacttggctctaatcttgtgagcttggttctcttgagagtccaggtcatctgcttttccttgtgatggcaaactgtgactgtatgattgacagctacataaaaatcatgcaaatggcagttccccaaagaaagaaatgcagtgccaacaaattggcagcaactgtcccagacasagggcagctttgtcctccaaaaggtgctgatctcgaggaggcacggattatccttggttgctttgtattcaaaaactgttggcatcatctcagaaacactagttatccaagcagaaagca

SEQ ID NO: 617125 - DNA, 596 bp, Homo sapiens
ttattgataataaaagcactcagtttccttttcctcttgtagttctagtatagttgagaaacctaaacttagagtcagatgccttgaaaataatartatctacttcacagagttttgtttaggagtaggacaagatgatgcccataatgcaagcagcacacagatcatgggtaaatctgtgctttgcattattggtgaaatttgtattagcatcttatcagtgtgttataattcctctgaaaccatgcaagagggaaaacacaacaagtgttgatgattcgtacccaagccctgggtcagagctgcctcttggaatctccagccctgtcacatggggcatgcacctttggtcttgtacttagtttttttatctgcaaaatatggggttgaacttcaggttcctgaaggccagtttgaactctaagattgcagatctgtttcttccaccactaagcaccctacactctcctacattatccagcctcgagccagtgatgaggacctgaactaaagtcagaagttgaagatgccattgttcaagtatcaagacatccttatggggaaacttggcaaatggcccaggacaggccccagga

SEQ ID NO: 617126 - DNA, 596 bp, Homo sapiens
ttattgataataaaagcactcagtttccttttcctcttgtagttctagtatagttgagaaacctaaacttagagtcagatgccttgaaaataatagtatctacttcacagagttttgtttaggagtaggacaagatgatgcccataatgcaagcagcacacagatcatgggtaaatctgtgctttgcattattggtgaaatttgtattagcatcttatcagtgtgttataattcctctgaaaccatgcaagagggaaaacacaacaagtgttgatgattcgtacccaagccctgggtcagagctgcctcttggaatctccagccctgtcacatggggcatgcacctttggtcttgtacttagtttttttatctgcaaaatatggggttgaacttcaggttcctgaaggccagtttgaactctaagattgcagatctgtttcttccaccactaagcrccctacactctcctacattatccagcctcgagccagtgatgaggacctgaactaaagtcagaagttgaagatgccattgttcaagtatcaagacatccttatggggaaacttggcaaatggcccaggacaggccccagga

SEQ ID NO: 617127 - DNA, 564 bp, Homo sapiens
ggcctatgaaaaactatttgcactccaaaaatcatagccgatgaaaagctggtaggaaggagtattttctttctgaagaaaaattgcgcctcttgctaaagttttaggaataaagcatttaaaagcaaggcctgctctcaagcctgcattggcaagtaggaaagtggcttggggtgacgggggcagtgatgagagagggccctggtgaccctctaccgtccaacaccaggggtgctgctgggggcctgaatttcacctttagatttggatgcatcgggcaaagctttggaagcccttggactgcaagcatcccaagggatgaataatcttttagtcaattttggccaactctatctgaatgtgattgatcttcatattctatctggagagattttattggaraggaaagaaaagaactcatgagggccatggatacctggagagagagaatgctggtgtggaggagaggagtgcaaaaggaagcttaggaggccagataccaaaggcactgggccacatgaactgtacttgaatcctggggtccttgttcactcagtggtgcca

SEQ ID NO: 617128 - DNA, 529 bp, Homo sapiens
tcctatatatgtgtgtatatatatatgtgtgggtgtacatagtatttcagatggtgataaggagaaacagcaaggaagggggagctgcagtattgtgaggtggagatggggatgcgatttctgattcagcrctcaggtaagggatcgctgagaattgcgagaatcccagtttcctggcttggagtgagcagggtgagggtggagagagatggcaccttacaggtaggagggcttctgtgtggccttgcaggacttttgtttttcctctgagtgaaagaggaaaccactggagggtttttaagcaaagaaatgacatatcaaatgtatttttggttttcataaattcctaagagtgaaaacgaaaatacacacctagcaggttttaataaaagtaggagtgattcgtggtgtgaatgacatccagcaacacgaattctctccttgcttgcctgctttgcgattctgccctgagaagtaattaagcggcgatgtgaagccctggattggatcaggaccctgggacaggaac

SEQ ID NO: 617129 - DNA, 658 bp, Homo sapiens
ctgtttgctccttagcttgcagacagcctgttgtgggaccttgttatcctgtgagttaatacttaataaattcatgtatatatatatatattagttctgttcctctagagaactctgactaatacacatgagtatggatggaaagtctgtgggttaaagctcaagcaaaaaaataaaatatttaagatmtctactcttgtacctgactttttagggtgctcctctcatttttttctgttggctatttatttctaatgctaaatccttaaaaaaaaacaaagaggtctactataaaatttctaccccaaacattcattcccattcatctttgagtacttgcagtaaaagatcaacattttaaggaaggaaaatctgaaaacaattagatttcatctcccacatgcagtaaggctgagaatatggcaatttgatattaaaggcctgttcctacactcaatattctcatttctccttttgtcccatctgaaaataacagtgagcatccaggagcctcctctccactctttccctcctgaactcctcgttgttaatattcagacacactcacatggtgaggaaataggcaggcttctctgttggtggaagattttgtcttgacttctcctttatggggtaaagatggtcttttggttgaccg

SEQ ID NO: 617130 - DNA, 581 bp, Homo sapiens
gagaagtccagtggacacttcaccctcagtggacttccatgggattgtcttccatgaatggctccctcctgaggctgatyctccacatcatggttctgtggttgtgattcataaatgagattcatatgtaatgagacttagcatgccatacactgtgttcacacagaagggtctttcctggccacagttgattgagccaggagagagtgcccgcctggagcctggccagtcagaatccttccaccagagtttcccaaataccagggactcagagcacaggtttccttctcagggagtttccttctccctgagccgctgaagctgttagatgagcacaaggtatccccaggtccagctacacgaaggaagctgttctgttgagtgggagaagagagaagccaacagagagagaatggaggagaactttccagacagagtctggctgaagctgggcctgagatcagtggcttctgaggcccgaccacactccttcctccatgtctgagaacatgctctgtgtttcagaaactccattgaacttggctctcgccacctgccattgaaggagtcttgaccgatag

SEQ ID NO: 617131 - DNA, 423 bp, Homo sapiens
tgtgtgatgttgggagtgtgaaacacagagcacaagccaagcatggtggctcatgcctgtaatcctagcactttgggaggctgaagtgggcagatcacttgaggccaggagttcaagaccagcctggccaacatagcaaaaccctgtccccactaaaaatacaaaaaaaaaaaattagtggggtgcggtggtgtacacctgtaatcccagctactcgggaggctgaggcacgagaattgcttgagcccaggaggyggggattacagtgagccgagattgcaccactgcactccaacccggccaacagagcaagaccctgtctcaagaaaaagaaaaagaaagtaagaaacacaaagcatacctctatatcacaagcagacaggcaaggtcatggccatggagtcaagacactaaactgttgga

SEQ ID NO: 617132 - DNA, 595 bp, Homo sapiens
aattcctagataagtaagtaacttgcctaaggcaaccagctagtgaatggtgagctgggagtactcctaggtctataatgccagtgcccatgaccctgatggggattggatagcaaccaatgcattccagtcccacctgattttgctcattgatctgaggccaggagcccagggagatctgcctacccacccttgatttgcaatgtggctgtgtctgtttcttaagtaaagtgcagttgtactttaactggaatcttgcaaatatctgttcttccgacctgatacaatttgctgcttctgaaatggtaaacttaagsagagcttggaaataggataatgagttaaaccttccaaaagttattataaaaaaattgaatgtagcgtttaaaattaattattttgaggagttactagtgaaagcataatatcaatggtaacactggtcctttgcaaaattctttcataatttggaacttctgggatcgtggacaagacagttcatattctcagtggtaagtttatgcatgatctttttgaaatataacatatcatctgtaagtcagaaaacagagaagttcttatcccgagaacctac

SEQ ID NO: 617133 - DNA, 595 bp, Homo sapiens
aattcctagataagtaagtaacttgcctaaggcaaccagctagtgaatggtgagctgggagtactcctaggtctataatgccagtgcccatgaccctgatggggattggatagcaaccaatgcattccagtcccacctgattttgctcattgatctgaggccaggagcccagggagatctgcctacccacccttgatttgcaatgtggctgtgtctgtttcttaagtaaagtgcagttgtactttaactggaatcttgcaaatatctgttcttccgacctgatacaatttgctgcttctgaaatggtaaacttaagcagagcttggaaataggataatgagttaaaccttccaaaagttmttataaaaaaattgaatgtagcgtttaaaattaattattttgaggagttactagtgaaagcataatatcaatggtaacactggtcctttgcaaaattctttcataatttggaacttctgggatcgtggacaagacagttcatattctcagtggtaagtttatgcatgatctttttgaaatataacatatcatctgtaagtcagaaaacagagaagttcttatcccgagaacctac

SEQ ID NO: 617134 - DNA, 525 bp, Homo sapiens
ctgatatattgagctgggtggagggcataatgggcgcatatgtgtaaaactgtaaccagtgcacacttaaaaagtagacatgtttctatatgtaaattataccccataaagtccyatttaaaaagaagtatttctgcttctgaaaagatgaagtagacatactttctcctattcttttcataatgtacaactaaatacccagaacattacacatacataacaaaaattttaaaactctaaaatgtgaagaaaagaaggcggaacagtgggaaccctgagaccaagtgaggcaggagatcagtgggacttgtttttcaagcactggccatgacctgggttgtgacccagttaatgggagcaggatctggtggaaacagggtacagggagaaagttggcagaaaccagccaatgactacaaaagtcacctctagctgccctcactgctcgttaacataaagacactcccaccagcaccatgacagtttacaaatgccatggcaatgcaccttggcaatgacctgaaa

SEQ ID NO: 617135 - DNA, 611 bp, Homo sapiens
gggaagtggaagtgcccacacacacctcctcccatactccatagtctttgtcagctgaggctctactttctatcccaagctttcaactccagtgaaaatctttgtaccaggcattctccactttgtaccaggtattcactttgcatgcttcacacgttagcctgaatattcccctaatttggagaagagaaaatttaatttccataactttgataaaaacaaagatgctaaaatttagttttaaaaatgctttgtttaaaaggggtccaaaaaatatttttaagtctaacaaacatatgcttacttaacacccaccttttgcaaagcattcaccctgtccatttcctctctccatgctcttttatcaaacaaacaatttccaaggccagagacagcctatgagaagaatatcttattttggctttaattcttcgagttttccttcgcaagaccatttattttgaaaaaggagggaagaaaccgaagctgcctatttattttcacttgagtttctttttatttatactaacattgtaaaaatttgatattgcaaagtttrgttagagtttgctccacaaatttctactgaaggttcagagctgtaaatctca

SEQ ID NO: 617136 - DNA, 573 bp, Homo sapiens
aaccgcctgtgcctcatctgaagccagcaccaccgcctggtgcactgcaggcctccctcaccactcaggagggggtgctccacaccacactctctcccagttaccagatctcctcatccgctgggttgttccataaacacacaatcaccaaacacactctactttctctcactaagcaaacaaacaagacaaggcaaacaaacaagaaatccttattttctaataccatctgacagcactccttaagtgacttggagccccactccaggaaactaagtgccataaaggatcaaagtgagaccagcctcaggccatcttcaaaccaaccccagtgaggagggttaagacacagcacatttctttaggaattgagccaaggggaatatgtgcaacacagttttgtgttggtttcatagttttaacaacagaaattttaagtctctttcrcatacaaagatgctctgggaaggtagaacttctttttccctctggatttgtcctgaggtgcccaaattatctcagaggctgtctgaaaaccaagtggattgggagctgagtctcagtgaggaggga

SEQ ID NO: 617137 - DNA, 667 bp, Homo sapiens
ttatttgccattttaaggtgtaaatttttaagaatttattcctttttctgcttttaaaaaaactgtcattggaagtttattttgaggaagtaaaaatatgttctcagtgcaaaatcctgaactagaagccatttttaaagtgaatgcgtcacttcctgagccagtgtttgattatagaaaataaaactggcccacacaagtcagtttagcttcctgccattgtgcgttggctcaagattttgtttatcaaaatgcaactttgtctggttccagctgcaatgaattctcatgacaaaaaggacwgtaaatcaggcttttgctgagttagtaccattcttcattttcccaattaaaccattataatttttaaaattatgttttcagttgagaacttgaaacagattacttttaaaagggaagttagaagcctaagcttgaaatgagtgaaaatatgccaggtaatgaagacatttggagcttcctggagttgctgaggattaagacagacatgcctttgtctgtgcagttctgacactgaagctgacgttgcagaaggcacttcaaacacagccaaaagcagcagcagccaccgatccagaatgcataggtgttcttagaatgttatttcagagatgaatttttatcactgtgtcaatgcaaataagct

SEQ ID NO: 617138 - DNA, 629 bp, Homo sapiens
gatgacaaccttccatgtcagtatgattgattctagtttggaacaaatataagtagtcccactggaaaacatagccttctcaaatggcatggtaaaaatgcattttattcagattgagttgccttttgcttaaataaatggttaagatattgagtttaattcaatgctttaaccttgcagttggttgatcacaaacatgttaatgataagaccatcatattgatctgtgtttacaatgtttataatgatgatgtctgtaaacactaattacaatgcaaagcacctgatggttagataataacacagaaawtttaaatgtgtgagtgtttttagttatggcaggattgactagggaagacacgtgcattcagaggcactgatgtgcttaaaattatgacactttttgttcctgagaaacatcccctgagatgatgtttgtggaagttgtttatcaggaagtgatcccaggaaaaactggtagaggaatggggaagtggtaccaggaaggaaaggaagccaagaaaaggcaatgccagtctgaggcttgagcagtgaaactttggtttaaacccacacccccacctccatcccaggacactgtagagatatgtaactcacatgtcagaaat

SEQ ID NO: 617139 - DNA, 615 bp, Homo sapiens
caggaattgtgagcttcttaggctctacttttgctctggtttccaggatgctcaaagccaaattttgccctcacacrttcagttaaattttcgttttattctcctgccttccaaaagctttctggactattaaaaatccatctttactttaactacctagtttcatatgcactttcatcaaatctttattcaaagtagttagtatataaactgtattttataaatggaaaagtctttttcttacttgaaaaccacccttggtgcttgaagattgcttcctagtatttaaagaaattattttttaatcaattttaagattattctttcatgcaaagatttgatcgtttaaatttcttacagatttcattatcttctgctctggattcttttatgttattggactttgtttcatgtccacagaactctttgttggtttaatggattttcatttttgctttttagttccatctctaattactttttaatattttacttaactttttaaagtctgtttgggaacttctgccaccacactttttggcaatctgccttttcagaattatttaaacatctactgtttcattgatgatggctcaaaaaaatagggaacctgta

SEQ ID NO: 617140 - DNA, 615 bp, Homo sapiens
caggaattgtgagcttcttaggctctacttttgctctggtttccaggatgctcaaagccaaattttgccctcacacgttcagttaaattttcgttttattctcctgccttccaaaagctttctggactattaaaaatccatctttactttaactacctagtttcatatgcrctttcatcaaatctttattcaaagtagttagtatataaactgtattttataaatggaaaagtctttttcttacttgaaaaccacccttggtgcttgaagattgcttcctagtatttaaagaaattattttttaatcaattttaagattattctttcatgcaaagatttgatcgtttaaatttcttacagatttcattatcttctgctctggattcttttatgttattggactttgtttcatgtccacagaactctttgttggtttaatggattttcatttttgctttttagttccatctctaattactttttaatattttacttaactttttaaagtctgtttgggaacttctgccaccacactttttggcaatctgccttttcagaattatttaaacatctactgtttcattgatgatggctcaaaaaaatagggaacctgta

SEQ ID NO: 617141 - DNA, 615 bp, Homo sapiens
caggaattgtgagcttcttaggctctacttttgctctggtttccaggatgctcaaagccaaattttgccctcacacgttcagttaaattttcgttttattctcctgccttccaaaagctttctggactattaaaaatccatctttactttaactacctagtttcatatgcactttcatcaaatctttattcaaagtagttagtatataaactgtattttataaatggaaaagtctttttcttacttgaaaaccacccttggtgctkgaagattgcttcctagtatttaaagaaattattttttaatcaattttaagattattctttcatgcaaagatttgatcgtttaaatttcttacagatttcattatcttctgctctggattcttttatgttattggactttgtttcatgtccacagaactctttgttggtttaatggattttcatttttgctttttagttccatctctaattactttttaatattttacttaactttttaaagtctgtttgggaacttctgccaccacactttttggcaatctgccttttcagaattatttaaacatctactgtttcattgatgatggctcaaaaaaatagggaacctgta

SEQ ID NO: 617142 - DNA, 615 bp, Homo sapiens
caggaattgtgagcttcttaggctctacttttgctctggtttccaggatgctcaaagccaaattttgccctcacacgttcagttaaattttcgttttattctcctgccttccaaaagctttctggactattaaaaatccatctttactttaactacctagtttcatatgcactttcatcaaatctttattcaaagtagttagtatataaactgtattttataaatggaaaagtctttttcttacttgaaaaccacccttggtgcttgaagattgcttcctagtatttaaagaaattattttttaatcaattttaagattattctttcatgcaaagatttgatcgtttaaattycttacagatttcattatcttctgctctggattcttttatgttattggactttgtttcatgtccacagaactctttgttggtttaatggattttcatttttgctttttagttccatctctaattactttttaatattttacttaactttttaaagtctgtttgggaacttctgccaccacactttttggcaatctgccttttcagaattatttaaacatctactgtttcattgatgatggctcaaaaaaatagggaacctgta

SEQ ID NO: 617143 - DNA, 484 bp, Homo sapiens
taacgtttctgagctccagaatgccccttgtccctgcccatcttcctgatgtgcccctgctgccagccaacctggggaacagcaagggatgtccckacccctgcacagaataaggagagtggttctcctcttcttcttttgtaagtgaagatcacaggggagaggcaggtgctctgaacaacagctgacgactcaggagactcacggccctccttgcttagttcccgggaaatgacagggcagcttatctactgtgaccttgggcatctgagtgtgtactttgtacctatgtgtgggcacgtgttgtgtgcacacatgtgtctgtgtctctgtgtgttgtgtgtgtgttcatgcatgcagggtgctttagaaatagctgttaacaaatagctattccaatggacaggccatttcttgacttcctgctttatgttcctcggtgcactagacattttctccacattattaggcaagattatatccc

SEQ ID NO: 617144 - DNA, 483 bp, Homo sapiens
ctttggaaactagtcagggctccccttagctcctcgcccctggctctttacacgttaagcactcaacamataattgctgcatgaccaacccatcacactaaattatgaaggaaaaaaaaagtcagcagaagccaatgtcgtcagcaacaacaataagaaaaagaccctctaaaacatcatctttaatattcggctctctgctgagcatatcaactttggaaacatcccatacctatcttgctgaactccttataataaaactttaggctcctcagtaatgaatttcagaatctaaaatatgtctgtgttgagccctgccctaccttgacagataaagtgagtcttatcaagggatatacattacacaacgtcttttgtttcagatctaacacgaatccatgtgtccagggaaactctctgaaattcatggttcagagccttttgtctcacaaactaagtcatggtccaaactccagttccttc

SEQ ID NO: 617145 - DNA, 483 bp, Homo sapiens
ctttggaaactagtcagggctccccttagctcctcgcccctggctctttacacgttaagcactcaacaaataattgctgcatgaccaacccatcacactaaattatgaaggaaaaaaaaagtcagcagaagccaatgtcgtcagcaacaacaataagaaaaagaccctctaaaacatcatctttaatattcggctctctgctgagcatatcaactttggaaacatcccatacctatcttgctgaactccttataataaaactttaggctcctcagtaatgaatttcagaatctaaaatatgtctgtgttgagccctgccctrccttgacagataaagtgagtcttatcaagggatatacattacacaacgtcttttgtttcagatctaacacgaatccatgtgtccagggaaactctctgaaattcatggttcagagccttttgtctcacaaactaagtcatggtccaaactccagttccttc

SEQ ID NO: 617146 - DNA, 500 bp, Homo sapiens
gggtgagtatattttgcctgtggaagaaatgtaaatcatttgtggccagaaggcaggctatgctggatttaaaatatatccacaaattctttgacacacttccttcaagatgtgcagcttcattcccctccctttgaatatggactggacttagtggtttcattttaatgaacagaataaggcagaaatgacagtgtgtgacttttaagcctaagtcataaaaaccattgcarcttcactcttgttctctctctcagatcactcattcctggagaagctggctgccatgtcatgagaatgtctaagcaatcctatggagtgccttacatggtgaggaactgaggctgctttctgacagccagaaaagaatgagtcctcctcagccaacagccatgaaaatgaaccatcttggaattgcaaactgcagccccagagaagcctgcagatcagtgcttccccagccaacaccttgactgcagccttgtaagaaactcggaggt

SEQ ID NO: 617147 - DNA, 591 bp, Homo sapiens
aagtttaatttatgcattgtgcacagtaagagcttaacaacagtaactaacaaaatagaacaatcayaacaatatgttatcataaaagttatgtgaatgtagtcgctctctctctccctctctatatatctcactcaaaatattgcactgcactgaaactgtaactaaaactgcagaacgcaaaaccatggatgagggaggacgactgcattttcacttttgttgcctgtgcttttggggtcatatccaaaaaaatcattgcacagattaacatcatggagcttccccgttatgttttctagtcgttttgcagtttcaggtcttatgtttaattctttaatccattttcagtggatttttgtatacggtgtgagataaggatctaatttcatttttctgcatgtggctatccagttgccccaacagcattccttgaaaaaactgtcctttccccactgtgtgtttttgtaactgcaattttgattttttcttgtgtcaagtgttatctataagattgaaatgttttacttctcaatggttgaattttcatcatccatttttatgtggtctgagaaagtgatctaaacactc

SEQ ID NO: 617148 - DNA, 591 bp, Homo sapiens
aagtttaatttatgcattgtgcacagtaagagcttaacaacagtaactaacaaaatagaacaatcataacaatatgttatcataaaagttatgtgaatgtagtcgctctctctctccctctctatatatctcactcaaaatattgcactgcactgaaactgtaactaaaactgcagaacgcaaaaccatggatgagggaggacgactgcattttcacttttgttgcctgtgcttttggggtcatatccaaaaaartcattgcacagattaacatcatggagcttccccgttatgttttctagtcgttttgcagtttcaggtcttatgtttaattctttaatccattttcagtggatttttgtatacggtgtgagataaggatctaatttcatttttctgcatgtggctatccagttgccccaacagcattccttgaaaaaactgtcctttccccactgtgtgtttttgtaactgcaattttgattttttcttgtgtcaagtgttatctataagattgaaatgttttacttctcaatggttgaattttcatcatccatttttatgtggtctgagaaagtgatctaaacactc

SEQ ID NO: 617149 - DNA, 580 bp, Homo sapiens
acagagagtttccatatacccccagttcccatgggcaagatattttctaagaaagaatatttaccattttcttcaatgttgtaagaggacaattctttttatacatttatattcaggggcttaggttgtaacattttcttcttgatgctactcaggcattttcaagggcttttaacatgcagagtttctttttgtttgtttcaatttacacatggtccatggatcaaagcaaggctgttgtcatcctgccacttccctgaatgctcattgggtcatctctgtcatggacggaaaggcacaattggaggtaatgtatacasaaagtgtctaattattgcttgaaccctgacctgagagctttctttctgcaaaagagaagtggctaacactttggcggaatgatcatattctcatgttcctatcccaggctcacgtgtgagataatgacatttataggtgaaagaaaatgtttccgtttacttccttgtgcaattaaagtgatgttgagacatataatcctctctctctgacaaagattactgtccaaagaatacaatgtaatcaacaggcggctggacac

SEQ ID NO: 617150 - DNA, 580 bp, Homo sapiens
acagagagtttccatatacccccagttcccatgggcaagatattttctaagaaagaatatttaccattttcttcaatgttgtaagaggacaattctttttatacatttatattcaggggcttaggttgtaacattttcttcttgatgctactcaggcattttcaagggcttttaacatgcagagtttctttttgtttgtttcaatttacacatggtccatggatcaaagcaaggctgttgtcatcctgccacttccctgaatgctcattgggtcatctctgtcatggacggaaaggcacaattggaggtaatgtatacagaaagtgtctaattattgcttgaaccctgacctgagagctttctttctgcaaaagagaagtggctaacactttggcggaatgatcatattctcatgttcctatcccaggctcacgtgtgagataatgacatttataggtgaaagaaaatgtttcmgtttacttccttgtgcaattaaagtgatgttgagacatataatcctctctctctgacaaagattactgtccaaagaatacaatgtaatcaacaggcggctggacac

SEQ ID NO: 617151 - DNA, 450 bp, Homo sapiens
gtgtcagtgcccagtaaacctgtgttgaattcccactggagaaacccctcatgtgccttctayatccctgacgtccctgccggcactttctcccctgtgctcactccagccatgctgaaatggcctccaacgcaccatgcctcctcactctgactcctacatgagctatttccatgtaattgtaattgtgtggaactgtaatccacctggctaacactgatccttcagatagtcatcgcagacatcacttcttccaggacgccttccctcctgcccccatagctgctattctcgtgctcctatggcgttccacataccgtccccctcctcatcattaacagctgtgacttcccagacacgatgtggcaagagttgcactaagtactctgcatgaattaccctttaatcatcacaacatctctaagagctggtgtggcagctgtacactag

SEQ ID NO: 617152 - DNA, 444 bp, Homo sapiens
agtaaacctgtgttgaattcccactggagaaacccctcatgtgccttctacakccctgacgtccctgccggcactttctcccctgtgctcactccagccatgctgaaatggcctccaacgcaccatgcctcctcactctgactcctacatgagctatttccatgtaattgtaattgtgtggaactgtaatccacctggctaacactgatccttcagatagtcatcgcagacatcacttcttccaggacgccttccctcctgcccccatagctgctattctcgtgctcctatggcgttccacataccgtccccctcctcatcattaacagctgtgacttcccagacacgatgtggcaagagttgcactaagtactctgcatgaattaccctttaatcatcacaacatctctaagagctggtgtggcagctgtacactagatgcag

SEQ ID NO: 617153 - DNA, 450 bp, Homo sapiens
gtgtcagtgcccagtaaacctgtgttgaattcccactggagaaacccctcatgtgccttctacatccctgacgtccctgccggcactttctcccctgtgctcactccagccatgctgaaatggcctccaacgcaccatgcctcctcactctgactcctacatgagctatttccatgtaattgtaattgtgtggaactgtaatccacctggctaacactgatccttcagatagtcatygcagacatcacttcttccaggacgccttccctcctgcccccatagctgctattctcgtgctcctatggcgttccacataccgtccccctcctcatcattaacagctgtgacttcccagacacgatgtggcaagagttgcactaagtactctgcatgaattaccctttaatcatcacaacatctctaagagctggtgtggcagctgtacactag

SEQ ID NO: 617154 - DNA, 445 bp, Homo sapiens
gtgtcagtgcccagtaaacctgtgttgaattcccactggagaaacccctcatgtgccttctacatccctgacgtccctgccggcactttctcccctgtgctcactccagccatgctgaaatggcctccaacgcaccatgcctcctcactctgactcctacatgagctatttccatgtaattgtaattgtgtggaactgtaatccacctggctaacactgatccttcagatagtcatcgcagacatcacttcttccaggaygccttccctcctgcccccatagctgctattctcgtgctcctatggcgttccacataccgtccccctcctcatcattaacagctgtgacttcccagacacgatgtggcaagagttgcactaagtactctgcatgaattaccctttaatcatcacaacatctctaagagctggtgtggcagctgtac

SEQ ID NO: 617155 - DNA, 440 bp, Homo sapiens
gtgtcagtgcccagtaaacctgtgttgaattcccactggagaaacccctcatgtgccttctacatccctgacgtccctgccggcactttctcccctgtgctcactccagccatgctgaaatggcctccaacgcaccatgcctcctcactctgactcctacatgagctatttccatgtaattgtaattgtgtggaactgtaatccacctggctaacactgatccttcagatagtcatcgcagacatcacttcttccaggacgcctyccctcctgcccccatagctgctattctcgtgctcctatggcgttccacataccgtccccctcctcatcattaacagctgtgacttcccagacacgatgtggcaagagttgcactaagtactctgcatgaattaccctttaatcatcacaacatctctaagagctggtgtggcagc

SEQ ID NO: 617156 - DNA, 446 bp, Homo sapiens
agtaaacctgtgttgaattcccactggagaaacccctcatgtgccttctacatccctgacgtccctgccggcactttctcccctgtgctcactccagccatgctgaaatggcctccaacgcaccatgcctcctcactctgactcctacatgagctatttccatgtaattgtaattgtgtggaactgtaatccacctggctaacactgatccttcagatagtcatcgcagacatcacttcttccaggacgccttccctcctgcccccatagctgctattctcgtgctcctatggcgttccacataccstccccctcctcatcattaacagctgtgacttcccagacacgatgtggcaagagttgcactaagtactctgcatgaattaccctttaatcatcacaacatctctaagagctggtgtggcagctgtacactagatgcagcc

SEQ ID NO: 617157 - DNA, 443 bp, Homo sapiens
agtaaacctgtgttgaattcccactggagaaacccctcatgtgccttctacatccctgacgtccctgccggcactttctcccctgtgctcactccagccatgctgaaatggcctccaacgcaccatgcctcctcactctgactcctacatgagctatttccatgtaattgtaattgtgtggaactgtaatccacctggctaacactgatccttcagatagtcatcgcagacatcacttcttccaggacgccttccctcctgcccccatagctgctattctcgtgctcctatggcgttccacataccgtccccctcctcatcattaacagctgtgacttcccagacackatgtggcaagagttgcactaagtactctgcatgaattaccctttaatcatcacaacatctctaagagctggtgtggcagctgtacactagatgca

SEQ ID NO: 617158 - DNA, 584 bp, Homo sapiens
tcccagagccttcaggtaagtgcccagctggctgacacctggatttctgcttggcataaccctaagaagacgacccagttgagtctacctgaaatgtggtctacagaactgtgtgatygtaaatgggctctgttttaagctatgaaagtgtgataatttgttacagcagcaatagaaaacaaagatacagaacatcaaagtcgataagtttccaggaaagaaacagaattatcaagaagtctcagaggcaaattttgtcaaaacttcaaaatacacataatcaaacttctttatcaaagccagagtaacatggaaaacaaaacttgtcaaacacagcaaaacaaaacaatacagatgactagggcaatttcacttaaaaatattgatacagtaattcgaaattaaatattagcaacagattccagcaacttattatacaaatgaaatctactactataaaatgtgtttttcccaaggatgtatggataacatgacatatcaaagatatgacagaagactagggcaatttcacttataaatattgatacagtaatttgaaattaaatattagcaatagattccag

SEQ ID NO: 617159 - DNA, 584 bp, Homo sapiens
tcccagagccttcaggtaagtgcccagctggctgacacctggatttctgcttggcataaccctaagaagacgacccagttgagtctacctgaaatgtggtctacagaactgtgtgatcgtaaatgggctctgttttaagctatgaaagtgtgataatttgttacagcagcaatagaaaacaaagatacagaacatcaaagtcgataagtttccaggaaagaaacagaattatcaagaagtctcagaggcaaattttgtcaaaacttcaaaatacacataatcaaacttctttatcaaagccagagtaacatggaaaacaaaacttgtcaaacacagcaaaacaaaacaatacagatgactagggcaatttcacttaaaaatattgatacagtaattcraaattaaatattagcaacagattccagcaacttattatacaaatgaaatctactactataaaatgtgtttttcccaaggatgtatggataacatgacatatcaaagatatgacagaagactagggcaatttcacttataaatattgatacagtaatttgaaattaaatattagcaatagattccag

SEQ ID NO: 617160 - DNA, 576 bp, Homo sapiens
ctagggcaatttcacttataaatattgatacagtaatttgaaattaaatattagcaatagattccagtaacttgttacaaaaactgaaatctactactatcaagtgtgttttttccccaagaatttatggataacatgacatagcaaatccactcatataatgcaagatattaattaatcaaagaaggatcaaatgaccttctccatggatggcaaagtacatacacgaaaaagttcatatccaatttttacaatacaaatacttcttaataaactaagacatcatggaaatctttctacattgtacaaccaaaagctagcatccrgcgagtggggaaaatacaagaagcaatccagttaagttatgataaagatgccccctgcattagtttgctggggctgccataacatagtgccacagaccgagtagcttaaacagcagaaatctgttttcttgcagttctggaggctgaaagtccaagttcaaggtgctagcagctttgttttcttctgaggccacttcccttgatttacagatggctgctttcttgccatgtcctcacacagtcatacctc

SEQ ID NO: 617161 - DNA, 444 bp, Homo sapiens
gtaggttaacaattgcttagggatgggaaggggaagtcaagggagcagggggactgagtactaattgcatatgaggatacttgggaggggctgctttatactcagaggtacatcccctgagccctccctcatgggtttcagttaayggcaactttagagacagaaccaccggcaaaccttggaaggctgagctcctctccctacctgctcccatcacctgcctgacagatgtaccaagaaacactcccagagaagatggcagtggggacagggtctgttgctaccttgtggttcccgtactaacaacatgagaactcattgttcacacgggaatctcaacatgaaaaacttgtaattgatttcattcacctatcattatctccaacaaatcaagcacctacaaagggagaatgacaattgggaggaaaaagaggtaggatgctt

SEQ ID NO: 617162 - DNA, 576 bp, Homo sapiens
ttaattgtgctgccttttgcaatagcaggtaattagaatcaatcccaatgccatgaacaagagactagctgaataaatgacgacagagcctgcagccatgaaaaaacgtagtaggaagacctctctggattgatttgaaatgatgtcaagcatatgtcgttccatgaaaaaaagcaaggcacagaacaggatatctaaaatactactttggggataaaaagtaagaggaaataaaaatgatacgtgtgtttgcctacttttgaaaaattaaaagaaaccccccaagaatttctagaaatgaatggaagtggctgcccacagaggcaggaaagtggactaacggtggggctggtagaaaggcaacgcgaattctcaaataataccttttatacagtcatgtctttgaatcctgaaaacgatttatatatacaaaaagtaaaayttaatcctaaaaggcaaaaaaaaaagaaaatctaaaaagaaaattcaaatagaatcaacgaaactaactagacttcaagttggttaaaaaaaaaatctgcagaagtgagctatcactggtcacatttagatgtg

SEQ ID NO: 617163 - DNA, 536 bp, Homo sapiens
tcttgggaggctgaggcctgagaatcgcttgaacccaggagacggaggttgcagtgagctgagatcgcactgctgcactccagcctgggcaacagagtgagtctctgtcttacaaaaaaaaaaaagagagagagagagaagtgctgagaagttacagggggaagctgggaccagggcaaggatggrgctgttatggtcaccagggacccaagctgatgagcagcagcgctgaagctcagcaggaaagccgcttcattattctcttttgaaaaacactggggacatgggagactgcaccagaggaaaggacatgcattggttctcctctgacttccaagagatggtctcaaatcactaacacagacaaaatgggacccagccatccagaaagacacctgagaaatagaagtctgagatttggtgaaaaggggactgagatgggaagcactccctggcccaaggtgtatgatattcttggacaagtgtctgctcctgagtggaaaccaggccaggagctcagacccagacaaggtgtc

SEQ ID NO: 617164 - DNA, 536 bp, Homo sapiens
tcttgggaggctgaggcctgagaatcgcttgaacccaggagacggaggttgcagtgagctgagatcgcactgctgcactccagcctgggcaacagagtgagtctctgtcttacaaaaaaaaaaaagagagagagagagaagtgctgagaagttacagggggaagctgggaccagggcaaggatggggctgttatggtcaccagggacccaagctgatgagcagcagcgctgaagctcagcaggaaagccgcttcattattctcttttgaaaaacactggggacatgggagactgcaccagaggaaaggacatgcattggttctcctctgacttccaagagatggtctcaaatcactaacrcagacaaaatgggacccagccatccagaaagacacctgagaaatagaagtctgagatttggtgaaaaggggactgagatgggaagcactccctggcccaaggtgtatgatattcttggacaagtgtctgctcctgagtggaaaccaggccaggagctcagacccagacaaggtgtc

SEQ ID NO: 617165 - DNA, 543 bp, Homo sapiens
taggggaaaactccaaaagagactcatcagtaaaaatgtccatttttctctctttaatataaaagaaaacaaattatytttaagagtctcaacaaggtttgagaaaatatcctgccttaatgattattcctccgtttgaaaacggctattttttccagtttactttaaaaatcaattgtacttccccttggcttatttaaagcaacagccacagtgactgctatggctaatgacttcatgtcatacgactgtggattttcctgtggaaagagatgggaagctgggtggctggtcggcgtgttagactttgcttagtgaatctctccaggtgataactgcaggggtgactgcaggggcctggcttggcttcgaaagcagtagcagcagcagcggagacggtcctgtggcacccagctgtttaacttccaccgaggcagggggcccgagcagggacagaagaggccggggtgaacatcaccctttctacagtggctcgatgccttgcttcacactccagttttagtgttcgtgtgatacttgcta

SEQ ID NO: 617166 - DNA, 644 bp, Homo sapiens
atctcaaaaaataaataaataaatacctataaataaataaataataaaaatatatccttaatgtatgcaaggcactaccctagaaactgtgttccagtgtgtaagacatgtgcattagacaggtctgtggcctcgaataggactccactcagattgttcaaccacagagacttgaaggaaggactrtttacaaaggtgagcaagttcaagagaagacatcgcagcccctaggattagtaacaaaggaaagcattactattaggcaacaaggcttgaagaggaaacatggcttgaagctattgctctggcagtagctaccagagctctttgtaagatggacctgtggaggatgggcccctctgcaagagctatagttgccaggaccaaggcccaaggaaattcctctcctcacttaattcctgtttgtgcctccccttgggcaaccccaagcccaagacccagctaatatattctgtgacaggggggcctcctgggcacacagtagggctgaaagggatggagaacggctatgggacaacaaagcgagaatgaaaggcatggcgtctttatacttgcgaggaacttgcatgtctaaagggggcagcgaagatgtcaccagaccgttacaatatatgacagttaca

SEQ ID NO: 617167 - DNA, 644 bp, Homo sapiens
atctcaaaaaataaataaataaatacctataaataaataaataataaaaatatatccttaatgtatgcaaggcactaccctagaaactgtgttccagtgtgtaagacatgtgcattagacaggtctgtggcctcgaataggactccactcagattgttcaaccacagagacttgaaggaaggactgtttacaaaggtgagcaagttcaagagaagacatcgcagcccctaggattagtaacaaaggaaagcattactattaggcaacaaggcttgaagaggaaacatggcttgaagctattgctctggcartagctaccagagctctttgtaagatggacctgtggaggatgggcccctctgcaagagctatagttgccaggaccaaggcccaaggaaattcctctcctcacttaattcctgtttgtgcctccccttgggcaaccccaagcccaagacccagctaatatattctgtgacaggggggcctcctgggcacacagtagggctgaaagggatggagaacggctatgggacaacaaagcgagaatgaaaggcatggcgtctttatacttgcgaggaacttgcatgtctaaagggggcagcgaagatgtcaccagaccgttacaatatatgacagttaca

SEQ ID NO: 617168 - DNA, 607 bp, Homo sapiens
aatgtaacaaaatgcttggggaagtaattcagtgctatttaaaaatatatatgttgacatagcctcaggaattgcagtttctcatagtcatgataaagttctccctttgatagctcagacatgaagtaattgaagtaagttcaggttttgcttctgctaattactagccatgtgaccttgggcaagtttcttaagtttgcaaaaaaatccagtttcctcatccataaaacctgaaaaataatactacctgcctcatcgagttatkgtttatattaaatgtgatcatttatgtaaaatgtttcatatagcacctagcacctagtaaacagtcaaaaatctaatttctactatggctaattggatgtttaatacagtccgttactgaggtcatctttactggatttgagtgacaatttaaaattttagatcaaataaatattacaaatatgcaaaatgtaaaatggtatgatcaaataaatatttatatggaagactttattaagattttagcttgcaatacatgattgagaatttcatttgggcagtatcctcaattgtgaaaagaggggttcagattcaataatccccaaggtgctaatatttaaat

SEQ ID NO: 617169 - DNA, 395 bp, Homo sapiens
cctttccattcctctcctttgctctttcaggcctctggtaaagctggaagcgcctgaaagagaggcaaccgaagccaaggctgccrtaatccacgcgctctggacgtcaccctgggtgactcagatttggttgcatttgtcatttcacaaccacctgcatctgatcccactgtgtgggcaaactgtctgctgggagtctctgcctggtgcctggtcttgggggcatagtgttcttccccagaattgcttttcccagctgtttctctatagctttagtcatggggttcactagtgaaagctgccatgcctaccctccccatttacttttgttagtagtcatttctttttttttttttcgagatggagtcttgctctgtcacccaggctggagtgcc

SEQ ID NO: 617170 - DNA, 518 bp, Homo sapiens
ttgtaaaacaaattttttctccttttggagacctggtgcccttggtatttgtatatagaatccacttgtttattctygaggagagcagctatgtgtgtgaattgggcatccgttggaagaaacataacaggcttgcctgtaacagctggaatatagttgcagccctttgaaataagacaatcttagttttccttccttctccttagccagccatccagcgtaggaaacaggatgctgtgtacgtaccctgagtaggaggagagggttccagagtgccacttggctgctcctgtgtacccattcttgttcaagagcaccttgagatcacatggtcttaaatgccaaagctgaccaagagctgcccctctgttcagcttcgtcgtccctggctgttggggaggactttgtctgtctgactgccgctgggctgccttgccccagctccctggggtcctttgctccgtaatccatcagctcttcttttctcttcttcttactcatagtataagacccgactg

SEQ ID NO: 617171 - DNA, 518 bp, Homo sapiens
ttgtaaaacaaattttttctccttttggagacctggtgcccttggtatttgtatatagaatccacttgtttattcttgaggagagcagctatgtgtgtgaattgggcatccgttggaagaaacataacaggcttgcctgtaacagctggaatatagttgcagccctttgaaataagacaatcttagttttccttccttcyccttagccagccatccagcgtaggaaacaggatgctgtgtacgtaccctgagtaggaggagagggttccagagtgccacttggctgctcctgtgtacccattcttgttcaagagcaccttgagatcacatggtcttaaatgccaaagctgaccaagagctgcccctctgttcagcttcgtcgtccctggctgttggggaggactttgtctgtctgactgccgctgggctgccttgccccagctccctggggtcctttgctccgtaatccatcagctcttcttttctcttcttcttactcatagtataagacccgactg

SEQ ID NO: 617172 - DNA, 295 bp, Homo sapiens
tcctgccttagcttcccaagtagctgggattacaggcgcccrccaccacgcccagccaatttttttatatttttagtagagacggggtttcagcacgtttatattagtataaacgtacataacacagaaggaaatctactcagcttggggtctttttttgcttttctcctttattatgagatttacccttcttctcctgctgtggccaattcatgacaaaatattgatgagtgtagaacagtgaaggattgatgacctagtaaaatcatgacatagtactgaattaacatcaagt

SEQ ID NO: 617173 - DNA, 482 bp, Homo sapiens
gaaacacaagcacctttgtggccaccaccactgagacygttttagttcagacctgaagccagcacagcactagtctcacacaaggcccactgtaacaactacctgcctaagtttgctcaaggccctacggctctacaatcagcaggtggcaaagccagccaggtttgtgtccttcccttcagtgcaatgagttcccccaggccccaggtgggttcagagatgctgtctggagccagggattgaagtcaaaacctttagaaatttacctggtgtcctagtctactgtagctaagctggcactcacatcacaagacaaagcccttctcactcttccctctcaaagcccaagtgctcttcagtcagcttgtgatgcgtgctgccagacctgagactcacccttcagggcagtgggctctcctctggcccaggcaggtccagaaaagctgaccaagagcctagacctggattcgaagaccccaaga

SEQ ID NO: 617174 - DNA, 482 bp, Homo sapiens
gaaacacaagcacctttgtggccaccaccactgagaccgttttagttcagacctgaagccagcacagcactagtctcacacaaggcccactgtaacaactacctgcctaagtttgctcaaggccctacggctctacaatcagcaggtggcaaagccagccaggtttgtgtccttcccttcagtgcaatgagttcccccaggccccaggtgggttcagagatgctgtctggagccagggattgaagtcaaaacctttagaaatttacmtggtgtcctagtctactgtagctaagctggcactcacatcacaagacaaagcccttctcactcttccctctcaaagcccaagtgctcttcagtcagcttgtgatgcgtgctgccagacctgagactcacccttcagggcagtgggctctcctctggcccaggcaggtccagaaaagctgaccaagagcctagacctggattcgaagaccccaaga

SEQ ID NO: 617175 - DNA, 651 bp, Homo sapiens
ccagttttttttcttttttctcaggatagctttggctactctgggtcttttgtggttccrtacacgttttaggattgtttttctatttctgtgaagaatgtcattggtattttgataggaatcacattgaatctgtagattgctttgggtactatggacattttaacaatattgattcttccaatccatgaacatggaatacctttctattttgtgtcttcaatttctttcatcagtgtttttagttttcactatacagatcttacacttacttggtgaattcttaggtattcaatttcatttgtggttactgtaaattagattacattttttatttctttttcaggttgttcattgttggcatatagaattggtactgatttttatatgtggattttgtatcctgtaactttatcgaatttatcagttctaatagtgttttggtggagtcttcaggtttttccaaatataaaatcatattatctgcaaataaggataatttgacttcttactttccaatttggatgctctttatttctattttctggttgctttagctagcactttgagaactatgttgaataacagtggtaaaagtggacacatctttgttgcattccagatcttagaggaaaggttttcagcttttcc

SEQ ID NO: 617176 - DNA, 651 bp, Homo sapiens
ccagttttttttcttttttctcaggatagctttggctactctgggtcttttgtggttccgtacacgttttaggattgtttttctatttctgtgaagaatgtcattggtattttgataggaatcacattgaatctgtagattgctttgggtactatggacattttaacaatattgattcttccaatccatgaacatggaatacctttctattttgtgtcttcaatttctttcatcagtgtttttagttttcactatacagatcttacacttacttggtgaattcttaggtattcaatttcatttgtggttactgtaaattagattacattttttatttctttttcaggttgttcattgttggcatatagaattggtactgatttttatatgtggattttgtatcctgtaactttatcgaatttatcagttctaatagtgttytggtggagtcttcaggtttttccaaatataaaatcatattatctgcaaataaggataatttgacttcttactttccaatttggatgctctttatttctattttctggttgctttagctagcactttgagaactatgttgaataacagtggtaaaagtggacacatctttgttgcattccagatcttagaggaaaggttttcagcttttcc

SEQ ID NO: 617177 - DNA, 542 bp, Homo sapiens
actactactaaaactgacaatactgaccatacagccaccactaaaatgctggggttgaattcagataatctctaargttcttcccagctccaccataccctgatttcagcatttcaaatatatgctgtatttgtggggggggttcctagaaagagtgtggcagtaactgaactcaactatacaaaagaccgaattcttcctttagttggagatttattgatttttgtaagtgagtttatagacaaaaacgaggaagatacagagaaaaaagagaagaattactgtgctttgatagtagggctatgggtgattattttatttttaaaattttattttttatacattaatgtggtttctataacaaacacaaatttagaataaaagtaagatatttctcttgtgcttccaatttaccatatacttcttaaatgtatttgtatcataatcatcagctgtaagtttactattaaaaaaaatcaacaaaagaacaatatcagagctaaaggacttcaggcctgatgaacctaagtctagtttctgtg

SEQ ID NO: 617178 - DNA, 542 bp, Homo sapiens
actactactaaaactgacaatactgaccatacagccaccactaaaatgctggggttgaattcagataatctctaaggttcttcccagctccaccataccctgatttcagcatttcaaatatatgctgtatttgtggggggggttcctagaaagagtgtggcagtaactgaactcaactatacaaaagaccgaattcttcctttagttggagatttattgatttttgtaagtgagtttatagacaaaaacgaggaagatacagagaaaaaagagaagaattactgtgctttgatagtagggctatgggtgattattttatttttaaaattttattttttatacattaatgtggtttctataacaaacacaaatttagaataaaagtaagatatttctcttgtgcttccaatttaccatatacttcttaaatgtatttgtatcataatcatcagctgtaagtttactattaaaaaaaatcaacaaaagaacaatatcagagctaaaggacttcargcctgatgaacctaagtctagtttctgtg

SEQ ID NO: 617179 - DNA, 544 bp, Homo sapiens
acaaaaactgtcttccttagattatatttcctggccctgcttccagctaggtttgatcagaaatgccctatgtgcatctcaagcctggtccataacaattcccacatgtgctcctccaaaccattctctgttttcttaaggctgcaatggagacttcaatgactggagtaaccctgraagccacagatcaaaaatacagatttcctactgtgtctggaatttgttccttccggtgggttcttggtcttgctgacttcaagaatgaagccacagacccttgcggtgagtgttacagctctgaaagatggtgtgtctggagtttgttccttcagatattcaggtgtgtccagagtttcttccttctggtgggtttgtggtctcactgacttcaggagtgaagctgcagagcttcgcagtgagtgttacagctcttaaaggcagcacatcgggagttctttgttccttccagtgggttcgtggtctgttgacttcaggaatgaagccacagaccctcgcagtgagtgttacagctcataaaggtagt

SEQ ID NO: 617180 - DNA, 544 bp, Homo sapiens
acaaaaactgtcttccttagattatatttcctggccctgcttccagctaggtttgatcagaaatgccctatgtgcatctcaagcctggtccataacaattcccacatgtgctcctccaaaccattctctgttttcttaaggctgcaatggagacttcaatgactggagtaaccctggaagccacagatcaaaaatacagatttcctactgtgtctggaatttgttccttccggtgggttcttggtcttgctgacttcaagaatgaagccacagacccttgcggtgagtgttacagctctgaaagatggtgtgtctggagtttgttccttcagatattcaggtgtgtccagagtttcttccttctggtgggtttgtggtctcactgacttcaggagtgaagctgcagagcttcgcagtgagtgttacagctcttaaaggcagcacatcgggagttctttgttccttccagtgggttcgtggtctgttgacttcaggaatgaagccacagaccctygcagtgagtgttacagctcataaaggtagt

SEQ ID NO: 617181 - DNA, 456 bp, Homo sapiens
actagcatagcagtattcttgartcttcagctgaatactgatctacacgtgtacaataaaaccctacaaagctgggcaaagaagaacttttgggaaaagaacaataacctgaggagctacaagcaaaacacttcccagagcttacccaggggtgagaattattcacattatcaccaccagaataaaaagtcatcactgggaatacacaaaacattcaggaaaaacccaaaaggtctctttgttggatgtaagacattgtgaattttagacggctgagggctgaataatacttgattttgttctgtccagaagttaagcttcttgtgcatcagtttgactcctttatggcttatttataaacttttttagttcacatctaacgtaattttttctttggagctaatttatcccataactaagaaattatcaatgaacttactttcttctgcaatgttt

SEQ ID NO: 617182 - DNA, 587 bp, Homo sapiens
acctgactaacaaagattaaatagtaacattctgagcaggtaggagggaactgacactcatattcctagcaggaacacagtgattaaatgtttttgaacaacaatttgagtttgtaaatgtgattactgttggatccagcatctacattttataaatttaattcacagaatattcacacaatatgaaaaaataatatggccaaaatgttctcaacactgactgtggcagcaaaaatctagaaaaaactcagctgttcaacaattagggcacacaatggaatactctggtaggcattagaaagaatgggataaccctatatgtaagttcacaatatagaaaatgaaaactgttccagaacagttttcaaagtataagcccatttttyattttaaaatataagcaagtatatatgactatatctgcaaagaaaaacatctagaaggataaataccgaactgttaatagtatcaaacatttcaggagttgacatgttaaacacttaaggagcttgaatactttttacttcatacacttataaggaataaattcctcataacaactgaaaatcaactttgtaatttaaaaa

SEQ ID NO: 617183 - DNA, 560 bp, Homo sapiens
caggcctccttcttggcacttccccctcagctacctaggttaaagggaaactatctcttcaccatatcacatacctgtccttggtcaagacttagggagtgggaaacatagtccctaagaaacatgggcagctcatcacccttcctttaaaatccgtttccctttcctctcagggaaggcttctactttccctttctgtgtggtgggaatgtcccctataacacaatcccatgattccttgcctggggatgcatttattctggatggagcttatgtctcattccctacagcaataggcttcttgacttagtcttaatgacataagggaatatttaaaggaacctggcttaccagaaaggggcaatacaccagaagatttyttaaaaaatattacctatagtataggaatatttcagaaatgcctaaaaaaaggagactggcaaatttcatgattcttaagcaataacaaagaggaattgtctctaccttgaaagagttattatgtaaacaaagagtaaagttaattagagtttactgagagtgcttacctgtaccagtta

SEQ ID NO: 617184 - DNA, 584 bp, Homo sapiens
tccaccacagctgcgaatatgctgggccacacccaaagccagcatgtcttagagtctcacccaaggctcacagtgtgtactacttggttaccactgctgattattcagagcccaagggcactttagtcagcacgtgatgaatcctgccagsactgggtccttcccgtcagggcagcaggttcccttctggcccagggcgtgactagaaatgtcatctgggagctagggcctggaatggaggcctcaggactctgcccagtgtcctattctactgtggatgagctggtattcaaggtgcaaaacaaagtcctctttactcttccctctcctctcctcaagcagaagaaaagggtcactttcattgctgtgagctgtgctgcctggggttgggagaaggatggtgcaagcattcccttagctgccctggttggtgtctcactaggttgcatactccccaagtcactggctcttagcccagcacagcactagggcttgcctaggatttacagtccttgtggcctagacagcctttcaagtttatttagaatcccagagcactttgccctgtgatggtgaggcatgcc

SEQ ID NO: 617185 - DNA, 509 bp, Homo sapiens
cagcaggtgtcctaggaatgcaagtatgggtcatcattagaacatctatcatttcagtggattaaagaaaaaatgctcagtgatttgagcaaaagagtgttctattagattattctgactgaagtgtggagaaggatgagaaggactagagaagctgcagggcctgctgagcagacagactatggcaacagggagaagaggtgatggtagcttgtactagggtaacagcagtagtggtggtgagaaactgaccaggaatcacagcagtgatatactactttatggccttcataatggcaaagggtacgtgggaggaaaagggctcttttgtactcctggccctgggagtatgaactgacaggaagacaatctggaagtatgaagcaaaattaaatatgtgcatactttagtactcaggcatctcacttttggataaaggtcccagagaaactaacacacaggtgcaaaggagayagacacaaggaaattcattgcagtcctgttttgga

SEQ ID NO: 617186 - DNA, 632 bp, Homo sapiens
gtgttgaaaatgagctcccaccacaaccaatccaaggataacagagtaagacacgtcacctaaacatagagtgcaccaggatatagaccaaaggagactctgagcttgacttcagactctatatctgctccttatgggtagctccaattgaacctagaagaattatagcaaaataagggacatgtcattttgcagggaattaagtagaacttagatttgatttacccagaaaaccaaaccaggtactgttcagttcaacccttgaatgtcagtcaggtacatgaccrtaagacatttataccggagaataacaaatagcttctgctcttgccttgtggttaggaatgtgctggagcacatgtgcacaagcaaatgctttccagctcaatggaagatttaatccactgcagatgaacacacgaaatcaatattgctttcttgtttaaaagaaaaaatccagaaactactgaaaactactcacagtttcttttattttactactgctcctaaatctttgttaggaagttaaccttatatacttacgccagccccccacttgactgctgggaagtctcctgaccacaggaagcgatctgtagagatggcccagcctgctctgcagcctccctcct

SEQ ID NO: 617187 - DNA, 589 bp, Homo sapiens
aattgaattaccagcattgagttaggtcagacaataattggtagtagaaatgcattatgtgggataacacagacatgctacttaaaaaccatgcactatgagagacctccacattgctggtgcagaattaacatctcacctgcagctgtgtggctacaggattagactgttttcatatgaaaagtaccacttaagagagttgctgcttaatcagataaagttcatggcaatgtctctaactcctkcatttatatataattttgcccaatataacattaagggcaaggataattctgatttcaaaaatctgaattttatttacttagaattccatcacaatgccagtagaagactctatttacagtaggaactcatactgttgacctagtagtcaacacataaagtgggccataaaagaggctagaatggcccatcaagagcctggcagctcatcaaccccaagccatcaggcccactcacctgaacctgcactggcacccagcagtgctgtggcctagccgcatgggagaaagacaggaccaaatttcctactatgacagcagggcattctggtctgtgttttgccctt

SEQ ID NO: 617188 - DNA, 569 bp, Homo sapiens
acccataatatatcagagcagttctttgcggcacatatttaacttctgtgaccatagcctccaaattctctaacagtgcggtattctggaaagagcacacaccccttatgcccattctactgcatccagcacacaaggctgggcagaaagcaaggttctctgcagcagcctaccctggaagtttcaacacagccactgcactatgactgtggccttacttggcctgccagcgcctttcagtgcttaccttttggcaggtagagtttaacaggaagcaatagccctgmtaccaaatgacagaagaacacaatctgagggttgatgacctttgtattaatttaaacatctcaacctttctcaaccaggacaggcagccacctccacttgtgaacctgaattcggctgccacaatttgcatgcataatgtactgaaaagccttctttataatgtttacttctctgtttcttccaaatgaaatcactgaagggcaaatttgattttcaaatcagttttaaaacatctgccttctaaaaaagtaagagtaaagagataaggcttttatattaca

SEQ ID NO: 617189 - DNA, 551 bp, Homo sapiens
ggtgtttaatatatttcagtttgttattttattttctcactttctgcaaagaatatctgagggtgcaggctttgctctaaaggtggagctatcaccctgcagctgcttgggcccaggtatgtgacagttaaggacagtttcaaagggctaaggaggtggggagaagcagttacaagggttggctcgaccccacatggaagagttgaatgctcacacatgtattttatatatacagcattcatgcatgtgggtgtctgtacatctgtcaaggcaacacacattagaagaaactttagaagtaaatccattatattttatgtcttacataactattatayacttttactgataaaataacaataaacggtattattttaataaaaacagcccttggagcccagcaccaagccttgttttaggaatggcatcttacagacgtggagacagaggcacagagagagtaaacgtcttgcccaaggatgctcggctaatcggcggcagaaccatggctaagagccaggcctcctgattttcagcccagggatttttat

SEQ ID NO: 617190 - DNA, 571 bp, Homo sapiens
cagacgtggagacagaggcacagagagagtaaacgtcttgcccaaggatgctcggctaatcggcggcagaaccatggctaagagccaggcctcctgattttcagcccagggatttttattttgccttttttacttcactcatgtacagataatgctgccatatttcacacttttcttgctggtggcaaatactagtaaagagtctaataacacaatccctagtataaaggctaagattgaaataattttacattaaacagaaacaattccaacacagattttcactttcatacatgcaccccttattccagcaattacactgtacttctcctggggacaggctctgagccctccaccagttaasttctagtacatagtgggtacacagtaactgctaaaccacaggaggtttgcagctcttgttccacagcgagcctgcactttacactctgacaatcaccaatcaccgtgggctctttaattttgtggtcaggcagatttttgcctgccacagtactgaactcatagtaggtacttgataaaaaggggttgaatgagtgaagaaaggtct

SEQ ID NO: 617191 - DNA, 494 bp, Homo sapiens
aatctgttcaaaatcaaccaatgaacaaacagtatgctttagaagcttctgcaacggaaaaaactaatcaggaacttcaagaaaacaaaaagctgtctaataggaagctatttaacatgtggaataattctgagcacttgtaagaaaatctaatctgtttcatcagaacagtacaattcttccaagaggggaacaagtttactgacatatttccctaactctagatccaaccaattactagatctgtcatgaacaatgtttatatgatcattatattttaatgagttcttagtgtttttcccttttcaggatcaatttatagttaacatatagatggtttaactataagttayagaacaaaaaataactatcacaatgtcaatatagtaaagcagctaacagaagatgagaagtagaatgggaaaaatgagggaaatgtagtgggtggtaatttcttcatcaacgtagtaaagagtcgagaaatattgtctata

SEQ ID NO: 617192 - DNA, 594 bp, Homo sapiens
attaggaaatagcagaataagcacatagtttagaatatgaagatacagaccaaaaaaaaaagaagtctaaaagagatgaatatgtttgcytcaaaatctaaaagtctgaccatgtgttatattggacaaggtagggtgacacaggcactctgacatattgccagaggaagtacaagttgacataccctcaactagcaaaatgttaaatgcacatacccctagagccagcaattcccttatactactttaatttatgatgtgtttgcagcatagggaagaagaatagggattgcactgcagcatcatttgaacagcaagagagccacctaaatgctcatcactggggattggttaagtacattatggtagattcctatccttataatgaaggactatgagctgggggatgggggatggggagagggaggaaatgcaagagatctccaaggtacagaaaaatctgtgttaaaagaaaatggggtcaatgatgtaatggcatgtattagctgaatccagagttgatatgagttctaaaattacactgaagctgggtgtggcagttcatgcctgtaatcccagcactttgggagacca

SEQ ID NO: 617193 - DNA, 507 bp, Homo sapiens
cttttttttttttttttttttggtagaggcacagtctcactatgttgcccaggcaggtcctgaactcctggcttcaagtatcctcctacctttgcctcccaaagtgttgagattataggtgcgagccaccgtgcccagcctaattgattttttatttttagagcaaattttcaccctgctgcccagactggactgcagggrtatgatcatagctcattgcagcctccaactcctgggctcaagtgatccttctacctcagcctcccaagtagttacaggcatgcaccaccatgcctggctatttttaaattttatgtagagtcagggtctcgctatgttgcccaggctggtctcaaacttctagcctcaagtgatcctcccacctcagcctcccaaagtgccaggattacaggtgtgagccgctgtgctggtctaattgatatttcttatagtattctctaattgatgataaccccatcacctttattatcgtgttttagtttcctt

SEQ ID NO: 617194 - DNA, 594 bp, Homo sapiens
attaggaaatagcagaataagcacatagtttagaatatgaagatacagaccaaaaaaaaaagaagtctaaaagagatgaatatgtttgcctcaaaatctaaaagtctgaccatgtgttatattggacaaggtagggtgacacaggcactctgacatattgccagaggaagtacaagttgacataccctcaactagcaaaatgttaaatgcacatacccctagagccagcaattcccttatactactttaayttatgatgtgtttgcagcatagggaagaagaatagggattgcactgcagcatcatttgaacagcaagagagccacctaaatgctcatcactggggattggttaagtacattatggtagattcctatccttataatgaaggactatgagctgggggatgggggatggggagagggaggaaatgcaagagatctccaaggtacagaaaaatctgtgttaaaagaaaatggggtcaatgatgtaatggcatgtattagctgaatccagagttgatatgagttctaaaattacactgaagctgggtgtggcagttcatgcctgtaatcccagcactttgggagacca

SEQ ID NO: 617195 - DNA, 654 bp, Homo sapiens
aagttgatctaacctgactgcagacctgaggcagcaaaaaaccgtgttaggagctatgggaattagtgattgttttggccacacgctgactagccaaaggctcactaagatcaaaagtcgcacatgggagcctcacagacataccttgctggtttcctgagtattttttaaaaagttgagttagctgccacttaaacattgggaaatttcacagcaaaacagagatgcctcccttctcttgaaaaccagaagatctggcatgcatgagtcctcttccctgcctgacaacagctggagatgaggagagcttttggtggtctctcttactscctgcgcctgccctggcctgctttgctccctcacatcacccatctggtccaaggaggtggccgagtgtctaccccagccttagatagagctcggtgttaaaatggactcttgtacagtaatctcaccaggttcaaaattctttgcggatttagcaccagaactgacataaaaatcatgtttcaggattaagaaaagtaaatccttatactgttttgttcttggcctcgagacaggtacagctgaggacataagaactaactacagtcctcacttcctgctgcctgccttcccttggctgtggttagcagaagtctggttatagct

SEQ ID NO: 617196 - DNA, 590 bp, Homo sapiens
gcttctgttagccctcatgagaatagctgcatttctgtgaccccgtgtggcctatcctggggcagcagcatataaaacatctgccacagaaggaggaggctgatgctttccactcatttcgttttccaaggtgaacaattctggtttttaaaatgattgctataatcactaccggtgaagtatttgttttaaagagttcttaacaattctagataattactaaacacacacgtgtgcatgaaaaaatgggtcagatggggccgaaatcctctgtaaaaatgtcttattgatgggttaaaatcttggaaagctaaaaggattcttttcatatatccagctatatcttatgatgactacttgccaagttctccaatcactcaacagaggtaaatggttgacatgtgaggtaaatcacacacatgaacacacaaacatatttttttttttggcatttaacttttcctgcttttccaaagaacatctgaattctagtgcycctcctgtatttttaacacacaacttagttgccatagcaatactgtctggtcttgaaatacctctaggatgaaactggctgaggcatatttacc

SEQ ID NO: 617197 - DNA, 545 bp, Homo sapiens
gagctctttagtttaattagggcccacttaacaatttttgcttttgttgtgattgcttttgaggacttacttataaatgctttctcaagtcccatgttcagagtgatgtttttgaggttttcttccagaattcttatagttcaaggtcttatatttatatctttaatctgtcttgagttaatttttgtatgtggtgaaaggtaggggtccagtttcattcttctacacatggctatccagctatcccagcaccattttttgaacagggatccctttccctattgctaatttttgttgactttgttgaagattagacggctgtaggtgtgcagctttatttctgagttctctcttctgttccattggtctatgtaagtgtttttgtaccagtacgatgctgttttggttactggagccttgtggtataaagacatgtaatgtgatccttctggcttttttttttyccccttaggattgctttgactatttgggttcctttttggttccatatgaattttagattagtcttttgtaaaaaataattg

SEQ ID NO: 617198 - DNA, 645 bp, Homo sapiens
gttgtttaatttctatgtaattgtgtagtttggagagatcttcttcatattgatttctatttttatttcattgtagcctgagagtatggttagtttaattttgatttttctgaatttattgagacctgcttcatggccaagtatgtggtcaatcttagagtatgtcccatgtgcagatgagaagaatgtatattctgtggttaatgggtgaagtatcctgtagatgtctgttaggtccaattgatcaggtgtcaagtttaagttcagaatttccttgttagtttactgccttgatgatctgtctaatgctgtcagtgggatgttgaagtcccctactattattttgtgactatgtctttttgtaggtctagaagtacttgttttatgaatctggatgctacaatgttgggtgaatatgtatttaggattaagtcttcttgttgaattgaaccctttatcgttatgtaatgttcttctttgttcytttctaccattactggtttaaagtttgttttatctgatataagaatagggacccctgctcttttttgtttttttctgtttgtgttgtagatatttcttcaaccctttactttgagcctatgggtgttgttatgtgtaagatgggtctcttgaagacagcag

SEQ ID NO: 617199 - DNA, 425 bp, Homo sapiens
cttactacctcatttcattctgaatatatcctctactctccactgatccttgtggaaattcatcasggttgcatttacagaccaggagtgtctcatgttacaagatgagacaggtcacctttggatgactcaattcaagaaaacttgtcaattcaaactccccagtctgcgactgcctctaaacccactccaaagagttttgctctcctactgacaatcatgcatttcctctatggctttaaaaggaggactttggccttgatgctgttttcctggagaaaaactgttttggatctcaaagcatctctgcagacaaagagctacagagacaccttttatttctgctattgttttctttgtttcattttgttttgtttgatgcactttgtggaggtcaagcttacttctctgaaaatgtatgacag

SEQ ID NO: 617200 - DNA, 584 bp, Homo sapiens
actttggccttgatgctgttttcctggagaaaaactgttttggatctcaaagcatctctgcagacaaagagctacagagacaccttttatttctgctattgttttctttgtttcattttgttttgtttgatgcactttgtggaggtcaagcttacttctctgaaaatgtatgacagtctctccggccatttccaggattccaagagtaactccatctagaagatgtaagattcccagagtttctcaaagacatcgtgtttaaggaggaaatggtcttattttactggcttgatattgagtgttgaacaatttctattattcatgcaacaaacattgaataagtcctagggcagagagcacaggacagtgaacaggatagatgccagccccggccttcatgtatctgatagacacaggagaacygacatgctttaaaacaatttaatggggctaaaagctgtttgaaactggcttcatggctctatgagaatatcatcaaactgtctaaattctaggaaattttccaaataatgaccgcaagaaattggctacagactttaacttcccacaaagatacaattcat

SEQ ID NO: 617201 - DNA, 628 bp, Homo sapiens
ctgggtgacttaaatgacagaaacttatcctcatggccctggaggctggtgatgggaatttttcagctccatcatagtcttatgggaccactgtcatgtaggcggtccatttttgaaccaaaccttgctatgcggtgcgtgactgtgtgtgaatgagtgaatgaatgtatgaatggctctttgttccagctctatctcttattagccattttttccttgagtaattcaatttacctacccaagcctcaggattctaaagttagtgccttaattcacatggcaattgtgtagctcaaataacagaaaatatataaaaatactttatgaacattttaygtaaattttaagagttactattctggtctgtcaaaacacagagaaaagaagacaaacaactaatttttatgagtccaactaaaatagattttttattttcttaatatagcaagtctatgcaaatccacatgtatggggccaattttccaattccagtctcatcctaggagttcccagatgtccagaactcataatataaacattagagagcactattaaattatagcaagggcatggcacttctctttatagcaatccaaggtcaaatgaacctctaatgggacacatagag

SEQ ID NO: 617202 - DNA, 555 bp, Homo sapiens
tatgtgcctctgaagcaaaatgaaaagagaaaatgtgaaggaaagcaatggtcattgcaattaagctagcaaacaacttaatcctgaagccaaattcattctcacataaatttaaataacattttagaaaaccttaaattatccgtcatttcaaattctattctgtgctttggtaacattcttaagcacattcgtacacatttagaattgttrgacacatactattttgccttttccttttgaaatgtaacacgatttcacacattttcgtacatcaccattgtccacgaacttatctgtaatagcaatacgaaactcagtctttcattagtttagtcattcaacaaatatttctgagcacctctagttactagagacttatatattatcaaagagaggatccctaaggataacccaacagggttgtttttcaacagtcttaaaactgatctctttatattttatttattttgcaaagtcagccttctgtatcaccaaataaagagagatttttcctcaagaaaaagtgaacgtaaagtacaaggtctcacttca

SEQ ID NO: 617203 - DNA, 370 bp, Homo sapiens
aactattgatgcctctgcttttgttacccaagaaagattaaataatgttaaatagaaattgtattatattttaattccttaaaaagtataattgaaataataaaaataatacctaatagttattgagtatttgctaagtgccaagcactattttaagtgttttaatgtagatagatagatagatagatagatagatagatagatagakagagagacagagagatagagagatagatgcattttaatgtatagacagatagatagatttaatcttcatggcattcctaagaatattcccattttacagatgaggcaatagaggcacagggaagttaaataaattgccaagatcacacagctggtgaaaggc

SEQ ID NO: 617204 - DNA, 579 bp, Homo sapiens
gactcttattggcctgctgggatagggtaggcagaattatgacctcccccacaaagatgtccacaccctaatccctagaatgtatgaatatattccatggcaaatgggaattaacgtggcagatggaattatggttgttaatcagttgaccttaaaatagggagactatcctagattatctggatgggcccaattaatcacaaatgatacaaaatgagagactccacccaccattgctggctttgaagatggaagagggccctgagccaaggaatgtgggcagcctttagaggctggaatggggaagaaaaaggcttttcctctagtctcctgaagggatgcagccctgctcaagaacatttatcccaataaaactaattttggcttctgacctccagaactgtaaggtaacaattttgtgttgttttaagcyactaagtctgatgctttgttacagcagctgtaggcaaccaatacgtggggtcagcaatttaaaccagggaaatactgacgttgctctcccagaacattgctggagcctcataactagtcctgcttccagcctggcatcgcgccctg

SEQ ID NO: 617205 - DNA, 538 bp, Homo sapiens
ttttcacatctagaagttcactttaattactttctcctcacatttttctattctgccttctaattccttaaataatttaatttaatattaaattattttggtcctacttctgctgattataatgctggctgtcactcatagtgacttgtgttttgtaatttctattgtttttataattttctattataaactcattgtcatcccagtgactttaacggtagaaattctgtgaggttgagttaaaagcatgtctctccagagcagatttatttttcttctaccaaatgccctaagatgactttaagttaatttcttagtgtgaggatttatggaccttgtgaatagcataaatgcaaagccaacgcttacatgaggactgacacattgttatgaagtctcagaggtgacttttttccatgtagagtacaggttgagttagatacatttccttttgaygaaaggcaaagatgtagaaatttgaggcactcaggtttatatggagatatcagttctaactccccacctcacatgggccaaa

SEQ ID NO: 617206 - DNA, 361 bp, Homo sapiens
aaagcagcaggtgcagccctgcaacagataaccatgygcatgccttgccgtactaaacaaatcagcatgcaccaaaaaccattgcctgcccactgatccccaaaacaaaactcaacagcaagatgcatccaagatacaagagctcccctgacagacaactaagttattcccagctcataggagacagttatgtggccactcatggcccgggctttcttctttgcaggaagccggggctacattgaaggagaaagtggggagggctgggggatagaaaggggcaggcttgtaaggccctttttttggaagcttagaaataaaatattgcatcttttgttagtcaaggacctttcgtggaggt

SEQ ID NO: 617207 - DNA, 572 bp, Homo sapiens
taggtcaactggtagttctgtttttagctctttgagaaattaccatactgatttccacaatggttgaactaatgtgcactcccatcaacagtgtataaccatctacttttctcagcaaccttgccagcctctgttattttytgactttttaataatagtcattcttactggtgtgagagacctgtcttattaataagataaggaaatctaatagaaaaagggaacaatttgtgacacaagatatagaatgatatgaggggttggaatcaaggggtggtctttaaaacttggaagaggaaccttatcctctgagactggtgaaggaagagttcagacctccctatgataggatgtgaggagcaggaaggaagtgcatatctggcagtattccattcctccctttttctgagcccagggtgaaagtataaatagatactcacatgtctatatccaaatatttaaaatttatcagtcaagcaaaaagtagttaaaatatgttagatatgtatgttcaatagaaaatgcctatcttgacagatataccttctttaaaatttgggaagccaacttta

SEQ ID NO: 617208 - DNA, 569 bp, Homo sapiens
tggtatgagccagagcaacatagagagacctctgttactacaaattttttttaattagcaatggtggcatttgcctgtatcctagctattcaggaggctgtggtgggaggatcacctgagctcaggggrctgaggctgcgatgagccatgtttgtgccactgcactccagcctgggcaacagaatgaaaccctgtttcaaaaaaaaaagccaaccaagcaagtgtgtttagctggtgacctaatgaccagggagtaagattgtttagtgctttggtaagttatttttattttgttatgtattataagttcgattattaccattactggggtggaagtgagggggttgtcaggacaagtgcatatcctcctgaatggataaataaggcagaggaaggcatgtgacctaaatgtgtgtgctacagaccatgtgtactattctccatcatgtatctcctaaattttcttagtaaagaaagacgtgaacaggaagccccctccttaacaaggtctcactgtaaccctacgatttccccattcatgcctacaatgttaaagtcttccaaaggaa

SEQ ID NO: 617209 - DNA, 569 bp, Homo sapiens
tggtatgagccagagcaacatagagagacctctgttactacaaattttttttaattagcaatggtggcatttgcctgtatcctagctattcaggaggctgtggtgggaggatcacctgagctcagggggctgaggctgcgatgagccatgtttgtgccactgcactccagcctgggcaacagaatgaaaccctgtttcaaaaaaaaaagccaaccaagcaagtgtgtttagctggtgacctaatgaccagggagtaagattgtttagtgctttggtaagttatttttattttgttatgtattataagttcgattattaccattactggggtggaagtgagggggttgtcaggacaagtgcatatcctcctgaatggataaataaggcagaggaaggcatgtgacctaaatgtgtgtgctacagaccatgtgtactattctccatcatgtatctcctaaattttcttagtaaagaaagacgtgaacaggaagccccctccttaacaaggtctcactgtraccctacgatttccccattcatgcctacaatgttaaagtcttccaaaggaa

SEQ ID NO: 617210 - DNA, 569 bp, Homo sapiens
tggtatgagccagagcaacatagagagacctctgttactacaaattttttttaattagcaatggtggcatttgcctgtatcctagctattcaggaggctgtggtgggaggatcacctgagctcagggggctgaggctgcgatgagccatgtttgtgccactgcactccagcctgggcaacagaatgaaaccctgtttcaaaaaaaaaagccaaccaagcaagtgtgtttagctggtgacctaatgaccagggagtaagattgtttagtgctttggtaagttatttttattttgttatgtattataagttcgattattaccattactggggtggaagtgagggggttgtcaggacaagtgcatatcctcctgaatggataaataaggcagaggaaggcatgtgacctaaatgtgtgtgctacagaccatgtgtactattctccatcatgtatctcctaaattttcttagtaaagaaagacgtgaacaggaagccccctccttaacaaggtctcactgtamccctacgatttccccattcatgcctacaatgttaaagtcttccaaaggaa

SEQ ID NO: 617211 - DNA, 481 bp, Homo sapiens
tccttcctaccaaagccatgctaggtgatttatttagtgagaaccctcccatacctcccacctccatgcccaaagtatgtgactacatgtcttcagtgtgcgatgaacatattgacagctgcttacttaatacaggcattgctagaaaaacaaacaggttttaayttgaaatttaaaatacagattaaattgccatgtaacaaaataaatatttgccatggcaattaaagagtgaatttgaaatagctgaagaactgaatggaagtcaaagtgagaaaaagtcaaagtacaatttgcaaacaaggggaatgacccggtattatttgtatccaaccttcttcatcactgaggcattactcttctttgtgtttcttaccaagtttaacaaaaaggaaactataatatgacacagagggtgcaatccgtatagctttctactatttgctgagccttggttttttcttttcttcttaattaaaaa

SEQ ID NO: 617212 - DNA, 481 bp, Homo sapiens
tccttcctaccaaagccatgctaggtgatttatttagtgagaaccctcccatacctcccacctccatgcccaaagtatgtgactacatgtcttcagtgtgcgatgaacatattgacagctgcttacttaatacaggcattgctagaaaaacaaacaggttttaacttgaaatttaaaatacagattaaattgccatgtaacaaaataaatatttgccatggcaattaaagagtgaatttgaaatrgctgaagaactgaatggaagtcaaagtgagaaaaagtcaaagtacaatttgcaaacaaggggaatgacccggtattatttgtatccaaccttcttcatcactgaggcattactcttctttgtgtttcttaccaagtttaacaaaaaggaaactataatatgacacagagggtgcaatccgtatagctttctactatttgctgagccttggttttttcttttcttcttaattaaaaa

SEQ ID NO: 617213 - DNA, 487 bp, Homo sapiens
acaagtcaacttcctatattcaagccctctaggttcctctttcctacctacctttsagtaaaactggttgtcaagctccattaagttattaataggtaaatgttatagcatgctgcatcggctactcatcactattgccaccaactccatagatcagttaggaaaatggtgaagcacagaaaatttatagtgttaatgtcagaggaaaaaaatcttaagcttcaatcaacatttagaccgaaaatgccatctatttaggtttccctgagagtataacattggtttgtgagtactgatgagaaataaagatcatcatagactcttagagtgggagggatattgaatattgattatgccaatatagtttgctgttgggccaattaatatcatttacccaacaaattcattgtcaaaccataactgtcaaaaagttaaaactcttgtacaaatattgcatgcatctgtgttaaaaatgtattcaacttat

SEQ ID NO: 617214 - DNA, 487 bp, Homo sapiens
acaagtcaacttcctatattcaagccctctaggttcctctttcctacctacctttgagtaaaactggttgtcaagctccattaagttattaataggtaaatgttatagcatgctgcatcggctactcatcactattgccaccaactccatagatcagttagraaaatggtgaagcacagaaaatttatagtgttaatgtcagaggaaaaaaatcttaagcttcaatcaacatttagaccgaaaatgccatctatttaggtttccctgagagtataacattggtttgtgagtactgatgagaaataaagatcatcatagactcttagagtgggagggatattgaatattgattatgccaatatagtttgctgttgggccaattaatatcatttacccaacaaattcattgtcaaaccataactgtcaaaaagttaaaactcttgtacaaatattgcatgcatctgtgttaaaaatgtattcaacttat

SEQ ID NO: 617215 - DNA, 567 bp, Homo sapiens
tggcaaagagacccttgtaagtgtgatacaattaaggactttgaaaagagaagattattgtggattattccagaaggctcaatgtaattacaaagaaggagctctttagatcctcctctttagaaaagggaggcaagaggatcaaaggcagaaatatgagatgtgatgacaaaagctgaggttgaagtgataccctgtgaagatggaggaaggggccatgaaccaaggaatgtggacagcctttagaagctgggaaaggaaaggaagtggattctcccctagaacttccagaaggaatgcagccctactttggacttctgacctctaacagagtaagacaataaatttgatttgttttaagcctttcgatttgtgctaatttgttacagcagccacagcaaactcatacagggcwcacagacaggaacctcatagcatcttaaataccagacttggtagaataatggcaaattctaaaaatccaagctattaccttaagtagtttgaccacctacaattagtagatctagaatgtagaaaagttgatttgaatgtttaagcataatt

SEQ ID NO: 617216 - DNA, 567 bp, Homo sapiens
tggcaaagagacccttgtaagtgtgatacaattaaggactttgaaaagagaagattattgtggattattccagaaggctcaatgtaattacaaagaaggagctctttagatcctcctctttagaaaagggaggcaagaggatcaaaggcagaaatatgagatgtgatgacaaaagctgaggttgaagtgataccctgtgaagatggaggaaggggccatgaaccaaggaatgtggacagcctttagaagctgggaaaggaaaggaagtggattctcccctagaacttccagaaggaatgcagccctactttggacttctgacctctaacagagtaagacaataaatttgatttgttttaagcctttcgatttgtgctaatttgttacagcagccacagcaaactcatacagggctcacagasaggaacctcatagcatcttaaataccagacttggtagaataatggcaaattctaaaaatccaagctattaccttaagtagtttgaccacctacaattagtagatctagaatgtagaaaagttgatttgaatgtttaagcataatt

SEQ ID NO: 617217 - DNA, 554 bp, Homo sapiens
gaacaggttaagataagatgaaacagaagttagcaagaagaaagaggagaaggagaagagattataattagttcttaatggcattttagtgcaactggtttttcttagtttcttgagcttttattcatttccagataattcatgccttgtctagttaaaaccttcacaaatacccggagaagccaagggtaaggggtttcaaacaaaatataattatagagtcaagggatcaactttttaagtcggaaataatgctttaagtttaccatcattaaaattctttcttctaatactagatgttattgttcacctacaatcaatccaagagctccactgtaaatgaaattgtaggaaagaaatatattgcatrcacagaagcaaacctgtgtttccctgctagactctaatctgggatgttatttccctctcatccaatttaccattaccagaaaacgaaaatttaaagtattggtattattcaaagcatcagcaaaatgtatacgtaaactgctagaagttaaaaatgtatctttatatccaggaatttaaaagtt

SEQ ID NO: 617218 - DNA, 554 bp, Homo sapiens
gaacaggttaagataagatgaaacagaagttagcaagaagaaagaggagaaggagaagagattataattagttcttaatggcattttagtgcaactggtttttcttagtttcttgagcttttattcatttccagataattcatgccttgtctagttaaaaccttcacaaatacccggagaagccaagggtaaggggtttcaaacaaaatataattatagagtcaagggatcaactttttaagtcggaaataatgctttaagtttaccatcattaaaattctttcttctaatactagatgttattgttcacctacaatcaatccaagagctccactgtaaatgaaattgtaggaaagaaatatattgcatgcacagaagcaaacctgtgtttccctgctagactctaatytgggatgttatttccctctcatccaatttaccattaccagaaaacgaaaatttaaagtattggtattattcaaagcatcagcaaaatgtatacgtaaactgctagaagttaaaaatgtatctttatatccaggaatttaaaagtt

SEQ ID NO: 617219 - DNA, 554 bp, Homo sapiens
gaacaggttaagataagatgaaacagaagttagcaagaagaaagaggagaaggagaagagattataattagttcttaatggcattttagtgcaactggtttttcttagtttcttgagcttttattcatttccagataattcatgccttgtctagttaaaaccttcacaaatacccggagaagccaagggtaaggggtttcaaacaaaatataattatagagtcaagggatcaactttttaagtcggaaataatgctttaagtttaccatcattaaaattctttcttctaatactagatgttattgttcacctacaatcaatccaagagctccactgtaaatgaaattgtaggaaagaaatatattgcatgcacagaagcaaacctgtgtttccctgctagactctaatctgggatgttatttccctctcatccaatttaccattaccagaaaaygaaaatttaaagtattggtattattcaaagcatcagcaaaatgtatacgtaaactgctagaagttaaaaatgtatctttatatccaggaatttaaaagtt

SEQ ID NO: 617220 - DNA, 554 bp, Homo sapiens
gaacaggttaagataagatgaaacagaagttagcaagaagaaagaggagaaggagaagagattataattagttcttaatggcattttagtgcaactggtttttcttagtttcttgagcttttattcatttccagataattcatgccttgtctagttaaaaccttcacaaatacccggagaagccaagggtaaggggtttcaaacaaaatataattatagagtcaagggatcaactttttaagtcggaaataatgctttaagtttaccatcattaaaattctttcttctaatactagatgttattgttcacctacaatcaatccaagagctccactgtaaatgaaattgtaggaaagaaatatattgcatgcacagaagcaaacctgtgtttccctgctagactctaatctgggatgttatttccctctcatccaatttaccattaccagaaaacgaaaatttaaagtattggtattattcaaagcatcagcaaaatgtatacstaaactgctagaagttaaaaatgtatctttatatccaggaatttaaaagtt

SEQ ID NO: 617221 - DNA, 592 bp, Homo sapiens
aatcgaactttaattacaactgtaacaagtaacgtgcaaagaaactacatcagaatagattggatagattatctggttactgttttcacatatcagtaaatgtgtgcagtgtggagcagtttaagagctccttgtgctatttaaacccttctacccatgttccagaaaaagagagacaggctcccttatggaatttacaaaccagaatggaaaacagacatggaacaagaaactgccagcgtgagctgcaccacactgtgggtagcattagaagagaaagcacaagactgtgtggtcagaagagaaggtcgtgtgagagctggacagcccagccagggagcacagcaagarctcctggaagaaaagcagatgctaaatgtggtgggcaaccaaacttcgtagaaaactgtctccttctgggaaggagcagcaatcacggtcactgggaccagacactcaaaagcagcccaactctcaactatctaaccccacagtgagagggaagctgaggtcctacttcgatcaaactgaccagaacctgcagggagagctctccaaagcctcacatgcatacagagtatcagtctccaat

SEQ ID NO: 617222 - DNA, 592 bp, Homo sapiens
aatcgaactttaattacaactgtaacaagtaacgtgcaaagaaactacatcagaatagattggatagattatctggttactgttttcacatatcagtaaatgtgtgcagtgtggagcagtttaagagctccttgtgctatttaaacccttctacccatgttccagaaaaagagagacaggctcccttatggaatttacaaaccagaatggaaaacagacatggaacaagaaactgccagcgtgagctgcaccacactgtgggtagcattagaagagaaagcacaagactgtgtggtcagaagagaaggtcgtgtgagagctggacagcccagccagggagcacagcaagagctcctggaagaaaagcagatgctaaatgtggtgggcaaccaaacttcgtagaaaactgtctccttctgggaaggagcagcaatcacggtcactgggaccagacactcaaaagcagcccaactctcaactatctaaccccacagtgagrgggaagctgaggtcctacttcgatcaaactgaccagaacctgcagggagagctctccaaagcctcacatgcatacagagtatcagtctccaat

SEQ ID NO: 617223 - DNA, 403 bp, Homo sapiens
tctgtgccaatcatggaatggtcagggatcagaattcaccatcgggggttcaaataaaaaggctttaataaaagaacwaaggtcccactgagaagtcattactacccctagttttgaaaatattaaggcaggagatcttaataggaactcagtaagaactggggaagctgtagtcccagagggttacagtgactaccagagacattgcaccatagctgggagaaatactccaatattccttttctcattccccagtctcctgatggtgcctttcactggctaagccaatcagcacctggaagacactgagcttggaagatgcagcccacagtggtgagctccccagggcacagagctggatagagaaagacagacatatagaactggaggggcaattagagaa

SEQ ID NO: 617224 - DNA, 581 bp, Homo sapiens
tagaatatttaacgaatttattttactgatattttccttttatgtgcagggaaacaataaatgacaaacgaaaatgtctaaatgtgtatgaaagagcttttgcagaaagtatacaaaaaaaactggaagtaacaaaaacattgtgtcagtttaattgacagctttttcccccttcctaatggttcatgaaataacggtgagtcacacgatgctgctccactttttttttttaacaaaaaaagaggatttggtaatttaggatgcatttgttgcaagaaamagaatccaatgcaagatgataaacaacaaaaacagtattagttgcttcccataactagaaagtccctatctagggtggacataagggttgggtagatttggtggcccagtgataaaatcgagtacatagtttctttctggccttctgctatgtgtttcattgtatcatattcatcctggagctggctcccttcctgtggctgaaagaaggcagcaaacaatcccttgaattacattttcaatatagatagaaaacaagttgttgctggaaactccctcaggagatccttcccagaagcatc

SEQ ID NO: 617225 - DNA, 581 bp, Homo sapiens
tagaatatttaacgaatttattttactgatattttccttttatgtgcagggaaacaataaatgacaaacgaaaatgtctaaatgtgtatgaaagagcttttgcagaaagtatacaaaaaaaactggaagtaacaaaaacattgtgtcagtttaattgacagctttttcccccttcctaatggttcatgaaataacggtgagtcacacgatgctgctccactttttttttttaacaaaaaaagaggatttggtaatttaggatgcatttgttgcaagaaaaagaatccaatgcaagatgataaacaacaaaaacagtattagttgcttcccataactagaaagtccctatctagggtggacataagggttgggtagatttggtggcccartgataaaatcgagtacatagtttctttctggccttctgctatgtgtttcattgtatcatattcatcctggagctggctcccttcctgtggctgaaagaaggcagcaaacaatcccttgaattacattttcaatatagatagaaaacaagttgttgctggaaactccctcaggagatccttcccagaagcatc

SEQ ID NO: 617226 - DNA, 581 bp, Homo sapiens
aatttttcaaactatgtgagtatatttatctcaatgtacatttcaatagtaaactcttgaaaatatcctatatgtttatgacacacttctataaatagaatatacaaccaaaaaattatatgtgccaagagtttttaataacataaagaaatgctaatggattatacttagagaaagaagaatagaatacagattctaactgctttgctcttattgaagagctggctgagttaagaaaagataatttttgagaggctttccttctttaattrtatgtatatataacatataatataaaatataaaatgcctttaaaggactataataaatgcatacattgttagcagacaaatagtaagggtggtgaaattatgaataataatattttttgtttcaatgatttgttctttaatattttataagaatatgtgtcacttctacaatcagaaaaaaagtagaggtttaaaagacttgaaaagttagggctatttccatttgcttttcttgggtcttctgtgataaatgacatctaattatttaacccttagaaggaaaaccatttgtatctaacatgtgtcagg

SEQ ID NO: 617227 - DNA, 617 bp, Homo sapiens
tcttcattgatgtctcataaattttaacttcctctgtaaaccatacccgcccccgtctgccccacttttcttaaccaaaacttgactctacatcaggaatactgtttctcctatagctctctcagatagaagctgtttactctcactcctttaagaccattatttttcttccttattgaataaaaaycattcttatgtgtctggcaacttcgtctctctttacaagaaccatagagcaattttgtggtcattctcctcactcgaaaaagacataagcacatgtcttcttcttcaccccaactcctgacatcacttgacatagcctcaagtttggccgctcaaatctttagtcttctcatctccaatgttctttcactctgtgctacacttggttacatccctgacctcatcaccaagagaaaccataccacgtgcaagattgggaactcaactcaagtgatagccaaaattgaaagctattgaactttgtgctgattcagacaatgggcacagctgaaaaaactagatggaacagataagacttgattgaagcacgcgataaagggcccgaagccgctccttgaagaagagagaactggaagaggaagagaaaagca

SEQ ID NO: 617228 - DNA, 635 bp, Homo sapiens
ggatttgggtggatttagcagttctcaggtgaacaagagctgggaaggaggcttttttctaagcaggaggaatagcgtatactggtagtagatatggatatcacctcaaatccctcttggaagcagagagtcaatcaacacttataaatgaaaatattattactacttttttgtaaaggtctatcctctattaaagcagatatttatctaatacctaacgctttccttgcaactacccttaacaatgagaataatatttgtgttaggagcctctactggagccccagtgatcctcacatcctggtattcatgccttcatgtaatctgtgttccttgagtgtgggctggacctagtgacttgcttctagtcaacagaaaaccacacacatgatgggatattaccaccaggatcagataacaaaatggcttgcttccatcttgctcatactcttgctttctcattcacctgccctgaggaaaccagctgccatattgtgagtggtcttctacaggttcataaacaagsaactgaagggggtcttcagccaacagcctgcagggaactgaattctgcaaataatcatgcagatgaacttggaaacacacctcactccacaccttttagatgtgaccac

SEQ ID NO: 617229 - DNA, 622 bp, Homo sapiens
cattgatgtctcataaattttaacttcctctgtaaaccatacccgcccccgtctgccccacttttcttaaccaaaacttgactctacatcaggaatactgtttctcctatagctctctcagatagaagctgtttactctcactcctttaagaccattatttttcttccttattgaataaaaaccattcttatgtgtctggcaacttcgtctctctttacaagaaccatagagcaattttgtggtcattctcctcactcgaaaaagacataagcacatgtcttcttcttcaccccaactcctgacatcacttgacatagcctcaagtttggccgctcaaatctttagtcttctcatctccaatgttctttcactctgtgctacacttggttacatccctgacctcatcaccaasagaaaccataccacgtgcaagattgggaactcaactcaagtgatagccaaaattgaaagctattgaactttgtgctgattcagacaatgggcacagctgaaaaaactagatggaacagataagacttgattgaagcacgcgataaagggcccgaagccgctccttgaagaagagagaactggaagaggaagagaaaagcactggaactg

SEQ ID NO: 617230 - DNA, 600 bp, Homo sapiens
ataaattttaacttcctctgtaaaccatacccgcccccgtctgccccacttttcttaaccaaaacttgactctacatcaggaatactgtttctcctatagctctctcagatagaagctgtttactctcactcctttaagaccattatttttcttccttattgaataaaaaccattcttatgtgtctggcaacttcgtctctctttacaagaaccatagagcaattttgtggtcattctcctcactcgaaaaagacataagcacatgtcttcttcttcaccccaactcctgacatcacttgacatagcctcaagtttggccgctcaaatctttagtcttctcatctccaatgttctttcactctgtgctacacttggttacatccctgacctcatcaccaagagaaaccataccacgtgcaagattgggaactcaactcaagtgatagccaaaattgraagctattgaactttgtgctgattcagacaatgggcacagctgaaaaaactagatggaacagataagacttgattgaagcacgcgataaagggcccgaagccgctccttgaagaagagagaactggaagaggaagagaaaagc

SEQ ID NO: 617231 - DNA, 633 bp, Homo sapiens
gttccttaacttagctacccattttaagtaatattaaaaatacattaatgacaaacagcacataccactctcatgatagtcacgagtttatatttgcactttaatacattctggaaaaatcaccaccataatttttaatgacttctctgaagaaatcacattaagacatttaacccttgttcttgtcattttcatatgaactaagcttatgaatattggctaaggtaacatttttgtcagtctatakgtaagcattatgtaaaaaaaaaagtctgggtttcttccctaattattatgtattatatataacatgtttaggattaaatctggcccatattctaataaagagcatttttactctgtttttagttgtaatgccctctaaatggttctaatcagaatagaaactcttgggtaggaggtagagaagatgcaatttttgttaagaattccaggcactctgcaggtaaaatgtgaattgttccatacaattcagtcaagtaaaaatataaaaataaatgtaaaaacaagaaaagtcatgaaactagttaagatacttaaattttaagatgcatggtggcaaatttcaagtttgtgagctctctttgtttaaaatgaagtttcatacgcaaa

SEQ ID NO: 617232 - DNA, 518 bp, Homo sapiens
atttcttttttgtcagaaattaatttgtttaggtttttattttaaagaacacttctttattgattgtccctatcttatctttattatttatgaatttatgatctttaaaatgtttttccttctacttttttcgggttttcttgaattgaatgcgtagcttgtcatttcaggcattcttttttaaaaaacaaacytcttaaaatataagttacatacaataaaatgcccaaatttttatatttcattgagttttgatgaatgtgtaaccaccactataaccaataaagagatcatttccagtatgccaaaattcccttgtgcccctttgcagccaaccttcaccactaccctagtctggtcccagggaacaattgatctgctttctgtcattataaattagtttgccttttctaaactttaatataagtggaatcatacacatattttcttctgtctggcttttttttttttttttttgcttagcataatgtatttgaaatttattcatgttaaaattt

SEQ ID NO: 617233 - DNA, 518 bp, Homo sapiens
atttcttttttgtcagaaattaatttgtttaggtttttattttaaagaacacttctttattgattgtccctatcttatctttattatttatgaatttatgatctttaaaatgtttttccttctacttttttcgggttttcttgaattgaatgcgtagcttgtcatttcaggcattcttttttaaaaaacaaacttcttaaaatataagttacatacaataaaatgcccaaatttttatatttcattgagttttgatgaatgtgtaaccaccactataaccaataaagagatcatttccagtatgccaaaattcccttgtgcccctttgcagccaaccttcaccactaccctagtctggtcccagggaacaattgatctgctttctgtcattataaattagtttgccttttctaaamtttaatataagtggaatcatacacatattttcttctgtctggcttttttttttttttttttgcttagcataatgtatttgaaatttattcatgttaaaattt

SEQ ID NO: 617234 - DNA, 563 bp, Homo sapiens
ttgtgtgagatggagtctcgctcttattgcccagggtggagtacagtggcccaatctcggctcactgcaacttccgcctcgtgagttcaagctattctcctgcctcagcctcccaagtagctgggattacaggcatgtgcaacaccacctggctaatttttgtatttttagtagagatagggtttcaccatgttggccaggctggtctcraactcctgacctcaagtgatccacctgccttggcctcccaaagtgctggcattacaggtgtgagccaccactcccagccatgtgcatacatttttatagacaatgataggagagcagagtggctaaaatcttggggctctggagtaagatcagagctcaaattctagttctgccacttactaagtgggtgactttagataaattgtcttctctcttacgcttccattagcccctctacaatgagatgataatagctatacctacttcagtaggttgtcaggagagctgatgagaacttatatgtgtgtggcacagtacatctgtgtagacacgcacacaggcagatacatgca

SEQ ID NO: 617235 - DNA, 592 bp, Homo sapiens
ctacgtgttcacttgtgcatgaattttggtagaatctgaaggaattggacctgcattttcattcaccactttggccactagcgagagttccctaacaggaatgtctcttcagtgggcagcaggaggcaagtggaccagaacaaagaagagagaacataggactgaaccatccccagcaagagaggcaaatcactaaccgttagtctctccagcgtartaacttgaaaggacttgccatctcatgctttccccactgtttcatttgtcttcttttatagcgttctttcttctcctcctccgcttcagacgatattcagtttaatggctgaattgaaatcgaccatgaaaagaatccaagcaaatgagctcagaccgttgcacaaaagagaaagtggaggagggagaggaatgagatgagggggaatgtgtaggaacgatgctatagaaagaggaggttttggctccaacactgttgccataggcagagtgtccccatacagctcagctgtcttcacaaagatggtttttgcttcacccaatagtcatttttgtcagatctccatctccggcctgggactgaataccacagtgc

SEQ ID NO: 617236 - DNA, 528 bp, Homo sapiens
ttaaatatttctggtgaatgttagctattatcatgtagtgagtgttatttccctaataatgtttttggccttaaacatatgaccttttaaaaagtattagtaatagtatttgcgtgctgtatcttcctttatcctttcactttgaatctttttatgtgcttttgttttagatatgcctcttgtcaataccattgtattagtctgttctcatgctgctaataaagacatactgagactgggtaatttataaagaaaagaggtttaattgactcacagttcagcatggatggggaggcctcaggaaacttacaatcatggcagaaggggaagcaaacargtccttcttcacatggcagcaaaaaggagaagaatgagtgcccagcaaagtgggaagccctttataaaaccatcagatctcatgagaatgaactatcatgagaataggatgggggaaccacccccatgattcaatatctccacctggtccctcccatgacatgtggggattatgggaactacaattcacga

SEQ ID NO: 617237 - DNA, 648 bp, Homo sapiens
ttgttgttttttttttaattcaatctggcaattctgtttctttagaaaaaatagttcctttacatttattgtgattacatacacacctacatattgaggtataattacctaatgtwaaatatacagtgtataatttgatgagctttgacaaatgtatacctttgtaatcaacacaacaatcaagattattctatcctagaaatttctcttaagctcctttccctttattctcactctcgtcacagaaacaaacactattctgatttctttccctgtggtttagtttggtctgttttgggacttcatataaattgattatttatgtcttttttggactgtcttctaatacttagcctatttttttgagattcatacccattgttgcatgtatcagaagtttattgttttattgctgagtagtatattatatgaatatagtcacatatttttatcagtaccatttcatcttttgcttttaatttacttgcctattctgtccttcttttgattgatcatgtctttcatccatttttttccccatcaactagtttgggagttacatactttatttctattctttcagtagtaatcattaataatttaacatgcacactaacaaaatgtaaaattactgaatacctctcatct

SEQ ID NO: 617238 - DNA, 606 bp, Homo sapiens
gttggtaggaatggccaatgttgtttccaagtctctgagtttgttttcgagaataaaggatggaagccttatccatcagtaatgcttgccaaggacatggaagcagagagcagtggctcgtgagctgtatatttgccatctctggtctaggtattctgactcttgtttttcaagtgtatatcctcagttaggagccataggctagaaagtaccactcggcctggataggggcccctgagctgcaggtttcacaaatggcataaggagaaagctgaagccagatactttttggccatragtcaatcaattaatctgcttttatttattttctaccatgtggcttatactatgtaagaatccaaactggttgctgaaaagcatctttcctggctcttgtagaagacttcacttctcaactctagccttacagtcttgtgatttgatttttctagcattacagtcaagggcaaaaacatttgttaggtaactactaaaatttagaagaggcatgagatacattctacctatcagggctcatttatattctgagcagagtctatgtttgctaaatgcataaattttcaggtacttgcaaaatgccagggt

SEQ ID NO: 617239 - DNA, 606 bp, Homo sapiens
gttggtaggaatggccaatgttgtttccaagtctctgagtttgttttcgagaataaaggatggaagccttatccatcagtaatgcttgccaaggacatggaagcagagagcagtggctcgtgagctgtatatttgccatctctggtctaggtattctgactcttgtttttcaagtgtatatcctcagttaggagccataggctagaaagtaccactcggcctggataggggcccctgagctgcaggtttcacaaatggcataaggagaaagctgaagccagatactttttggccataagtcaatcaattaatctgcttttatttattttctaccatgtggcttatactatgtaagaatycaaactggttgctgaaaagcatctttcctggctcttgtagaagacttcacttctcaactctagccttacagtcttgtgatttgatttttctagcattacagtcaagggcaaaaacatttgttaggtaactactaaaatttagaagaggcatgagatacattctacctatcagggctcatttatattctgagcagagtctatgtttgctaaatgcataaattttcaggtacttgcaaaatgccagggt

SEQ ID NO: 617240 - DNA, 612 bp, Homo sapiens
agtgcccagcaaagtgggaagccctttataaaaccatcagatctcatgagaatgaactatcatgagaataggatgggggaaccacccccatgattcaatatctccacctggtccctcccatgacatgtggggattatgggaactacaattcacgatgagatttgggtagggacacagccaaactatatcaaccaccaaactaagttgttgttttttttttaattcaatctggcaattctgtttctttagaaaaaatagttcctttacatttattgtgattacatacacacctacatattgaggtataattacctaatgttaaatatacagtgtataatttgatgagctttgacaaatgtatacctttgtaatcaacacaacaatcaagattattctatcctagaaatttctcttaagctcctttccctttattctcactctcgtcacagaaacaarcactattctgatttctttccctgtggtttagtttggtctgttttgggacttcatataaattgattatttatgtcttttttggactgtcttctaatacttagcctatttttttgagattcatacccattgttgcatgtatcagaagtttattgtttt

SEQ ID NO: 617241 - DNA, 648 bp, Homo sapiens
ttgttgttttttttttaattcaatctggcaattctgtttctttagaaaaaatagttcctttacatttattgtgattacatacacacctacatattgaggtataattacctaatgttaaatatacagtgtataatttgatgagctttgacaaatgtatacctttgtaatcaacacaacaatcaagattattctatcctagaaatttctcttaagctcctttccctttattctcactctcgtcacagaaacaaacactattctgatttctttccctgtggtttagtttggtctgttttgggacttcatataaattgattatttatgtcttttttggactgtcttctaatacttagcctatttttttgagattcatacccattgttgcatgtatcagaagtttattgttttattgctgagtagtatattatatgaatatagtcacatatttttatcagtaccatttcatcttttgcttttaatttacttgcctattctgtccttcttttgattsatcatgtctttcatccatttttttccccatcaactagtttgggagttacatactttatttctattctttcagtagtaatcattaataatttaacatgcacactaacaaaatgtaaaattactgaatacctctcatct

SEQ ID NO: 617242 - DNA, 468 bp, Homo sapiens
tgaagcaagcattttgttcaattacaaaaaatatataaaatgattttcataaatcaatctggtaattatgtcctcttatgactaccctatttttatttgtggaggtaaaagttcttataataaacaaacaagagaacaaaagacacacacacactcatgcacacaaaagacttccctccccttgttttactttgaacacttgccttatagtgattctcatcaatcagttctgagacagtaaaattccagttcattcaagcaaccacatttggtggttgagagcttggtcaaggaggcccaggatagatcctcatgtgaagcctgakgatgtgagcagtgatcagtttttgcaggaaatgccaatccatattgctccctgttagtcataatatacattgcattaaatgtgtgggaaaaaaaacctcccatggaaaccccatctctctctgccgttcccctttcccacat

SEQ ID NO: 617243 - DNA, 559 bp, Homo sapiens
actaactcatagcaactatgacatggagggtgaagtttctgcttttcacccttaccttgagcttaggatctgatggcagcttgtgctttggcatcactgaatggtggcaaacatcagtaggaaatatgagattaggagtatgccttctaattttatttatataatctgctgttttatagtttctatgtttatcctcattttatgctctttagaatttagaagcttggaaagatactttgaattactgtggggaaagggaaactttgatccttttcttaatttgcttatttacatcaatgatttgtgtcatcttcattctaatatagctgattagcctctttggagactgtctcagtaaccatggagaaagggtgctgttttatggcaagatctctcgtttgctttgttaactaattcacatcaaacgaatgcccaacagggctgcttatagggccaggaggcagagaccttgggttcctgatgccctrtggtttcaagtctctttccaacccctaaacaagccctaaatatattaggttgctttcaacatgtcgctcag

SEQ ID NO: 617244 - DNA, 556 bp, Homo sapiens
tctgcaagtaatgagaagcctggagagctcacaagttcaatggataacagttagagaatcaacaaaatctctatgacttacgatcactgtcagtgaactacaacaaaatacaattgaaactggggtaaatgtacaatttgtcatttgagttttttgaaaacaccaaaatactaataactaattgtataagccctgagtgggaaagtccttccttagcaaaagcagaaatgaamatttgatttcagttttcagtagtttcaataggtccatgaggtaattaacattacctatgactgcaattatctaaacaagttcacttagagtgccacattttattgtatttctttcacagcatatttagatggcatggtaaaaaggaaatagataaaagtatgtttaataaagaaatactgcaaagtgggggatgcaaaaccttaattactatgttgaatgaaggactgtagaaggaatggtgcctcttctctctaatttctgggctccaccacagacctgctgaatcaaaattcccgagtggtgccaggggatctgcagttgt

SEQ ID NO: 617245 - DNA, 430 bp, Homo sapiens
tttggatatgtacacattgatttactgctaaaatacagttgtcatgaagagtaggaactccaccttatttctctccactgcctctagaatagggtctgctacctaagataygctcaataaatatttggtggaaaaatgaatgattcattggcattaaaggccaaagcttttggcttatgatgatatatagcaaccatgaaaaaaagaaacacctaaatccttcatagtttaaataaatgtatgccagagttcttactcagatcagcatgcttgctgaggtcacatcctcattgaagtatcactctcctccttttctcctcctggtaaacacagctggctccttatggtgccagtggtcactctctagaaaggctggacttggacgcctcagtaggcttctgcttcctgcatacttcacttggtagagagc

SEQ ID NO: 617246 - DNA, 574 bp, Homo sapiens
acttcacttggtagagagcgcatgtgagacagttcacattccattgaatggttgaggtccttcattttccatcttaccacaggggctatttgaatgtatcagactttactacagtacaaaggtatggagagggttacgttggagtaaggcaaacaatgtaaagtggacactgggcattctggatgctttatgctcaaagctccagtcccctgccatgttattacttccctttttctgttcccccagattcctgaccatcactcattcaaaacggttagatggcttttttgtttctatctccttataggtatgctcttttctttcccatgcaaagtagagaaagaaaaacagtttctgctcttaaatgtatttttgccactcaatctatagaacatgttcttccacaaytacaagtaaatagaagacagactgggactctggaaaatcctaaagcattatagaacttggggcttgtcctttgacttcatggttttcaaacccagcatggtgacccagtagtgggctgtccaatcaactgagctcttgaaattggaatagaataaaatagaaatat

SEQ ID NO: 617247 - DNA, 453 bp, Homo sapiens
ttattttttaaagttcttttaaatatagttcttctaaaaatcactgagagaaaatttgaagattaggaaatataaacatttatttaatatttctctgccaagcttaaaacatatcaaatctctctaaactgcaagattttatgttgacatatccatgaatwtaatgctacaatatatgaatatgagaaaacaatgcgttccgatagctcagcacatcactggggaaaatgcgttattatttacttgtggttgataaatattaaaaccgagaataaagttaaaatagtcttctatcataaaacccaccattttctcttctctcctcaaaaactggttagactcattcttttatatatatgtcttgtattttataactaacaaaaattttcttttggcttttctttcttttgcaaataacttagatttaacaaatcattgccatgagctaagtca

SEQ ID NO: 617248 - DNA, 366 bp, Homo sapiens
aactcaaatcatgggtctatgcakttttgtagccctttctgctgagcaccagggctgagattcttatttgtggccactgagctctaccttgacctcacaggtatcaaatagctttctagacagttcagctaaggtgaggatagaaatacaagcagcacctacaatgtgatctgcgatgctccttcatccatctcctgtgttcaggataattcaagtgctcagtttaatcccatttgcctgggtatgtattattggtcctagaagtcacagccattgccagatgagcatagcaatccacatgcttccttaggttcccatagccctacctggcactcaacctcctccttagagccccaccatgagcta

SEQ ID NO: 617249 - DNA, 477 bp, Homo sapiens
acaatgtgatctgcgatgctccttcatccatctcctgtgttcaggataattcaagtgctcagtttaatcccatttgcctgggtatgtattattggtcctagaagtcacagccattgccagatgagcatagcaatccacatgcttccttaggttcccatagccctacctrgcactcaacctcctccttagagccccaccatgagctatgaaaagaacttgggtctgagcaagatcctctacttgcttctgcagtggattttgcatttcctaattaactgtgaggcttgagacagaggattcttggttggtaaccttctctcggttcatgaactgagaggactgagtaactagcaaatgctttgctttttactgagcacgtattaagtgtcaggtgacacggtacttgctgaacacatggcatttatctagtcttcatactaaatcttcaatgggcaagttaatattactacagattaa

SEQ ID NO: 617250 - DNA, 562 bp, Homo sapiens
gtcaacaaatccctatgctttttggaggtctacgttttgatcatcttctaatatgacaatgattttgataatattttctatagacaggaaacaaaattaaggatttttctgtagctggttgatagaaaaaaaaaagagttgttatggatagttttaaaaagcgcatttctgtttcacaactcattgatggttatgttatagccattggcattgttctgatatttggggaaacttccgtcaagtctctttcatagctgagctgaatgatatgaaagagttttccacagagcatattctggcccaatacaattcaaatcttatttctcctccactaaccacatccttcccgtatcagtgttgtagttcacaatggaatagcagtaaaacctctatctgtgaatacttgtgtcacaacactatgtgagatggtaggagtattcctggaaatatttmtacaacagaacagtagcaatatctaaataatgcaaacaaaatattcctctaaacccaaactaaatgaatttctaactaactattcttcacagatagtcatgcccactct

SEQ ID NO: 617251 - DNA, 586 bp, Homo sapiens
tctttcctctgtataccttttgggtatccctcaggctgctgagaggtaaytatttctgcatttcagcaagtcccctcattcttctctgccccttgccctgttctttgatgtgcttcttaaagtatttatcacactaaacatttgtcacaagattttacactgaccatcataagacctttgatggcagatacaatattttatttatctttgtatatttttgctatttttcatttgttttttatttatctttgtatacatgacacataggtgatgcttcacattagtttgtcaaattaacaaatgaaccttaagttgtgttgaaagcatttctcttcattagtatacagtgggttaggattattaatttactctggaaaccactaagtacaagcaaaatgattctttaaaaatttatgcagcctttaactccagagagttatatagaggtattttctattcaaactaattttctaaaatctattaatataacacagatgtacgttttagtgtgtatatagctgacattgtgtgcatgtgtgtgtgtagttgggattgagaattttgttgtagttgttgttgttgagac

SEQ ID NO: 617252 - DNA, 530 bp, Homo sapiens
gtttagacatagtgattttagtatcactggtatgaaatgaaggtctaaggaagaccaataaaacaaaatactgactcaagtgaagattttgtagaaatatagatggaaagagggcaaagtaaaatgcttataataaattaggagactcaagcaagtccctccataaaggcaaaaattaataaaatggcaacgtaagtgaaaayagctattcagggaaaggaggcaggtggattacatatttcaaaatcagtttaaatgaaaaagaaaactaaaaggtaaagaaaagtttgaaagaacagaaatgctcaagaaaaaacttttaaattcaattcacttaggagagatgtataaacaaagataatgtaaattatgaattcattagtgaaaactggtaatctcatcttaaattgcatggtaatatccttgggcaatgagccatacaagtcaaagatacaggacatgtcaaaacattttaaatgctcctgtcatttccactgccttgttttcagaataaatgctaaattgtacca

SEQ ID NO: 617253 - DNA, 586 bp, Homo sapiens
tctttcctctgtataccttttgggtatccctcaggctgctgagaggtaactatttctgcatttcagcaagtcccctcattcttctctgccccttgccctgttctttgatgtgcttcttaaagtatttatcacactaaacatttgtcacaagattttacactgaccatcataagacctttgatggcagatacaatattttatttatctttgtatatttttgctatttttcatttgtyttttatttatctttgtatacatgacacataggtgatgcttcacattagtttgtcaaattaacaaatgaaccttaagttgtgttgaaagcatttctcttcattagtatacagtgggttaggattattaatttactctggaaaccactaagtacaagcaaaatgattctttaaaaatttatgcagcctttaactccagagagttatatagaggtattttctattcaaactaattttctaaaatctattaatataacacagatgtacgttttagtgtgtatatagctgacattgtgtgcatgtgtgtgtgtagttgggattgagaattttgttgtagttgttgttgttgagac

SEQ ID NO: 617254 - DNA, 569 bp, Homo sapiens
taaatttctcttgctattctagatgaacaggagattatattaactcccaagtttcattatgcacacgttaaagcagccctctttattgatattttttcaatatgtgggtgaatattttagcaaattatattggactctggttggcaactttcctggaatttttaaattgttattacattttttaaaaaattgtgaaagcaatacctgctcagtataggaagtaatgtgagtcaaatataaattcttttagaagttaatattatctttttatgacacatctccaacacactcttttactgaacaatacatcatgaccattgctccaaaccaatgagacagaastcattctttttagtagctaattagttttccacagcatacctgtagttcactaatacattcgattatttatttatggatgttttagagttttccaccgttttgccactataattctatgattatcattctattacatggttcctttatatcctgagattagattctctaaaaaggaattattgtgttgaatgatgtgttactacttttaaattttaatgcacattgcc

SEQ ID NO: 617255 - DNA, 602 bp, Homo sapiens
ttcctttatatcctgagattagattctctaaaaaggaattattgtgttgaatgatgtgttactacttttaaattttaatgcacattgccagactttccataatgatcatattatacgactatcaacagaatattaaggtgcttctttcttcaaacataaagatkctttctttagagtggcaagccatcatttttttctttgacatccatatcgttaaaaaattatatctcatagtaaatatcattttatatgtattagccatttggattttctcctttttgaattgcttatctatattgaaatatttataatttctaaaaatctatttgtagagacttatgcttccagtcaagatggagtaacttggaccacatttatcttcccctctgagtcaagcaaaaaagtgggcaaaatatatttttaaaaaatttcaaagcaatggacatcaggcaactaaggctagtgatccctgaagtatggggaacaactgtggtaagccctatgtcttattgccttgaaaaagtctccaaattatggcacagagaggagtaatctaggtagagtccagcaaactccctgagtggtagagacactgttgaccg

SEQ ID NO: 617256 - DNA, 586 bp, Homo sapiens
tctttcctctgtataccttttgggtatccctcaggctgctgagaggtaactatttctgcatttcagcaagtcccctcattcttctctgccccttgccctgttctttgatgtgcttcttaaagtatttatcacactaaacatttgtcacaagattttacactgaccatcataagacctttgatggcagatacaatattttatttatctttgtatatttttgctatttttcatttgttttttatttatctttgtatacatgacacataggtgatgcttcacattagtttgtcaaattaacaaatgaaccttaagttgtgttgaaagcatttctcttcattagtatacagtgggttaggattattaatttactctggaaaccactaagtacaagcaaaatgattctttaaaaatttatgcagcctttaactccagagagttatatagaggtattttctattcaaactaattttctaawatctattaatataacacagatgtacgttttagtgtgtatatagctgacattgtgtgcatgtgtgtgtgtagttgggattgagaattttgttgtagttgttgttgttgagac

SEQ ID NO: 617257 - DNA, 540 bp, Homo sapiens
tacactatgttcatgggatgaaggaaagattcaatattgataagttatcaattctcctgaaattgatttacccatttaattcaacctaatctatggggccttcctgcaacagtaagtgggccatggtaatagctaggaggaagacatttttttaccaagggccataagaaaattttaggggggatggagagattcattattttgacagtagtgactgtttcacagmtgcatacatcaaaacattaaattatctcttttaaaggctacaatttctaatcaggttacaataagtcaaattaaaaaattaattttagttacttctttttatcatgaatattaatctttaaactgtgatgaacactataatttttaaaagtctaacagtagtcttttgattttattcattgtatcttttactgtttatttttatcattgtatagataatatgtctcatcagatacatttatctagtaatttatttatataatctgcaattcctagattacattacaatactggcaaaaactaaggtcatataaa

SEQ ID NO: 617258 - DNA, 540 bp, Homo sapiens
tacactatgttcatgggatgaaggaaagattcaatattgataagttatcaattctcctgaaattgatttacccatttaattcaacctaatctatggggccttcctgcaacagtaagtgggccatggtaatagctaggaggaagacatttttttaccaagggccataagaaaattttaggggggatggagagattcattattttgacagtagtgactgtttcacagctgcatayatcaaaacattaaattatctcttttaaaggctacaatttctaatcaggttacaataagtcaaattaaaaaattaattttagttacttctttttatcatgaatattaatctttaaactgtgatgaacactataatttttaaaagtctaacagtagtcttttgattttattcattgtatcttttactgtttatttttatcattgtatagataatatgtctcatcagatacatttatctagtaatttatttatataatctgcaattcctagattacattacaatactggcaaaaactaaggtcatataaa

SEQ ID NO: 617259 - DNA, 608 bp, Homo sapiens
taaatggatgctctatttcaagttatgtactgtgtgctgcagttggaaaaatgtgttcaatccctactcagtagtgattatattatccaatttacattgctatatgtacaatcctcactttttgaaataaaaaaataagattcagatttaccaacatagagatgtagagatgttaaggaataaataactagtccactggatctctcacagttccaaaggtaaataagatgttatattttcatcaagcwatttatagtttggtcaggcacagtggctcacacctctaattccagcactttgggaggccaaggtgggagaattgcttgagcccaggagttcaaggccagcctcggcaacgtagtgagaccttgtctctaacaaaatttttaaaaagccaggcatagtggtgtgcacctgtacacctgtagtcccagcttctagggaggctgaagtgggaggatcgattaagcctgggaggttgaggcggcagtgagccttgattggaccactgcactttagcctgggcaacagagtaaggctctatttctctcaaaaaaaaaaaaaaaagaatttgtagttttgtggggcaatgaaaacatttttaataa

SEQ ID NO: 617260 - DNA, 608 bp, Homo sapiens
tctgagccagaaagaaagttaatggagatgctagcaagtagctttggtcagttgtgaaaagagttgtggttaactttttcaaattaccatgggatgacattgaagatccattagatgacactagaagactttcatgagattctagttgagggatgatgatggctcagatcagaccacaccatggatggggacattcaggatgcgttttgtaagtgtaaccaaaatcacttcttgatggatttgatttgggaggtgagaaaatagagaaacatagaatgaaatataagattttgggcktgagcagtgggtgaatagagatattatagagaagatgaagaatattcaagaaaagataggtttgacagggcctgaggttatagaacagaaattatattttggctattttaagcagttagtcagattaacaaattcagatcttagggagagtttacttctggaaaatcaatttagaattgatgaaatataaactaattagagggtcaaaccaatccctgcttcctgtcaggaataatttttgctcataggtgttttctggaagtcacatttgtattcctgttttaatgtaaatttgcagactacagacatac

SEQ ID NO: 617261 - DNA, 581 bp, Homo sapiens
gagtgtcacataagtattcaaagtgttcattattgtttcatgtttcagtagctactgaaataatcctgaatatgaatgattttgcatgcttttctccatctgttatcacacaacttggtctctgaagaccatatcttccttaggcaccaacagctagacatgagtcagctattgttttactggaggagagtgtcacaataaaacttcaaattgaaggtaagaagagatttacactatgaagtaaataagcagcaagctttattrtaagacaatgttcaaacatttacttccagaggcaataatgctgccttactttccctttcctctaatgtcataattatgggtcataatgggtggaaataggtgatgaatgaccacactggcaaaagtagcacctgactcaaacactacaagcatcaaaaaatgtagggccagttaccacttttgttgtcgtctggtaggaacaaacaattaacagcatacagcagactactgccttatgtacagcaatattcattccaaccaacttctgtgaacaaccctcatttaacaactcaggagacctatataacacctgcata

SEQ ID NO: 617262 - DNA, 320 bp, Homo sapiens
accagaaaaaacgcattattaaaatgtagtcaaagagcagtcaattaagatttattaagcatctgcttggtgcatggctctgcataagttttgtataaaggctttataaaacttattcatcaaggaagattggatatyacaaagtcaaaatgttgttggctttgtatcttaaatggtgagtgactgtaaatgtctgtacctaaacaatgttttatcttattttcccattactaaggtcacattgcccattactcatcatcagagaataagatagtaccaatacagacagtatgtagacattttgcaggaagattggaaag

SEQ ID NO: 617263 - DNA, 659 bp, Homo sapiens
tgcactgcatcattagtggacacaggatatgagtgaggactcagctggatctatgtggaaacattttaatgctaatgcacaggtatcaatgacttaaaatgctgagagcgtataaaaggtaagatgacacttctaagatcaactatctgaattgaagatgaaagttctgttggcaagcagactctttctatctttccttggctatgttcccactacgcatctgcaggttgctagrgtgatgagtgttggagactcattttactgctgcaataaagtttttttttccacttataagccttggaaactatgaatttattttagctaggttttagatgtcctatggattgcttccatttttagtgggtgtcacattgttaagattttttttttccattagagaccaatgactggtatttctgttagagtaagaattcaacatagtacagattatataggtgtctgaagttgtttaaggcttgaacctactagtatgcacactccagataaaaatgtcttcatttatgtagtcagaagacatagttgacccattgtgtcaaattttctaaagaattttcatgaattcccttgaatgtgtttatttgagattcttccattttctcttttcttaaaatactctcagaaacaaaattacctgattc

SEQ ID NO: 617264 - DNA, 574 bp, Homo sapiens
agccagctttttaaaaattttactaaatgaagttcaaagtgcttctgctttttgcaatcaataatgcctaagtaactcacaaaaaatagattattaatatctatgacttcaaagggtccataacttatcacaagcaaaaattaaggaatattatatatgataaaattttatgtaatagttaccttttattaacaacaatattctaggtatttatgcatgcttataagtgcttatgaatatttatttttaatcttcaatagagtcttgagaggctgaaacgattattcccattatatagaagagatccaaacctcaaagtgtttgtaaaattacacaggtagtgtcacagttagaattcagaccttgaggtgctgctgtctgttttgaartgccacatcctgtccacccagtgacactcaggaatctcaaactgaaccttcaacttccctcgtgatatattcatttcaacaaacagtgtctcaatttaacccagtcgttcagtctaatcacctttacttcataaacacattcctttactcctctctctttcacacatccacgtattttccatcat

SEQ ID NO: 617265 - DNA, 599 bp, Homo sapiens
cataaatccctttttactttcagttattattttcttttataacattgatttgtaagggagaaaacataacttcttactagatgtccaaaaacaaaagaaaacaaaacaagagcaaagaccttaaacattctttcccaaattaaggttagcattctagtaataagagtatttctacaatgtaataatgttcctatttacatattccatactttatattgtatcagagatatttctcttgaaatttaaaaggaaaagaatatctcttattcattttaaattgtagatacagttcaacatattgtttgaaacagaagacaacaaaattctgtttcatttcctttcrttaatgctagcaccactaatgatatcagtacagcattggaagtgaaatttaatttttaatgctaattttcttttctttttatgtatatagtatcagatctgtatgttatatgggattaaatagtgaaatctttcaatcaaatttttcttctaagaagatatattaaaatccaggccataaagcactatcctgttttcaattatttaaatggattaaaatcttagaataaggtttctctgaaattaaaatcttatat

SEQ ID NO: 617266 - DNA, 473 bp, Homo sapiens
cctgccacatcctctaccttttattttttagttaatgacactcctaaggaagcaaatgtttgtcagcagcataaacaaaatgaaggaccctagttttcctttatttatcagagtagtttctttttggaaacaggattgatagaaatcatgtaagaatattctttcctgcatrtattctgtcacttctttctaagacttcacccaaaagtaagaagttatagttgtgaagacaggagtatagtttactgtaagacagaaaacacactgggaggcaggaaaagattttaggagatatttctggggatttagttggttaaaaagtagctccttactcattaagcaggaactgatcccttatatatttgaaaccagatctttaaaaaatgtgtctgttttatattccaaataaattaaaatgttttaagcaaaatatctggtacagaacagaattacacacagagatctgtaaatat

SEQ ID NO: 617267 - DNA, 586 bp, Homo sapiens
ttgtttctttaattaaggagttttagggtctaataattagatagatatatcagacataggcctgaaaacagagccagacaggtctgtcttcaaagctaacagcatgtaaagatgtaaaaggcagagtccatggctttaaaaaggaaacaggtaagatagctggacaaaaacaaagcttacagatacagggcagaatataatttgtgagagtgaactccagacttcattgttagatatatgctgatattttcttgacttacytcataaagtgggtgtgaagtagtaccagctggaaatcccattaaactaaatatatctgtaaggttttttattagccttgcttctactcaggaagcctgaagaactaagtaggtatatactgctttctatttgatgtagtaagtacataggaatttggcagaagggcagcaaccaataatcttcaactttatagtagtcaggatagaaaagactagggcaattagatgtatagtcaagttctttagaagtctagaatattaatagtagcaacacaaaacaatgggaataatgaaaattataatagaagcaactaatataattgagg

SEQ ID NO: 617268 - DNA, 590 bp, Homo sapiens
agttcattctcaaagaaacctaggaggcacctattattatcattaccattttacagatggaaaagctaaggcacataagtaaattaccagaagtaaaacaactagtaatggtcagagctgggatttgaactaaaatacagtttcaaaagwctatgtatttttgacataataattgttcctaaaaatttacaaaaatcaaatgatcttcatatcctaacagcattatgatgtttaaaatttagagtatagagctacttacagaattaatctttatttacaaaggatatggcatgtctcctagtaatgcctacctatggtgtcaataaaaggacaacactccttcccccaaaaattgagacagtcattatatggaaaaattgaggtttcagttcattcagactggttaataaatagaaaatcttttttattcttacatactttgaacattaggggaggttaaattcattgtcattgctttggggacttctgacagtcctacgtgtgaatacaggttagttaatatggggagccatgcatggcatatgcagcacagaagatatatggtctttcaagaaggtctcttgcactat

SEQ ID NO: 617269 - DNA, 568 bp, Homo sapiens
tttcctctctttagtataaaatttggatcacacatgcaaaggtaatatagactgtgattattcaaaacaagttttgaatgtatgtttgtgtctcattgaataatgaaaacatgtctcacacagccaggatgccaggccctgtcagcctacacagcagcaaccaattttgytcttcagtatgtatgtcactagaatactgcataagtaatagctattagattcccatactaaactgatgttctgaccttgttctgtcataggtggcagcacaaagaaccttagcagctttcagattgggtagctaggtaaacattgctttcagttaagatccagcaggaaagtaataaggcagcaatttcagatgtcatagaagccaagaacacatagagtgaggtgcatttactttacacagctaagaatataaaggacagacattcttcatctgtcagttcactgaggaaggaacaaaagtggtttagcattgtttaaagctcataaactgcaaccataaatcagcaaattagctaatgattgcctctgggtagtgattcatgataaaaaacacaaa

SEQ ID NO: 617270 - DNA, 577 bp, Homo sapiens
aagctttcttttctttttattagtattagcagagctaaaatgccttgattatacaacttaaatgttgtaagggccactatagactacaaattagggttaattttgataaaaactgtaactctcaaatttaattccagaatataataaagacacatgtagcagttggcctccagtggtcactgaggcctgttacttggactgcatgtctccatttccatttatgaagattaatttctgcatgtttcgggaatgaaacatgagagcttagacagaattggtgagctctttttttctactcccatgtaaaaacacgataagaattttgtttcttcttggctcaaatttctgaacttaatgagctcagttgggatgcaacattgaggattcaccgtagaatgcagctggagcagaagtcaccagttatgccagcattagcatgtgccatcacacatgccacttgaatgagaaatgtcactstccctctctctcagtagataccaatagttgcccttgtctttagaaagtcagcttagataggctagttagaatcagctactcttattatctggtggcatct

SEQ ID NO: 617271 - DNA, 482 bp, Homo sapiens
tcatttaccccagtgagtgtgtcatctggttgatgctagcaacctgccccatacaggtagtattcgttaattagttataaatttgacctttttggcctctaaagaaactcacgttgagtgtttaaaataataggatgattcactatttcctatctgcccttgaaacaattatttgtataaaatgcagtggctctttgggagacatttctactcacaaacccttaccataaaatttgggaagttttttgaaagcagaggaytttcataatttttttagtgtgagttacagaacccaaagcaatattaaaggtgaacacatcctaacacgacatagctagctagaagatgccaaggcctgtgttcttttcctcaattattcgatatctatcagaacataattttagcaaggaaataattgagactatataaaattatatcaactgtttacttcattagaaaatatatgacagccatgtcaatga

SEQ ID NO: 617272 - DNA, 634 bp, Homo sapiens
taaatctagtacctatgggattttaagacatagttccttggacaataaaagtaacttggacagctctctggggtatatatttgtccactcgggttgccttaacaaaacaccatagactgggtggattaaacaacagaaattaattttctcacagttctggaggctggtagtccgagatcagagtaccagtgtggtccgactctggtgaggactctstttctggcctgcagataataccctcttgccatgttctcacatggctaacagaaagagacagcaggctctctagtgtctcttcttataaaggcactaatcccatcatgaagacctcaccctcacaacctcatttaaacccagttatcttccaaaggccttattctcaaataccatcacattggaggataggagttcagcatatgaatttgtggattgtgggaagggcatgattaggtccacagtaggtataaagtggagattctgcacaatttaaatcccccctgttctgtgaggtaaccctgtggacctcacctacagacatcactgatcattctggcactgacatgcatgtctgatgtgagaaagaaggagctgggagacatctatgatgttcagacctctctatcctttgcccaag

SEQ ID NO: 617273 - DNA, 454 bp, Homo sapiens
acccccctccccagccaagggaagcagtgaatgaatgtgcaactcccccggggaaaccaagcttctcccatggatccttgcaaccctcggatcaggagatcccctcctgaacccactccaccagggccttgggtccaacatacagagctatgtggagtctcagcagagcagcggctcagcaagcacagagacccaggacctttacatgctccagtccaaggatccccggmaaaggcgactgcaactcaggcaagcccagaggtccataataccccttggaagggggctgaatgcaggggtctgagcagcctcagcctgtggcttacctgagactggacccaactccttggtgggggaggggtgggctgccacctttactatttgaaggattcagccaaacaggctgcaggctttggagagcccaaatggcctggatgaggaagggaccttcccc

SEQ ID NO: 617274 - DNA, 576 bp, Homo sapiens
actctgttagtatccatgatagtgtaaaataaaaactcacttcatacgggtgtttataagtcagaggtactgttgaagaatgaatgtgaatatgtgaagaaagatgaaaaaataaaaagcccatcaggatattctccatttggtttctaagcaatgcagcctattctctatttggtttctaagaaatatgaggcagaargaataaacgagggtcctttctgtgtccttcctctaccaaattgatcaacaacatggtttcatataaaggaaaagtgtgattttccatcgtcaacaatgaagagaaatagtcttaactcaaatcttgagattattacaagttattgcaaagaacatctacagcatccctagtaaaagcctttggatcataagatattatagaaaataatcacaaagatctgtttctgatagaaggatttagcagcctctattttccactaaatagggaatccataacagaaaaggcccaaaatgtggaaaagatctcaatcctcattaaccattcctgtaaggctttctgcaaagtcagtgacaatcttactaagcaggcaatttgta

SEQ ID NO: 617275 - DNA, 573 bp, Homo sapiens
atatgttattgtagttttgatgtgcatttctctgatgatcaggagatccacttttaaaaaagattcttggcatgtctaaaattttgttttgctctcacattggcttggtggttcctctggacatagaaatctagggtcaaaaaagtttttcttggatttgggaagtacttaggttacttgatgcttttgtatcatgtgctatttggcattatatgtgtctccccttctactcatggactgatgaaggtgggaaaaggaggtacataacataagatacctctgactttgttcaaattagtgatgtgcaacccttgaggaagcctgatgcattaaaactggatttacacaaaatcggtagtataaggtgggggattaaacactctgcagagccatttgctatttacactcattatccaaataccttcaatgtaaaactcaaccaaaagaagtagttttaggcaggktgcattggctcatgcctgtaatcccagcagtttgggagaccaaggcagacagattacctgaggtcgggagtttgagaccagcctggccaacatggtgaaaccttgtctc

SEQ ID NO: 617276 - DNA, 606 bp, Homo sapiens
tatctctataaaaacaattctcacaaaaagtaatctaagggaacatcagaatcctcttaaattttggaaggaagtaacttccaaaggaatagcactgctttcaaatatcttttatctttagtgtttatttttggtatttcataggcccagtaagaaatatgagaacattataataatcaaagtacctggcttttcaacatttttttctcaagctctatgagtaataatctctgaataaagatcatgtgaatcataattattcttatcttttgttctataattgcttttgggggatataattttctctgaaaaatgttgaarctaagactaagaggtgttaaatgagttggtgaaggacacatggttccttagtggtttcttttttttttcaacatacttcatttaataagcaggctttcatggctaaactctcttttgctacaagaaactacttaaagaagaagaaaaaataaaacaaatatttattgagcaccatctatatgttatacaccgtttcttatgttataaactacctattctccttttgtaaacatgagattttgcaaattagtgtaattaaattaacctggctaaggtcacagcata

SEQ ID NO: 617277 - DNA, 542 bp, Homo sapiens
tcttttgttctcactttaatcccagagcctatatttgctcagtgcataccgtaattattcaataaatatttgttaactcattggctggaagaaaatgagacaaaatgccatccctactgctgtgagagggaaaaggaaaggaaataaactacattgttgagacttccccacataagtcagctcccttctcagttggaaacaaatcttctcagttagaaaatctctgagaaacagctcaggaataagtgggtcacatatgacggattaccagtttttgaaggcagaaaacgaatagacatcttctctgtagttttctacatmctcctagaaaaaaacaagggaggcactgaggtggagcccccttagtagaggccagagtcacatgggtgtagaaggcacttccagcattggactaaagaatggggccttgccctctgctgagccagaaaacaaaacatttttgggtcttggaacactgtggcttccttgccagagttttctccaaagttacccattgtgccagcagagatggcagaagaggg

SEQ ID NO: 617278 - DNA, 556 bp, Homo sapiens
atcattatttacatttgataaccagttataggttttcatgattttaatgaattttttacattaacttttggctttagtctctctaattgaaggtgacaaactattaaagcaaaaatttaaaaactgtattattcaaaattcaaaaatctaaaaaaagtaaagtaattagacctaattgaactttaaaatgctgatttaaaaataaatttgtagtattacacttttgaagttattaaggtgtaaaagtgtactaagacttttggcacactttggatttcaayattcttcattaaaaatgaattttaaaaaaacctaaacaaagaaaaataggaccatattataccttctttactatccttcaaaaattgctgaaaactttcctgcagtacaatgtcacttatcttcaatcatctagagaatgaaagccagggagttcaagggagcagcctcaggtcatggagctggttcatgaaggaaaagattccctgggctgtcactccatttctgttctcactacctaaatggagtaagtcaatgagaattatggacttgatat

SEQ ID NO: 617279 - DNA, 570 bp, Homo sapiens
aagctttttactcagaagactgaggctgatccatagtttcactcatccatacttaccctctgtcctaatgggaggttttaatcctcctattgttgccttaagctgagggttctagaaactatgtcatattttatttaaatctctggtgtcaatgttttgacaataaagtgagacattaaaacatatatctttcwtctgggcgcggtggcttatgcctgtaatcccagcactttgggaggccaaggggggcagatcacgaggtcaggaggtcaagagcatcctggctaacatggcaaaaccccatctctactaaaaatacaaaaattagctgggtgtgttggtgcgtgcctgtaatcccagctactcgggaggctgagacaggagaattgcttgaacccaggaggcagaggtttctgtgagccgagattgtgctacagtactccagcttagcgacagagtgagaatccgtctcaaaacaacaacaacaaaagcaacaaataaaatatatgtcttttaccccaaaaaggttttctatattttgtattttcatggttttaagccaaaattttt

SEQ ID NO: 617280 - DNA, 570 bp, Homo sapiens
aagctttttactcagaagactgaggctgatccatagtttcactcatccatacttaccctctgtcctaatgggaggttttaatcctcctattgttgccttaagctgagggttctagaaactatgtcatattttatttaaatctctggtgtcaatgttttgacaataaagtgagacattaaaacatatatctttcttctgggcgcggtggcttatgcctgtaatcccagcactttgggaggccaaggggggcagatcacgaggtcaggaggtcaagagcatcctggctaacatggcaaaaccccatctctactaaaaatacaaaaattagctgggtgtgttggtgcgtgcctgtaatcccagctactcgggaggctgagacaggagaattgcttgaacccaggaggcagaggtttctgtgagccgagattgtgctacagtactccagcttagcgacagagtgagaatccgtctcaaaacaacaacaacaaaagcaacaaataaaatatatgtcttttaccccaaaaakgttttctatattttgtattttcatggttttaagccaaaattttt

SEQ ID NO: 617281 - DNA, 555 bp, Homo sapiens
acaatctttccgtcccagtatctcaagactagccctcttccacaatcaacatcaaaggggagaaaagagttagagattcaacactgacaattaaatatttcaggctgaaatattaactttttttctatcatttaaaaaacaaagcaagttccatgaccagtcttgactacaaggggaaggatgcccagaatggaaagagtcctggaaatattattaagcagctstaacactgactgtagtttctcatagatattggtgaatttctattgttatcaacaccttaagacatagatgtatttttagattctggtgcttttattattttattgaaatctaagacgtctcatataaatccagggttttgattttatttctttaatcataaagattcagaatttttttttttttttgagacagtctctctctgttgcccaggctggagtgcagtggcatgatttcggctcactgcagtctctggctctcaggctcaggtgattctcatgcctcagcctcccaagtagctgagattgcaggtgtgcaccaccatgcccagct

SEQ ID NO: 617282 - DNA, 581 bp, Homo sapiens
caaggacaagggggaatagtttatctttaatagtgatcttaaatttgtattcacattgtacatttctagtcaattacccatgccatgataaaaagactaatacaatggcaagtagagagtgataattcggaagtctgtggtgactaaacaatgaggtctgactactgcacaaatgagtggttttaactccagcatcaccttcctgacttttgaggggcaaattgattataatatttaagagataaggatatccttcataaaggatatgagaaagccataaattagagtatgttcattctcagataaaagctaacttttaagtagyttgagatcaattaagaagcatagatatccatagacattccatttcatcctattacatacctaatttggtccccagtacagctatttctagctacccacaaaatcatttttaaatacctaaatgtcatttggttattatgccagaaagcaaaatatgattcagaaatgtaagttttttccttctatgttagaaggggaaaaaaagcacataggctaaaatcttgatttaagctctaattagcaataaatctcaaacc

SEQ ID NO: 617283 - DNA, 372 bp, Homo sapiens
catgttcaacatcaccaattatcagggaaatgcaaatcaaaaccacaatgtgataccaccttactcctgcaagaatgaccattaaaaaaaaaatagatgtttgtgtgaatgtggtgaacagggaacagttctatacttctggtgggaatgtaaactagtacagccactatggaaaacagtgtggagattcatttgagaactaaaagtagaactatcacttgatccagcaatcccactacaatcccagaggaaaagaactcattatatgaaaaagatagttgcacacacatgtttatagcagcacagttcacaattgcaaaaatgtggaaccaacyttaatgcccatcagtcaatgagtggataaagaaaccg

SEQ ID NO: 617284 - DNA, 441 bp, Homo sapiens
gtacgttgttgtctgtcctgtagaagagtgagcagctgggattcttgactcctctatctcttccccaccaccagctcaatggctagtgggctattaggaarcagtatggcttccaggtgttgtatcagatgctcaactaatcatagcatcagaattaaaatatttagttgcaaggaaaacagctgtgggtggctgaaggaccaaccttctaaactctgagtcatcccctggaatggactgctgtgtaaatatattcacacccacccaatttatctcgacctccagaaattatcttgaacaaagcaggcatttcactgcattggctctcagacttgccttcctggaaacaaccttttctggaagggaggctcaagacatatttactaagaactctgaaccaccaggaagccttaaagcaagacctgtgcttctatagttcac

SEQ ID NO: 617285 - DNA, 593 bp, Homo sapiens
aggggaatgggtaggcctctgtaaaattgacagagagagaaaaccctataaagaaattggttgtggttgggtagtagttaaggactatggcaaagaatcttaygcccagtatgtcatcgaagagtccttcaaatgcaagaaatgaacaaataaaactttgtatcacatttaaaaatttagtttgaggaatagtttgaactctgctataatttttagaataaacgtgaccaaaggaagaagtggaagctattttaacaagtgaacatttcttaacccttgttctgattttcagttctgattttctgagcgtatgtaatccctatgtagtccagaggtgcaagtatcacatctctagggggaagacaaatgtgaagtaagtatgctaatagtataaaatgacttgcgttactttaggtaggtatagaaaatgttggaggaagatatttctaaatgtaatactttgtttgccactacattttgcttaatatgcaaattttcatctcagaaatgtcacaggaaacattagaaaatataatctgcaactttctaattcttgaagaggcagggaaaaagaaggatggcttttaaagctt

SEQ ID NO: 617286 - DNA, 625 bp, Homo sapiens
gaaactgggcagagggccagacagcgtaaagggcagtgagaatttcagatcccagagtggatgtttatttagaaggcaataaaggacctgtgggagaggccaagcgggggacgaaatttgtgttttagaaagacctttctaactgcagttagaaagtagaaaggggcaggrccagaggccaggagaagtctaagaagacgtttagagtggcagtgaagataaaggcactggcagcagacatgaaaagaattagatgaattctggatatattgaggaagaaagtgaatggatgtatatggtggtgaaatgatgcaggaaagaagatgtaaattctgatatctgctttgagaaattgagtggatggttgtgtcatctagtaggataagaaacaccttctaaagcattagcactttgggaaggaaggaaagcaatgataaattctgtagggttgctacatgatatccaagatgagctgtctaacaatgctagggtctgaatgtttgtgttcctcaaaattcatatgttgaagcctaattccctatttgaaggtgaggcctttcaaagataattaggtcatgaagggagagccctcattaatgagactggtgtccctataagaagaaac

SEQ ID NO: 617287 - DNA, 599 bp, Homo sapiens
attttttgccttctacttttaaacttaacttcctgttaaagcaaccttttttgattacctgctccaccctgactcattccgattacctgctccaccctgattcattcctattacctactccaccctgatacattccgattacatgctctgtcataaccatttttcccaccaaaccactcamcccgtcactctctttaaattagcggtctaaccctagccaataggggaacgacacagcagcaggggccacacatgcgtcagggataagaaccccttcccctcccttgtccaagtgtgcactcaccattgctccatctgtaagggtgcacccttctatagaagtaacttgccttgctgagaattgaaagtaaaattttatattcgagtgctatttcttttgcggcaccaaaagtttatttataacaacaccacgtggtgaaagcagtaccaagagagaggggaggtgccacacactttttaatgaccagattttatgagaattcactcattgccacaaggagagcacccaaaggatggtgctataccattcatgagaaacgccctcgtgatccaatcacctcccaccaggctccatctcc

SEQ ID NO: 617288 - DNA, 506 bp, Homo sapiens
tcagtaaatgtcaaactgtacaataggaggaagaggttggaaatagaatcaygctttctatgcttggcattttcacttggacatataatcatcccatcaaatttaacaggcataaaacttaagtccttatcttattcttgcccttctgaagtatttctttgcccctaaaaatgcttcccacatttggctttcctgtttttgttaatgacgctattcaatcactcaggtcccaaacctcagagtcatcttgacaatttttccattgcatttttccctatggctaacaggatcacaagtctaactagttttctctctctctctttttttttttttttttttgagacaggttctcactctgttgcccaggctggagtgcagtggcacagttagggctcactgcagccttgatctccaaggctcaggtgatcctcccaccttagcctctcaggtagctgggactactgatgtgcaacaccacgttcagctagtttttttgtattttttgt

SEQ ID NO: 617289 - DNA, 448 bp, Homo sapiens
tttctagttgtgctattttttttagggtaaaaaaggttaaaatttggttaaatcaaagcaggatctctggtatttaatcatgagtaatattttgcctaatatgccttttaattacacctggctttcaattacatttgttgattttttttctaaattgatctgttattttatttaaccccttttgactgctaagttacattttataagtgtagtttgtactacccttcatccagcactatgaaatggtgatttttttttttttttagagttagtgaattaatactaatagttctgctaactttggtccttccaaagacttatacaatttgaatcccataatgtttcaaatcmaactctctgtctccccaattcctccctgaatctgtatcagctttgagatgcctatcttggttattggcattgccatcctgatacttttttttttttt

SEQ ID NO: 617290 - DNA, 498 bp, Homo sapiens
atctgaaaattagctccttgtgtcagtaagtcaatactagtatccccttttccagttttatctttagcctccttagcagaggcttgccctatccagtatttagccctgctatttctttcattacctactgcttacaggtctcaagacttctgtgctgtttcatacattcttgcacctgggagtagcccatgtgcacttctgtccagatttgaatgccgcagtttttatattcatactcttccatcaccagtaatagataattacattttcaaagcagcttccacattttaagtgcttaagacatgttttatgagaacatagactgtgctgctcctctwtatagaaaattcatattcatcatttggtgaagtgggaattttaccacggttagccactttaaacttcttgacagcttcaaaccactgtatcccatttacattaacattttgttctagaaagtggaaaaagttacattgagatattctcatttcatacatt

SEQ ID NO: 617291 - DNA, 519 bp, Homo sapiens
aaaattagctccttgtgtcagtaagtcaatactagtatccccttttccagttttatctttagcctccttagcagaggcttgccctatccagtatttagccctgctatttctttcattacctactgcttacaggtctcaagacttctgtgctgtttcatacattcttgcacctgggagtagcccatgtgcacttctgtccagatttgaatgccgcagtttttatattcatactcttccatcaccagtaatagataattacattttcaaagcagcttccacattttaagtgcttaagacatgttttatgagaacatagactgtgctgctcctctatatagaaaaytcatattcatcatttggtgaagtgggaattttaccacggttagccactttaaacttcttgacagcttcaaaccactgtatcccatttacattaacattttgttctagaaagtggaaaaagttacattgagatattctcatttcatacattctgaagcatgcttcgtgaatgaattc

SEQ ID NO: 617292 - DNA, 498 bp, Homo sapiens
aaatggaccattaaataacacaaactaccctaactaccccaatacaaaatagagaacttaaatagccctgtaactattaagaaaattaaatcttaattatctccccccaaaaaaactctattttcactgaaaaattctaccaaacatttaaagacttgacacraattctatacaatctcattcagaactaaaagaggaaacacttcccaatttattttatgaaatgagtattacctgatagcaacataagacaaaaacagtattaaacagaacactacaaacaaatatcccttattaatacagacacaaaactctttatgaaaacattagcaaatagaacatagcaacacatgaaaagaattatacatcatgacctattggagtttattccagggatgtaaggttggtgcaacattggaaaatccattaatataatatcatattaacaggttaagcaagaaaaataacatgatcatatcaattgattcaaaaaataca

SEQ ID NO: 617293 - DNA, 583 bp, Homo sapiens
caaagacacctacaggttttatgaaccctgattcaaaaagggttacttcgcacacttacaggtacttactatgtgtcagacattgtcctaagacttaaaaaaaaatcaatatatttgaatctcaaaagaatcctataagatatgaggtcatgttataaatgaggaaaccaaggcacagagaggtcaagtaacttgaccaaggtcacagaggcaataaatggcataagtgccacagaaagtggcaataagtcactcctcatgattacagtattctactgtatagctctgctaaccaaatccagtgctcaaaccccctcccaagacattttaatatgtctccctatgtcaccagtgtctcatgcttcaaaaataattttattttccctctatttcattaacattctttagtgcatttatttcagttattaggaaaaaaaagaaatctaatttaaactaattcataccaagaggcattaaattgtggawagattctggcttgacatagtcattgcacaggttttcaacttgaaaggagaacaattgctattttaaaggaatgaatctcaattgtagtggttttcaa

SEQ ID NO: 617294 - DNA, 503 bp, Homo sapiens
ggttttcaacttgaaaggagaacaattgctattttaaaggaatgaatctcaattgtagtggttttcaaaattcaagacagtcaactttcagagtccagcaggaggcttatccccaaaatccagcctcaaatacacaaagttctgcttttctatgtgatggctgtgcataaaatttcatttgggaaaataaaagggactctgctgcctcaaataacagtaaattgaaccactcctctaatccactagtccagtgaactttctggctcttctttccctcacctccatcagacacatttcatgcgctcccccgacccccacccttgataaagaagcacttagaggctcacagaacagcgcagaatatctctgsgttcaaagaacttcaggagggatccagaaagtacttttgagtagatgcattgagcctctcagtaatgtgaaagcaggctgcagagatcaccatcccagcaacaggattattctgtttgatatctgttgccaac

SEQ ID NO: 617295 - DNA, 564 bp, Homo sapiens
tgtcctctcatgtttattgcagcactactcacaatagccaatatttggaatcaacctaagtgtccatcaacagatgaatggataaagaaaatgtggtacatatacacaatggagtactattcattcatagaaaagaatggaatcctgtcatctgcaaaaacatgaatggaactggaagtcatatgttaagtgaattaagccaggaacagaaagacaaactttgcatgttctcacttatttgtgggaggtaaaaaatttaaaacaattgaactcacagagtgtagaatgatggttagaagaggctgggcaggggtggggagaatgggaatggttaatgggtgcaaaaatatagttagatagaatgagtatgattamatagaataacagggagagcacagtcaacaataatttattacacatcttaagatagctaaaataatataattgaattgtttgcaacacaaagaatggataaatgcttgaggtgatggatatcccatttaccctgatgtgattattatgcattgtatggctgtataaaaatatctcatgtaccccataaat

SEQ ID NO: 617296 - DNA, 554 bp, Homo sapiens
cagattatacattgatgtaatttgggcttaagtttacagtaaattagccaggccaaaacaaggtagcagtaagaaaacttcccaggaaacctagtacttttgaatgagaataaagaaaaaataattagtcacaagattttagctaaatgagtgctttaaaaataatataatttagttaacacttatttttctttagcataatcttcttggttataatagtttttaccaaaaggaaagaaggcagatgcttttttaaaatatagatatcttcagataaattcctaagaaaacttcaggaagaaatcatggcagtttagcatgaattacgttggtctgaaattgtgtcattcacacagaactgtagtgctctccttgatrtcagatcaacatgtttagtacttggcagaaaaaaagaaagtgaatgattagagtggtgttagtccatttgtactggaatacaaagaagaataaggacagatggacagaaacaaacctaatccagtataaaggtaacaataaaataaagggaaaagtaaaagataatttgtttttag

SEQ ID NO: 617297 - DNA, 554 bp, Homo sapiens
cagattatacattgatgtaatttgggcttaagtttacagtaaattagccaggccaaaacaaggtagcagtaagaaaacttcccaggaaacctagtacttttgaatgagaataaagaaaaaataattagtcacaagattttagctaaatgagtgctttaaaaataatataatttagttaacacttatttttctttagcataatcttcttggttataatagtttttaccaaaaggaaagaaggcagatgcttttttaaaatatagatatcttcagataaattcctaagaaaacttcaggaagaaatcatggcagtttagcatgaattacgttggtctgaaattgtgtcattcacacagaactgtagtgctctccttgatatyagatcaacatgtttagtacttggcagaaaaaaagaaagtgaatgattagagtggtgttagtccatttgtactggaatacaaagaagaataaggacagatggacagaaacaaacctaatccagtataaaggtaacaataaaataaagggaaaagtaaaagataatttgtttttag

SEQ ID NO: 617298 - DNA, 560 bp, Homo sapiens
tattggctgggcacagtgacttatgcctgtaatccctgcactttgagaggctgaggtgggagaactgattgaggccaggagttcaagaccagcctgggcaatattgcaaggttccatctctacaaaaaacattattttataaaagttagccaggtgtggtaacacacatttgtggtcccagatgctcaggaggctgaggtgggaggatcacttgagcccaggagtttgaggcatggggtgggaatgggaagtgactgtaagtgagggcaaagtttctttttgggctgaagaaaatgttctaaaattagattgtagtgatggtcatataactttataagtctgctaaaaagtcactgaattggccacacatggtagctcacacctgtamtcccaatgctttgagaagccaaggcaagaggatggcttaaggctaggaattcaagaccagcctgggcaacatagtgagccctcatctctacaaaaataaaaataaaaattagcctggtgtggtggtgcatgcctgtagttccagctactctggaggctgtggcaggaggatc

SEQ ID NO: 617299 - DNA, 583 bp, Homo sapiens
ccagagaaatgcaaagcccaatgcaagggaatccaaaaaatgatacgaggtgaaaaaagaaatattcaaggaaatagacagcataaaggaaaaacaatcaaaacctcaggaaacattgcaaacacttagagaaatgcaaaatgttctggaaagtctcagctatagaatttaacaagtagaagaaagaaattcagagcttgaagacaaggtctttgaattaaaccaatccaacaaagacaaagaaaaaamataagaaaatatgagcaaaggctacaagaagtctgggattatgttaaatgaccaaacataagtataatccatgttcctgaggaagaagagaaaactaaaatttggaaaacatatttgggggaataatcaaagaaaacttctccacccttgctagacacctagaaatccaaatacaagaagcataaagaaaacctgggaaattcattgcaaaagatcattacctaagcactttgtcatcaggttatctaaagttaagacaaaggaaagaatataaagagctgtgagacagacgtgccaggtgacatataaagggaaacctagcagattaacagca

SEQ ID NO: 617300 - DNA, 513 bp, Homo sapiens
ggctagttttttgcatctctttcctcatttcataagttttgcaataggaagataatgaggggaaaattataagaggcgcaataggtgcctcttataaggaggcacctattgtgaattgcctaattcctttttgctttctgctgtttctgaggacattgtctggtgaaaaccgagtagtttcttattagtccatgagcagtgccttcaactgttttgtgttgctataaaggaatacctaagactgagtaatttataaagaaagtaggttaatttaactcacagttctgctgactggaaggttcaagattggtcatctaatgagggcctcaggttgattccactcttggaagaaggtgaaaggcaatgrgcatgtgacgagatcacatggcgagagtggaagtaagagaaaggtgggtggaggtgccaggttctttttaaccactaggtgtcagaataactaatagagtaagaagtcactaccccaaggatggcaccaagatattcacgagggat

SEQ ID NO: 617301 - DNA, 584 bp, Homo sapiens
taatatttagtaaaaagatgtctgggttttattctaagggattattcttagaaataggtayatttgtatattctaactcatgtgacaacataaaatctgtgcttagttttaactataatgagattcttggttcttttcaaagccattaatgatatgattctatttttctctggcactacctaatatatatatttatatatttataaaattaaaaaaatatatttttctttttctttgagccatgactgatacaatgagcagttagagacctgaatcaaactttaaactggaattaaccatactaattttctgaatcttgaactgaactgaaatattaatcttgtatcaaattaaaaacatcagttttcttcctgaaaaaagaaccagtttgagccagaactgagcctgtttatgttttttccctcaaatcattgaattggaagactgctgaaatgtcagaatataccttgaacaaaagttgtgcaaaattgtatcattttggtctgaatccttgatgaaatgggaattctatctcaataggcttgtttttttctgtctttcctttatcttttaggtgtaacaag

SEQ ID NO: 617302 - DNA, 532 bp, Homo sapiens
gagaggaccaaagatgcaccctcagggagcgccagcatttgggatgtgggctggrgaggagttgcgtataaaggccaaggagcagaagtcatcaaaaaggtgggagggatatcaggagtaacaagagtccccaaggccaaaggaaaacagaatgccaaagagtatctatgtaaacaacagacagggtctcactctgttgcccaagctggagtgcactgatgcaatcatgcttcactgcagcctcaaactcctgggctcaagcaatcctcctgcatcagcctcccaagtagctgggaccacagatgcacattaccaaaccaggctaatttttatattttttgtagagacaggggtcttgctatgttgcccaggctggtttctaactcttggcctcaagcagtcctccctcttcggcctcccaaagtgctaggattacaggtgtgagccaccacacctagggttcaaattttgtttctaaaggctgaaaaaaaggggttactggatttgacaataaaaatatcatttgtgagtt

SEQ ID NO: 617303 - DNA, 532 bp, Homo sapiens
gagaggaccaaagatgcaccctcagggagcgccagcatttgggatgtgggctggagaggagttgcgtataaaggccaaggagcagaagtcatcaaaaaggtgggagggatatcaggagtaacaagagtccccaaggccaaaggaaaacagaatgccaaagagtatctatgtaaacaacagacagggtctcactctgttgcccaagctggagtgcactgatgcaatcatgcttcactgcagcctcaaactcctgggctcaagcaatcctcctgcatcagcctcccaagtagctgggaccacagatgcacattaccaaaccaggctaatttttatattttttgtagagacaggggtcttgctatgttgcccaggctggtttctaactcttggcctcaagcagtcctccctcttcggcctcccaaagtgctaggattacaggtgtgagccaccacacctagggttcaaatttygtttctaaaggctgaaaaaaaggggttactggatttgacaataaaaatatcatttgtgagtt

SEQ ID NO: 617304 - DNA, 532 bp, Homo sapiens
gagaggaccaaagatgcaccctcagggagcgccagcatttgggatgtgggctggagaggagttgcgtataaaggccaaggagcagaagtcatcaaaaaggtgggagggatatcaggagtaacaagagtccccaaggccaaaggaaaacagaatgccaaagagtatctatgtaaacaacagacagggtctcactctgttgcccaagctggagtgcactgatgcaatcatgcttcactgcagcctcaaactcctgggctcaagcaatcctcctgcatcagcctcccaagtagctgggaccacagatgcacattaccaaaccaggctaatttttatattttttgtagagacaggggtcttgctatgttgcccaggctggtttctaactcttggcctcaagcagtcctccctcttcggcctcccaaagtgctaggattacaggtgtgagccaccacacctagggttcaaattttgtttctaaaggctgaaaaaaaggggttactggrtttgacaataaaaatatcatttgtgagtt

SEQ ID NO: 617305 - DNA, 418 bp, Homo sapiens
gaattctctatatatggacataatccttcaaaggtgatggaggaatagactttttcaaaccgtaattaagaggatttggtgccattagttcttcccttccaagaaatgttaaaaggagttattcagagtgaaggaaactgatatgtattagtatgattgatatgctaagagaggagagaaaattatataaaatkctcagttgaaaccataaaaggcagaaatacagtggaagacagtaaaaaagattaaaggcaacaaatagaaaacaataaacatggtagacattattccagttatatcaacagtaactttaaatatcagtagtctaaagataccaattaaaagagactgttagagtggatttaaaaaaaataaataaatgaaacaagactaggccaggcacggtggctcacgcctg

SEQ ID NO: 617306 - DNA, 606 bp, Homo sapiens
aaactatacaaattttaataaaattatatcagcctggactgaaaaaaaaaactaaggaaagagatagctcaaaatgaaaagatgcctcaagacygccaaacttctatggggaggaagtaagccagaaaagaaactcatttcttttgggtcatttctcttggaaaaagaaggatatctcagagaacagagcctaaagcacagagggcagaggtaagaggcacagagaatcagttccagggagtagaactgagccatcatcagtaaactagctacatgtaccttactggatttcaaaattgctatggaccagtaacttctgtgtaccacccattttcaacctttttgagtaggaatgtctattgcaggtttcctatgcttgccttatcgttgtatattgggtgtgtgtaggccagaaaacacacctctttagttcacacatcttcagataaagaggcgttgcacccaagagaccccttctgcacctggattgatttggatgatgagattctgtacatgatatcataatgagacaagaccttggatgctttggaggggataattatatttttcatgtagtaaggacatggcccattagagaccagagag

SEQ ID NO: 617307 - DNA, 606 bp, Homo sapiens
aaactatacaaattttaataaaattatatcagcctggactgaaaaaaaaaactaaggaaagagatagctcaaaatgaaaagatgcctcaagaccgccaaacttctatggggaggaagtaagccagaaaagaaactcatttcttttgggtcatttctcttggaaaaagaaggatatctcagagaacagagcctaaagcacagagggcagaggtaagaggcacagagaatcagttccagggagtagaactgagccatcatcagtaaactagctacatgtaccttrctggatttcaaaattgctatggaccagtaacttctgtgtaccacccattttcaacctttttgagtaggaatgtctattgcaggtttcctatgcttgccttatcgttgtatattgggtgtgtgtaggccagaaaacacacctctttagttcacacatcttcagataaagaggcgttgcacccaagagaccccttctgcacctggattgatttggatgatgagattctgtacatgatatcataatgagacaagaccttggatgctttggaggggataattatatttttcatgtagtaaggacatggcccattagagaccagagag

SEQ ID NO: 617308 - DNA, 629 bp, Homo sapiens
  misc_feature 112: n = A,T,C or G
agtgatctcatcacagcctcctgagtagctgggactacaggcatgcaccaccatacctggttaataaaaaaaaaattgtatagacagggctatgttgccttagcttggtctnaaattgctgggctgagcaatcctcctgcctcagcctcccaaagtgctgagattacaggcagaatccacctcttgatgcaagagaaaggtgtgtacagggaggtgagaaattgttggtggctagctttaaagacactcttccaacatgaatagttcttattacggtacctttatcttcactgaaggatttaaytcattccaaaatgcttggcaaattcctggttacctgctttactcataaacaaatttgaccacatgctacagtctctctttttcttaagctactgtgctttctccttgctagctgcctgcctttgagtctgcagatcaagtcctttgcctgctaaaacaattggagtggggaggtctttacaaccccttttgacagggaacctgtttggagtctcatatggagaaagaaatccctattgtgcagaaacatggatacttcctatgaaatattttctacaggaatatcacataggacattagggtttcatcagttaatctgtgtatca

SEQ ID NO: 617309 - DNA, 632 bp, Homo sapiens
ctcataatttatcttaataaatgaaccaagtgctgtttttggagtggtaaaatctataaaactcccatggaaaagaccaacaaggagacatgggctctgcattatcgttaacgaacagaaacaagtgaagaaaataatggaaaataaatactactatgatgggcttaataaatgtgaaataaaagcagctgtatcaaaggaacagtatcagcaacaatagtgagggcctaaaggaggattttcaggaaggtcttgggtaataagtggtaactagcagaatgattatgggaaagtatctaggccaggtggttatccaaacagctgcaaaccatacaaaatratttcatttacttcttatctgcaacaacaggttgtaagacagtactttccaatttgaagaatcatttgagagtggctcctgtcacctgttaatagcagttaaactaactcttttgtatcaattagctaaatggaggcatgatgttgggtccctctaatgttaagttctgagttctcatttttaacagttgctttcattgttatatttttagttgctatgctgcaaaatcaacttgtcttttatgccccttctcctagtattgcagagcaattcttatgttaaaagcctggtg

SEQ ID NO: 617310 - DNA, 632 bp, Homo sapiens
ctcataatttatcttaataaatgaaccaagtgctgtttttggagtggtaaaatctataaaactcccatggaaaagaccaacaaggagacatgggctctgcattatcgttaacgaacagaaacaagtgaagaaaataatggaaaataaatactactatgatgggcttaataaatgtgaaataaaagcagctgtatcaaaggaacagtatcagcaacaatagtgagggcctaaaggaggattttcaggaaggtcttgggtaataagtggtaactagcagaatgattatgggaaagtatctaggccaggtggttatccaaacagctgcaaaccatacaaaatgatttcatttacttcttatctgcaacaacaggttgtaagacagtactttccaatttgaagaatcatttgagagtggctcctgtcacctgttaatagcagttaaactaamtcttttgtatcaattagctaaatggaggcatgatgttgggtccctctaatgttaagttctgagttctcatttttaacagttgctttcattgttatatttttagttgctatgctgcaaaatcaacttgtcttttatgccccttctcctagtattgcagagcaattcttatgttaaaagcctggtg

SEQ ID NO: 617311 - DNA, 632 bp, Homo sapiens
ctcataatttatcttaataaatgaaccaagtgctgtttttggagtggtaaaatctataaaactcccatggaaaagaccaacaaggagacatgggctctgcattatcgttaacgaacagaaacaagtgaagaaaataatggaaaataaatactactatgatgggcttaataaatgtgaaataaaagcagctgtatcaaaggaacagtatcagcaacaatagtgagggcctaaaggaggattttcaggaaggtcttgggtaataagtggtaactagcagaatgattatgggaaagtatctaggccaggtggttatccaaacagctgcaaaccatacaaaatgatttcatttacttcttatctgcaacaacaggttgtaagacagtactttccaatttgaagaatcatttgagagtggctcctgtcacctgttaatagcagttaaactaactcttttgtatcaattagctaaatggaggcatgatgttgggtccctctaatgttaagttctgagttctcatttttaacagttgctttcattgttatatttttagttgcyatgctgcaaaatcaacttgtcttttatgccccttctcctagtattgcagagcaattcttatgttaaaagcctggtg

SEQ ID NO: 617312 - DNA, 477 bp, Homo sapiens
ccaggaaagcaaaccttagcattcataaaacattcagtatagttcactattttaacacttgatcaagaaaaatacacatgactgtatcaatcattatcatatcatgtatcatttaatcaatatgattatatatcaacagatgaataagtaaaaccatataatgatcttaatggatgcacaaaaatcacttgacaaaacttaatttccactcataaaaactgtcaaaaacactaagaataggccaggtgtggtggcttatgcctgtaatcccagcactttgggagtccgaggcaggtggatcacgaggtcaggagatcgagaccatcctggccaacatggkgaaatcccgtctctattaaaaatacaaaataaaatagctgggcgtggtggtgtgtgcctctagtcccagctactcgggaagctgagggaggggaatcacttgaacctgggtggcggagtttgcagtgagccgagatc

SEQ ID NO: 617313 - DNA, 595 bp, Homo sapiens
aaaaaaaaaaaaacactgctatgggtttctttttgctacaaagatggggaggttgactgtggcagtgggaattcaatactgaagatgtcatcttcacagtacaaaatcagaccatccataaatccacacacagttaaaacaagtctttstttgtttgtttgtttgtttgtttttgtttttgagacggagtctcgcactgtcgcccgggctggagtgcagtggcgtgatctgggctcactgcaagctccgcctccctggttcacgccattctcctgcctcagcctcctgagtagctgggactacagaagcccgccaccacgcccggctaattttttgtattttttagtagagattgggtttcaccgtgttcgccaggatggtctcgatctcctgacctcatgatccacccgcctcggtctcccaaaatgctgggattacaggcgtgagccaccgcccccggccctaaagcaagtcttattgtttgttggtcaagaaagtcttcagctaggtaaggatctagcacagtggagttactaacattctggacggtctaaaattcatcgttacctagcttcagccgggcagacccagttgc

SEQ ID NO: 617314 - DNA, 498 bp, Homo sapiens
tgtttgcaaatgccaaccaggtaattattttaaaaataataagcatactgcatatataataatatatacgtttatgtaaatgtatatggacatgtatgtataatacaattttgacaatccactccaccaatactattgttgactactaatcaagttttaagcaatgatcattctttaaaaacatgaaatgaatgttgtatgatactagaaagcaagcacttaggctttcatcaggaaatcttaatgtttagagtgtaataccttattgatggattttctaaacatatgtaagcctcatacttctgatctttgtatcaattatgcctggcacacagcaagtactttatcaatgttagctcttattagtattgacattattatttcttccmacaattgtcagcacagagatggacgagctgaataaacttgttttcttcaaggaataattgctgctattgtctaaatatttgtgtctccctgaaattcatgtgttgaacc

SEQ ID NO: 617315 - DNA, 538 bp, Homo sapiens
aaccagtttatggtatctttttttgcagtagcctgaacagactaagacttagtgccttcaattttttcttttttttttttaaccaaaacttcttttcttcacatggttcttacatgataacaaatggaactgtgcattttacacctgctagcttattctagaaataattaaattctggcaaggcagtgggagaaaatataacttgcatctattgcgttttttatgataaaaaccaatctctgtttctctgctttttctggcattgccactgagaaacggcagggttttatacttctcttttggcttaggagtctttttttttattcatacagaaaccacctgctttaagcttttccccccttaattaaaaataaatgaaactaagaaaagagwtaatgcgtaggaaggaagacctgttggttgttgctctccatgcagctcagggatactgacgtacaacacagcatatcttgtttgctgcttttgatatattttggatgttagatggtgtccttgtatgatagtgtttgatttggtt

SEQ ID NO: 617316 - DNA, 538 bp, Homo sapiens
aaccagtttatggtatctttttttgcagtagcctgaacagactaagacttagtgccttcaattttttcttttttttttttaaccaaaacttcttttcttcacatggttcttacatgataacaaatggaactgtgcattttacacctgctagcttattctagaaataattaaattctggcaaggcagtgggagaaaatataacttgcatctattgcgttttttatgataaaaaccaatctctgtttctctgctttttctggcattgccactgagaaacggcagggttttatacttctcttttggcttaggagtctttttttttattcatacagaaaccacctgctttaagcttttccccccttaattaaaaataaatgaaactaagaaaagagataatgcgtaggaaggaagacctgttggttgttgctctccatgcagctcagggatactgacgtacaacacagcatatcttgyttgctgcttttgatatattttggatgttagatggtgtccttgtatgatagtgtttgatttggtt

SEQ ID NO: 617317 - DNA, 567 bp, Homo sapiens
acaggtaggaaagcttgcaagttactttcaaggagtgtgaatggaaagatgtgaggttatgttattttttaatatatcctttatgacacatattttagcacttaatatgtgtatattgttgaacttagattctaacaactatttaagattttttttatcctaagaaactcagattcgtagagaagagatacaacatgcaaaacaacaattataacacagaaaagaaatgggtaagcagcataaaatgtaaacacataacattatacagattcagagaatgaggacattatttccaatggaggaacgtaagatgtttcatgaaataaatgtcttttcttatgagcagtcagttgaacattctgtgacttaagaaaagcttccctaaatgttatagatatttggtggtaagaaaaagaaagttttaaatttctacttgccagttctcaaaaatcagttgagtattgggatcctcacatcgatgacccacraatttacctatagtgtctgctaattccatgtattcttaccaaaatagtaggaaagatcaaacaatttgacttctgaaat

SEQ ID NO: 617318 - DNA, 621 bp, Homo sapiens
tagagaaagattatttactgaattctgttgatgcattgttttattttgaaaactcgttctctacgtttcaggccaaaataaattgtgttaggaataaccacatagaattgcaaaacaaaacattaaatgatctgaataaaagtttcaacatttattttagatacagtgggtatgtgtgcaggttcgttacatggtgtattgtgtgatgctgaggtttaaggtacagatcccatcatccaagtagtgagcatagtatccaataggtaggtatttcaacccctacctgctccctccccaacttctactagtccaaagtgtctgctggtcctatgtttatgtccataggtactcactgtttagctcctacttacacatgagaacatctagtatttggtttcctattcctgtggtaattcacttaggataagggcctcaatctgtatccytattgctgccaaggacatgattttgttctttttatggctgtgtagtattcaatgatgtatacgcaccaccttttatacagtccatcattgactgacacctgggttggttccgtgtctttgctgttatgaatagtgcagtaatgaacatgcaaatgtatgtgtctttttagtaaaa

SEQ ID NO: 617319 - DNA, 324 bp, Homo sapiens
gagccactcccatccacccctgtagttacagctttccacctgatttcaaataaccctcctttcaccacttcacaattacttgcaggctgaaaccttccaataacctctccctaaagcaaacttcacatctttctcaaggtaaaatacatatttcatgtatttttttayatatttatcaattccttaatgtatatgcaatgcacttttgaccttatcagtttatcattttttcaaatgtgtcccttatgaagttgttgaatgttatacacttcacctcatctccaccttaacattcacgcttttcattgtgtgattttgcatagc

SEQ ID NO: 617320 - DNA, 382 bp, Homo sapiens
cttcttatattttttaaaagataggattgattgccttttaatcatttcatcacttatgtataaatgtaatacatatatgtgracaaatatatgtatgagtataattctttagtttgatgtatgtttggaggctacttctcccccatctaagtcttatttttttaacttccatttttaatgaagagagtatcttaatttttataaagccttctttattgattttttaaaaaaattaatggctacgctatttgtgacctaagaacgttcccaaccctcaagacatgaaggcatttttattgtcttttccattaaaaaatacatttgggtctattaattttgaattcaattttacctatgatgtgaggattcaaaattcattttt

SEQ ID NO: 617321 - DNA, 382 bp, Homo sapiens
cttcttatattttttaaaagataggattgattgccttttaatcatttcatcacttatgtataaatgtaatacatatatgtgaacaaatatatgtatgagtataattctttagtttgatgtatgtttggaggctacttctcccccatctaagtcttatttttttaacttccatttttaatgaagagagtatcttaatttttataaagccttctttattgattttttwaaaaaattaatggctacgctatttgtgacctaagaacgttcccaaccctcaagacatgaaggcatttttattgtcttttccattaaaaaatacatttgggtctattaattttgaattcaattttacctatgatgtgaggattcaaaattcattttt

SEQ ID NO: 617322 - DNA, 633 bp, Homo sapiens
agaaaacaacagatgctagtgaggctatggagaaaagggaacacttatttactggtgatgagaatataaaattagtccagtcactgtagaaagcagtgtggatatttctcagagaacatcaagtagagctaccatacaatccagcaatctcattactgggtatatatccacaagaaaataaattggtctaccaaaaagacacatggactcgtgtgtttgtcactgtgctattcacaagaacaaaaacgtgaaaccaatccaggtgcccatcaattatagattggataaagaaaatgtgatacatatacacttggaatactatgctaccatawaaaagaatgaaatcatgtcctttgcagcaagatggatggagctggaggctataaccagaagcgaattaatgcagaaacagaaaaccaaatactgcatgttctctttcaaaagggagctaaacattgaacacacattggcatatatatgagaataataaacactgtaggttactagagatatgaaggaaggtgggagggctaaaaaaatgacctatagggtactatgctcactacctgggtgacaggatccatactccaaagctcagcagcatatattcccatgtaacaaatctgcacatgt

SEQ ID NO: 617323 - DNA, 588 bp, Homo sapiens
tactgatggaagtttgggtatacacaccttagctttcttagtctatcaggtgggataattctgaagtgtgtgttttttacggttgatcagagtttcctaggggaataacctctaagcacccactttaatagttgatttaatttcattttctacattctctttcatctaccaacttactcaactttaggtgtgttttatatctcctaaaaaactacttctactcaaactttttgctcaaggtctgtttctggagactcccaactaaggtattcctgtcttggaaargttctcaagacctaccatattctccatcaatcagtcaaggttgtagggttagttgactaaatatgtgcctgagttaagcctgttattcaagaataattgctaatgctcccctaactcactctcaaaagaacaggtatgggaaaatcttctttccccacctcccaccaacccactcaataaagttgtatctctcattagacaccatcgtaaaacatagcagcatttatttttttttctgtgatactaatttttctctctgtatttgattgtaatatctacaaagatcttgtccatggtgctcat

SEQ ID NO: 617324 - DNA, 588 bp, Homo sapiens
tactgatggaagtttgggtatacacaccttagctttcttagtctatcaggtgggataattctgaagtgtgtgttttttacggttgatcagagtttcctaggggaataacctctaagcacccactttaatagttgatttaatttcattttctacattctctttcatctaccaacttactcaactttaggtgtgttttatatctcctaaaaaactacttctactcaaactttttgctcaaggtctgtttctggagactcccaactaaggtattcctgtcttggaaaagttctcaagacctaccatattctccatcaatcagtcaaggytgtagggttagttgactaaatatgtgcctgagttaagcctgttattcaagaataattgctaatgctcccctaactcactctcaaaagaacaggtatgggaaaatcttctttccccacctcccaccaacccactcaataaagttgtatctctcattagacaccatcgtaaaacatagcagcatttatttttttttctgtgatactaatttttctctctgtatttgattgtaatatctacaaagatcttgtccatggtgctcat

SEQ ID NO: 617325 - DNA, 539 bp, Homo sapiens
gttgttcataaaatagagaaaatagaagcaaacataaaagtgatgctgttaacttttcaaagaggtgaagacaaccatagacaattttccatcacatgtattttttggtgaaataaaaagaagacatattataaatttacatatttttaggtgttaactcataaaacagttaagaaacaatgctatgatcattgttttaaattccatcatctacttttattttgatgtatgcattcactatactattcattatggaccatatgatatttattattaaataaagtaagagctgtatgatagataccaataagccwatttatttgacaataagcccttttttaataattgcttatccatgacttattatatatatagaaaaattatcagtaagccagtcatatttgttcagaacaggttatgtaatgcatttgtagtattgtattgatgaccattttaaggtatacagcatgaggttataagacacatatatatagcaaacattatctttattgatatgtctgtttccctttttttctaat

SEQ ID NO: 617326 - DNA, 539 bp, Homo sapiens
gttgttcataaaatagagaaaatagaagcaaacataaaagtgatgctgttaacttttcaaagaggtgaagacaaccatagacaattttccatcacatgtattttttggtgaaataaaaagaagacatattataaatttacatatttttaggtgttaactcataaaacagttaagaaacaatgctatgatcattgttttaaattccatcatctacttttattttgatgtatgcattcactatactattcattatggaccatatgatatttattattaaataaagtaagagctgtatgatagataccaataagccaatttatttgacaataagcccttttttaataattgctyatccatgacttattatatatatagaaaaattatcagtaagccagtcatatttgttcagaacaggttatgtaatgcatttgtagtattgtattgatgaccattttaaggtatacagcatgaggttataagacacatatatatagcaaacattatctttattgatatgtctgtttccctttttttctaat

SEQ ID NO: 617327 - DNA, 588 bp, Homo sapiens
tgctagtctgaaatcaaggtgttatcagggttgattttttgctgggaactgtaagggaaagctcctttcctctctagtagcttttggtagcatcaggcattccttggcttatagatggtggtctccctgtgtccagatagtcttcccttggtgcatttctctccatttagcccaattttctgattttaattagggataccagtcagattgcattagagtccactctaataaccccatcttactttcatcggcaaagatcctatttctaaataacgttacatacgggggtactgagaattaggacttcaaatatccttttctgagagacagaattcaacccctaatgaataatatgcaatgcaaaactgtgcgaatgtatgtaaaatgcacaaacacacacacayatatgtacacacacacggaattttatacatagttcttacgaagtttgtaaataggctttgcaaacatgagagttaattgctgtgtgtagtatgtcatattttgcttacctgttctttatcgctacatgtagaggaggtttccatttacttgctatcataaatgacgatttcatgaatatggtat

SEQ ID NO: 617328 - DNA, 578 bp, Homo sapiens
aaatctggaatgttgagtgtgttgctggaaaagttttatgatggtaaagtgtcttttttcattaaattttgttataatttcaaacrtaacaggaaaattacagtaagagcaaaaaaatgcttgtatactcttcatctggactcatcaattcttaactgttagatcttctaaatcatttcttctattttcctttctttctgtatatataaggtagtgcaaagtatacacatacacacacaagtgcctacaagtttttcctgaaccatgagagaaaatgtgcagacattcagagccttacccctaaatacttcagcatttcctatgaatattcaattatataaccttggtaaattatcacaattaagatattaaactccatgtaaaacaatttgctaatccacaagctttactgaaatttcataaattatctcaataaaattatttttagctatttctccatttctacttttccccctccagaatccattcctaaattatagttagtagttgtaccttctgaacggtttatcagtctatctttcttttatgacctttactttttgatgattataaatcgt

SEQ ID NO: 617329 - DNA, 578 bp, Homo sapiens
aaatctggaatgttgagtgtgttgctggaaaagttttatgatggtaaagtgtcttttttcattaaattttgttataatttcaaacataacaggaaaattacagtaagagcaaaaaaatgcttgtatactcttcatctggactcatcaattcttaactgttagatcttctaaatcatttcttctattttcctttctttctgtatatataaggtagtgcaaagtatacacatacacacacaagtgcmtacaagtttttcctgaaccatgagagaaaatgtgcagacattcagagccttacccctaaatacttcagcatttcctatgaatattcaattatataaccttggtaaattatcacaattaagatattaaactccatgtaaaacaatttgctaatccacaagctttactgaaatttcataaattatctcaataaaattatttttagctatttctccatttctacttttccccctccagaatccattcctaaattatagttagtagttgtaccttctgaacggtttatcagtctatctttcttttatgacctttactttttgatgattataaatcgt

SEQ ID NO: 617330 - DNA, 578 bp, Homo sapiens
aaatctggaatgttgagtgtgttgctggaaaagttttatgatggtaaagtgtcttttttcattaaattttgttataatttcaaacataacaggaaaattacagtaagagcaaaaaaatgcttgtatactcttcatctggactcatcaattcttaactgttagatcttctaaatcatttcttctattttcctttctttctgtatatataaggtagtgcaaagtatacacatacacacacaagtgcctacaagtttttcctgaaccatgagagaaaatgtgcagacattcagagccttacccctaaatacttcagcatttcctawgaatattcaattatataaccttggtaaattatcacaattaagatattaaactccatgtaaaacaatttgctaatccacaagctttactgaaatttcataaattatctcaataaaattatttttagctatttctccatttctacttttccccctccagaatccattcctaaattatagttagtagttgtaccttctgaacggtttatcagtctatctttcttttatgacctttactttttgatgattataaatcgt

SEQ ID NO: 617331 - DNA, 454 bp, Homo sapiens
ttatattgctgtgtaaaaagttaccacaaatgtatcattttaaaacaggtatggcataccattgttctcagttcagggtatcaaaaggctaaaataaatgtgttgggtgggttgagttctcaatgggaggctcaaggtcttccagtgtcctaggaagagcttgcttccaaggtctttggccaaattcagttacagttgaccsttaaacaacatgggagttgtggcactgactccctgcatagtaaaaaaaaatcatatatctcttttgactcccctaaaacttaccactgatagactactcttgactgaaagccttactgataacatagatagctgattaatatggaatttgtatattatatgtattatatacagttttcttaaaataaggtaagctaaagaaaagaaaatgatattaagaaaattataaggaagagaaaatatatttactatt

SEQ ID NO: 617332 - DNA, 516 bp, Homo sapiens
actctactaaaataataattttaaaaatcctacttcacaktccataatcagtgacatgggaggtggaaaagtcttaaaatccctcaagaggaaaaactgtggccaacacaattcatagttaaaagatcaacctgatattgctcacaaagttctaagtattcttttagatgtttatgtgaatgcattaataatattctattatttgcctttgtccagttcagatagttttcttgctcttatcagcattgataagatgaagtaaatcagatgtgagagaaagcacgggaacccatcatctgtgcctcagccaccgattgttctcctctggctgtgctcatcttgccagtctgctggctcacaaaggccccagctttgatgtcagtctgactgtttgacaaagccagttgcagatgctcttcatggagacagcagattacagacaataccatgctaaagaaatgctatcgtctagccatgtatacactgaaagttatctcagtgtatacatgggatatg

SEQ ID NO: 617333 - DNA, 530 bp, Homo sapiens
caattgtgtatgatgtgaaagtcttattgattcatttttttaggtgtagctggagagactaatgatgcattgcagcagccaaatattctccactttcccccagaacactttcagcttttgaaagtgagcagcaataatataatcacactgttaactttcaaggatgcgatacaaatcttaaaaacacattttgatcttgttatccctgtgacttaggaagagattctgatttcacttttgtgaatacctatggccattaaattccattttaacaaatttagcttaaagtaatctttactactagatacatatggtttcaggttaccatgaggtacaaasttcttctctttacaatttgaaattatactatcagaattcagcaaatgactttgttgatgtcagaagaatacactttgagttttatcctcatgtttctatcgggacactgcacactggtcaagtctctctgtctcagcagccctggaaacatcaaataaaatgacatctctgtccagtcacatttttttcag

SEQ ID NO: 617334 - DNA, 432 bp, Homo sapiens
aacactccttttgtcattcagacttgagagcttcccacattccaagtttatttatttaccttcattagacacagtctccaaaacccttttcttgttcaaattaaacagctatggttttaattctggtttggaaaagtacgaatagtctactatattttgactttcattttgctttggmcaattacaacaataactcttaaatttactgagtgcatatctgtcaccattcaatatatgcctatcatttcctgcttgatgtaaaaccaataaaatgggataattcaaagaagttccttaaaaacaaggcaagtattcggttagatctgttctcaaatgtgattcatcaagttcaaacaggccatcaagttcagagggcctattcagtagcagaattctccagaaaatgcagattagcccctagtcactagcaaa

SEQ ID NO: 617335 - DNA, 556 bp, Homo sapiens
  misc_feature 254, 255, 256, 257, 258, 259, 260, 261, 262, 263, 264, 265,266, 267, 268, 269, 270, 271, 272, 273, 274, 275, 276, 277,278, 279, 280, 281, 282, 283, 284, 285, 286, 287, 288, 289,290, 291, 292, 293, 294, 295, 296, 297, 298, 299, 300: n = A,T,C or G
  misc_feature 301, 302, 303, 304, 305, 306, 307, 308, 309, 310, 311, 312,313, 314, 315, 316, 317, 318, 319, 320, 321, 322, 323, 324,325, 326, 327, 328, 329, 330, 331, 332, 333, 334, 335, 336,337, 338, 339, 340, 341, 342, 343, 344, 345, 346, 347: n = A,T,C or G
  misc_feature 348, 349, 350, 351, 352, 353: n = A,T,C or G
ttctgctgggtttatgaatgtagcacaacaggacctcagagtggaagggatcaggaccagagtggacagcgtgacaagaaggtggtcaataaatatcaaaaagtttctcacaaggagtcacacttgtgttgggcccagaaaatgaataggatttygccccacacagcggataaagttgcagagcattcttttggagtagcaggtctcaggaatactaaggaaataaagaaggtgtgacagaaatgcaactagannnnnnnnnnnnnnnnnnnnnnnnnnnnnnnnnnnnnnnnnnnnnnnnnnnnnnnnnnnnnnnnnnnnnnnnnnnnnnnnnnnnnnnnnnnnnnnnnnnnaaaaaggagcatgaggtgaaaaagagatctgacttaaaaacataaacttcttggaaaggctactgtgatggcttcatataggggttcttgggaaaaaatataagacagtctacaaaaagatctacctaggacttttaaaagtttgaaaacagctataaattttggagttgcatattcttatagaaaataaaatgtagcctaac

SEQ ID NO: 617336 - DNA, 610 bp, Homo sapiens
tatgcaaggcttgaacacagtcttcagttacttttttgggaaagctgccccagtttagttttgagtcatatttctacatctgtcactatgttctaatcattacccaaacaggtatcagacatgaccacgtaggcaaaataaataaataaataataaaatttaaaaaacccaattttggctttaaagtgtctcagcatggataatgtggatgaatggatacatgttctaatctacttatatctacttatttctgtttcaattttaaaaagtgatagagcactcatgaaggcataagtattgcctaacaagttaactggagcctcagttaatatgtgctacattagctgaatgaatgagtgaatgactaaaatttgacagaaaaaagattgtgagatctgtgggattctttcctttccttttctttttctttctttctttctttttctttttytttttttttttttgagatggagtttcactcttgttgcccaggttggagtgcaatggcgtgatctcggctcaccacaacctccgcctcctgggctcaagtcattctcctgcctcagcctcctaagtagctgagattatagtcatgcaccaccacgcccag

SEQ ID NO: 617337 - DNA, 462 bp, Homo sapiens
catggcaataccataaattagaaatgtaaggctatgcatgaaacaatccactgaatttcctcttaggtcagaggtttctgtgtaaaatgtacagctataggtgtctgactttctttttcttactttgatttatgcctttctacaaatgaagcgaaggatgaaacacaggctacckctgactggtgcacatctaagttttataaagacccttttcagtctgaagctactagaatttttttattcccctgaaaagaaatggacttggcttaccaaaataccacccttggaagagccacagaaatgcagtactaagaacagttttttttttttttttgagatggagtctcgctctgttgcccaggctggagtgcagtggcatgatttcatctcactgtaatctctgcctcccaggttcaagcaattctcctcctcagcctcccaagtagctgggattacaggtgc

SEQ ID NO: 617338 - DNA, 521 bp, Homo sapiens
aatggtttggagtacacatagggtgcattcgttatgctcagctgcttatttctggtacagataataattttcatcccattgaaaaatctaaatttgtaaaatatttggtaagcacttaaaaatagagatctgaatgaaatggtggcttctagcatctataatgagtaagaatactttgaaaattttgtcaaattagacacagcaagttttcagagaaaggaatgatggaggctttcatgattaggtgatttgcctcttaaatttaataggctttgaaacacagttaaaggcctcagaaaactccgtgtgatccagcaaccttatgttaacctgtgattaaatcacattcctgaaaacacctcagaaaatgtcttttgatgagaaacaattcaattcatactctgaaagatgagctccatctcataaaatcatttttwcaaaatcctcaaaatatattgccaaggtgaacataaattttaacaatgtttctcttttgtgatccagaattatagataatatgc

SEQ ID NO: 617339 - DNA, 621 bp, Homo sapiens
gggacagctgccctgtataatgcgagacaaagcaaatcatcactttctaaacatacaagtcatgctttcttagtcactggatcccactgcagatggaaggttgagaaacgtggaaaagaaaaacacgaaccgagatacgaagggtgataccgagctcccgcgatgagaagcagcttgcaaggcttccagggcacagcacctgccgcagggacccaggctgcaacaaaaagaacaacgtcaactccatctgacacgtctccattcatcattccaaacgacacacccagcagcagaaagaaatacctaagtctagttcgaaaatatttgaacagtaagaacctgtgcaacagattcgccataggataggaggacttgacctggatcccaaatggcagtggagggaatggcrtgcaaggacctcatggaggttcagtgagtctcttctgcagattcatgtggtacataaataaacaggcataaggaacatttccatagcaactgtgtttcttaggaagaggaagagcacaacaatgcttgaatgtcaaactctcaaagaaaactattatcagggaaaaaaaagtatatatatatatatatatatatatatatatatgcaacctt

SEQ ID NO: 617340 - DNA, 647 bp, Homo sapiens
aagctaggactttcattcctgctggctgttaatcagccccagcaccacagcaggggacctagttttctgcctccatccgacagtgataggatttcctgcctagtatccattagggtgatgtcagaggagaatcagaactttaaccacygtgtagggataatgaggtcacttccactgtgatgacagtgagatcacatggggagctagagtgcccacctgcccccagtaacaagacgtccgcctcagtatcaatggacactgagtagggaacctagacatccaactacacgtggctgtaatgagcggtgcttccccttcctttgccagcatagtgtccaaaagcagctgtcaagtcagaagcattaaatacgtctagaatctcatgacatcaaataaaaatgttcagccttcaataaaaaattactttccatgccaagaactaggatgaatttaagctgaatgaaaaagacaagcacgagcatactttggtatgttagaatcacctggcaaaaattacaaagtatccgtgacagaaactgtgcaggccagcaggaaatagcaccatatttttcagatgagcaaagaaatatcaatctagaatcccactaaaaatataaccttcaaaaattaagtggaaatcagggcac

SEQ ID NO: 617341 - DNA, 576 bp, Homo sapiens
tttgttaaaccaaataaaaatataaaccattgtaagaatatgttttcaataattaaaaactttaagaaacaaagcctcaayatacatagatatactgtcaacatgcttagcaaactaatcacattattttattaagtagagactatgagggtcttacaccagctactagagtatcacgtcccctaggtacaattccaaattccaggaagtttgaaaccaatttctttttcttaattcatctggcaccttgtttaaactgaaataaattacagtcacgtgctgtgtaacatttctgtccactctggactacatacatgacggtggtcccttcgaattacagtaacatagttttactttcttatgtttaagtatgtttagatacacaaataccactgcattacagctggctacagtgttcagtccagcgcatcctatataggtttagagcctgggagcaacaggccatatcatacagcctaggtttgttggggaccgcaccatctacatctgtgtaaattcactctgtgatgctcacatcatgatgaaactgcctggcaatgcatttctcaggaggta

SEQ ID NO: 617342 - DNA, 576 bp, Homo sapiens
tttgttaaaccaaataaaaatataaaccattgtaagaatatgttttcaataattaaaaactttaagaaacaaagcctcaacatacatagatatactgtcaacatgcttagcaaactaatcacattattttattaagtagagactatgagggtcttacaccagctactagagtatcacgtcccctaggtacaattccaaattccaggaagtttgaaaccaatttctttttcttaattcatctggcaccttgtttaaactgaaataaattacagtcacgtgctgtgtaacatttctgtccactctggactacatacatgacggtggtcccttcgaattacagtaacatagttttactttcttatgtttaagtatgtttagatacacaaataccactgcattacagctggctacagtgttcagtccagcgcatcctatataggtttagagcctgggagcaacaggccatatcatacagcctaggtttgttggggacmgcaccatctacatctgtgtaaattcactctgtgatgctcacatcatgatgaaactgcctggcaatgcatttctcaggaggta

SEQ ID NO: 617343 - DNA, 535 bp, Homo sapiens
ttaattttttttttgtttttccatgtaatgatccctcaaaatttgtgcaggcagcactgcttctattttgattgaacgatacaaagcactttgactcttcatgtcttcccaactcagaggaagtggcagagctgaaaaggaaacatgcacagtttgtgattacctgagtgtgttacaccaccaccttgctttacttcttctcatcctccgctctacccattgtcagcacacacttggaggactttttctgaatcagtgaatcaatgctagtgggttggaggagggaggggcttaggtgggtgatgtaattcaggaaggaagagattttggttttacatgactgatcacttttccatacttcagcccacagcatgatgaagaggaaatccatgagctgggtgtattaaaaggtaactttcactggaatcataaagayggtttgaagacagtttcttgagccagggccttgggcaggctccagaggcagcacatagcaggctgggggctcacagcaggtcaggagcaggatgcgtgt

SEQ ID NO: 617344 - DNA, 603 bp, Homo sapiens
gcccttttttctctttttaaattaatatcgttctgagcccagtgctgagctcactcaagtcagaagttatggaaaagcataatgcagcttttattagaagacatgtttctatcgagttcatttaaatgaagcagctgatcatttaaaacacgggaaaaatagatcatttagaattttaaaaagaatatgctgcactcaaatgttttctttgatcttaacagtcttttaaatgtaggaacatgatgttaggctggcacttaaaatcgaaagctgtcatttttcgagtgacaccrcccacccacccccaccgacccccatatctggagttgctcatcctcatcactttccttacaactgccatttgctttccaaacaaagccatgtttcttgtaaaaatacttcctgttaattgaggaactcttggcaaaacaaagaaagttaaaaattacttttcttggtttcccattgttctacagcaagtaaatgagagttaatactggaacccagcttccccgaatttcagccacgggccttttctctccatgtcgtgctcctgttctaattattttgatagcatggtggcacagtgatgtcactgagaat

SEQ ID NO: 617345 - DNA, 596 bp, Homo sapiens
ttaaaccacagtgaaatatcatctcacaccagacagaatggctattatgaaaaagtcaaaaaataacatgctggctaggttgtggagaaaaaggaatgctttactccgttgggargaatgtaaattagttcaaccattgtggaagactctggcgattcctaaagacctaaagaaagaaataccatttgactcagcaatcccattgctgggtgtattagttctgttttcatgctgctgataaagacatagccaagattgggcaatttacaaaagaaagagatttaatagacttaccattccacatggctggtgaggcctcacaatcatggtggaaggcaaggaggagcaagtcacatcttacatggatggtggcaggcaaagagagagcttgtgcagagaaactcccattttaaaaaccatcagatctcgtgagacttattcactagcacaagaacagcacagaaaagacccacccccatgattcaattacctcccaccaggtccctcccccaacatgtgggaactcaagaagagatttgggtggggacacagccaaaccatatcactggtatatacccaaaggaatataagtcatt

SEQ ID NO: 617346 - DNA, 576 bp, Homo sapiens
cgctgctgaatgacaatggcaacggcaaaaatagtactgtggctttaagagccttgctgttctctcagatttctggtccatttttctttaacagtaagctagaatggtcaagtgctggttctacctacaagacaaacttcctagacaatattctagacaattttgtgatgataggcacaggtttaaaaaaagatgctgctataattacctgtacacacacccaaacatatgtgaattaagaccatctacatattaagagtcacctaaaccactctcaaaattttacatttagtggaaaacctgctaaaggctcttctctatctcaggctgcatcaaagcacacacagtgtcatgacagacagtgatggttcttggttgcaagggaaagggagtcaatttcatttttcaattgagtggcaactgaggcatcacatcaggctccagcaaggcagagagaggagcccatagagctagctgcgctggcttcttcttggcctttcctttctaaaaagcatcaycatcacccaaagtatgcttctgatctatttgcattaccatcctgaccattttgattgc

SEQ ID NO: 617347 - DNA, 539 bp, Homo sapiens
gaattcattattgatgtattcagggattcagttgcttcctgattcagtcttrggagggtgttatgtgtccaggactttatccatttattctagattttctagtttatgtgcatagaggtgtttatcgtattctctgatggttatctgtatttctgtgggatcactggcgataccccatcattatcatttctgattgtgtctatttgattcgtctctcctttattagtctagttactggcctatctcatttattatttttttccaaaaagccagctcctggattcattgattttttttaaaagggttttttgtgtgtctgtctccttcatttcagctctgatcttgattctttcttgtcttctgctagctttggtgtttgttttctcttagttctgtagttatttttgttgagatattaggttgttaacctgagatctttctaactttttgatgtgagcatttagtgccataagtttccctcttaacactgttagctgcatcccagagattctggtatgttgtctctttgttctcattag

SEQ ID NO: 617348 - DNA, 502 bp, Homo sapiens
tgtcatttttttcctaattgtataagcaatacatggccacttcccaaaactgaaaaaacaaggaaaatcacaaagcaaagaagattcaagctgtcgataatttcgcctatagtccaaactacttagaggctgargcaggaggatagcttgaacccaggagttcaaggctacagtgcgctatggtagtgccactgtactccagcctgggcaaccagcaagaccctctctctgaaattataataataatactaacaacagattcacatttcaaagtactcattgttaacattgtagagaatgcatttccatatttttccagttcttaataaaagatataaatataaataatgtacagctataagtaaataatataaaatgtaaataaagtaaatataaaaccctataatatgatttcattttcttttattatagtctctaattactggtcaagtatatcttttcaattttttctctgtttttgttttttgtttatttttgtttg

SEQ ID NO: 617349 - DNA, 597 bp, Homo sapiens
tcttgctgaccactatctgcagtgcctaaagcagttcctgagacaccacaggaactcagaaacatgtgttggatgaataaattttcagcataggctctggctgagaaaacctcacagtgtggaaagggcagcactgactcgggtttgctgtgggtcaagggcttcagggaggaatcacaggcagatcatgaccttccagctccacaggtggctcaaagcacagggggaagagcttgttagcattgaactcacttcatgtgtctccacaatctctcaggtctctggtggacagctgagcaagccagaagcttccatcagggcagatcatgctgggcatcctccccctgtgggttcctcataggacacaccctggacttccctggagaagcccagaagtgacacagaagagcagggggaatccttctcagaaggaaaggtgaaaaacagaaagaaccaattacatgttttcccagcgacagagactgaaagcacaagtcttgggcatgtgccatgaaacaccttctgtctagctggaagccagatctggcctcaygaatccacttctgcttagtatttctttgttgaaaagaaaaaaga

SEQ ID NO: 617350 - DNA, 597 bp, Homo sapiens
tcttgctgaccactatctgcagtgcctaaagcagttcctgagacaccacaggaactcagaaacatgtgttggatgaataaattttcagcataggctctggctgagaaaacctcacagtgtggaaagggcagcactgactcgggtttgctgtgggtcaagggcttcagggaggaatcacaggcagatcatgaccttccagctccacaggtggctcaaagcacagggggaagagcttgttagcattgaactcacttcatgtgtctccacaatctctcaggtctctggtggacagctgagcaagccagaagcttccatcagggcagatcatgctgggcatcctccccctgtgggttcctcataggacacaccctggacttccctggagaagcccagaagtgacacagaagagcagggggaatccttctcagaaggaaaggtgaaaaacagaaagaaccaattacatgttttcccagcgacagagactgaaagcacaagtcttgggcatgtgccatgaaacaccttctgtctagctggaagccagatctggcctcackaatccacttctgcttagtatttctttgttgaaaagaaaaaaga

SEQ ID NO: 617351 - DNA, 594 bp, Homo sapiens
tgaaattatcagaaattaaaaattgaaaaaaaaaatascatttcaaccttaggcaccttgagccctttagccctggcatgaagtgaaaacttcgtagatgtttttgactaactgactgattggctaaccaacaaggaaaactggaagatccagtgacaattgcacttctgtgaatggagacgttttatatacattaagcctgttactgatcagaagaaaacttttgcaaccgatttatccttaaaaacatcattttctgtaaggatggggaagaagccccagctcagcagcctggttggctcttccatgtcccaaatgacataggcatccttcagctagattccccctagtaaataagttccaccagcccacgcaggcaccactcccaagaagcaggctgcaaacatgagtctcttccacaggtaaggctctaatctgcgcaccgtgtactgctcctgtctccctcatcctcagactgctgactccctctctgccacatcattgccagctctttacatttggctacccttcccatttcctttaggctttggggatttggctttctattcagatcggactatggtttgatataat

SEQ ID NO: 617352 - DNA, 594 bp, Homo sapiens
tgaaattatcagaaattaaaaattgaaaaaaaaaataccatttcaaccttaggcaccttgagccctttagccctggcatgaagtgaaaacttcgtagatgtttttgactaactgactgattggctaaccaacaaggaaaactggaagatccagtgacaattgcacttctgtgaatggagacrttttatatacattaagcctgttactgatcagaagaaaacttttgcaaccgatttatccttaaaaacatcattttctgtaaggatggggaagaagccccagctcagcagcctggttggctcttccatgtcccaaatgacataggcatccttcagctagattccccctagtaaataagttccaccagcccacgcaggcaccactcccaagaagcaggctgcaaacatgagtctcttccacaggtaaggctctaatctgcgcaccgtgtactgctcctgtctccctcatcctcagactgctgactccctctctgccacatcattgccagctctttacatttggctacccttcccatttcctttaggctttggggatttggctttctattcagatcggactatggtttgatataat

SEQ ID NO: 617353 - DNA, 297 bp, Homo sapiens
aagaagaagagaggaaaacagggggtcagctatgtctccaccaatgacaggaaagaatgccaaattcccaagaagcatgtgaatgctctgggaagtgcaaataaaataaaatctcaagtcacttttaaaggatcccgaacaagatggtgtcctgccaaaatgcaagatcccagaattgtttcgcctcatagggacggaaaagagtcacaaaggaatgagtyacattacatgtcctcatacgggagtctccaaagaacccacaaaattatgttttggaaaaaatgttctgcactcagg

SEQ ID NO: 617354 - DNA, 332 bp, Homo sapiens
gaaggacctgttgcataacatcaagtataccaacatctgcacatagtatgtattggtccattttcatgctgctgataaagacatacctgagactgggcaattcacaaaagaaagaggtttattgaacttacatatggctggggagayctcacaatcatggcagaagtcaaagaggagcaagtcacctcttatgtggatggcagcaggtaaagagagatggcttgtgtagggaaactcccatttttaaaaccatcagatctcatgggacccattcactatcacaagaacagtgcaggaaagaccagcccccataattcaatcacctcccactg

SEQ ID NO: 617355 - DNA, 468 bp, Homo sapiens
gaggtgaacttccttcactgtagctgttctgaggcttttccttttttctctctcttctcaaagtctcctgaagagctctggggtgggttccctctgctcaccttctttttctaatataccacccttgtattaggaggtgtctgcagcacataaactacctcttttttttttttttttttttttttttttttgagacagagtctcactctatcgccaggctggagtgcagtggtgcgatctcggctcactaaactacctaaactacctttttaaagagagttcttytttggttttggcctgaggtcaaaggcctctgcttccaaaggctctgtggttttaagggtttattgggagagaatggtctctgcagctgagccagatccatgttttaaatcagtcatcttgatggcaccttggcctactctggctgtgtgtgtgtgtgtgtgtgtgtgtgtgtgtgtgtgtgtg

SEQ ID NO: 617356 - DNA, 468 bp, Homo sapiens
gaggtgaacttccttcactgtagctgttctgaggcttttccttttttctctctcttctcaaagtctcctgaagagctctggggtgggttccctctgctcaccttctttttctaatataccacccttgtattaggaggtgtctgcagcacataaactacctcttttttttttttttttttttttttttttttgagacagagtctcactctatcgccaggctggagtgcagtggtgcgatctcggctcactaaactacctaaactacctttttaaagagagttcttttttggttttggcctgaggtcaaaggcctctgcttccaraggctctgtggttttaagggtttattgggagagaatggtctctgcagctgagccagatccatgttttaaatcagtcatcttgatggcaccttggcctactctggctgtgtgtgtgtgtgtgtgtgtgtgtgtgtgtgtgtgtgtg

SEQ ID NO: 617357 - DNA, 619 bp, Homo sapiens
acagtataatgtaaagtccacgtggttagggatttttattaatttccttcactgttgtgtcgtaagtgcattgagaaggatgtagaaaatggtgggccctcagcacatttgttgaatccagaaattctgtgccttcataataagtgtattcaaaataagtgccttcataataagtgtattactttcaaatactggaaaattcagagttccagtttagaaggaattggtcaatggattcctaactcacttgtttttgctcagccctggaatatattctgtcatattctactgcagaatttccatrtaatttacaaaaatgacatcactcattctcttccctaccctaggaaaaaagacactgagggagaatcagacccttactgaatgacttacacctcgttttggttatcttaggaattcttggaaatttcattctccacattaaactaacataagctatttcagccctgacatgctaggtttagactatttgagataactgactatcactgagatatgccagttgagtgagccacctgaagtcctagcactcctcttctctggcattatcagtgccatgaaaaagccactttgtcacatccttcattacaaagactta

SEQ ID NO: 617358 - DNA, 443 bp, Homo sapiens
acatgtatgaattatgggagctataatcaagatgagatttgggtggggatatacagccaaaccatatcaggtgagatcttctttacctgctaggtccatttggtctatggtatagtttgagtctgtcattttttggttgattttctcttcagataatctgtccattyttaaagtggagtgttgaaatttcctactaatattgtattgcagtctatctctacctttaaatctaatatttgctttatatatctggttgttctggtgttgggtacgtatatagttacacctaagtaatatatatgttatgtcctcttattgaattgggccttttgtcattatacagtgacattctttttttatatagtttttttatttaaagccttttaaaatatgacatgactgtggctactcctgcttgcttttcatttgtttgcataaaatat

SEQ ID NO: 617359 - DNA, 533 bp, Homo sapiens
ggtttcttctggaatactgcagcagagtggagagggcatgtgtggagctatggggttggccagagctgtttccaaactctggggagtcagccagtaagaagactgggcaaacaatacagaatgttctttttttcattaatttacattctaaaatcccacaccagaactctgattggtctgacatgtttacgaagcccacttactccagcagttggtgggtcagggacttttatcatcacacaatggggttggtagtgggaatggggagcagttccgcacaacgaggaatgatctgctgcagatwccagggtgatgctgtggaaactatgagaagtctagtgctgtcacctatttgtgggatctggacataaaacagttgaactcatggagatacagaatagaatggtggttatcagagtctgagaagggtagtatggggagcaaggcagaggtggggatagttaatgggtacaaaaaaatagaatgattaagacttactatttgctagcacactgggagactatagtcaataa

SEQ ID NO: 617360 - DNA, 572 bp, Homo sapiens
actgggtaatttaaaaataaaagaggtttaactgacttacagttccacatggctggggaggcctcaggaaacttacaatcacagtggaaggtgtagaggaagcaaggaatgtcttccatggaagcagaagagagagaacgaaggagtgagtgccatacttttaaaccatcagatctcctgagaactcactcactgtcataagaacagcatgagggaaaccgtcctcatgatctaattacctcctaccaggtccctctctgacacttggagattacaatttgagatgacatttgggtasggacaaagagccaaaccatttcatagtagatgtctatgtttacgggttacataagatgttttgatacagacatgccttgagaaataatcacatcacagagaatgggatatctaccctctcaaacatttatcccatgtgttacaatctatttacactcttttagttattttaaaatgtaaaattaatttatcactgactgtagtcaatttgatgtgctaacttttttttttttgtacccattaacatccccacaaggttctgtgattcgggttga

SEQ ID NO: 617361 - DNA, 557 bp, Homo sapiens
agaaaacatgacttggtcattagcctgtgaaaaaatcatgaaaacatctatggagatttaaaagtataaataaggttgtatggttctttgggaaaagcagcagcctcatacgataactatgtatttacagggttttccaccttcctttgtttattgtttgcttgtttgtttatattccataaaagacttgagttagctaggctaggaactaaatttacctttacatatagtccaaattaagtgttcagagatcacaagcactcagagatctcttgcttacaagagatggatacagaaataaatacatttacaataagaaatgcagtctgtaatttctgaacacatgtattctgactagagtgttccccaatrtttgacctccaaaaagcaaacaaattacatccagaaactttcttcccttcccttccccttcccttcaacagtctcactctgtcgcccaggctggagtgcagtggcgtgatttcagctcactgtaacatccacctgccaggttcaagtggttctcctgcctcagatgcctaaggagctgggattac

SEQ ID NO: 617362 - DNA, 435 bp, Homo sapiens
ctactttttttttctttttttctttttttgagacaggrtgtagctcagtcacccacactggagtgcagtggtacaatctaagttcactgcaacctcttcctcctgggctcaattgatcctcccgcctcagcctcctgaatagctgggtttacaggcatgctccaccacacctggcaagtttttgtgttttttgcagagatggggtctcactgtattgcctaggttggtctcagactctggggctcaagagatccacctgccttggcctcccgaagtactgggattataggcatgaaccaccatgcccagcagatattaattttttaaaccatgagtttagtgtagaaaacagaagtgcagtttcattgatatttaaattatatttattataattgatgaatataaaaatggtttattaagagcaaactaatttgt

SEQ ID NO: 617363 - DNA, 435 bp, Homo sapiens
ctactttttttttctttttttctttttttgagacaggatgtagctcagtcacccacactggagtgcagtggtacaatctaagttcactgcaacctcttcctcctgggctcaattgatccycccgcctcagcctcctgaatagctgggtttacaggcatgctccaccacacctggcaagtttttgtgttttttgcagagatggggtctcactgtattgcctaggttggtctcagactctggggctcaagagatccacctgccttggcctcccgaagtactgggattataggcatgaaccaccatgcccagcagatattaattttttaaaccatgagtttagtgtagaaaacagaagtgcagtttcattgatatttaaattatatttattataattgatgaatataaaaatggtttattaagagcaaactaatttgt

SEQ ID NO: 617364 - DNA, 511 bp, Homo sapiens
gagatgagttttcgttatgttggccaggctggtctgaaactcttgagctcaaagcaatccacctgcctcagcctcccaaagtcytaggatttcaggcatgagccacatgcccgactcaaggaagcaacattaaaaaaaaaagttaaaccactttaaaatttaataaacaactattgagtgggatactaaaggaacaaaccaatcttgttggggattttaagactttaaacttgtaaaatcttgaatgaggtcatattttaggaaatctgcaacaggaaagttttaaagtatgtacaaaatagtattgattatacactaaatacaaattaagggcacagatgaatcataccagagctctttgaatatgataatatttgagggtgtgtattaaaatttttaatgaatataatttgttttaaaaaattgctcttaaaaataatacaagatggcaagtgggtaggaaaaaaatgccttgaataactttaatattgagtaggatgtaactaaatac

SEQ ID NO: 617365 - DNA, 314 bp, Homo sapiens
cctacattgaaaagatattaaatggtcttagaaarcaaagaataaacaagaatttaatataagaatatgaaaagttaatataaaaggttaattatattaaacattaatataatttattacattaaaataaaaaagagtattcattcatataaagtatgataacttgtgggaatgtctgcagtagaaagactccaagaaaaacaactgaatgcctttatttctctgatttaggagcattctgaaaattgagacgagatactgcaatatttgtatagctatctcagctgtaactcttacattcaagcagataacaa

SEQ ID NO: 617366 - DNA, 452 bp, Homo sapiens
ggatctggcagatatgtttttgaaaatgagtagaataaatctgacacttcaagtaaactgacagtactcactgctcaagataagattcaagctttaaattaaaaatttgaattttggaaaacttccatttgccagcattatttggacagcttcccaatattgacaggcttttctatctaataacattgatagttactaatgcatgtggtgtttctttgacattgaataatgaaatttttccacawttgtaagatcacgtatattagtgactcaatattttccaactaatatcacaaaataaggcaagggtaagatatctattaaaagactaagataaaccaagggattttaatgtaacagaatgaaagtttgttgacatggtttcagattatacactgcaactaatctttaataaattaccatttctcaagttttggtaaagaaaaatatgt

SEQ ID NO: 617367 - DNA, 532 bp, Homo sapiens
agaccttcataagaacctacagccaactcttggtagcattcagattccaagcacacagcaagaatcagcagggccagtgtagcaaagacacaacagagtacttgctgccatccacaagatatagctccaaaccttaataaaataatctgttcatccgggttaggattctctgcattttatttgtttgtttgcttgcttgtgtttaagattggagccacttctccagctctgtgcaggattaggggggttagaagaatgctgggatcttccactccccrctttaccagagaaacctcattcatatttgtttcatctgtggtgcatcgtatgtagggttttatattggaaatacagtgtttccctgctttaaaaaagttgccactgtgcaattgaagggtacctctattagacagagttgagacacttggtattcttctgacaacccctactcccttactaccaactgtggtaggattgcagctagacactcaggcagttcccaagtgaaggcatcacggactaacactgaggt

SEQ ID NO: 617368 - DNA, 314 bp, Homo sapiens
tcttagccttcatgtttattatgtcccccgtgcctctcaaacatcaaagacattgtacctactagtatatgccttgcwttaatgctccatcccagttcaccaccagtacaagtttcaacaaatgcatgacagaggatattagtgttttacctaccatcagtgaagggtccttctttgtcagaaggtcagcaagaattaagttggaaatcccattacagtgctgcttcccaagtctaacccccacaagatgggtgcctcaaaaaacagaatctgaaaaaagaatttgcatataagaaatgtattggtggccagac

SEQ ID NO: 617369 - DNA, 559 bp, Homo sapiens
aggggtggaatgatatggtctggctatgccctcacccaaatttcaactagaattgtatctcccagaattcccacaagttgtgggagggacccagagagaggtaattgaatcatggggccgatttttctcatgctattctaatgatagtgaataagtctcatgagatctgatgggtttatctgtggtttctgtttctgtttctgtttcttcctcatttttctcttgctgccaccatataagaagtgcrttttgcctcccactacgattctgagccctctccagccatgtgcaactgtaagttcaaataaacctctttttcttcccagtcttaggtatgtctttatcagcagcatgaaaatgacctaatacatatgtctttctggagctctgctagtacacttgtcatttctggtgtcttgtctcttctttgaatttgtgtacatcatctttgaggtcctgtttcaggcatcccatattttctttaatttattccatttcagagaaagatctttgttcaatgttttctgatgctttgtggcgtattttttgatgtatatac

SEQ ID NO: 617370 - DNA, 412 bp, Homo sapiens
tttttgacaccgtgatttctttccctttaggtatatatccagtagggggattgctggatcaaatggctgtttacagacagtctttaaagcagatacaactttatgaaatttagacgatttcttctagatacatacttcgcaccattcaccatttttcatactcacatggcttttactgacctcctcgtagcccacatccaccatggtaacctttgttatcctggagtatggagtgccaactgtaagcctggagatttcactcttccacatcactaccaaataattgaatgtgagcgctgccagcctggatgccaayggatcctgatattcatatgtctctatgcccaatgggcctgttttttcctcacttctgctttctgatctttaaattatttcttatatcaaaacaaaa

SEQ ID NO: 617371 - DNA, 416 bp, Homo sapiens
tgtgtacatgtgtcataagaaggaggaggygtgtgggaagcttgtatgtaatttccattttctgtgctaaccctattatatataagacatggtatgaagggatgaagataaattggttaagaggtacaaaatacagtgagatagtacaactaagttcaagttccctattgtagtacagtcaagaaattatagttaagaataatttattatgtatttcaaaacagctagaagggaggaattgtaaagttcccaccacaaaaaaagatgtgtttaaggtgataaatatctcaattatcctgatttgatcactacacattttatacatgcatcagaatatcacatgtacccccaaaatatgtacaactattatatataaatttttaaaaattaaaaacttgacctattgtgttgaattc

SEQ ID NO: 617372 - DNA, 628 bp, Homo sapiens
cgaagacttgttctgtggcaaaagacatatctgggcagccacagagagattaaatctcttctgtatacaaacaagcatagctttactttttttctcctttttacaaagaacaaataaacccaatgtaaaaactgaaaaaaaaaaactatgtaaatgcaacataattatgtttaaaccacagaagagaggaaatttagagttacagattccatggtaagttttaattctatccttgtgtatgtgaaagagtctttcattacacgatcacataacactgggccatgtaacaatcagtccaacaaatgtttactttacaacrtgtggaaggaaaatattttgtaagagaaattgtaggaaattagtatattatttatgtaaattgttaggtaacatttcttagaatcctgggcacttacaaaatattaatagaaatacctgttccttaatttccttgatctaaagaacacgaaatttggaggatcgcttgagcccaggagtttaaggctgcagtgacccctcatcatgccactgtactttagcctggatgacagagtgagaccccacctccaacgaaaaaaaaaaagaaaaaaaaaagaacatgaaatttaactcttttataggcaggcac

SEQ ID NO: 617373 - DNA, 628 bp, Homo sapiens
cgaagacttgttctgtggcaaaagacatatctgggcagccacagagagattaaatctcttctgtatacaaacaagcatagctttactttttttctcctttttacaaagaacaaataaacccaatgtaaaaactgaaaaaaaaaaactatgtaaatgcaacataattatgtttaaaccacagaagagaggaaatttagagttacagattccatggtaagttttaattctatccttgtgtatgtgaaagagtctttcattacacgatcacataacactgggccatgtaacaatcagtccaacaaatgtttactttacaacgtgtggaaggaaaatattttgtaagagaaattgtaggaaattagtatattatttatgtaaattgttaggtaacatttcttagaatcctgggcacttacaaaatattaatagaaatacctgttccttaatttccttgatctaaagaacacgaaatttggaggatcgcttgagcccaggagtttaaggctgcagtgacccctcatcatsccactgtactttagcctggatgacagagtgagaccccacctccaacgaaaaaaaaaaagaaaaaaaaaagaacatgaaatttaactcttttataggcaggcac

SEQ ID NO: 617374 - DNA, 562 bp, Homo sapiens
gaagccaaaaagtagacatccacatttttcctmatgtggcttgatagaaactcttctataggtcttgacaacctctgaggtcagagagaatggattaagatggcccttcagagctcaaagcacttaacatggagaaagtactgcttccaagtaaaacacctcccataataataaatgcatagagagcatacctgtcacttctatatagtctaggactttaattatataataatgttgaaggaaaggaagtcagtcctgagggggatggtcaactcctctcagccaggctggtcctctctgagtttgcttgtgtgcagtagatgttttgaatgtgtgtatttgctgcagaaaaaaaggaaacattcaaggaacggtacccccctcaatgagcctgagttcctcaagggcaaagacaacctttactatcccattcaatccttacttatgctagtattcaataaacaactactgcaagattacaattacagaccactaattttcaaaaagtatgtttttttgttttttttttttttttgagacgaagtctctcttgtccccaggc

SEQ ID NO: 617375 - DNA, 543 bp, Homo sapiens
ctgtaaacacgccaatcagcactctgtaaaaacgcaccaatcagcactctgtgtctacctaaaggattgtaaatgtgccaatcagcactctgcaaaaatgcaccaatgagcactctgtgtctarctaaaggattgtaaatgcaccaatcagcactctgtaaaatggaccaatcagcactctataaaatggaccaatcagcgctctgtaaaatggaccaatcagcaggacgtgtgcagggacaaataagggaataaaagctgtccactccagccagcagcggcaacccactcaggtcctcttccatgctgtggaagctttgttctttcgctcttcacaataaatcttgcttctgctcactctttgggtccatgccacctttaagagctgtaacactcaccacaaaggtccacggcttcattcttaaagtcagtgagaccaagaaccccctggaaggaaccaactacggacacaaaaggactttgtcccattacgtcctccctctccatcatcgaaaataaattcacacaccaaaaaaccacagt

SEQ ID NO: 617376 - DNA, 550 bp, Homo sapiens
tcttttttctctttatggaaaaagaaagttatgyttctctggtttttgataagaataaacctcatacggtgaaatcaatttttaaaaggagtaatgcagaataaaaatccataaaactaccaaaaaagggcacataattgtatatttaaaaaaaccaaaaccaaaaacaaaacattgatcccagagcaatggcataagaagatatccttctgtggaattccataacattgctagttagtaagtagacaggaagtaatttccctaataaaatgtacatatcatttagatttattaattaaaactactgaagaacttgtatttgagctattctaatgcaagcattcatgccaaggtgtcattccattcttgcatttacacatgggatcaaataaatgaaattccccaatccccatctgcgtctcaaaaaagtcactgactgctggaaaacaacagatattctctcctggaaatgaatcagaaggcaaaccatcattcggtagccagcatatgattcagcagagctttgtataaaagtataaagttcaaaagc

SEQ ID NO: 617377 - DNA, 670 bp, Homo sapiens
gcttgtgggctgtggtttgccaacctctggtctttatggtcacctggtaagtcttgcctggtagctttttcccacacacacttacttctgtagttaggaatcctctggtacttgcctgatattaggagtataaacatgaatgttaagatggttcttttcttaaaagatctcagagtctcagaagaaagaaaaatacataaatatgcttattacaagtgttgattatagtgtaacatgatgaatgccatcattgatgtgcagagtgggtattggggagggctcctcatagaaggtaaccttgtgacaagcytccaaggttcaccaggcagcagagggagggcagagtattccaggaagggagataatatttatgccttaattttagacgtttatttgggtttttttttcctatctcagtggaaggtctgagtttccagataatagcagagacaatatcagttcagtgacaaagaacttctgcagaaatcctgaggaaaagcagaattgaattttataattattatccaataattatatagctaaacaggcataccatttaaagcatttgatttctgcttctgaacgcaagttatttttctttaacagataatggtcatcaaataagttaaatctcaaacatatagatttagacacataaatgatgaggttt

SEQ ID NO: 617378 - DNA, 670 bp, Homo sapiens
gcttgtgggctgtggtttgccaacctctggtctttatggtcacctggtaagtcttgcctggtagctttttcccacacacacttacttctgtagttaggaatcctctggtacttgcctgatattaggagtataaacatgaatgttaagatggttcttttcttaaaagatctcagagtctcagaagaaagaaaaatacataaatatgcttattacaagtgttgattatagtgtaacatgatgaatgccatcattgatgtgcagagtgggtattggggagggctcctcatagaaggtaaccttgtgacaagcctccaaggttcaccaggcagcagagggarggcagagtattccaggaagggagataatatttatgccttaattttagacgtttatttgggtttttttttcctatctcagtggaaggtctgagtttccagataatagcagagacaatatcagttcagtgacaaagaacttctgcagaaatcctgaggaaaagcagaattgaattttataattattatccaataattatatagctaaacaggcataccatttaaagcatttgatttctgcttctgaacgcaagttatttttctttaacagataatggtcatcaaataagttaaatctcaaacatatagatttagacacataaatgatgaggttt

SEQ ID NO: 617379 - DNA, 670 bp, Homo sapiens
gcttgtgggctgtggtttgccaacctctggtctttatggtcacctggtaagtcttgcctggtagctttttcccacacacacttacttctgtagttaggaatcctctggtacttgcctgatattaggagtataaacatgaatgttaagatggttcttttcttaaaagatctcagagtctcagaagaaagaaaaatacataaatatgcttattacaagtgttgattatagtgtaacatgatgaatgccatcattgatgtgcagagtgggtattggggagggctcctcatagaaggtaaccttgtgacaagcctccaaggttcaccaggcagcagagggagggcagagtattccaggaagggagataatatttatgccttaattttagacgtttatttgggkttttttttcctatctcagtggaaggtctgagtttccagataatagcagagacaatatcagttcagtgacaaagaacttctgcagaaatcctgaggaaaagcagaattgaattttataattattatccaataattatatagctaaacaggcataccatttaaagcatttgatttctgcttctgaacgcaagttatttttctttaacagataatggtcatcaaataagttaaatctcaaacatatagatttagacacataaatgatgaggttt

SEQ ID NO: 617380 - DNA, 450 bp, Homo sapiens
attctagaatgttgggtaaatactgtttcccccattgtaatagtgagtccttcaggagaagggctaccttgcctttgccatcaaaagtaatccttaatataatgctaactacagatttaaaatcattaattattgtcatacaaaagttaccacattataagactacactgattgtcaaataaagtgtcttcttcacatttgaagcactctctgaaagatgaccatgacttgctataatgctgctttctgtgggacccatgtaacacacaaaattgttaactcttcaagctaacaaagccagccagtttcaggcccccaaatttgaagatagattttccaaatatttccagctgttagaaactattgagttcactaccaaagccagcttggtacytagagtctgtgtgctactctcttttttttcctgattatgtttatacttcaaagagt

SEQ ID NO: 617381 - DNA, 414 bp, Homo sapiens
  misc_feature 393: n = A,T,C or G
cctgtgctatagcccacccctactcactctcaccttctggttgaactttgcttaggccaccattgtctgcctcatcaggaactatctgtagacgtagctcccagggagctcacagcaacaccccctaccaccaggatgggcagtaatatgtgacagagcccaaagcaaggctggaacgcagtcccttccagcttagtctttctgactcctagccaacaaaccatccttaatstgagcaacttctttaggcatttcctcttttccccgcctgcacccactctgaacatgacaaaagttgccagagttggggcattgaggaagagatatttctggaatgtgagacttgttatgcctctgtctctttctctccctccccctcccctctaactaccngtgtgcctagcataccttttc

SEQ ID NO: 617382 - DNA, 559 bp, Homo sapiens
tctaggttaatttaaggttgggaaatcattaaagttatcaaatgataccagtaactatcatcctgaaagtttaaaaaaaaaaaaaaaggcaacagccaccaaaccttccaagatttttcacctgaaaaatggtaaatgggagcccaactgcaactgcatactcatgagcattattttttctacataaccagtgcagtttttggtggtaattgaagcaccatatagtatcacttaaaatactgttttcagtggaaaacttgtctatgcagcatccttgttcattacatttattawtaactgtgccttccgagatctaataagcttaagatagacttttggaagaattaattattgtgtattctgtcagtgctacttaacattcttttcttacaccaatgtgtggctttaaaaagaataccaagaaaatatgaaataaaatgtctagagacaaatgatatcaggtatcacaactttaattaccggtaatgatagttttgctgtatagcagcaattacatgaaagtttattggataaatacctctgcattctctgcagtaag

SEQ ID NO: 617383 - DNA, 463 bp, Homo sapiens
tcaatctgttatttaatctatatttatgctcttgattgcttttaatatttaattatctttggcatttagcagttaactctgaatttattttttcttcattttgtttcatttctttgggcttcttaaacctttggcttatttttttccccatcattttctctcatytcacttattctctcatctcctgggactccaatcacagatgcccctcagtaactgcaggggacccctgtggataccaaagcctgtgcatgctcaagtcagaaaatggcataatatttgcattaaacctacatacatcttcctgtatactttaattcatcactagattacttaatatccaatacaatgtaaatgctatgtaaatagttattatactatatttttaaaaatttgtaacattttaaattgttgtattgttttattatttttttcctctgaataatttttatccacaattggt

SEQ ID NO: 617384 - DNA, 465 bp, Homo sapiens
catgggctgtagaggcttcttgcgagagttttaagtggcgatcacttacctgctgcttccctattcatttttaatatgtttagtgcttttgttatttaatgttctcaacaataatttctgctaaattaattttattattgttgttacatattgatgcattttgtttgctgttaagttcaatacatttctttgtttccagttagaatttgtaaatcactgactgattttctccactgaaatttttctggtgtrctagggagatgtttaattacttaataattgctgaaactcatcacttaagaaaataaatatttctctagtcaaggtcattgcacatcaaatttctgttacatgaattagtgctccattcttgaatttctaagtataaaattagaagtattcttggcagagctgataagacacattttgaagtccaagacagagaaaataaagttacttagagca

SEQ ID NO: 617385 - DNA, 631 bp, Homo sapiens
gtgatgggtggcttttacagttgtcatggatatgtccctatattggtgatgcatctttattcccacagacccaaccactcaktgttgactgtgaagaggtacccacaaaaccacatgcaatctgagtcagggtcaagggctgatgactagggatagaaaaatgacaaaatcaccccaaagttgtaattttctcctgggagggaaagaagcaggtgacagagaaatatgcagtttgaacaaatattctgcagttactatttattgtcttgacatgtttttggttataatatttaaaattgttttgatggcttgaattacattttaaaaaggcaagcaatttttttgtcaatcacaaggcaacattttttccaagctgaaaaatactactcttaagaatccatcatcctattagtttaatcaggacaatgtggctcaagtcactgaggtaacatactataaaggcatctatttattccttagaagcaatcttgtgtaatccaagcaaagctgtgattggaaaggtaaaactctgggctcaagattggtgatatctctgccctcactctgggtcagccagttttgttccttaagcaacaagaacaaaatttctgccggcagacattttgcccac

SEQ ID NO: 617386 - DNA, 255 bp, Homo sapiens
ctccccccccctccccccaatttgcaagctatgtatatgaggttatggaacacacttgtcttgttctttagcgttgactgggcacagtgttcagcatattctaagcactcaatagacgtttgctgaatgaatgaatgagtaatccaataagcaaatagattactttggaatgcagaagtattataaggaaatkagaagaaaaccatatgcagaagccagggttctgttcctctgaatattgttttctgcctctta

SEQ ID NO: 617387 - DNA, 618 bp, Homo sapiens
ggatattgagtccctgtctcacaatgccagatttagcaaataaaaatatagaatatcaatttaaatttgaatttcagataaatttgaatttcagataaacaaataattttttagcattaagaagttccacaaaatttgggscattcaaatttaattgggcattttgtattttatctgtgaatgttagtctcagataaacaggatgaagagcatgataatgagtcgtgtcatgggtcctacactctgttccactgcaaggttaaatcccttgcacaggaaacaacagcacccccaacatgagtttgggggtcccaaagcagagaaaactaggtcctgatttgcatttagaattctgagagaaaacagctttgcagggtgtaatgtgatgatacgggacagtgattagaataggaacagtgggtcacatctagagacagggtctgaggtggtgacctcaccttcccccatcatagtacatacatcttctttttctgtggttccaaaaccaaaggtttcctgtgattgcaagataaatacagaggttggctgagtgtggagaggcaggcctgaaatggccgcatggtttgagtcaaaactaaacatgttttagacaacact

SEQ ID NO: 617388 - DNA, 639 bp, Homo sapiens
ctctgctttgctatgctgtaggactgtatgacactccaggactcccaagacttaggacagtgggcaaagcttcccaaggttcattaatctgcactttgtcatatcgcttggcctgacactagactgacccaacttcatrgtcagctgtctcaggcactgttggagcaggaagcatcccagcattgccagttacatacccttgcttttctcttcccattcttcttcctttgtgggtactaatagatgaaattcagtctaagagttgaactattgattttgagtaagggctgagttctaattaaataattcagggggaacctaatgagaagagctcattggttttcacccacaatgcaagaggctaaggtcatttgactgttgaacttgggctgaatgtccgctgtgtggacacaagggcttgttcagccttgagctgttaactgggccaggctgcttgcaatgcctcacccaacacccaaactctgacactacaccacatgaaagcttcaacgtccacctctgtatagaagagacagctcattgctaatgaagtgattagtgagcccagttcaacaaaacaagcctctgaatcaagatcaagtcctataaccattaagttttacacagagaaaaactgct

SEQ ID NO: 617389 - DNA, 639 bp, Homo sapiens
ctctgctttgctatgctgtaggactgtatgacactccaggactcccaagacttaggacagtgggcaaagcttcccaaggttcattaatctgcactttgtcatatcgcttggcctgacactagactgacccaacttcatggtcagctgtctcaggcactgttggagcaggaagcatcccagcattgccagttacatacccttgcttttctcytcccattcttcttcctttgtgggtactaatagatgaaattcagtctaagagttgaactattgattttgagtaagggctgagttctaattaaataattcagggggaacctaatgagaagagctcattggttttcacccacaatgcaagaggctaaggtcatttgactgttgaacttgggctgaatgtccgctgtgtggacacaagggcttgttcagccttgagctgttaactgggccaggctgcttgcaatgcctcacccaacacccaaactctgacactacaccacatgaaagcttcaacgtccacctctgtatagaagagacagctcattgctaatgaagtgattagtgagcccagttcaacaaaacaagcctctgaatcaagatcaagtcctataaccattaagttttacacagagaaaaactgct

SEQ ID NO: 617390 - DNA, 563 bp, Homo sapiens
acagtcagctaaaacagtaaaattcctgggctcttttgccagaaggagtggtcaatgagacgtagcaggttataaactttctattgtatgtcctacaaatatttctaatgatgtaaacttaaaggaactagacctttaaatctaatgctcacaaattcatatttaaatggcttaaacaattcatacaaagacatgtagacagacaatctgtcatctgattaattaaaataatcatatttaacccatactgtaagggtcatatgccactcagtaataaagtgtctcagagaaggtaaagtttwgacttcacaactaagttttattacctgagaacagtgccattatttgcaagtttaaggaagttcccatcttctagatccaatgccaaacctttgcaactgaaataggaaagtttgattattaatcaattcctatatttagctaacctaagaaataacaacctatattttccaaacatcataatgctaaaaagggattctgccacccaggggaatgatatgttaatcacacaattaagaatatctaagaactgtaaaattaaa

SEQ ID NO: 617391 - DNA, 400 bp, Homo sapiens
agggatggtctagtccaggaaaagccatgcatatggatgccattaaccaaggatcaaaattctctccccagacctctcaatagtatgttagcccttctgcaatttagaagccccacacccccaaaagaacagccaaagtcaaagagaggtattataaagtgacagtcaaagagacattaagtttaacctggaactagctgagcttaccttgagtttatccatattgtatttccatctcagctgctggcaaatcaacattccctatcatatatcattaaagttgattatttgaaccttaaagcaaaacttaacatttaattaaatttcatttcattgctctaccatttgagatttttttwaaattgtaatcctgccacttaatatctatccaagaggaatt

SEQ ID NO: 617392 - DNA, 573 bp, Homo sapiens
ttttcaaagcgtgctttaattttaactctgctgtaataaaccttgaatctttcatctttgttgttggacttaaacatataattatactgttaaaaaaagaggagttgggccaggcacaatggctcacacctataatcctagcactttgggaggccgaaacaggcagatcacttgagcccagttgttcgaaaccagcctaggcagcatggcaaaaaatacaaaaaatacagaaagtagtcagatgtggtggcatgtatctgtggtcccagctactaggttggctgaggtgggaggaccacctaagcccaggatccatgatcaccccactgtactccagcctgggcaacagagtgaaaccctgtctcaacaacaacaacaamaaaagaatatttggtcaacaataaataaagtaaaagcaattaggaactccaggtaaagtaagaaattgtagaatgatgtcatggtccaatcagaatgtacaaaaaatgtgacatgattttgagcagttgtgaaaattaagaaaaggaaatctatttgatctttattctagtaacatgttctttcaaatgacgg

SEQ ID NO: 617393 - DNA, 503 bp, Homo sapiens
tgcattatataatgtttagcaagatcactggcctctatccactagatggtagtagcagcaccctccacccaccagaaattgccaaatgtccctggggggtgaggggagctaaatcaccctcagtcaaaagccgtaatgtataaaaatatctttccatgaaagacagamtctccagttgtttcttctagatagacaagagagtttgtcagttacgcctattaaattttaccttctgaaaggactatcttctggaagtgcctttttccttttcttataggttgttaatctggtctttgatgctgtgttctcatccagaagacattagatagtcaaaggacagggaactaccattagaagactgagttttattccaacactgctattattagccttggcactgagcaaatcctttaactactctaagccttagtttacctatctgtcatcaatgttgtggaaagagaaatatgtatgtacaaaagcatctttaaaaaacaaagaag

SEQ ID NO: 617394 - DNA, 628 bp, Homo sapiens
catgtaattttatacttttctataaatttgtatagtagcaaacttgttttttcctgctgcatggaaaagtaactttcattcagtattccctgcttctcttcatcttgactcaggttataatggaaaagttactctttcaacagtgcaaaggttctttggaaaagaaacagagcagtgtcaataattcaaagtcacaaagtcaattatagcacgctgtttatgtgtttacaaagacgatrcctcaatagattgatttcaccccacaaataaaaaaagagcgtttattaagacaaagaggaaagagggagagaaaaataattgctctctgctgtgtgaatcttgtttgcatatttcttatgggataactgattagctggcaggcagtaaagaggtcattctggacacattgtccttgggtaggctgactaggcatacaaaaaatcctgcaaggcaggctgtttctccgtattgtctgccagtgacctttcatcagtactttatcttagttgaaccagaactacactccttccctcgctagaagtctcagtatatatgatgtattcctctaagaggaatcctttttctctaaatctgtacttctgagcctgtatttgaaagtgatcataat

SEQ ID NO: 617395 - DNA, 481 bp, Homo sapiens
aaaagcctgttaaaactcttcagggctttttctagtccttacaacagagctacatctggtgacagctggtagcagaggcctgaagaaggaagaaaacatttgtaaggaaagccacaagccactgctaacagagtggttatctaactccaggaactggtcaagcaattaacaagcatgttatgggctgtgtcctcctaraatacacatgttgaagccctaacctactatgggaggtggtggggttgcggggaaggcagtatttggagatgagtgcctttgggagaaattgatttagatgaggtaatgaaggtggggtctctatgatgggattaatgcccttaagagaggagacataagagagctctctatctctctctccatgtgtgtgcaccaagaaagaccatgtgggcacacattgagaaggcagctgtctgcaagccaggacaagagccctcatcaaaacccaaaccctgcagaactg

SEQ ID NO: 617396 - DNA, 481 bp, Homo sapiens
aaaagcctgttaaaactcttcagggctttttctagtccttacaacagagctacatctggtgacagctggtagcagaggcctgaagaaggaagaaaacatttgtaaggaaagccacaagccactgctaacagagtggttatctaactccaggaactggtcaagcaattaacaagcatgttatgggctgtgtcctcctagaatacacatgttgaagccctaacctactatgggaggtggtggggttgcggggaaggcagtatttggagatgagtgcctttgggagaaattgatttagatgaggtaatgaaggtggggtctctatgatgggattaatgcccttaagagaggagacataagagagctctctatctctctctccatgtgtgygcaccaagaaagaccatgtgggcacacattgagaaggcagctgtctgcaagccaggacaagagccctcatcaaaacccaaaccctgcagaactg

SEQ ID NO: 617397 - DNA, 486 bp, Homo sapiens
acccaggaggcagaggctgcagtgagccgagatcatgccattgcactccagcccaggtgacagagtgagacttcgtctcaaaaaaaaaaaaaaaaaaaaaaaaagaacttgtagcccataatgcgaagaacttcacaaggtatttggtaaataaggaaaggctatgtggcctctaaaacatcaataaatatcagccactataagagaaagcttcactttggtrtaacaaaaactttgggaaaaactttgggaaacctacaagtaacttgagccctaagggactccaaagtttggatttcgcagacacagacaagtacatgtttactgtgcttgagaaaatataaaagattaaaaactgtaaaaaacggaaaatcctaaaacatcacagaggagatttgaaaaagaacttaaatattttctttagcttcccagtaagaactaaaaaagctaaacaaatggggttttaaaaaaatctttaaagtagca

SEQ ID NO: 617398 - DNA, 486 bp, Homo sapiens
acccaggaggcagaggctgcagtgagccgagatcatgccattgcactccagcccaggtgacagagtgagacttcgtctcaaaaaaaaaaaaaaaaaaaaaaaaagaacttgtagcccataatgcgaagaacttcacaaggtatttggtaaataaggaaaggctatgtggcctctaaaacatcaataaatatcagccactataagagaaagcttcactttggtgtaacaaaaactttgggaaaaactttgggaaacctacaagtaacttgagccctaagggactccaaagtttggatttcgcagacacagacaagtacatgtttactgtgcttgagaaaatataaaagattaaaaactgtaaaaaacggaaaatcctaaaacatcacagaggagatttgaaaaagaacttaaatattttctttagcttcccagtaagractaaaaaagctaaacaaatggggttttaaaaaaatctttaaagtagca

SEQ ID NO: 617399 - DNA, 570 bp, Homo sapiens
taaatttataaagcccatttctttcaagtagaatcagtgatagaattattatacatattcattttaaaataaacatcttctctctatcttcagagtcaaattattaactgaggaacatactgaaaagaagaataaaatgagtaaattaatttttcctccagagatagttactagtaatactttggtatacgttcttccaataagtttttctattcatatttacacatttttaaaggttatctaaaatataccatctgtaacattttttcactacactactgaaaaacttttcatgttagtatttcttactaaattttttttatttttgtaattttttattttgatgttgtggatacatagtaggtgtatatatttatggggtacatgagatgtttcgatccaggcatgcaacgtgtaataatcacatcgtggagaatggggtctccatcccctcaagcatktatccattttgttacaaacaatccagttatatctttttaattattttaaaatgtaaaattaagtcattattaactctagccacccagaagccttgaattttttaagctt

SEQ ID NO: 617400 - DNA, 598 bp, Homo sapiens
attcccgcccccccagcccaccgtgtaaaacatctacacatattattttttactgttgttgctgttaagggaaattttttgacctagtaaatttaaaatccaaaggagtgatatgatatagtgtatacataagatacaatgaattctctgtgatgcagttgtattaatccatattctcaactgtgatgaggaaatacatgaatccttccattttttcccccatacaaaatcatgtttgcttgtttgtttgtttgtttgttttgagagggagttttgctcttgttgcccggactggagtgcaatggcktgatcttggctcaccacaaccctccgcctcccgggttcaagcgattctcctgcctcagcctcccaagtagctgggattacaggcatgcaccactccacctggctaattttatatttttagtagagacggggtttctctatgttggtcaggctggtcttgaactcccaacctcaggtgatccacccgcctcggcctcccaaagtgctgggattacaggtgtgagccactgtgcccagcctaacaaagtaacttttttgtttttgcttttttgcttttttttttttttttgag

SEQ ID NO: 617401 - DNA, 603 bp, Homo sapiens
ctgttttttagttttccttctaactaggaaggaaaaccaggcccctcttctgcaggtctgctggagtttgctggaggtccactgcagacgctgtttgcctgggtatcaccagaggaggctcagttggaaatgcagaaatcatccaccttctatgttggtctaactgggagatgcagaccagagctgttcccattcggccatcttgcccagtgaatgtgttttgttttttaaagacagggtcttgctctgttgcccaggctggagtgcagtggtgtgatcatagcttactgcagcctcaaactcctgggctcaagcaatccgccagtttcagcctcccaagtagctgagactacaggtgctgccaccatgcttggctaattttttatttttattttatttttgtagagatgagttcttgctttgttgcccaggctggtctcgaactcttggrctgaagcaattctcctgccctggtcttccaaagtgctgggattactggcatgattcactgcacctggcctgccttttattttaataagattgtaaagctgctatgttgagaatgggctaaaagggaggtgaaggtagaggcagtgagaatat

SEQ ID NO: 617402 - DNA, 437 bp, Homo sapiens
tggttcagcccagaaaggcaggatgtcttgaagcagatcttacacgttatacatggattgagagattctttaatttacaagtggttaaaggtgtaaagttttgtctaaaaatttggartcagcagaaaggaatcttaagtttcattgtgctttgacatggtgcttccttcctgatgctttgacatggtgaggccttaaaagctgcctcagaatgcaggtgaatcgcttgaacccaggaggcagagtttgcagtgagccgagatcacgccactgcactctagcctgggcaatggaatgagactccatctcaaaaaaaaaaaaaaaaaaaagctgcctcagaatcaagatccctaaccctaacccctaactcttttattccccccactcaaagtgcagggagggactctcttggaatttccttatctaaacaagtaact

SEQ ID NO: 617403 - DNA, 404 bp, Homo sapiens
ttttgtatttttagtagagacagggtttcactgtgtttgccaggatggtctcgatctcctgacctcgttatccaccttccttggcatcccaaagtgctgggattacaggtgtaagccactgaacctggcctayctttggtcttcaatgttggtgaccttcagatggagtttttgtgtggatgtcctttttgttgatgttgatactattcctttctgtttgctattttttgttctaacagtcaggcccctctgctgcaggtctgctggtgtttgctggacgtccgctccagaccctgtttgcctgggtatcagcagcagaggctgcagcacagcaaaaattgctgcctgtcccttcctctggaagcttcatcccagaggggcacccaccagatgccagccaaagc

SEQ ID NO: 617404 - DNA, 334 bp, Homo sapiens
ataaactacttgtatctttttaaaggtttttacatttttaaatttttgtgggyacacactaagtgtatatatttataaggtacatgagatattttatacaggtatgtaatttgaaataagcacatcttggagaatggggtatccaaatcctcaaacatttatcttttgtattaaaatcaatccaattaccctttaggttatttctaaatgtacaattaaattattaatgactatagtcactctgttgagctacaaaatagaaggtcttattcattctttctcattatttttgtccccattaaccatgtccacctccccccattttctattaccc

SEQ ID NO: 617405 - DNA, 621 bp, Homo sapiens
gagaccacacaaatccagtgtttctatcttatacttaattctctttgctaatttctatgcttcagctgggaaatatattctggccttttttatccctagcaagttctctttaagttttcctttctttaaccatacaactttaaaaaagtatataatagatattaaccatttccttctttccccttctcttctcttcaacctcccaatctttctttccacatccatatccccagcagcaccactgacttttattaaagctcaagcttgtggcactatctacttactggatatcttcaactggagattctatagkcacctctaatttaatatgtctgaaaccagatttattattttccatttgctaaaatagtctctttctctgctatctctcaacccacttataaatatcacttagaatgttttctgtttttgattcttcatgttcaataaggactgaaagaatcataaagcagggggttagtgctcagttgtccatgtagctaacatatctaggtaaccacaatgcatcattcatcagacattcaggaataacacaagtatagacagtctatttttatttgggtgcttcatttgtgttccttgttgtatcatcttaatcaa

SEQ ID NO: 617406 - DNA, 621 bp, Homo sapiens
gagaccacacaaatccagtgtttctatcttatacttaattctctttgctaatttctatgcttcagctgggaaatatattctggccttttttatccctagcaagttctctttaagttttcctttctttaaccatacaactttaaaaaagtatataatagatattaaccatttccttctttccccttctcttctcttcaacctcccaatctttctttccacatccatatccccagcagcaccactgacttttattaaagctcaagcttgtggcactatctacttactggatatcttcaactggagattctatagtcacctctaatttaatatgtctgaaaccagatttattattttccatttgctaaaatagtctctttctctgctatctctcaacccacttataaatatcacttagaatgttttctgtttttgattcttcatgttcaataaggactgaaagaatyataaagcagggggttagtgctcagttgtccatgtagctaacatatctaggtaaccacaatgcatcattcatcagacattcaggaataacacaagtatagacagtctatttttatttgggtgcttcatttgtgttccttgttgtatcatcttaatcaa

SEQ ID NO: 617407 - DNA, 574 bp, Homo sapiens
ctgtgcagcaagggattcatcttgcacaaagacaggtttggctcctaggaggtaacctctaacactttagaatgtcctgcctcataagaatgtgtttgtttacctgtgggccttgggccatgccagagtctatgttaaaaatgtgatttatggtgagggagtttcagaccatgcagtgtcagcttaacctttggaggagctgaagactaaagtcagccacccgggaggtcagccaagtctcaaggctgagccccaacaaaactccmgacaccaaggaagggatgagtttctctggttgtcaatcctttttatgtatcatcacacatcattgctgaaactaataagtgttatccacacaactccactgagaagacaactagaaactccatgcttgcaaccttcctagactttgccctatgctcctcttcccttggttgattgtagtgtactctcttgctgtataaaacataaccatgagtataacagctcttagtgagttgcctgagtccatctagcaaattattgaacctcaatatggtcttgagaaaccatgaacttgcagccaatgttagat

SEQ ID NO: 617408 - DNA, 473 bp, Homo sapiens
ttcctgctgcagataactagccagagcccatccctttgtttcctgttttagttaatctataatctatagaaagaatgcttatcactggcttgctcttaataaatatggggataaaacttgttcatggctctcagatctgaaggctgtcagcactctgattcccactctgcactcggtatttctgtgtgtgtgtctttaattcctctaacaccgctgggttagggtctccaagaccgatggtctcagcaagatttgggtagggacacagatacaaaccatatcaatacccaatagaacttggtgaaaggtgaattgtggttacgataaaaaaccataatgttgattttcagtttgagyaactaaatagttggtaatggcatcaaccatcagtaatgaaagtatagggataaaatgcttaagtaggaagatactgaggtttttttggcatatgcgtgtttttggagtctattggt

SEQ ID NO: 617409 - DNA, 536 bp, Homo sapiens
actaacttctaaaagaaaacaagaagaaatctttgaggttctgggtagacaacttagaagataaatatcccagcactttgggaggccaaggtgggcagatcacgaggtcaggagatcgagaccatcctggctaacatggtgaaaccccatctctactaaaaatacaaaaaaaaattacccaggtgtggtggcaggtgcctgtagtcccagctactcaggaggctaaggcaggagaatggtgtgaatatgaacccaggaggtggagcttgcartgagcggagatcacgccactgcactccagcctgagcgacagagtgagactctgttaaaaaaaaaaaaaaaagaagataaacaatatgagaaaaattgataaattgaataatatttaaaaacttttgcccttcaaaatgtatattttgaaaatataaggcaaaccacagcctgggagaaatttttgcagcacatatcaataaaaggtgtgcactcagaatgtataaaatattctttcaaaggaatgcaaactgctgtcactgcta

SEQ ID NO: 617410 - DNA, 385 bp, Homo sapiens
ttgctgcttgttattggtctgctcaaggtatctaattcttcctgatttaagctaggagggttgtatttttccaggaatttacccatctcttctaggttttctagtttatgtgtgtaaaggtgttcatagtagccttgaatgatcttttgtatctctgtagtgtcagttgtaatatctcctgttttgtttcttagtgaggtyatttggattttctctcttcttttcttggttaatcttgctaatggtctatcaactttatttatcttttcaaagatcaagttttttgtttcatttatcttttgtattttgtttgtttgtttgtttcagtttcatttagttctactcttatcttggtaatttcctttcttctgctgggtttgggttt

SEQ ID NO: 617411 - DNA, 418 bp, Homo sapiens
ttctctttccttccttcctcctttttttttttttttttttgagagggagtctcgctctgttgcccaggctggagtgcagtggcacgatctcggctcactgcaacctccgcctyccgggttcaagctatcctcctgcctcaacctccctccttccttcattttttatccgtttgtattggtctttatccacctggcttggtccctctctttgcctctccatatctccttctccctctgactttttgttcacttctgttctctctctctctctctctctctctcttcctctccctctctctcactttcctccaccgctaaccacttcagccaccgtctgcttgctcgcctcaggccccactgcacacaaacccagggccctggcttaggagtctccaggtcttctgggtttcttggccct

SEQ ID NO: 617412 - DNA, 393 bp, Homo sapiens
cttccttcctcctttttttttttttttttttgagagggagtctcgctctgttgcccaggctggagtgcagtggcacgatctcggctcactgcaacctccgcctcccgggttcaagctatcctcctgcctcaacctccctccttccttcattttttatccgtttgtattggtctttatccacctggcttggkccctctctttgcctctccatatctccttctccctctgactttttgttcacttctgttctctctctctctctctctctctctcttcctctccctctctctcactttcctccaccgctaaccacttcagccaccgtctgcttgctcgcctcaggccccactgcacacaaacccagggccctggcttaggagtctccaggtcttc

SEQ ID NO: 617413 - DNA, 580 bp, Homo sapiens
cacttctcatttttgctataaaattatgagtatgcattgtgtgtacgtgaggtcaaaattattccattttttaaaggtcaattatctttaggcataaggagacaaacactaaacacatccaggtatatgcactgcaacaaagacttgaattcacaagagtaagaaaattaagcctctggggaaaattagcacactgagccactgttgtatctcactttgctgtatgaaactatttctcatttctgttatgtwccatgccactgtgtagactcttaaatattttgaatggttactggttaatatttagacatcagtgcttccaatcctttctctttcttcacagtatcctttctttttcttcacagtatctaaaacaagcttctctttcatagaaatcctttctctttcttcacagtatctaaaacaagtttctctttcatagaaatatgttatgcctattagttaagtaaaacttttgtgtttcgagggaatgagtagaacaagctttttgagccaccacaagatgatttatatgttttattctaaaaaacattcctggctgggtgccgtggctcacgcc

SEQ ID NO: 617414 - DNA, 564 bp, Homo sapiens
ctgcctcatgtcaatttggtttctagatccagttgaagagcccactgagagctaaagggggttggaggtaatctctagttcccttacagatcagttacaagttctaactctaacaggagaaagtgttttcccattaagagaactgggtatatatttaggaatgacttacataagcaaaaactggttaaagtaccattttcayataaagcatgcactttaataccagtccaatgattataaattcaaggttttagtatctgcagtaaaatagtcagtgtatctgaatggaaggagtgggcaagaatcggggaaggaatatgtcacagaatagaatgcaggcgggacgtgttttctatttcttcctctcgattgcatctcttcatgctggtagttaaggttttcctactttggctccagcatctgcagaggttccagctgatgggttcctgctctggtaagttgtgatcctctgtattcacctgtcagtttctcctgttttaggggtagcagttttcactgtgacttcacttcttttatggatctaagaagacctgttgctttttc

SEQ ID NO: 617415 - DNA, 564 bp, Homo sapiens
ctgcctcatgtcaatttggtttctagatccagttgaagagcccactgagagctaaagggggttggaggtaatctctagttcccttacagatcagttacaagttctaactctaacaggagaaagtgttttcccattaagagaactgggtatatatttaggaatgacttacataagcaaaaactggttaaagtaccattttcatataaagcatgcactktaataccagtccaatgattataaattcaaggttttagtatctgcagtaaaatagtcagtgtatctgaatggaaggagtgggcaagaatcggggaaggaatatgtcacagaatagaatgcaggcgggacgtgttttctatttcttcctctcgattgcatctcttcatgctggtagttaaggttttcctactttggctccagcatctgcagaggttccagctgatgggttcctgctctggtaagttgtgatcctctgtattcacctgtcagtttctcctgttttaggggtagcagttttcactgtgacttcacttcttttatggatctaagaagacctgttgctttttc

SEQ ID NO: 617416 - DNA, 564 bp, Homo sapiens
ctgcctcatgtcaatttggtttctagatccagttgaagagcccactgagagctaaagggggttggaggtaatctctagttcccttacagatcagttacaagttctaactctaacaggagaaagtgttttcccattaagagaactgggtatatatttaggaatgacttacataagcaaaaactggttaaagtaccattttcatataaagcatgcactttaataccagtccaatgattataaattcaaggttttagtatctgcagtaaaatagtcagtgtatctgaatggaaggagtgggcaagaatcggggaaggaatatgtcacagaatagaatgcaggcgggacgtgttttctatttcttcctctcgattgcatctcttcatgctggtagttaaggttttcctactttggctccagcatctgcagaggttccagctgatgggttcctgctctggtaagttgtgatcctctgtattcacctgtcagtttctcctrttttaggggtagcagttttcactgtgacttcacttcttttatggatctaagaagacctgttgctttttc

SEQ ID NO: 617417 - DNA, 535 bp, Homo sapiens
gcatgggagatttgtctctattttttgatcatttatttcagtaaagactaatgtatttatttcagattttaggttataatcaatcactactttatcttattgcttaaatagttccaactttgacttttgggagctctttcagtgagttcctgtgtctatttgacatactcctattgctgtgaatttttgtttgtttgtttgtttgtgaacattgccttaccttctggcactactagatgctccaggctcatcttataaagttccttccttagttctgaataagctctttctctaaggagctctggttgcttttttttttagaaaacggtattagaaaccaagatctaggtgctaggtatgttcattgctgctggaattattgcttttaagctcttaattcattttgattctccaatttttctatctcagtccaaagaaagcctctttargttggctttagtgttattcttaaataattccacaggactttaattgcttccttcttttcctgccccaaaaaaaggctcccaggctc

SEQ ID NO: 617418 - DNA, 548 bp, Homo sapiens
caatcatgttgaatgtagctgasatgtcaaccatgataggaaaacgtcctttatgcttggcaattctgagaggtattcagatgagacaatcaggaaggaagttagactggcaaagagtgagagtattagtgggataactggatacaaatatgtgcatatagacaactctagaaaattctgtgaagtgtaaacacttagaaaatgaagaaaatggaacagagaataaagacccagggtggggtgatgggtagcaacagggtatgaagatgatccttagcaaatgggtaaggggaggagacacatgggaagagaaagctgaaaggaaaaacacagaacaattatgactgtggatgagtctgatggcattttgttctcctctaaggaagtcatattctcataaacaaaaattattatgcataagaaatagaggaaaataagaattgtaaccaacacttatatttacgtgtacacatttacatatatttatttgtgcagtagacagaagtactgataaaagcatatcaaaatggagctgaaatactgaaaac

SEQ ID NO: 617419 - DNA, 563 bp, Homo sapiens
taggaaaacgtcctttatgcttggcaattctgagaggtattcagatgagacaatcaggaaggaagttagactggcaaagagtgagagtattagtgggataactggatacaaatatgtgcatatagacaactctagaaaattctgtgaagtgtaaacacttagaaaatgaagaaaatggaacagagaataaagacccagggtggggtgatgggtagcaacagggtatgaagatgatccttagcaaatgggtaaggggaggagacacatgggaagagaaagctgaaaggaaaaacacagaacaattatgactgtggatgagtctgakggcattttgttctcctctaaggaagtcatattctcataaacaaaaattattatgcataagaaatagaggaaaataagaattgtaaccaacacttatatttacgtgtacacatttacatatatttatttgtgcagtagacagaagtactgataaaagcatatcaaaatggagctgaaatactgaaaacatggcatggtctcccaactttaccagaattcatgttgagaggaaaaaatat

SEQ ID NO: 617420 - DNA, 434 bp, Homo sapiens
tgataggcaactaaacctatcctctcccctccaaaatattccatgcatacaccatcaccagatttatatcaaagatgacactgtagtatagtggaaagcctttttaataaatgattccaggtcaattgatatccacatggaaaaaattaattttgacctcacaccatacacaaaaatcaattccaaaaatcaattagacatctaactttaaarggtaaaaataataagacttttaaaagaaattgtaggcgcatttctttgtaaccttgaagtaggtaaaaatttattaaatagaatacaaaatgcactagttttaaaagcaaaatggataaatttaatgatattaacattatgaaattcattttattaaaaaacacccttaagagaatgagaaggcaggcttaccatgggatatgacatttctaattcatatg

SEQ ID NO: 617421 - DNA, 395 bp, Homo sapiens
gaattcagaacactgtgcaaatacaatttgcgtacatttatacatagagattatactttaatgcaattaaaaacatcaattctactatcttatggttacatgccagacaaaataattagaaggcacagtttaaackcttaaggaatttcataaatccaagtaagaaaaatgacattcatgacatgatattatttgaatgtcaaagaagcaataattataatgaaaataatataccagaactgaaatgaggaagcaaatttaaggaaaagcaaatgagattaaaataatttctaggataagccctttctttacttttgttttggatgcagtgtttggaaaagacatgcaatgttatattttaaagtaacatatatcttttaatttcaaaaaagtgg

SEQ ID NO: 617422 - DNA, 605 bp, Homo sapiens
tatctagtcatttcattagcgtacaaaggacattcgtcactttggagattcctaaggttttaaaagctcctgtgtctggaatcagggtcaaagaccaaatattagaacaaaagatgctcttagcaccccatcactcaggaaattacaaggattttaggagctctgtatccggaactgagggaagagaccaaatatatatttcctattatgtcataaatatctatttctcaaaacagaggttgagtctcttctgtggagcatctaaaggttggaaaatctcttcttatcctwtccttgtaaaaaatcgcctttgtggggtctgaggcaataatgatcctcttagcaggcctcattcaggccacttgagagattctaatgcattgagaggattcataaaatagtttctcagaagtaagattacatgtttattttgtgcatacacccagaagttttgcaataagtgcatttttataattctaatagatttccagggtactgcctattcttttttctatgctaatagcaagaggctgttgagatgggagcaattttttaaaaattctgaatataagcaatgtaaatatcactgccaatttgtgaatctg

SEQ ID NO: 617423 - DNA, 530 bp, Homo sapiens
ctctctggttctatgactattattatcccactatgtgggattactaaacccatccaactcaagttgcttgtttcaaacacctctttcccttgtattttcaaggtgcattatatatgtattcagatataatcaaggatattgccctgtgtgttctgtttttagggttccaatcttggtacctaacataaagacctacaaagagtgcaaagcagacgggtagcttttgagtgcctatctcagtcacacatcactacttccgcttttaatttccctatctcttgcaaattcttcaagttaactttatttttgttccacatttttcccatacttacttgactttctcctctcattttcttctgaaaacttcaagccttattttttatcttaaatcatgactgtttctttttctctgtcctttagctgagactatatatattttagtacrtgaatgttgtatttgcatcacagttaaaccatttaacaccaagtgcaataaaattttaggggaccaaatactatgttctcttctg

SEQ ID NO: 617424 - DNA, 570 bp, Homo sapiens
aatttctttctaggcagggcagcaatggttacatggtaattttattctaaagaacattcacaatcttgtctgaaactatttctcaagccttatctctacattttctgcatgaccccattttcctcctgcagcattggtttcagctaggctaactggccatccctcattgtgccatacatctacttattcattttttaatattttcatttctttatatacaggcagtccttgactttcaacatttcactatgtgtgaattcagttactrtggtttagttacatgacaccagtcatccagcaactcaattcaaaatttagttacaagggtatattaactataataatcatataaagcacaaactttgctgctagctcttcagtgcaaaaatcactactgaaataatatatgcacatcatgactggtgaccaatcatattgcttccttcaaaatatgttggtaattggtccttacgcatctgttactcagttcatgcacagacagcaagttgtgttgcttcccaatgatagccccatgtgatattttagaaataaagataattgaaagagaaa

SEQ ID NO: 617425 - DNA, 578 bp, Homo sapiens
tatgaagtccttgcccatgcttatgtcctgaatggtgttgcctaggttttcttctagggtttttatggttttmgatctaacatttaagtctttaatccatcttgaattaatttttgtataaggtgtaaggaagggtccagtttcagttttctgcatatggctagccagttttcgtaacaccatttattcaatagggaatcctttccccattgcttgtttttgtcaggtttgtcaaagatcagatggttgtagatgtgtggcattatttctgaggcctctgttctgttccattggtctatatatctgttttggtaccagaaccgtgttgtttgggttactgtagccttgtagtatacttctttgaagtaaggtagtgtgatgcctccagctttgttctttttgcttaggattgtcttggctatacaggctgttttttggttccatatgaaatttaaagtagtttttttctaattctgtgaagaaagtcaatggcagcttgatggggatagcattgaatctacaaattattttgggcactatggccattttcacaatattaattcttcctatccatgagc

SEQ ID NO: 617426 - DNA, 578 bp, Homo sapiens
tatgaagtccttgcccatgcttatgtcctgaatggtgttgcctaggttttcttctagggtttttatggttttcgatctaacatttaagtctttaatccatcttgaattaatttttgtataaggtgtaaggaagggtccagtttcagttttctgcatatggctagccagttttcgtaacaccatttattcaatagggaatcctttccccattgcttgtttttgtcaggtttgtcaaagatcagatggttgtagatgtgtggcattatttctgaggcctctgttctgttccattggtctatatmtctgttttggtaccagaaccgtgttgtttgggttactgtagccttgtagtatacttctttgaagtaaggtagtgtgatgcctccagctttgttctttttgcttaggattgtcttggctatacaggctgttttttggttccatatgaaatttaaagtagtttttttctaattctgtgaagaaagtcaatggcagcttgatggggatagcattgaatctacaaattattttgggcactatggccattttcacaatattaattcttcctatccatgagc

SEQ ID NO: 617427 - DNA, 578 bp, Homo sapiens
tatgaagtccttgcccatgcttatgtcctgaatggtgttgcctaggttttcttctagggtttttatggttttcgatctaacatttaagtctttaatccatcttgaattaatttttgtataaggtgtaaggaagggtccagtttcagttttctgcatatggctagccagttttcgtaacaccatttattcaatagggaatcctttccccattgcttgtttttgtcaggtttgtcaaagatcagatggttgtagatgtgtggcattatttctgaggcctctgttctgttccattggtctatatatctgttttggtaccagaaccrtgttgtttgggttactgtagccttgtagtatacttctttgaagtaaggtagtgtgatgcctccagctttgttctttttgcttaggattgtcttggctatacaggctgttttttggttccatatgaaatttaaagtagtttttttctaattctgtgaagaaagtcaatggcagcttgatggggatagcattgaatctacaaattattttgggcactatggccattttcacaatattaattcttcctatccatgagc

SEQ ID NO: 617428 - DNA, 566 bp, Homo sapiens
tgagtacttaacatgccaagtttaatgctttccccataacagatggtcaataagactgatccctttctcctagagtagttaacttctgtgggattaaataattgctactccaacaactgtcccctctctctaattaataaagcattcaactggaaagacttcattttaatctgaagtgcagacattttgtagttgctaaagtgtttacaaaagttactcttcttcaaatacaatttaaaaataatttagtgtaacaaatcctattctccccacctctctaattttgtatgatgacttcacacattgagttcattgttcaaaagatttctgagatgttatgagtgcagaaaggcacaaacyaattttcatgccataataaatttaattttttatcaaaggaatggagagatttttttttttttttttcagaaataacggtgccttaaaagatagttgagactagggaagaatgatgtggaaatagaaggtgagctctcagaacctgacagtacaccagcgcaagttcgtgctctaacaattggcgtgtgtcacaaactaggtgattc

SEQ ID NO: 617429 - DNA, 566 bp, Homo sapiens
tgagtacttaacatgccaagtttaatgctttccccataacagatggtcaataagactgatccctttctcctagagtagttaacttctgtgggattaaataattgctactccaacaactgtcccctctctctaattaataaagcattcaactggaaagacttcattttaatctgaagtgcagacattttgtagttgctaaagtgtttacaaaagttactcttcttcaaatacaatttaaaaataatttagtgtaacaaatcctattctccccacctctctaattttgtatgatgacttcacacattgagttcattgttcaaaagatttctgagatgttatgagtgcagaaaggcacaaaccaattttcatgccataataaatttaattttttatcaaaggaatggagagatttttttttttttttttcaraaataacggtgccttaaaagatagttgagactagggaagaatgatgtggaaatagaaggtgagctctcagaacctgacagtacaccagcgcaagttcgtgctctaacaattggcgtgtgtcacaaactaggtgattc

SEQ ID NO: 617430 - DNA, 572 bp, Homo sapiens
tatctttgttttggggctttggtaacacatagagtctacttgagttttaaggctgctttttaccaatgtctcaaaagaatttgaaagcctaacagaatttaatactagctactaaaatcagagcaggctgtcacagagagtttaaaattttttttctgaaaagtaagaacattttggttttctgagaccttgagtggaatgacctgagtgcatatctaagtgactttcaaaaatgtagttattaccaagccttgcctataaaaatccacttaaaaagaaagagagagagagagacagggtgctctgtcktccaggctggagtgcagtggcacaatcctagctcactgcaacctcgacctcctaggttcaagcaatccttccacctcagcctcctagtagctaggactacaggtggagcccaccatgcccctctaatttttatttattttttttaatagagattggggttttgctgtgtcacccaggctggtctcgaactgctgacctcaaagcaatcctcctacctcagcctcttaaagttctgggattacaggtgtaagctaccatgcctg

SEQ ID NO: 617431 - DNA, 572 bp, Homo sapiens
tatctttgttttggggctttggtaacacatagagtctacttgagttttaaggctgctttttaccaatgtctcaaaagaatttgaaagcctaacagaatttaatactagctactaaaatcagagcaggctgtcacagagagtttaaaattttttttctgaaaagtaagaacattttggttttctgagaccttgagtggaatgacctgagtgcatatctaagtgactttcaaaaatgtagttattaccaagccttgcctataaaaatccacttaaaaagaaagagagagagagagacagggtgctctgtcgtccaggctggagtgcagtggcacaatcctagctcactgcaacctcgacctcctaggttcaagcaatccttccacctcagcctcctagtagctaggactacaggtggagcccaccatgcccctctaatttttatttattttttttaatagagattggggttttgctgtgtcacccaggctggtctckaactgctgacctcaaagcaatcctcctacctcagcctcttaaagttctgggattacaggtgtaagctaccatgcctg

SEQ ID NO: 617432 - DNA, 586 bp, Homo sapiens
agggaacaattctcattgcatttccagcagtcgtgatcctttatgaaaaataatacggcattaaaatacttgaaacaaaaagctttagaaatacaagggaaaagagaaattgagttgttgtgggtaaattaaggaaactttccaggcttatttagaaagaggtatatgtattattttcttaggcatttttgatggaacatgacccatctagttcttggctgggcctagaatgagcaggctcagatatttttcttagtttaggttatattctgccctaataacaatgtttattaacaactgttgtagagatatcaacatctgtagaatgaaattcattatttttccctctgaaatcagttctgtcttggatgctaaaacccattaaattgtaacacaattcactcaggctgctaaactaaacatgtcatccytggctctcttcatctctaaaatgtatctattgaatctgactcctcctctccccctcactatcacggtcttattttaggctttctttgatctaaccaatgttgtccctggcactggactcatacaaacctgatcacaccattttctttagaaactt

SEQ ID NO: 617433 - DNA, 533 bp, Homo sapiens
ccaatttttctttgaatgtctaatagaattcacctgtgaatctgtctggtcttggactttttttttggttggcaattttttattatcacttcaatctcactgcttgttattggttgattcagagtttctatttcttcctggtttaatttagaagggttgtatagttccaggaatgtatacatctcttctaggctttctagtttatgtgcataaaactgttcatagtagccttgaatgatcttttgtatttctgtggtatcagttgtaatgtctcctgtattagtctgttttcatgctgctgataaaaacatacctgagactgggtaatttataaaagaaagaggtttattkggcttacagttccacatggctgggaggcctcacaatcatggcagaaggcaaggaggatcaagtcatatcttacatggatggcaggaggtcaaaagagagcttgtgctgggcaacttcctctttaaaaccatcagatcttgggagacgcattcactatcatgagaataacacgggaaagaccc

SEQ ID NO: 617434 - DNA, 460 bp, Homo sapiens
gtggagcagaagttcacaatgtgagtctccacatgctactgtgtctgtgcgagtgggagctgcaagctagtcctgcctcctatccaccatcttctcttctaattgtgtatttaaacataggaaaggtaatatgctgcactatgacattatgaygactacaatgtcactaggtggtagaaaattttcagtttcactaatgatcttaagggtatatactgtccattgttgacccaattgtatatcatagtggtcctatgaaattataatgttgtatttttactgtacctttttattttttacttttcttttttactatacctcttttttggcaaaatgttcaaatcttttgtgtgatttttattagattgttctgtatatttgtggaaaaggtatgttttatagatacagttgttgctttaaaaaaactttttgcaagtgtttatctttgaaatgttcagac

SEQ ID NO: 617435 - DNA, 612 bp, Homo sapiens
gctgcatagtattccatggtgtatatgtaccacattttctttatccagcctatcattgatgggcatttgggttgatttcatgtctttactattgtgaatagtgcgcaatgaacatatgtgtgcaagaatttttttcatttgaaataattttatatataggaaagttgcaaaaatgatacaaagaattcatgtattctttcatccagcttcccttaatactaacatcttatattagcaaggataattatcaaaacaaagaaattgactttggcataatacttttaagcaaacaatagatgytccttgaattccatcagttttccagtagttcattgcttctatctcaggatccaatccagtattccacattgcagttactttttatgtctctttagtctcctctaatcaatgataattcttgaatttgacagttttaatgaataatggtcagttatgctgtagagtgtctctcagtttggttttgactcttgtattcttgtgattaaattgatacatctttggcaagtacactgtagaagtgatgttgtgtccttcccagtgcatcatatcagggtgtatatgatgtcaatatgtctcattacagatgatatt

SEQ ID NO: 617436 - DNA, 546 bp, Homo sapiens
aaaaatgatacaaagaattcatgtattctttcatccagcttcccttaatactaacatcttatattagcaaggataattatcaaaacaaagaaattgactttggcataatacttttaagcaaacaatagatgctccttgaattccatcagttttccagtagttcattgcttctatctcaggatccaatccagtattccacattgcagttactttttatgtctctttagtctcctctaatcaatgataattcttgaatttgacasttttaatgaataatggtcagttatgctgtagagtgtctctcagtttggttttgactcttgtattcttgtgattaaattgatacatctttggcaagtacactgtagaagtgatgttgtgtccttcccagtgcatcatatcagggtgtatatgatgtcaatatgtctcattacagatgatattaactttaatcattttcactaaaatattgtctgccaggttgctccaccataaaattatcactttcctttttgcaattaataaatatcttgggcaaaacactgt

SEQ ID NO: 617437 - DNA, 539 bp, Homo sapiens
accaaaagtctgggaactgctggtttagagtcacaatactgactgctcaaaatgacttttgtaagtaaaagcacttttagtctgtagatatacatgaaattgtacacatcatttaaagtatttttatttaagcaaatttaaaaattcttcctgtgctgataccttggctaattaatattagatgtagttcaaaacaagctaacggttaacccrggtaattcttgtctattttaagaatagacatgtctaacaattgtatttaaaataattcccaccaaaagactcatagcaacttggtgatctaaagtatgatctagccagctgtaaaaatattactgacatatctctacacggaattaacttaccagtgagattatcatatttgtgcttgatctattaagactgaagtttggctttgtctaaataaatcttattttaataaaagataaaaaataaaaaaataaattaataaaagatttaattaatacatcttattattttttatgcttcaaaatatactgaatcaacaagtcagaaaa

SEQ ID NO: 617438 - DNA, 539 bp, Homo sapiens
accaaaagtctgggaactgctggtttagagtcacaatactgactgctcaaaatgacttttgtaagtaaaagcacttttagtctgtagatatacatgaaattgtacacatcatttaaagtatttttatttaagcaaatttaaaaattcttcctgtgctgataccttggctaattaatattagatgtagttcaaaacaagctaacggttaacccaggtaattcttgtctattttaagaatagacatgtctaacaattgtatttaaaataattcccaccaaaagactcatagcaacttggtgatctaaagtatgatctagccagctgtaaaaatattactgacatatctctacayggaattaacttaccagtgagattatcatatttgtgcttgatctattaagactgaagtttggctttgtctaaataaatcttattttaataaaagataaaaaataaaaaaataaattaataaaagatttaattaatacatcttattattttttatgcttcaaaatatactgaatcaacaagtcagaaaa

SEQ ID NO: 617439 - DNA, 657 bp, Homo sapiens
ggaactgctggtttagagtcacaatactgactgctcaaaatgacttttgtaagtaaaagcacttttagtctgtagatatacatgaaattgtacacatcatttaaagtatttttatttaagcaaatttaaaaattcttcctgtgctgataccttggctaattaatattagatgtagttcaaaacaagctaacggttaacccaggtaattcttgtctattttaagaatagacatgtctaacaattgtatttaaaataattcccaccaaaagactcatagcaacttggtgatctaaagtatgatctagccagctgtaaaaatattactgacatatctctacacggaattaacttaccagtgagattatcatatttgtgcttgatctattaagactgaagtttggctttgtctaaataaatcttattttaataaaagataaaaaataaaaaaataaattaataaaagatttaattaatacatcttattattttttatgcttcaaaatatactgaatcaacaagtcagaaaaaaactgaacattgactggaaacaattacacattcgttttcctggagactctctcaatggcttacacaggagtgcrttctatttccaggtctgtttgacacagcagcagagatgaccttagtttgtacaaa

SEQ ID NO: 617440 - DNA, 529 bp, Homo sapiens
gggttcccatagtcttgggcagctctacccctgtggctctgcagggtatagccccctcccagctgctttcatgggctggcattgagtgtctgtggcttttccaggcacatggtgcaagctgttggtggatctaccattctggggtctggaggatggtggccctcttctcacaactaggcagtgccccagtaggaactatgcgtgggggctctgaccccacatttcccttctgctcttccctagcagatgttctccatgagtgccccacccctgaaacaaacttttgcctgggcatccatgcgtttccatacatcctctgaaatctaggcggaggttcccaaacccgaattcttaacttctgtgcacctacargctcaagaccacatggaagctgccaaggcttgacgctttcaccctttgaagcaacagcctgagctgtaccttggccccttttagtcatggctggagtgggtgggacacagggcaccaagtccctagacttcacacagcaaggggaccccaggcccag

SEQ ID NO: 617441 - DNA, 529 bp, Homo sapiens
gggttcccatagtcttgggcagctctacccctgtggctctgcagggtatagccccctcccagctgctttcatgggctggcattgagtgtctgtggcttttccaggcacatggtgcaagctgttggtggatctaccattctggggtctggaggatggtggccctcttctcacaactaggcagtgccccagtaggaactatgcgtgggggctctgaccccacatttcccttctgctcttccctagcagatgttctccatgagtgccccacccctgaaacaaacttttgcctgggcatccatgcgtttccatacatcctctgaaatctaggcggaggttcccaaacccgaattcttaacttctgtgcacctacaggctcaagaccacatggaagctgccaaggcttgaygctttcaccctttgaagcaacagcctgagctgtaccttggccccttttagtcatggctggagtgggtgggacacagggcaccaagtccctagacttcacacagcaaggggaccccaggcccag

SEQ ID NO: 617442 - DNA, 560 bp, Homo sapiens
tagtgggaggctaaaggcacttcttacatgacagcggcagagaaaatgagaaaaatgcaaaagcagaaacccctgataaacccgtcagatctcgagagacttattcactcccatgagaacagtatgggggaaaactgtccccatgrttcaaattatctcccattgggttcctcccacaacacatgagaattatgggaatacaattcaagatgagaactgggtggggacacagagccaaaccatgtcacctgatgattgataaagaaggaaaataggaaagttgagagagaattattcttaatatttatgtatacaaacttcaggaaacctttactaaactcacatccagctggtttgaaacaaaaaagaatgtgcctcaggtgacatcaactgatcacctattcctttgacctaatagtgccaagcactcttctagtttctgaatgatatatattctgtccattcatactagaaaacatttcttcagtgactgttacgtgttagacaacataccgggcaatatggttacaaagatgaaagaaactcagcctctgcccaca

SEQ ID NO: 617443 - DNA, 543 bp, Homo sapiens
acaaacataacatggaactagcagtaaaagactgagtttatacttaaagaactaagtgctacagtccattgtaaactgagtgatcatggaagtcaccaaggaagtgcagcttcatttggactttgcagcaaggggtggttttgcatagttggaggtgggaaggcagaggtcattctaggtgggaagattaaagacatggaagaaaatatacaagaagtgacacaaagctagcttagcgaggggagggtgctgtactatattttctcttcactggcttccaattcaaagacagtagtcttggtattgctaagataattttgatggcactctacaaaattaatgtttcatgcaacttacaactcttaygtatttctccctgttatttcccttctctttgaatctcactttcatcttttttttttctcttgaactttttagcttccatctatagttccaatagacattgttcaggtgtattaatggctttgcttttgtagaagttcttaagctcgttatatcttcaggacaggtgagaattgggag

SEQ ID NO: 617444 - DNA, 575 bp, Homo sapiens
caagtgatttgcatggcattatcagatgtcccaaatcaataagagacagatgcccaaaggtatcactaaacactagagtcatctaggaagtagtgtgaatttattagtgaatgttttcagattaggatttcttttgcttatgtgtgcaacaccagactagaaggcacacacagaatgaatagttggataacaaggtgacctttctgcctaygtatggaagctcccaagtaagtgtacttagttccattttggggattcattttaggcatcttcagagctctgtttgcttgggcaggtagacacaccattgatgcagggagagatttgaactgatggatcctctcctaacctgtcagaacaccatgcttctctgcttagttgtggctgagggatgatacttaaaaaaaaacaacatgcatctttttatttatttatttgacaaataaaaattgtgcatgtttattgtgtacaacatgatgttttgaaatatgcatacgtttaggaatgactaaatcaagttaataacatatgtttacatatgcattacaagatatcattgcattacaatatgcaat

SEQ ID NO: 617445 - DNA, 575 bp, Homo sapiens
cactaaacactagagtcatctaggaagtagtgtgaatttattagtgaatgttttcagattaggatttcttttgcttatgtgtgcaacaccagactagaaggcacacacagaatgaatagttggataacaaggtgacctttctgcctatgtatggaagctcccaagtaagygtacttagttccattttggggattcattttaggcatcttcagagctctgtttgcttgggcaggtagacacaccattgatgcagggagagatttgaactgatggatcctctcctaacctgtcagaacaccatgcttctctgcttagttgtggctgagggatgatacttaaaaaaaaacaacatgcatctttttatttatttatttgacaaataaaaattgtgcatgtttattgtgtacaacatgatgttttgaaatatgcatacgtttaggaatgactaaatcaagttaataacatatgtttacatatgcattacaagatatcattgcattacaatatgcaatttgtacatacccaaaattgtatatctatgttttttaaaatcagaaactttttcatgaaaagtg

SEQ ID NO: 617446 - DNA, 575 bp, Homo sapiens
cactaaacactagagtcatctaggaagtagtgtgaatttattagtgaatgttttcagattaggatttcttttgcttatgtgtgcaacaccagactagaaggcacacacagaatgaatagttggataacaaggtgacctttctgcctatgtatggaagctcccaagtaagtgtacttagttccattttggggattcattttaggcatcttcagagctctgtttgcttgggcagrtagacacaccattgatgcagggagagatttgaactgatggatcctctcctaacctgtcagaacaccatgcttctctgcttagttgtggctgagggatgatacttaaaaaaaaacaacatgcatctttttatttatttatttgacaaataaaaattgtgcatgtttattgtgtacaacatgatgttttgaaatatgcatacgtttaggaatgactaaatcaagttaataacatatgtttacatatgcattacaagatatcattgcattacaatatgcaatttgtacatacccaaaattgtatatctatgttttttaaaatcagaaactttttcatgaaaagtg

SEQ ID NO: 617447 - DNA, 575 bp, Homo sapiens
caagtgatttgcatggcattatcagatgtcccaaatcaataagagacagatgcccaaaggtatcactaaacactagagtcatctaggaagtagtgtgaatttattagtgaatgttttcagattaggatttcttttgcttatgtgtgcaacaccagactagaaggcacacacagaatgaatagttggataacaaggtgacctttctgcctatgtatggaagctcccaagtaagtgtacttagttccattttggggattcattttaggcatcttcagagctctgtttgcttgggcaggtagacacaccattgatgcagggagagatttgaactgatggatcctctcctaacctgtcagaacaccatgcttctctgcttagttgtggctgagggatgatacttaaaaaaaaacaacatgcatctttttatttatttatttgacaaataaaaattgtgcatgtttattgtgtacaacatgatgttttgaaatatgcatacrtttaggaatgactaaatcaagttaataacatatgtttacatatgcattacaagatatcattgcattacaatatgcaat

SEQ ID NO: 617448 - DNA, 670 bp, Homo sapiens
agatatcattgcattacaatatgcaatttgtacatacccaaaattgtatatctatgttttttaaaatcagaaactttttcatgaaaagtgaactgattttatgatattgttttagattaagattttttaaaaagtattcgtcttttttgttgttgtttgkgtaagttccaatttgtattttaatggaaatactgacaaaagctgtttttcatataatacagtcatattttgtagtcatctgtttggttttactatttaaaagcatcacttgtatcaacttcccccaaatatataattttaaaaaacatcttttattttaagataacgatactattttgttatgaaaataggacagattcattaatagaaaatgtaaaaaatacaggaaagtgggggaaacatcaccagaacaactactgacatttctaatattttctttcagtttctccctatgctaaatagattttacatatttcaaatcaaactgcagatgatattatactttccttttttctccttatagtaaagaagaaagccttaaaaacccttgagtgaatggttggtatttacagacaagcaaatgtatggaagagaaacgagagacccagcctgaatctgttgaatgaacgaaaggggaaatgccctaaggagtcagatggaagaagttttt

SEQ ID NO: 617449 - DNA, 670 bp, Homo sapiens
agatatcattgcattacaatatgcaatttgtacatacccaaaattgtatatctatgttttttaaaatcagaaactttttcatgaaaagtgaactgattttatgatattgttttagattaagattttttaaaaagtattcgtcttttttgttgttgtttgtgtaagttccaatttgtattttaatggaaatactgacaaaagctgtttttcatataatacagtcatattttgtagtcatctgtttggttttactatttaaaagcatcacttgtatcaacttcccccaaatatataattttaaaaaacatcttttattttaagataacgatactattttgttatgaaaataggacagattcattaatagaaaatgtaaaaaatacaggaaagtgggggaaacatcaccagaacaactactgacatttctaatattttctttcagtttctccctatgctaaatagattttayatatttcaaatcaaactgcagatgatattatactttccttttttctccttatagtaaagaagaaagccttaaaaacccttgagtgaatggttggtatttacagacaagcaaatgtatggaagagaaacgagagacccagcctgaatctgttgaatgaacgaaaggggaaatgccctaaggagtcagatggaagaagttttt

SEQ ID NO: 617450 - DNA, 562 bp, Homo sapiens
agattcattaatagaaaatgtaaaaaatacaggaaagtgggggaaacatcaccagaacaactactgacatttctaatattttctttcagtttctccctatgctaaatagattttacatatttcaaatcaaactgcagatgatattatactttccttttttctccttatagtaaagaagaaagccttaaaaacccttgagtgaatggttggtatttacagacaagcaaatgtatggaagagaaacgagagacccagcctgaatctgttgaatgaacsaaaggggaaatgccctaaggagtcagatggaagaagtttttctgggaagagcagaacacaggagttggggtgcagacctcctggatcaccagcagaaggaaaagagcagtgagacgttaaagtgattgagacaaaaatggaagtaaaacagcttaaggctttctgagatcgagttcctggcagtgtcatcagcagatggtttcttctgaagttcaggggaagagaagatgctcgaagaactctccagggactgagtgggtggtacagagctagtgctgtagatgcc

SEQ ID NO: 617451 - DNA, 533 bp, Homo sapiens
ctgcaagaagcccagaggcaacagggagctcaacacrtggatgctggggaagagagagagagaaagagaaagagaggaaccggtgggactatgcggttcttaaggtccacgggcattattccttaggcttttgcgtggcggttgtggattggctagtttaaagaaaacacagcaaagggagaacttatttacataactctggtgttaatcatgtgttttattgtagttagcagatgtggtgtgtgttggattttgggccaataagaggaggaacaagcaggctatgttgtaaacaaccactatggggaggggaagttttaatttaaccaaagtgatggggttggactaggtttcaaacaacttatgtcaggtctaaaactgaatgctgaggcagcaactatattaaacaaatttatgacagtgatgctggcatcacttactgcttttagttcaaccctgcaacaggttttcaaacatgaccattttgctttcttatgcttgcaaattagaaacatcattaaataggctacata

SEQ ID NO: 617452 - DNA, 533 bp, Homo sapiens
ctgcaagaagcccagaggcaacagggagctcaacacatggatgctggggaagagagagagagaaagagaaagagaggaaccggtgggactatgyggttcttaaggtccacgggcattattccttaggcttttgcgtggcggttgtggattggctagtttaaagaaaacacagcaaagggagaacttatttacataactctggtgttaatcatgtgttttattgtagttagcagatgtggtgtgtgttggattttgggccaataagaggaggaacaagcaggctatgttgtaaacaaccactatggggaggggaagttttaatttaaccaaagtgatggggttggactaggtttcaaacaacttatgtcaggtctaaaactgaatgctgaggcagcaactatattaaacaaatttatgacagtgatgctggcatcacttactgcttttagttcaaccctgcaacaggttttcaaacatgaccattttgctttcttatgcttgcaaattagaaacatcattaaataggctacata

SEQ ID NO: 617453 - DNA, 599 bp, Homo sapiens
ggatgtaatctggtacttgtaaataaaactcagagttctcaaaagaaaatcataaaagtagcatattgcaatcaaagagcagatgtcttgtgatgtcaagctgaatatttatggtcttgctctaagccaatctctgaaactgacaacaaattacaaattatttgaatatctaaaagagaataatttcattagaaaggtgttaaaaactttgctttgcaaacaaacaaacaaacaaaaaacaaatagatttttagttctaagaaaaaggaaaaaaacccacacaatactgaaatagaaaaattcaacaatgtattcaagagtttctgattactagtaatgagtgacccagaacaactagattagacttcttttaattagattgtggtaagtattccaacatacctgaaagatgaaaaaaatattcttaatttgattcttgctaatttaaattctcaaccaaattaactttagtgattaaatttcacacgtaaaaatgtttaacatcttatttcttagttggccttggaagtgtttctagwttattctggctcttctgcagaaggtctcaaaaagaaatgtggtaatttatcttctgtagt

SEQ ID NO: 617454 - DNA, 682 bp, Homo sapiens
atttaaattctcaaccaaattaactttagtgattaaatttcacacgtaaaaatgtttaacatcttatttcttagttggccttggaagtgtttctagattattctggctcttctgcagaaggtctcaaaaagaaatgtggtaatttatcttctgtagtcaaacatgtcacttttgctttttataatgaggcagaagggatactgttattcaccatayttctgctatgttaagatttggaagttaattggggagaaccataaataaggtcatcaaaatccaaatgcttcagtgaaacttgagccccctcgacaacattcctaaagtgttgttattttgtctttgcgggatattccagtgacatgttaatctgatccatcttcagagggttgtatcattcaaagtttacttcctgatatggtttggctttgtccccactcaaatctcatcttgaattgtagccgccataatccccatgtgtcatgggagggactctgtgggaggtaattgaatcatggggccgggtttttcccatgctgttctcatgatagtgaataagtctcatgagatttgatggttttataaaagacgttcccctacacatgctcccttgcctgctgccatgtaagatatgtctttgctcttccttcaccttccaccttgattgtgaggcctccccagccat

SEQ ID NO: 617455 - DNA, 682 bp, Homo sapiens
atttaaattctcaaccaaattaactttagtgattaaatttcacacgtaaaaatgtttaacatcttatttcttagttggccttggaagtgtttctagattattctggctcttctgcagaaggtctcaaaaagaaatgtggtaatttatcttctgtagtcaaacatgtcacttttgctttttataatgaggcagaagggatactgttattcaccatatttctgctatgttaagatttggaagttaattggggagaaccataaataaggtcatcaaaatccaaatgcttcagtgaaacttgagccccctcgacaacattcctaaagtgttgttattttgtctttgckggatattccagtgacatgttaatctgatccatcttcagagggttgtatcattcaaagtttacttcctgatatggtttggctttgtccccactcaaatctcatcttgaattgtagccgccataatccccatgtgtcatgggagggactctgtgggaggtaattgaatcatggggccgggtttttcccatgctgttctcatgatagtgaataagtctcatgagatttgatggttttataaaagacgttcccctacacatgctcccttgcctgctgccatgtaagatatgtctttgctcttccttcaccttccaccttgattgtgaggcctccccagccat

SEQ ID NO: 617456 - DNA, 579 bp, Homo sapiens
gaagctgcatgtagtacatctggttcagctgcagtgcctgaagctgcccaccctgcygcagcagccagtgtgcctgcctgtgcgctgtggctgaaccccatgctcacttgcccacacacccctcactgatccgagcctggcttgcccttggcaggtatggaatccaggctgatagcatgagccgagtgcagccttccaggatgagtgggcaaagcgagcccaccaggcatgagcaatactcaggcagaaggtaccaccagccacagaggtttccagctggtgaagcaacaccccaagtatcccgtgacaatctgagtagcaggaagagaatgtctgaaagctgtgtatttttgttgcaatgactatcttcttggtttctgaccaggaagactcagaataagtatggtagcatttgttgtcctggaatagaaagacaggcaccaatcatgaggacaatttggttaataatggcaggaaagcaaaaaggagaggaaagtttcaatgcaagtacagatctaagcatggaattgagtcaaccaaaaaattctttgctctgtgattactgttcaatcccagcac

SEQ ID NO: 617457 - DNA, 608 bp, Homo sapiens
atgtgtctatgtgtatgcctttgtgtgcttctgtactttctatttatacatttcctattggcagcatgtaaggacttttactatcttggaaattaaatagaatattccttgagagttaaactttgggtaaaaaaccagagcagagataagcaaagtattgggaaaggtaaagaatggttcccatgttgaaaggatttgattgcaactcaattgtccatattaattcacttgaataaagactgttatctmtgtaaataagggttagccagtaatggaaatatagaaaatggagagtttcagggaaataaatgttggcaatgccaactcaggaatagccaagggaatgaatactgctaaatattcctttgaaactcaaatgcttcccttaccaagaaaggtgtcccttttgtgatgagaaatgcaattaattgtaggcaatgaaaacagcatgttctggatccattcacaacaataatatttctatggacaagtgggtatgtttcatgttatcttagcacaatgcccttgaacagtttatacatcaaatcatctttctactaattccacacttacctagttaccatctatttatgatttgattttccatt

SEQ ID NO: 617458 - DNA, 435 bp, Homo sapiens
agctgaagaatgaactatcaaatcatgcccaagcaaggtctagaagtggaagaaacaattattctggacatctttcagtcaagtgtatcattatcatagattcccaggcattyttatcaaaattgtggctgtgttaagaagttttgcaaggttagcttctgagaaggtgaaaaaatttaggctgaaaaatctgctatatttgccatctttaaccaggtagacagattttactcctgctgaaaaaaaaaaaaaaacctttgcattgaaaaaagaattatctttgaatgttttctttaagacacaattcaagcactattttaagggcatctaccttctctttcatcaagtattgagcacctacaagatactagaaattctgttagatctggggatagaatacagcctaatagaaaacaatctaaacgctattattct

SEQ ID NO: 617459 - DNA, 366 bp, Homo sapiens
ataaaaaaaaaaaaattaaaaaaaaaaaaagaaacttaatcttaatgctcttggctttgtcagctctttcttttatagtttctatctttgattttatgccttkaaattgttatctcaacctaaaagctgataaaaatttatttatatatttttcttattttgtatgtgtgtgtgtgtgttttaattcttacacatttaacattttaggctgtctagaatttatttttgtgtgtggaataaaaatgtgatcacatgtatttcttttacattaagatttcagacagaatatatctaaagtgcacattgtataacccttctctcagtgatctgaaatgccatttttatcatacaccaaattctcagtct

SEQ ID NO: 617460 - DNA, 646 bp, Homo sapiens
aagtgagatcatgcaatattttcattttttttggcttatttcacttggcacagtgtcctccaggctcatccatattgtggtaaatgacaagatctcattcttcctttagggtggaatcatattctattatatatatgtaccacagtttttttatccatttgtccaatgatggacacaggatttttccttatcttggctattgttagtaatgctacaatgaacatgagtgcaggtatctttatgatgtaktgacttcattccctttgggtataaatgcagaagatggaattactgggtcacatgttaattctgtttttattttattttatttttttagaaatcaccatactgttttctataatggtggcaccaatatatattcccaccaacagtgcacaagcattccctttctccacgtccttgtcaatatttatcttttaactttttgataatagtcatcctaacagttgtgcagtggcatcatgagtggttttgatgtgtatttccctgatgactaatgatgttgagcaccattttatatatctgtcagccatttttatgtcttctatggaggaatgtttattcaggtcttttgcctatattttatttgaactatttgtccactatttttaatatttttcactat

SEQ ID NO: 617461 - DNA, 572 bp, Homo sapiens
aatttcttaaattttatttgtggttctcacctgagagaattgatgccttcaagagagcaccagacagaggctaaacagacatgcaataaaattatcctccttggatgggtcaggagctggctgataacttactctaagcctacatcaatcagggagcagcaggggcatccacagtcaaggagagctgaaggtggcagggcgtacagccgcagatcatcttaaataaagatayagaaggcagactctcataaaagaaaccataaatgaaacaatgaataacgacttctgtttatcattctctattgtttgcaactttcacaataagcgtgtattgttttcttaaataaatagcaaacaataaactcatattgatatggcatcaattttcactgaataccctaagaggaagccatgtttttcctgcgttttgtaaagcttacaggtggatttcttttttcttttcttaaaaagagtacattcggactgatcagtgagttcatgcatctgggtaaatggataagcaaatattaaatttgacatcactgttttcattattactcatttcagaaatt

SEQ ID NO: 617462 - DNA, 582 bp, Homo sapiens
tctatggctccttaagccagtttcctttgctttgcttagtgatgattaatggtgatccagatcctacatggtggtttcatttcccactgatgagcccaataatagaaccaactttacgcatgaaaaacttaaagctattytttaatagattcaaggaggtacaaaatctaataaaagtcaaatagatcaatgcttcaatgtgcttataggccttttttaagttcccacagagaactttccatgttcactgtctcatttttacaaaactctatgccttgttccatttgaatcacaaatagtgacatccttgaactagacctaaaatgactgtcaactaaaacccaaccatttacagaatagtccatggccctaatgagggagcctaccgtgagagctgggctcaaaaattaagtagcaaatctgataagatcttctcttttaggggattttaagtataaaatacacggagagggacacaatcacatgggtgatgcacaagagaaggtagcaagaagaaggaataatccagtagaaattatgaggtagcagatgttacgaacaaggaagaattgtgtggcagat

SEQ ID NO: 617463 - DNA, 536 bp, Homo sapiens
agttgaggttttctgagggcaaatttgtgcttgctacctgaagggtcttaatatgcaaacattactgtatttgcaggaaagaaagtattttattgccctagaagttagttttttatttttatagatttagggttacaaatgttgttgtgttacatggtgtattgcatagtgctgaaatctgaacttttagtgtacccaccacctgaatagtgtgcattgtatccataagaagtctttcaacacttacccctgtacccctgcaactctactayattttggagtctccaatgtctctctctctatctctctctttttttggagacagattcttgctctgttgcccacgctggagtgcagcagtgtgatcttggctcactgcaacctctgcctcccaggttcaaatgattctcctgcctcagtctcccaagtagctgggactacaggcatgcaccaccacgccaggctaattttgtatttttagtagagacaggattttaccatgttggccaggttggtctcaaattcctgacctcagg

SEQ ID NO: 617464 - DNA, 598 bp, Homo sapiens
tggcattggcagaatcagttaaarcagtagcagtgaaggacagagaggcacatgtggtgtccattgccatttgcattgggaatagaccctgatgtaagattagcagcagcatcaatagcctcagaaaaatagctgtcaactatagaaggagcatcaggatctactccgaaggcagagagggattacttcacctgacagtacatctgcacttaaaaggtcaaaaacaacctctgttgttgagagtactagtggttctagggggaatgaagtctcagtaacacacactgtggggtgtgtgtggatgggtggagggggccttagggaggacgaggagagaggaagggagtaaggaggaacaatgcaaatatctgtgctgataacccaagaccttgaattatccccgctcaatttaactggaggatgggaagagattatagaagcaaacataacatggaaagaaaacataactagattttctttctcttctcccttttccttccttccttcctttactccatctctttgtctttctattctaaacatttttaaactttttattttgaagcaattttacacttacaaaaatgttataaaaata

SEQ ID NO: 617465 - DNA, 598 bp, Homo sapiens
tggcattggcagaatcagttaaaacagtagcagtgaaggacagagaggcacatgtggtgtccattgccatttgcattgggaatagaccctgatgtaagattagcagcagcatcaatagcctcagaaaaawagctgtcaactatagaaggagcatcaggatctactccgaaggcagagagggattacttcacctgacagtacatctgcacttaaaaggtcaaaaacaacctctgttgttgagagtactagtggttctagggggaatgaagtctcagtaacacacactgtggggtgtgtgtggatgggtggagggggccttagggaggacgaggagagaggaagggagtaaggaggaacaatgcaaatatctgtgctgataacccaagaccttgaattatccccgctcaatttaactggaggatgggaagagattatagaagcaaacataacatggaaagaaaacataactagattttctttctcttctcccttttccttccttccttcctttactccatctctttgtctttctattctaaacatttttaaactttttattttgaagcaattttacacttacaaaaatgttataaaaata

SEQ ID NO: 617466 - DNA, 596 bp, Homo sapiens
attctcattcccctctccagagatctgcagtaatcttgaaaactgtattagtccattttcayactgttgtaaagatactacctgagactgggtaatttataaacaaaggaggtttagttgactcacagtttcatatgactggggagctggagaaacagtcatggcagaaggggaagcaggcaccttcttcacacctcagcaggagaaacagaagccaagggggaagagccccttataaaaccatcagatctcgtgagaactcactattatgaaaacagcatggggaaaaccgcccccatgatctaaccacctcccacttctcacctcaacacctgggtacaattcaagatgagatttgggtgggaacacaaagccaaaccatataaaaaatcaatatccttgcaatgaatgtatctgcaaaacacagcagaacagaatcagaataaaggtggcagaaaagtttgcagcttccctctcaagccacccaaacttcatttccagataatctttatttgacctgagtcagaattaactcattctgaacaactttttccctgggaaaaactgattgaaaacaatcaatggtgattttttaa

SEQ ID NO: 617467 - DNA, 568 bp, Homo sapiens
gaagagaaagattcaattttgttaagatrtcagttcttcacaagttgatctgaagattcaatgtaatcctgatcaaaaccccaataagttattttgtggatatttacaaactgactaaagtttatgaggagaggcaaaagaccccaaataactaacatgatattgaaggagaagaacaaaatcacgggactgactctatccaacttcaaggtatactatcaagctatagtaaccaagacagtgtagtgctggcaaaataatagacaaatagatcaaagaaacaaaatagatagcctagaaatagacgcacacatacaaagtcaactgctctttgataaggagacagaggcaattcaatggacaaagcatgatcttttaaacaaatggaactggaatatccacatgccaaaaaaacccccaaaacatcctagacacagatcatcctacatctttcacaagcattcactaaaatgaactcaaaatgaataatagacttcactataaaaagtgaaagtataaaactataagaaaacataggagaaaatctaggtggccttgggtttggtga

SEQ ID NO: 617468 - DNA, 568 bp, Homo sapiens
gaagagaaagattcaattttgttaagatatcagttcttcacaagttgatctgaagattcaatgtaatcctgatcaaaaccccaataagttattttgtggatatttacaaactgactaaagtttatgaggagaggcaaaagaccccaaataactaacatgatattgaaggagaagaacaaaatcacgggactgactctatccaacttcaaggtatactatcaagctatagtaaccamgacagtgtagtgctggcaaaataatagacaaatagatcaaagaaacaaaatagatagcctagaaatagacgcacacatacaaagtcaactgctctttgataaggagacagaggcaattcaatggacaaagcatgatcttttaaacaaatggaactggaatatccacatgccaaaaaaacccccaaaacatcctagacacagatcatcctacatctttcacaagcattcactaaaatgaactcaaaatgaataatagacttcactataaaaagtgaaagtataaaactataagaaaacataggagaaaatctaggtggccttgggtttggtga

SEQ ID NO: 617469 - DNA, 621 bp, Homo sapiens
actttggaagaccatttgccagtttcatagaaaaataaacacactstcaccatatgattcagtgattgttctctttggtgtttattcaaatgagttgaaaatttatgtccacataaaaatttgcccacaaatatttatagcgtctttattcataactgtcaagacttgaaagcaaccaagctgtgcttccataggttaataggtaaacaagctgtgaacattcatacaatgaaatattatttaccaataaacaaatgaggtatcaagccacaaaaagacatgaagaacaagcaatgcatattgctcagtgaaagaagccaatttcaaaaggctacatactatatgaatccaactatagtattctagcaaagccaaaactaaaaacaaaacaatcagtggtcatgagggctttgggagagaggaggaatgaataggtagatcacagggtatttttagagcagtgaaactattttgtatgatactgtgatggtgaatacatgtccttaaactgttttaaaatccatagaatgttgaatacaagaatgaatcctaatgcaaactatgggctttaattaataatcatgtatcagtattagcttaccaattttaacaaatgcacta

SEQ ID NO: 617470 - DNA, 621 bp, Homo sapiens
actttggaagaccatttgccagtttcatagaaaaataaacacactctcaccatatgattcagtgattgttctctttggtgtttattcaaatgagttgaaaatttatgtccacataaaaatttgcccacaaatatttatagcgtctttattcataactgtcaagacttgaaagcaaccaagctgtgcttccataggttaataggtaaacaagctgtgaacattcatacaatgaaatattatttaccaataaacaaatgaggtatcaagccacaaaaagacatgaagaacaagcaatgcatattgctcagtgaaagaagccaatttcaaaaggctacatactatatgaatccaactatagtattctagcaaagccaaaactaaaaacaaaacaatcagtggtcatgagggctttgggagagaggaggaatgaataggtagatcacagggtatttttagagcagtgaaactattttgtatgatactgtgatggtgaatacatgtccttaaactkttttaaaatccatagaatgttgaatacaagaatgaatcctaatgcaaactatgggctttaattaataatcatgtatcagtattagcttaccaattttaacaaatgcacta

SEQ ID NO: 617471 - DNA, 405 bp, Homo sapiens
aaattacataatatcttggatattagccttgtacaattcctgccctacagctctttattatttttttttcctttttttttttttgagacagagtctcactctgtttcccaggctggagtgcagtggggcaatctcagctcactgcaacctccacctcccgagcggttcaagcaattctcctgcctcagcctgggattacaggtgcccaccaccacgcccagttaatttttgtatttttagtagagatggggttttaccatgttagccaagctggtctcgaactcctgacctcaagtgatycacctgccttggtctcccaaaatgctaggattacaggcatgagccactacacccggcctattatttttctttaactatttttttcctttttttttttttttaata

SEQ ID NO: 617472 - DNA, 544 bp, Homo sapiens
tattgtgtaaatgactcatcattttgccatttatctattataatcttaatattttcctttcggtgtggaagacttgtgttagatataaataacatacaaatcacatcctacccctctgcctgcttttccccttactggttagctttttttcactgtaagaccttctctgtgtttgtgtaagtaaaattgctcctttccactggtgattttttcctttcttctacaaatctaagagcgttgttgatttttccagaagtttaacatatttatccaattccctgttcctatgtttttgataattatatttgtaaaaatccttaatcctattctaccaggagttttccctaaggaaacgggaaacacttcaaatcatatggggaactgctaattaaaccgtgatgctctcagaacaagaaaataacgcggccatgaagatcctcatcattacagcagtgaaactgcactgtgttgtgtgagamtctggaggctaggaaacaaaaacggagagctgtggctctgcgatggcgaggatggatgtgaccgt

SEQ ID NO: 617473 - DNA, 606 bp, Homo sapiens
accatctgttcccagcttctccctaggagaagagttgaagcaggtacccagccttccaacttttccaggggctgctcaagggatagatttctgtctcttctgtcttagagcactgatgagacctagtaaaatcaagatgctttgggggcctctragaacaaagcacaaaggtttgagaggcccccaaaatctctgggcagactgactgatgaggatttcctcctgcataagttcagtcgtgaaggtagggaaaggtggctgcattttctaatgcatagatactgacacaaaaactcaaggaaaatgaagaaacagggaaatatattcggaacaaagcaacaggataaatctccggaaacagtctcaatacgatggagattcaagcacgcctcattttattgcactttattgcattttgcagacactgtgtgtgttttttgtttgatcgtttgttcacaaattgaaaaaaaaaaaaagactctgcattaagcaagtctagcaatgccattttcccaacagcatgtgctcacataatgtctctgtgtcacattttggtaattcttacactatttcaaacattgtcattattcttatgtttttcatggt

SEQ ID NO: 617474 - DNA, 534 bp, Homo sapiens
gctaggcgatgcagcatcaaggtgccatcttggaagcaaagagcagccctcaccagacaccaaacatgccagagtcttgattttggacttcccagcctccaggactgtgagaaataaatttctgttctttatacatgtgtctcaaccattccagatgttgaggatttgaatttatttccataagtctcaaagtctttggtgatgcaggtggtgctgctgaaatgttacaaatcaacatgtgggtttcttgtttggctaaaaaatatctccggattccagatgatacaaagttggggttagagtattagggagcatcgatagcaagataaagaaagccactcagcctggcttgagttaaatgaagtttgttataataaagcaacagatggcaaccaccacggagtgggmagccaggccttgtcaacctaaataacaaacattttgaaaagaaaatgatatttatttgggaataggcattgcgatggaaatgcatgtactataatacactatgtacctattcagggaggtaaagga

SEQ ID NO: 617475 - DNA, 540 bp, Homo sapiens
cctccgtctctcgggttcaagcaattctcctgcctcagcctcccaagtagctgggattacaggcacccgccaccatgcctggctaattttttgtatttttagagagacagggtttcaccatgttggccaggttggtctcgatctcctgacctcaggtgatccacccacctcggcctcccaaagtgctgggattatagtcatgagccgccatggccagtctttttttttttgacaggatctcattctatcatccaggctggagtgcagtggcatgatcatggttcaatgtagcctcgacctcccaggatcaagcgatcttcccgcgtcagcctcctgactaactgggaccacagacatgcaccaccatgcccagmtaattttttgtatttttagtattgtctgggtttcaccatgttgcccaggtgggtctcgacctcctgggctcaagcgatccgcctgccccagccttccaaattactgggattacaaggcgtgagccactgtgcccagcctattctaaggttaagtggagaaagtttt

SEQ ID NO: 617476 - DNA, 457 bp, Homo sapiens
ggcacaccactatctggagtatctaagcaataaacacrctgaacccaacacactggccaaccactccttcactctacaacaggcttcatatactctcctgtgttaaagattttggtaactgcctaaatttttgtttcattgggccagtaaaccctttatgaattactacatggcaaacattttttaaaataaaacaaaaattctaatagccccaatctccctgaccctaactacaagaaaaaaaaaaaagcctacaatttcattgctttgcttaaaataggatgtagatataaaatctttttacagaaaagcatctttgttcccttttaacagtgacaatctatacactgccttaattgggcccctgtatttctcagcatgaatttcattttttactgaagattttctttaaagcaggtaaaaccggtttgttctttaaaaaaaaaatcaataagaa

SEQ ID NO: 617477 - DNA, 457 bp, Homo sapiens
ggcacaccactatctggagtatctaagcaataaacacgctgaacccaacacactggccaaccactccttcactctacaacaggcttcatatactctcctgtgttaaagattttggtaactgcctaaatttttgtttcattgggccagtaaaccctttatgaattactacatggcaaacawtttttaaaataaaacaaaaattctaatagccccaatctccctgaccctaactacaagaaaaaaaaaaaagcctacaatttcattgctttgcttaaaataggatgtagatataaaatctttttacagaaaagcatctttgttcccttttaacagtgacaatctatacactgccttaattgggcccctgtatttctcagcatgaatttcattttttactgaagattttctttaaagcaggtaaaaccggtttgttctttaaaaaaaaaatcaataagaa

SEQ ID NO: 617478 - DNA, 599 bp, Homo sapiens
ttacaaatgttaaagcaatgaaaatattaactttaatgactgttagacgtggcacagagggaggagactaagacaagttcaaggttgctgttttgtataatttgagaaaacatctagcataattcctgataatgacagctattagtattatcatcatcgactacaactcacacatttcacaggttaaaaagcatcaacaacctgtggcccccatagaaagagtggaatcatactcctactggaraagctaccatgctttattgtagaataactgtttgcccacctctctctctcattgttaaactgtggactctccaagggcaggaatcctgtcatatttatctctgcatctccagcagctacttttataaatgtttgtcgatttgaaacataaaatacggagcctttaaatgctatttagtagccattcctgtttgaagaactttattttgataccttggaaaaccaaataaaggcagctcaactagttcctacttaagcaggacttgttcaattcagtgctgttagcactgatggtttatacgtccaggaaaagctctctgaatagaggctgtgttttgcatataagatttacagta

SEQ ID NO: 617479 - DNA, 566 bp, Homo sapiens
cttagggaaaggaaaggggaaaatttagtttgatggagtcttagaaattctattacccaatagtatcataagttaatattcttaaattgcaattatacttagtatttccagtccctttgactgctgttgatttccagattcccattttgggctggacaatctgactgcatccctgygatttcaccaatactttcctactctgcattcctccacctaccctgtagagttgtataaatatgtccatttatacagctgatttttctaggtttcctttgattcattctcatatgacaaattcctcaagagcaaaaactaggccttcatctttcttaataatgacttacagtaaggatggaagtactggttattgctaaaaaatcttttgatagtctcaaactctttcaaaaagttgaagagggtggaacatttcctaactcattctatgacagcagcattacccacaccaaagcctgacaaagacactacaagaaataaaaattacagaccaaagtctctgatcaatattgatggaaaaattgtcaacaaaatactagcaagctgaattc

SEQ ID NO: 617480 - DNA, 568 bp, Homo sapiens
caggcatgtaattttaactttcaaaagttcaaacgtccactagaaactcaatgttcctattagacatgtcaaaaagcacagtattccgattattttattcagtattttcaatgaaawgtttcaccacataattcatggctaaatgtgttatagagaatatttagagagaacaaaagaagattcggatttaccttaagtcttttaactcagtcaagatatggaaatataagatcactggatgccaaaaaaataaacgaacgaaaaacaagcttttgatctgtaaatgttcacaatgagacaatgagctaatgaaagaaatctcattacttcatctctgttagaagtaacagtagtaataatactggcttttccaagaaccactctgtcaagccttcacatttggcttaacaataacatcaaaaggaaaattctcaaatatgaccaaactcagcataagaacatacttgagtgcacgatgaaactttacagatcctactttcctaacaatacaaaaaactttcaaaaaattaataaaatactctcatggatagctaacatttaaaacata

SEQ ID NO: 617481 - DNA, 454 bp, Homo sapiens
ttgaggaacactgttaaaaacagatgaaaaacttctctttgctacctaatgtgcattgtgaatttataatatgcatcttttccaaaacttatttttgaccatgtaacttttaaaacattttcctggattttctggagactagaatttcactgccacttgggaaatactggcctagaacttacttcttcataaactcaatattaatttttctgctccccttttcaaaccctcctggaattgttctttagtaaagctgagggtctccaaaataatcatatgttgtacgatattcatcagtattgtcctattccaagttgaacagtacaaaacatcataaaagccarttaaaaagccacttacaaagacaatttctaaacctgatttaagatgaaaacaaatgtcataagaattaattgagaagtaaaaattaaaatggttgattttgttatatact

SEQ ID NO: 617482 - DNA, 503 bp, Homo sapiens
accttcactaaaaggaagacagaaaggaaagaaagaagagaaaaccacaaaacaaccagacaacaaataacaaaatggcaagagtaagtccttacttaccaacaacattgaatgtcaatggactaaactcttcaatcaaaagacatagaatggctgaatggataaaaaaaaaaaaagacccagtaatctgttgcctacaagaaacacaggtaagctataaagacagatatagactaaaaataaggggatggaagaatatatcccatgccaatggaaaccaaaaaagagcaggaacagctatacttttgtcagacaaaatrgatttcaagacaaaaactaagagacaaagaaggtcactatataatggtaaaggggtcaattcagtaagaggataaaataattttaaatatatttgcactgagcactggagcacctagaaatataatacaaatattattagagttaaagtgagagataaaccccaatataataataactggaga

SEQ ID NO: 617483 - DNA, 295 bp, Homo sapiens
ttctgtcataatttccttcccttttaaggctgaataattttccattgtgtatatgtaccatattttgttcatccattcattcattgatagatacttgagttgcttctaccttttggcaattgtgagtgatgctgttatgaacatgggtgtacaaatgtctgttttgagtccttgttttgctttcgtgcattctattaaaaatgttaagrttctttgctttttacttttttttctcttttatccaccttttgactttattcttaaagttttatcttggtataataatttatggtat

SEQ ID NO: 617484 - DNA, 690 bp, Homo sapiens
atattctataacatgcatagctgagttcacaaaaaagtacagaaaataagcaataaacaagagtaataaaaaattgataattgaaaaagaaatggtaagttattgctgaagctatgaatgtattgtgtaattaaacaagaagcatgggttgtaatgaccatattagggagagtggagtcttggactcatgctgggtcctgggactaacctccaatgaaagtttatagaagaaagaacacattagctagcagaataytaagaaaagaaaaaattgaaaacaaggcaaacttgaattccaatacaaacatattctacataacatctcctcaattactgttttttttagggaaagatctcttggtttttgatatccaaatattttatggagtagatctgtcattataatgtttttcagccgatatatacaagaaaaatatatgcatatttacaaagctcactgaattataaatgagcatgcagagattatctcaatttatatatcaaatgcaatttgcagagtttaaaaatcaaataatgatgtttagaaaaacattttaagcatcaacaaagctaatgcatataaaatgtattaggaggcactaagggaaatcatactatacacaagggaactttttatttaacaatcatatgtacttttgctaatccagtagaaactgtttaaaatatttg

SEQ ID NO: 617485 - DNA, 518 bp, Homo sapiens
cggactcggtctcagaaaaaaaaaaaaagaaatatattttaaacctgtaattttatgacatttaataaatattatacttttgtaatcaacaccctagtcaattctatcatgccagaaatttcccttgtacatttttgcagttaagcctcttaattctccctcagaaaaccacccatctctttttttctctcttgattatatttgtttatccagaccttcacagaaaggaaattatatagtaaacttatttttcctaatttttttcttccaatataatattttttagattaatacctctttgttgcatacwtcaatattttctcatttatttttgagtagtattctcttatacggatctaccaaaatttacatatctaccacaatttacgtattgcactggttgaaggctactaaaaataaagcgcttataaatattcacaaaacacttttaaatcaattagtattaatatctaagtgcataattgctaggtcttacaagtaaattattaattgtgtaa

SEQ ID NO: 617486 - DNA, 600 bp, Homo sapiens
taaaaatttccatggacttcgaacagatctatattaaatcttcaaataaaaaagaaacacatattgaagggaagttgatgttttatgttttcttttcaggcaaactatattaactttttaacattaacgctttttctaactttagccaaatgtatattggatatgataaatccataatcatttttttcacctgagtgcaattctgtcattttgtcaacaaatgctctgctcatgtattcactcttacataaggcctcagatggcagcacgagggtcacttgttcaagtttcatattaagctaccagagttatgtggcacctgggtaaaatgcaagaagaaaawttaagaggtcagattaagaactaactgaactgcatatacagagctgcgtaagtctcaggttcaaagggatacttggtgtggcacaaagaatgcaccctgctggccatttcagtggctgtaaaacactgagacttaagatctggtgggaaaccccccaaaagacaattgatgttaaatgttgtgtgtattgtaaaatactaagaaaacacatatttttattctaggataaatagaataaagtgttatcattaaaacca

SEQ ID NO: 617487 - DNA, 592 bp, Homo sapiens
gaagaaggtttttaacttgatatgaccccatttgttcatgtttgcttttgctatctatgcatttgaggtcttacacgaaaaaatctttgcctagagcaacgtcctggaatatttccccaatgttttcttctagtgctttcatagtttcaggtattagacttaagtcttcaatccattttgattagatttttgtatatgttgagagctaggggtctagattccctcttctgcatatggttaaccagtttttccaggatcatttattgaagagacttccctttccccattgtatgttcttggcacctttgttaaaaattagttggctataaatacatagatttatatctgagttctttattctattccattcatctatatgtctatttttatgccagtaccatgctgatttaattgccataactttgtagtatattttgsagtcaggtagtgtgatgcctctagctttgttctttttgctcaggattgctttggctactggggtcctttatttctgtgaagaatgtcattggtactttgatagcaattacattgagcctataatttgctttgggtgatactgtcattttaacag

SEQ ID NO: 617488 - DNA, 547 bp, Homo sapiens
gttcccatgtatgcctgtgacagtggtagtgtttgtgaaggtgaggctgatyaatgaaactaaggtggaaaacatctgagtaatggcatgtggacttacataacatcagatagttttggtagcaggaaaacacataaaactttctgctttcttttataaatcaaataattatgttagtggcattttggtaaattggttagaaagtttcatttcaaaagttttgattacaaagtttctgatgatttttgttgactgataaaaataggatatcctgaatttgcatattcaaaggattgagcttcttatttttattgccagtgagaattttccataacagaaaaggcttgacaagtattctcaccacgacttttcacatcccagcctgagaaatgagatcaaggaaagtggagcttgtctaattgctaatttgccaatttgagtctgtaggaagtggaaaatcgaggctttgactttactttaattttactttctatacttcgatatggactgaatttttaataagaccattaattattttttataataa

SEQ ID NO: 617489 - DNA, 547 bp, Homo sapiens
gttcccatgtatgcctgtgacagtggtagtgtttgtgaaggtgaggctgattaatgaaactaaggtggaaaacatctgagtaatggcatgtggacttacataacatcagatagttttggtagcaggaaaacacataaaactttctgctttcttttataaatcaaataattatgttagtggcattttggtaaattggttagaaagtttcatttcaaaagttttgattacaaagtttctgatgatttttgttgactgataaaaataggatatcctgaatttgcatattcaaaggattgagcttcttatttttattgccagtgagaattttccataacagaaaaggcttgacaagtattctcaccacgacttttcacatcccagcctgagaaatgagatcaaggaaagtggagcttgtctaattgctaatttgccaatttgagtctgtaggaagtggaaaatygaggctttgactttactttaattttactttctatacttcgatatggactgaatttttaataagaccattaattattttttataataa

SEQ ID NO: 617490 - DNA, 547 bp, Homo sapiens
gttcccatgtatgcctgtgacagtggtagtgtttgtgaaggtgaggctgattaatgaaactaaggtggaaaacatctgagtaatggcatgtggacttacataacatcagatagttttggtagcaggaaaacacataaaactttctgctttcttttataaatcaaataattatgttagtggcattttggtaaattggttagaaagtttcatttcaaaagttttgattacaaagtttctgatgatttttgttgactgataaaaataggatatcctgaatttgcatattcaaaggattgagcttcttatttttattgccagtgagaattttccataacagaaaaggcttgacaagtattctcaccacgacttttcacatcccagcctgagaaatgagatcaaggaaagtggagcttgtctaattgctaatttgccaatttgagtctgtaggaagtggaaaatcgaggctttgactttactttaattttactttctatacttygatatggactgaatttttaataagaccattaattattttttataataa

SEQ ID NO: 617491 - DNA, 568 bp, Homo sapiens
ggcccctatttttgtattcttaaaagagaccaggtttccccatgttggccaggctagtcttggccaactcctgacctcaagtatctgcccacctcagcctccyaaagtgctgggattacagtcatgagacgccatgcctggctgggatactgaattttgaatcagaaaatccagactttacaatagtcaaaaccatatcttatttgtctttctgctccattacccaggattttacttagaacatcagtagacacctgaaaacattggtcaaatagaagtgaataaatgattaaagaacaaattaacaagtaaatgaagcccgacataaataaaggccctgctaatccaccagctacactcgtgtgacaaaggccccagagatacccatgctctatatccatggaattgtgccatggggctggcttactggggattctatttacctgtggtcttgacgggcctccctggagaaacagtaacctgacatctggagagtacatttggctctgtgaactaggtcagatctgcagacttgtggtttacccacttagacccatgccacacacag

SEQ ID NO: 617492 - DNA, 568 bp, Homo sapiens
ggcccctatttttgtattcttaaaagagaccaggtttccccatgttggccaggctagtcttggccaactcctgacctcaagtatctgcccacctcagcctcctaaagtgctgggattacagtcatgagacgccatgcctggctgggatactgaattttgaatcagaaaatccagactttrcaatagtcaaaaccatatcttatttgtctttctgctccattacccaggattttacttagaacatcagtagacacctgaaaacattggtcaaatagaagtgaataaatgattaaagaacaaattaacaagtaaatgaagcccgacataaataaaggccctgctaatccaccagctacactcgtgtgacaaaggccccagagatacccatgctctatatccatggaattgtgccatggggctggcttactggggattctatttacctgtggtcttgacgggcctccctggagaaacagtaacctgacatctggagagtacatttggctctgtgaactaggtcagatctgcagacttgtggtttacccacttagacccatgccacacacag

SEQ ID NO: 617493 - DNA, 551 bp, Homo sapiens
tgtgcctcctctcctctctctagcttcttgctcttctctatgccctttgcctgaccctgcctctctggttctgaccttggctcccctcctgttttgcagtgagcatttacccttcagatcatatctgcagctgccactctgggcaaactccctctccctcaaacttggcctccatgtccattggccataggctgattttcccactgtgcttggtcaggcttcatgggtggaattcagacaccaggactgggcatcctggtcaaaaccaggggcaaacgctctcacctgcattcttgggcgggaggcaggggtcccaggtggccaagaaactcaccccataactgaacagaggtggcatgcccacactccgtccctggacaagggaagctcaaattcaaatagtatacaacattgtgcttctcacatagtaaaaccartctttcagaaatgtgtcctgaattcctaaggggaggaagggagaaagatcctccagaaaataaaaaaaaaaattccaataaaacgaagttggtccactggcaatatagtacaaa

SEQ ID NO: 617494 - DNA, 586 bp, Homo sapiens
ttagtgagattaaccaagaaaagaagagcgaggatccatataagctcaattagaaacaaaacaggagatatcacaactgataccacagaaatagatcattcaaggctaccatgaacacctttatgtgtataaactagaaaacctagaggagatacataaattcctggaaatacacaaccctcctagattaagccagcaagaaatagaaactctgaccacaccaataacaagcagcaagactgaaatggtaatttaaaaattgccrcacacacacacacacacacaaagtccaggaccagatggattcacagctggtgctgaattctgtctgatgttcaaagaatagttggtaccaatcctattgacactattccacaagataaagagggaatactccctaaattattctatgaagccagtatcaccctgataccaaaaccaggaaaggacataacagaaaaagaaaactacaggccactatccctaatgaatatagatgcaaaaatccttaacaaaatactagtgaattgaatccaacagcatatctaaaagataatccaacatgatcaagtgggtttcataccag

SEQ ID NO: 617495 - DNA, 525 bp, Homo sapiens
atcagaaataatatactgccatgttttatctttgatgattgaatatttagcaagcactccttctgtttttaaaaaaactggaatagtatagtatatctctgtaaaactctcctagtactaaaccaacatgcaacttttatcccattctcaactctcctgtttttccttccaccaagtttttgctcttctccccttctcaggggagaagaattgctratccagttgggtttcaagttactgattggaccacatttcttagtgggtgcttccttcttttttcagtgccatgtagatactctctcttccatttcctttttctttacagctaatgaactgcctcctcacagatgactagccatcttgttctctctctgttactccttttcacttaagtgggtaagctgatttagaacttcctgcttcaggacaggcgcggtggctcacgcctgtaatcccagtactttggcaggccgaggtaggcggatcacgaggtcaggactttttttttttttttttttgagacgg

SEQ ID NO: 617496 - DNA, 499 bp, Homo sapiens
gatctggggaagctgaggaagggaagatcgcttgagtccaggagttcaagaccagcttggacagcacagtgaaaccttgtctcattaaaaaaaaaaaaaaaaaaaaaaaaaaaaaaaaaaaaaaacagagagacagcgagaaagagaaagaattactgaattacaaaggaatattacttcttggaggatgaraataaagtttctgaggttctgtgtttgtggttcacaaataagaatttttagtctttcttcctggccctattcattgattagatagtcaaatcaacatatttttccccaaatatggttgtgtggtataatgagagttttatattaaaaatccttagaggtcaacaatctctagaggagatttttctcctatgtacataaagacaggactgacccccaaggagaacagttgttcttgttcccctccctcttatgtcattatccattagcaaaaatataaccacacctgaacagatccctttccaagata

SEQ ID NO: 617497 - DNA, 499 bp, Homo sapiens
gatctggggaagctgaggaagggaagatcgcttgagtccaggagttcaagaccagcttggacagcacagtgaaaccttgtctcattaaaaaaaaaaaaaaaaaaaaaaaaaaaaaaaaaaaaaaacagagagacagcgagaaagagaaagaattactgaattacaaaggaatattacttcttggaggatgagaataaagtttctgaggttctgtgtttgtggttcacaaataaraatttttagtctttcttcctggccctattcattgattagatagtcaaatcaacatatttttccccaaatatggttgtgtggtataatgagagttttatattaaaaatccttagaggtcaacaatctctagaggagatttttctcctatgtacataaagacaggactgacccccaaggagaacagttgttcttgttcccctccctcttatgtcattatccattagcaaaaatataaccacacctgaacagatccctttccaagata

SEQ ID NO: 617498 - DNA, 535 bp, Homo sapiens
atttgcactatatgcttgtaaaattatttacatttatttacaaagtaaatttatttacatttcatttgatgttcatcacaatcttgtaacagaggcacaagtttcatctatgggttagaaaattaaggccctgaggttctacagcgtataggaggcagatccagaaaaataactaaaataatgtacatcaaataaacaaatgcaaaatggagcagagttttaaaagaaagcattcagagatgccccaaaatcttcctgasattttctctgtataagcaattctgagtcctttggagtttacagcaaaagtaacatggggttgttgcaagattcccaagttactagagtttgagcacagcatggtcgtcagttctgcattgcaagaagctgtgcacttgcctagaaagctgcaagtgtcattgattcccctggtgattccgacatgaacatcttgatgttcatatgccctatgaggatcagggcaggagcgagcaattgccaattatattttttttcttttttttttttttttttt

SEQ ID NO: 617499 - DNA, 549 bp, Homo sapiens
tcaactgatctttgacaaaggagcaaagacagtacaatgaagcaaatatgatctgttcaacaaatgctgctggaacaagtagacatctgcatgtcaaataaggcaaaacaaggaatctagacaccacaaaccttacactcttcacaaaaattaattcaaaacatatcgtaggcctatgtgtaaaacatgaaagtatacaactcttagaaaacaacataggagaaaaccttgggtatgataagactttttagatataacagcaaaaacataatcatgaaagaatcaataagctagactttattaaaatcaaaaatttcttctctgtgaaaaacagtgctaagagaacgaaaagacaatctacactgtggaataaaatattttcaaaagacacatctgataaaggattgttatccaaaatatatgaagaactcctaaaactcaacaataaggaaaygatctaatttaaaaataagcaaaaaccttagcaggcacctcatcaaggaagattacagattacaaataagtatatgaaaatctgttcctcattat

SEQ ID NO: 617500 - DNA, 623 bp, Homo sapiens
tcattttggtttggatctattgctagagttagtgtgattctctggtgatgtaaaactctgttatttcatattgcctagaattatttttctgttttttttcttgtctaartaggctattacttgttattattttttaatttatttttgattggattgggcttttcttcccaccaaggatataactataatgttaatattgcctaactttggttatggatgctttagtagcaaagtttctctacgaatttcttggttatagagaaactatgtgcaatggctttctcagatgctgctcatagttatgatatgctgagtgtgtgtatttgtcagggttctccagagggacagaacttacaggatatatgtgtatatgaaaggtagtttattagagataattggctcacacaatcacaaggtgaagtcccatcatgataggccttctgcacactggggaagaaagaagccagtagtggttcatccaagttcaaaagcctcaaaagcagggaagccaacagggcagtcttcggtatgtgtcaatgtattttttatatatatatacacacatatatttatacatatataaaacaaatatatgtatatttatattttggggggtatatatt

SEQ ID NO: 617501 - DNA, 605 bp, Homo sapiens
tcttattataataattattgttattaccaccactcctaattttactaccaatagcacgatgagtttaatttggtagggaacatattagagccaaaatattctttttctccaactttgttgtcatatttgcacttgggaattttccatggatctgttttgtatattgtcccaactaatgtcatctgacccaayatacccaatgatagctggtccctgacttttatagttataaactagattcttttgtttgagattagtgggattagagcactatatttcaggaaatgtagagaagtaagtatagaagttaatattaatttaactgatacttttcctactcatacatataattacctttgttggaagagacattagagccaccacccatagttacccctcaagaaaggaggttcaaattatgcatacttagttgttccaagtctagtttagtgtagcagataagaatttcacaccataaactaaaatgtgaaaataatatgactttgtagtttagtttatgttttaaagctctaataggataatagattttattctgttgaggttcccaattttcaaagagtcatgtctaattttcagagttgtta

SEQ ID NO: 617502 - DNA, 557 bp, Homo sapiens
tttcctttataaattacccagtctcaagtgtgtttttattagcagtgtgagaacagactcatacaatatgttaaatactctgaagtggaattgtttcatcatagtgtggaggcatttataatttcattaaaaatgctgaagagttctctaaagttcttgttcattaacactctcatyggcaatgtataagagctccaattactttaatttcttgtgagcattgtgaatattttgatattagccattctaacaggtgaaacatggtatcttatcttggttttgtagggtcaatgcaaaatttccccttcaccctctgaaggtttgtggaaaatgatctgacaagaggaagattaatagtagatgaagcatagaaatgtatttgatcatagttttacataacatgagagcctttagaatgagaatccaaaagtacaggggagattgtccatttttatgattaggttgaacaaaatgtggacagccttgtgaaaatatgactgcactaaaaagataggactgtgggagggaggttccaagatggccaaagagaaatgact

SEQ ID NO: 617503 - DNA, 383 bp, Homo sapiens
tgttttcagaaaacaggccttgaacttctcgtaaaaaatgtaatctcaaatattttattctttttgatgaaattatgaatgaaattgtttttcttaacctcattttcggatgttcttggtgagcatatggagggtgtgctgatcccctcatgttgccctcccagaagtcatgcatcctttaaacaggaatgttttctaaatcacgggaayggtgggaaaagtatagggctttgtgtgaagtatctcagagtatatttggaaagatacactaaaactagattttaaaatatttggcatttatattgtgaattacacttgacaaaaatacctgaacagtggtaaagagaaagtaaagctaaaataaagaagactgagaaatggag

SEQ ID NO: 617504 - DNA, 385 bp, Homo sapiens
ctcaacattttaggactttatttttcttctcttcaaaataaggggctttcagacacagtgccttgggggctatcctgggaggaagggtatcctccctgtggctagaagagtccagcagaaakctgcccacaccactgggacagagcagctccaaatgcagcaatttcacatagttggggtccacgtgagttcactttctgaaaggacttgtgctttgacatcttggaagaccagtgcctgagctcatctttgatttcagcagcagctgagatagaaaattccacctgagcacagattcagccaggtttttggcaattgcccttcttccatccaactctgaaggcagtttcagaaagaagagcccaggctcccagctgctcctgct

SEQ ID NO: 617505 - DNA, 646 bp, Homo sapiens
tcttgccattatacacgttttaccttattaataagtgatatgtcagccaaacagtgctaaagctaatgstgtaaaaataaagattaatctgaccattacagccttctttcagcatgtccagtaaattctggatggatgccttgtatatttaaaagagtgccctgagataggagagacttaaagcacaaaaagtagcgttaaggtaaactcaattttcaaagatgtttcctcacctagacagcatatgtagtgtaaatatattttgaaaaaccattaaagaatctggtaggtatttttcaagatcagaaatatgaactggagcatacctgactaaattgtcaacagaacttcaggatagttgatgtttaggtttaatgggcaacaaatgccaagtcagtaacttctgttaaaattgggattggtaatccctgattcacaacagtgaaggccaaattttatgtaatcttaaatactactagttcaacaaatatttgaagacttactctagcaccctacactagtaagtatatgtgtattttaaaatctgcaatttaattaatgtttaattctatatgaacttaatataaaatgtgggaaataatttaaaatacagctttttcatattcatgcagtgaagttactgagc

SEQ ID NO: 617506 - DNA, 646 bp, Homo sapiens
tcttgccattatacacgttttaccttattaataagtgatatgtcagccaaacagtgctaaagctaatgctgtaaaaataaagattaatctgaccattacagccttctttcagcatgtccagtaaattctggatggatgccttgtatatttaaaagagtgccctgagataggagagacttaaagcacaaaaagtagcgttaaggtaaactcaattttcaaagatgtttcctcacctagacagcrtatgtagtgtaaatatattttgaaaaaccattaaagaatctggtaggtatttttcaagatcagaaatatgaactggagcatacctgactaaattgtcaacagaacttcaggatagttgatgtttaggtttaatgggcaacaaatgccaagtcagtaacttctgttaaaattgggattggtaatccctgattcacaacagtgaaggccaaattttatgtaatcttaaatactactagttcaacaaatatttgaagacttactctagcaccctacactagtaagtatatgtgtattttaaaatctgcaatttaattaatgtttaattctatatgaacttaatataaaatgtgggaaataatttaaaatacagctttttcatattcatgcagtgaagttactgagc

SEQ ID NO: 617507 - DNA, 646 bp, Homo sapiens
tcttgccattatacacgttttaccttattaataagtgatatgtcagccaaacagtgctaaagctaatgctgtaaaaataaagattaatctgaccattacagccttctttcagcatgtccagtaaattctggatggatgccttgtatatttaaaagagtgccctgagataggagagacttaaagcacaaaaagtagcgttaaggtaaactcaattttcaaagatgtttcctcacctagacagcatatgtagtgtaaatatattttgaaaaaccattaaagaatctggtaggtatttttcaagatcagaaatatgaactggagcatacctgactaaattgtcaacagaacttcaggatagttgatgtttaggtttaatgggcaacaaatgccaagtcagtaacttctgttaaaattgggatyggtaatccctgattcacaacagtgaaggccaaattttatgtaatcttaaatactactagttcaacaaatatttgaagacttactctagcaccctacactagtaagtatatgtgtattttaaaatctgcaatttaattaatgtttaattctatatgaacttaatataaaatgtgggaaataatttaaaatacagctttttcatattcatgcagtgaagttactgagc

SEQ ID NO: 617508 - DNA, 498 bp, Homo sapiens
agtgttaataaagacaagtatttattattatatcaaaaacttggcttttaatatatttttgttactgatttccacataattattttatctatatagttctgctaggtaaaacaatggccaacaaagaagcctacaccctaatccccagtacttgtgaatatgatcttataaatggcaaaagagactgtgtttataattaaggtaaggaaactgctggggagatcccaccaggtggggagactatcctgaatcgcccagatgggctcatctaatgtgtttacagaagcaaagaacctttcccagctgtgatcaaagagggctatggaaaggagttgatcacctttgcagcctttgaagatggaaaaagaggaccatgagccaaggaacgcgggtggccttgagaagctgggaaaggcaaggaaacacagcctcccttagatcttccaaaaaggaatgcagycttgtcaacaccttaattttagcccagtaagacctcta

SEQ ID NO: 617509 - DNA, 400 bp, Homo sapiens
aattctttagaatgtctggtttaaactgcactctagtttgatggaccttcctggagttatctgcaaaatttaccaaactagcagaatcaattgatttatctgaagagtgacttggaattgtacattcaaacattagaaaatgtctaccaaatttttttgtgtgtgtgtgtgtgtgtatttatagaagttaatgttatgatgttgagctgttctttcagcgagtaattagtaatcaggccctattcttaagaacatcatggtttatgatagaaaaattgcatcgccattgaagaaaataatgcttttttattgcattgacaagttggcatgtgtccaacttatctaaaaatrgaatcatttagatatgttagaggagaagtacacagggcttgtccaacct

SEQ ID NO: 617510 - DNA, 587 bp, Homo sapiens
ctgtcagtataatattgactagataaagaaataaactttacacaagtataaatgtgcttttctccttttgctaaaaggtagttagttcaatgttactggggtgatagtaaataaaaatcaaagaaaaggaaaataaggaagaagtatttagttcaagaggaaaattcttaatgatatattgaatagaacatttacatctcaggtttaaccaataccgaatcaaatacatttaagatctcaagagatcaagattatcctggccaacatgatgaaaccccatctgtattaaaaatacaaaattagctgggtgcggtggtgggagccagtagtcccagctacttgggaggctgaggcaggagaatcgcttgaacctgggaggcggaggttgcagtgagccaagatcgcgccactgcactccagcctggtgacagagcgagactctgtctcaaaaaaaaaaaaaaaaatacacctcagatcatgtgctgtaatgaacagaactatagaggctgggtagcccagtctgytcactttattggtgaggcagcaaatccaaagaagagaagagtctccacagactgtgcagcatg

SEQ ID NO: 617511 - DNA, 583 bp, Homo sapiens
gtcagctttctttcttgtcttcatgcttcattgtgctcacgtgctctctctgtccttgttctcattctcctcccccsctagactcgacttgttctcattctcctctccccatgactcgattcctcccctcagacatagaaaggactggaattgctctcacttatgtcatagccatatccttccctactctgtagttatattaaatcttcatgcatttggggaggcctaggaaggagaatcatttgaaccaaggaatttgagagcagcctgggcatcgtggtgaaaccccacctttacaaaaaatacaaaacttagccagttgtggcaacaggcacctgtaagtcccagctacttgagaggctaaggtgggaggactgcttgagcaacctccacaacagcaacctctgttgtggaggttgtgctttagtcctctgtatatgacttaatattcaaagcctagatttggaaattctggaaaaacccttttattgctcattaagccaggctcttacaaataataaaaaaaaacttcttttgagattatcatctcaccatagacttcaaaaatacctattttgaaatt

SEQ ID NO: 617512 - DNA, 583 bp, Homo sapiens
gtcagctttctttcttgtcttcatgcttcattgtgctcacgtgctctctctgtccttgttctcattctcctcccccgctagrctcgacttgttctcattctcctctccccatgactcgattcctcccctcagacatagaaaggactggaattgctctcacttatgtcatagccatatccttccctactctgtagttatattaaatcttcatgcatttggggaggcctaggaaggagaatcatttgaaccaaggaatttgagagcagcctgggcatcgtggtgaaaccccacctttacaaaaaatacaaaacttagccagttgtggcaacaggcacctgtaagtcccagctacttgagaggctaaggtgggaggactgcttgagcaacctccacaacagcaacctctgttgtggaggttgtgctttagtcctctgtatatgacttaatattcaaagcctagatttggaaattctggaaaaacccttttattgctcattaagccaggctcttacaaataataaaaaaaaacttcttttgagattatcatctcaccatagacttcaaaaatacctattttgaaatt

SEQ ID NO: 617513 - DNA, 583 bp, Homo sapiens
gtcagctttctttcttgtcttcatgcttcattgtgctcacgtgctctctctgtccttgttctcattctcctcccccgctagactcgacttgttctcattctcctctccccatgactcgattcctcccctcagacatagaaaggactggaattgctctcacttatgtcatagccatatycttccctactctgtagttatattaaatcttcatgcatttggggaggcctaggaaggagaatcatttgaaccaaggaatttgagagcagcctgggcatcgtggtgaaaccccacctttacaaaaaatacaaaacttagccagttgtggcaacaggcacctgtaagtcccagctacttgagaggctaaggtgggaggactgcttgagcaacctccacaacagcaacctctgttgtggaggttgtgctttagtcctctgtatatgacttaatattcaaagcctagatttggaaattctggaaaaacccttttattgctcattaagccaggctcttacaaataataaaaaaaaacttcttttgagattatcatctcaccatagacttcaaaaatacctattttgaaatt

SEQ ID NO: 617514 - DNA, 568 bp, Homo sapiens
ccatatccttccctactctgtagttatattaaatcttcaygcatttggggaggcctaggaaggagaatcatttgaaccaaggaatttgagagcagcctgggcatcgtggtgaaaccccacctttacaaaaaatacaaaacttagccagttgtggcaacaggcacctgtaagtcccagctacttgagaggctaaggtgggaggactgcttgagcaacctccacaacagcaacctctgttgtggaggttgtgctttagtcctctgtatatgacttaatattcaaagcctagatttggaaattctggaaaaacccttttattgctcattaagccaggctcttacaaataataaaaaaaaacttcttttgagattatcatctcaccatagacttcaaaaatacctattttgaaattcaaagcagaacattgatttctttggtcttggcagtgtctgccctctgctgcccttggaaataagatcaggcttaagtctgaaccttcacagcagaagggctgccagggacaaaccttcattactcagaggaacaatgcaataggttatacttaagc

SEQ ID NO: 617515 - DNA, 531 bp, Homo sapiens
tactcccagggtttagaatagtactggcatatagtagtgattaataaatgtyagcaactttttgtactaatagtagtagtagtaaatctgagctcgccttccctcctttatctgaaactaaaaacttcaagcaaatttgagcaaacacccttgtattggtgcctcaaattttgcccacttactcagaaaatttataaatgtatcctggtcattttaaaaattttagggctaaaagaacaaaggtatattttaatgattaaattaactaacagccttaagtctttctggggttcactcccactagtccttgcttacaagtagatgtcttggtatcttgatagactcaaaaggaaaatgcacttattttccaagtagagacagagagagagagagagaaaagacattgaaaacagacatggaatttgcgtctgttatttattcttccctgaaacactcttactctggccaacacaaaggttctttaccctcaaggaagtagtgactcttctttgcttaaggagtattaatttg

SEQ ID NO: 617516 - DNA, 381 bp, Homo sapiens
atcaaaaaagagaccaccactcactgccmccttataaattcatagttccatgtaaataggaatacagtaaactctgcaaaatttcagactaaatgaatttaaattttttaatacaggacttctcagagcttttattttgttattctgatttatgatccttcaagagaaaggtttactgtacgtgactgtgtgactcccccattttattcagactctcttactagataaatgtttctaggaatattgaggacttctgcccctgaaagcgatgtattttaatgtcctgtattgccttcaatttagtatatgtttgtttctttattgggtttctgctgtataccttgtactatgttgaaggctggagatgtagtgaagttcaaa

SEQ ID NO: 617517 - DNA, 381 bp, Homo sapiens
atcaaaaaagagaccaccactcactgccaccttataaattcatagttccatgtaaataggaatacagtaaactctgcaaaatttcagactaaatgaatttaaattttttaatacaggacttctcagagcttttattttgttattctgatttatgatccttcaagagaarggtttactgtacgtgactgtgtgactcccccattttattcagactctcttactagataaatgtttctaggaatattgaggacttctgcccctgaaagcgatgtattttaatgtcctgtattgccttcaatttagtatatgtttgtttctttattgggtttctgctgtataccttgtactatgttgaaggctggagatgtagtgaagttcaaa

SEQ ID NO: 617518 - DNA, 582 bp, Homo sapiens
aatccattaaaagatgacttcctttagcttctccagcaatttgttttcttatcctatctctcaaagccagactttttctatcgcctaagaaaacagttactatatctgatgttctgattgttactaatgtgctgatgggggtgtgttagttttagacctcagagaaacagatgccaaaatgggattagaagtgcaagagagatattggggraaatgcttacgaagggttaagggaagagaatagaagaggaggagagttcggtctgcagtgcagttccgatgcctgtggaggaaaaggactgggtaggaagaggtgcagtcagcagcacagctctaagaagacatcctctcatgacaagtcttaggtggtggttgttattttcaaaattactagaactcatgaatatgagcataaatgatatgttttcatctattgtattgttgtctttatagatgtcacatctttggttggtaggaccatgttagattggatcctgagtcattttgatgcaattatagtctttgataagttcattgccatctcatatgataacagattccaagctcatctcatacaattcc

SEQ ID NO: 617519 - DNA, 554 bp, Homo sapiens
cagagtgaagggaaagcactagaaccagcataagaaagttcaggaagcagctagctccaggggtttcagtggcaacagaactctgttgcttttatcagtcagtgagccatcagaagtagaaggcatgccattccaaccatcttttctgactttaggctcaagattcaaaatcctggaagagaaaaatcctgattcrcttagctttggctttatgctgaccttttgaccagttgagggaagactccttggttttcggtactctaagactgcacacaacgggaggcggtaggaaactgggagatgtaaattgatgctccagaggaaagacagcatggatgctgaatagtcaacaccaaaaacatccattatagctagctattgtcaaaaagcctgaatttttcttgaagagcaattaactatccttgaagttttcttaaaggctgcgtttgggttaatttctattaattaaaattaatatttaaaaaacatatctgtgattttttaaagattattttgggagataaaatagatgttccaggaatatatagcatgtt

SEQ ID NO: 617520 - DNA, 554 bp, Homo sapiens
cagagtgaagggaaagcactagaaccagcataagaaagttcaggaagcagctagctccaggggtttcagtggcaacagaactctgttgcttttatcagtcagtgagccatcagaagtagaaggcatgccattccaaccatcttttctgactttaggctcaagattcaaaatcctggaagagaaaaatcctgattcgcttagctttggctttatgctgaccttttgaccagttgagggaagactccttggttttcggtactctaagactgcacacaacgggaggcggtaggaaactgggagatgtaaattgatgctccagaggaaagacagcatggatgctgaatagtcaacaccaaaaacatccattatagctagctattgtcaaaaagcctgaatttttcttgaagagcaattaactatccttgaagttttcttaaaggctgmgtttgggttaatttctattaattaaaattaatatttaaaaaacatatctgtgattttttaaagattattttgggagataaaatagatgttccaggaatatatagcatgtt

SEQ ID NO: 617521 - DNA, 533 bp, Homo sapiens
aattctttggattctgccctgacattggcatgttgcacaataataaagtgctgctctctcctgatcttttgaaagatgaacaaaaaaagggtcatgtttcagttgccattttgttccttttctgattcatacttttggaatgtagctatagattatgggtcatttacaatcgataggcagagctgatttcccagctgctgacaagggccttatcctggaaattacctttactactactgtaaaatcctgaaattctaccccaggtatgtattaattgtgttccctacatgttaaactacaaatatccaggaaagaaggtaactatcgtagctctagttctaatgtttatttacaactttctcaactttttagttggcagcccattttgatgagggttagagagagaacagaaagctcatgagggagcccgtacctgagggaacagaaggcccatgagatgccgtaaaggaaaggagagaaaamaaggaggggcttttaagggaggttaagcatgaagggtcacatgtttaaga

SEQ ID NO: 617522 - DNA, 636 bp, Homo sapiens
atgacattgtctggagttacaatctttggcagatcacaagaaaatgagaaaggcaagtgaagaaagcaaatataatcaatgattagctgtatgacattataggtggatggaagatagtaagcagatatgtaagtcagaaggtagttactggtctgtcttggtgcctgctggtcctcaacacccataacaatgtcttacagatgatgtatctgctgaaggacaaaagaaaggatgggaaggattgttctcatgatatgtgctagctcctggccttgccttaattagtagttcgctatctttttccttagcccagagatctaattacagatttttccatgtctgtggcaagcattcaacaactagacaaatatagcaatacatcaataatattcaataatgcaataactattatatcctgtgttaacaatttcttargatttcccagaaattaattatactctatggaagtaaacaataaagaatcaggaatatttcccatgtacttttcctttaggacacacctaaataaaataaaaaggaaaagaaaaagattacttcaacattatcagagaaaactccaagctaaagagcccgctaatttagatacagtccatttttaggtaattgcagaagcgt

SEQ ID NO: 617523 - DNA, 610 bp, Homo sapiens
tgtgctagctcctggccttgccttaattagtagttcgctatctttttccttagcccagagatctaattacagatttttccatgtctgtggcaagcattcaacaactagacaaatatagcaatacatcaataatattcaataatgcaataactattatatcctgtgttaacaatttcttaagatttcccagaaattaattatactctatggaagtaaacaataaagaatcaggaatatttcccatgtacttttcctttaggacacacctaaataaaataaaaaggaaaagaaaaagattacttcaacattatcagagaaaactccaagctaaagagcccrctaatttagatacagtccatttttaggtaattgcagaagcgttgagtgctcagaacctttgtgggggtggcctcttgctttgctggcactcctggctggctggctggctggctatgctgacagtgtaagtcaagggattattagattggccacatgctctctgcttttgtttctttgtttttgttttgttttgggacagagataggaaggttgaatggggccccagagatctaagagtaaaggaggaggggagagaaatttgtagtgatga

SEQ ID NO: 617524 - DNA, 556 bp, Homo sapiens
aagatctaaaataattgatgaaggtggcaacacaaaacaacagattttctatgtatatcaaacagctttatactgggaaaagatgccatctaaaactttcatagctagaaagaagtcaatgcctgggttcaatgcttcagcagacaggcctgactcttgttaggagctaatacagttggtaacttaaagttggagctaatattcatttggaattcaaaaaatcctgtagcccttaagaattatgctaaatctactctgcctgcattctataaatagaatcacaaagcctagatgagagaatatctgtttacagtatagtttactgaatattttaaatgcactattgagacttactgctcaaaaaaaaaggattcctttcaaartattattgctcattgacagtgcacctagtcactcaacagctctggtatagaggtacaaagagattcatgttgtttctatgcctgctaacacaatatctgttctgcagccaatgggaaaaggagtaatttcaacttttaagtcttattatataaggaatacatttcataaagct

SEQ ID NO: 617525 - DNA, 526 bp, Homo sapiens
ctactcctggtgaaaatgctgtgaatattgttgaaataacaacaaaggatctagaatatctcattaacttagtacataaagcagcagcagggcttgagaagattggctccaattttgaaagaagttctattgtgggtaaaatactgtcaaaaagcattgcatgctacagagagatcttttatgaaaggaagtcagttgatgtggctgacttcattgtcttatactaagaaattgccacagtcaccccaaccttcagcagccaacatcccaatcagtcagcagccatctacatcaaggcragaccctccacggtgaaaatattacaactccctaaaggctggggtgatcattagcatttttaaacaataaaccattcaactctgaccctgtagcaaaaagcaatcatagacaatatgtaaatgaaaggatatggcgaggctgcaataaaaccttatttcacaaaagaggtggcacacccataagccgtagtttgccgaaccccttcctagagctaaaaataccacat

SEQ ID NO: 617526 - DNA, 598 bp, Homo sapiens
tttctaaattccaaactactaaaaattgaaagacataaacaaaaaatatgacttatccatatatcgatttttaaaattttaaatccaaagctttcccataaagaaatgccaggccctgatgaattcagtggtgaattccactaaatgtttaaggaagaaataatactccaaaatcttttttaggaattagaagagaatatttgccatttcatgtaaggaggctagcataatgttgatattaaaaattcttagcaaaaatatatttacaaataggatccagcaatatatataaaaataatacatcacattaggcggggtttaccccgggaatgaaaagttatattataaacacccatttataatgaaacaaaccaaaaaccctaaacctctcactttaaatgagatctacytaagcttgataaatagcatctaaggaaacttacagaaattaacaatttcccctgtagtctcaaaacaggcaaggctctctactttttccatttgtgtttaacgttgaactggaattcaataagacaaaaacaaaataaacatatatatataaatatatatttatgcaataagtacaataacacaaaca

SEQ ID NO: 617527 - DNA, 529 bp, Homo sapiens
gttatattataaacacccatttataatgaaacaaaccaaaaaccctaaacctctcactttaaatgagatctacctaagcttgataaatagcatctaaggaaacttacagaaattaacaatttcccctgtagtctcaaaacaggcaaggctytctactttttccatttgtgtttaacgttgaactggaattcaataagacaaaaacaaaataaacatatatatataaatatatatttatgcaataagtacaataacacaaacaatatatgaattgcaaaataataaatctttattcacagacatggtcatgtacatagaaaattctaaagaacgttccaaaaaattaaatttataggccaagcactgtggttcatgcctgtaatcccagcacttttagaggtgaagccagtaggatcgcttgagtctaggagtttgagattagcctaggcaatatagcaagactccacctctacaaaaaataagaaaattagccaggcatggtggtgcctgcctgcagtcccagctactc

SEQ ID NO: 617528 - DNA, 572 bp, Homo sapiens
atatgaggacatggagcggtttcttctggggatgagagagtgatcagaaaatagtaggcagaggggaatttccgagctggagattttggctcttggggatagtgtgatttcagtgaaaactagttttaagatgaattgtcaaaactgaggactgagataaaataaagaaggttattggaggaagtaaataaagtgtacagtcctgaaagatataagtawgggatggagaggagaggaagagaattgaagtcattgagggtagaaggaaaagtgatgcctactgtacaatggttaagagttaccagcgttgaaaacgtcccaaacaccctatcttacattaagacaagataataaatatgaaaatactttacaaattgttaatcactctccagaaaaaaaaaaggtgatctacagattattcattcactaaaatacgtactagccagctgagaacaaaagttcaatcttctttaagcttcatatgtttagcttaatttggcgcgaaatctgattattttatccagtatgtcaacatagaaaaatttaatttacaatttaaacacattatttct

SEQ ID NO: 617529 - DNA, 496 bp, Homo sapiens
gaaatggtggtgtctcattggagcgaaatctgcaattctctgagtcttaatgaggtttagcatcttttcatatgttaattaaccatttgtgattcggttttgaaatacttgtttattgcttttgcccatwtatctgtcacagtcttgtcttaataatgttagatgttaatcctttgttatatgtgttgtaaatatcttctcccatttcagtttgatttttcactctgaagacctttgatgttcagaagttcttaatttaaaaatgttatcaatcattgtatgaatctcttaggacttaaccttctgattttataggctttcatttcttttcgtgtatttgtttgggactttggctttctacatctgtagatgggtgtttttaatcaattttggaaaattttctctactattatttgttcaaatattgcttatatttctattctctcataaaagtttgattagacatgttttgcacttctcccatttaacttccttg

SEQ ID NO: 617530 - DNA, 595 bp, Homo sapiens
ttatctcatgtactatctcatttggtcacaacttatctagtagataagaatcattttctccattttacagatggaagaactgaaactagcagaattaacattgtgtgyttaaataattgccagtaaagtaggggaaaaaatgcactctcaagtcttctgtatttccaggcagggctttcctatagagatatgtggatggcatatcccccgccaaaaataatagctgtagatatgcgaactattcaaaaaagaaattgttatatgtgttatacaactagaaatcatgcagtttaggaatatttgaaatatgaactcattgaaaagaaggaaaataagaccttcaatttaaccattaggtcaggcaattgctggcacatctaaattactgacaataaatctcagagcaagtacaatacttctaagtatggttataagaattagaatcataaaaccatagaattgtgaaattacttacacatcatagaatccaatcccttctttttggagaaatggaaacataccccagaaggttaaatcatttgcccaaaataacatgattggttgttgaccctttctactaagccatccccagttc

SEQ ID NO: 617531 - DNA, 529 bp, Homo sapiens
agtgtgttttttcaactcaagaggactgttttctgcttgggattcctcttcctgggccttagtttggcgtgtgcctccgggcagaatgctgggcygatcattggtgccacctcatttgtttcctttctccaggtatcatggtcttcctctatctctgttgtctgagaacttgttacatatattttgttcagattttttctgtttacagtgggatgataaccatagttacttcatcaaggccagaagtagaatctgtgttctcattttaataatcaaatcatcacttagtgttcgccatgtgtcagcacaataatatcagaatcccagtgattatctttttattctttggacaatgaaaaagccagatattcttaccctatactttgattttcattacatcatttaataggaagtcaggagtggctttttcttaaaattgttgttacgacaggagttccaaaagtatttatttaacgaagggatgagtgaagtaagtattctttattagcaggcattcattcatgcttcc

SEQ ID NO: 617532 - DNA, 571 bp, Homo sapiens
ttacatattgatgtactaatactgtattataagagatatataaaatagaaatttttaaagaattagataaaatatcaatataaatgctaatattttattttccatactctagccaattgttttgccaatccctgggatcatatgggactcaaaggcctagctagcttcagtatagcatagggtgttggctctcttaggggaatatgagccacctggcatggagctgatcctactttctgctagaagcatcctcttaaaaataagagaaaagatacctaatattctttgggaaattttggcaatacagtaagatacagtaagcttaaatttgaggaggaaagagcatattaagatttatagatattaccttgtaaggagataacatttgatctgagatcaaattagcatccctttktatgtcaaagtgatcttcagtgctagttagtgtgcagtgaaagcaaagtgcactacgctggtagtgcagtatatctcggttacacttttggaactcttttttttttctccttaatacctagatggatcgaattcttaaaattgatatgtggttatg

SEQ ID NO: 617533 - DNA, 497 bp, Homo sapiens
tatgttgtcacaaactcgtaagcagttttgcagaccagcagtgtttctgggaccacattttgattggcacagatctagatcttttttggatcctgttatggtcctcctggcttgaaaaacagggctgcacatttactgaggcaataaggcacatgaatagctggctgtgagaaggtggtctgtttaagggtatccgtgtgtactggaacgtttcaaagtgagcaacatcttattattagcctagaaaaccatggtaaagcagagatattttccarctacaaaagcatttattccttacatacaccatactttaggttttcatgttcttactgtatcctgaaagtctcattcttagcaattatcatagtagataaatatgagagtagagttatgtctaattacagtagaaattccatgtgtcttgtactcacttgtatgataattgccaagaacaatgtcttacacctaattgatgagttgtaaatgaatgaaatatt

SEQ ID NO: 617534 - DNA, 629 bp, Homo sapiens
ggattgctttataagctatgcatgcagagaatgggacactatggaaccattaaaaacagcaagacagatttatacgtattaatctggaattattgctaggacacattaagtgaaaaatgcataaaactaaagtatagtatgcagaacttactaccatttgcaaaacacacacgcaagtatgccttctagaagattttggtttagataagtacacaaatttcttagcagagaacagcattgacatatatatagattggattggacacacarttatttgtaggtgggtggaaaggtgtcatagaaactggtactagccctaaactttggggtaggagaggcaggctttctcctttatatttttttgtactatataaaatttgtacttcacctttcatctgtatccctgtgtactttaaaatttttcaatttttagttaaaaagcaatatttatatggcttttaatagttccaaagggtataaatacagagcgagtttgtcctggaaaacaattaagtgaggtaaataatgtatatttaaaccattttttctcttaggttggggttgagaaaaatcttaaaagtcaaaacttcttaccagaagaactttagaacttcataccagaaaaactt

SEQ ID NO: 617535 - DNA, 629 bp, Homo sapiens
ggattgctttataagctatgcatgcagagaatgggacactatggaaccattaaaaacagcaagacagatttatacgtattaatctggaattattgctaggacacattaagtgaaaaatgcataaaactaaagtatagtatgcagaacttactaccatttgcaaaacacacacgcaagtatgccttctagaagattttggtttagataagtacacaaatttcttagcagagaacagcattgacatatatatagattggattggacacacaattatttgtaggtgkgtggaaaggtgtcatagaaactggtactagccctaaactttggggtaggagaggcaggctttctcctttatatttttttgtactatataaaatttgtacttcacctttcatctgtatccctgtgtactttaaaatttttcaatttttagttaaaaagcaatatttatatggcttttaatagttccaaagggtataaatacagagcgagtttgtcctggaaaacaattaagtgaggtaaataatgtatatttaaaccattttttctcttaggttggggttgagaaaaatcttaaaagtcaaaacttcttaccagaagaactttagaacttcataccagaaaaactt

SEQ ID NO: 617536 - DNA, 556 bp, Homo sapiens
gatggatgagtggatcacagagaagttttagggcagtgaatctattttgtatgacactgtgttttagtctgttctcatattgctataaagaactacctgagactgggtaatgtatgaagaatagaggtttacgactcatggttacacaggcttaacagtaagcatgactgggaggcctcaggaaacttataatcatggcaaaaggtgaaggagaagcaggcatcttcctcacatggcagcaggagacagagagggaagggggaagtgccacacacttttaaaccatcagatctcgtgagacctcactatcacaagaataacaaggggcacatcagcccccrtgatccagttacctctctccaggcccctccttcaattcaacatgaggtttgggcagggacacaagtccaaatcatatcattctgttcttggcccctcccaaatctcatgtccttctcatattccaaaatacaaatatctcttctcaatagtccaccagtcttaactcgtttcagcattaactcaagtttatagtccagactctcccctgagacaa

SEQ ID NO: 617537 - DNA, 247 bp, Homo sapiens
ctggttggggtggcagtaaacaatccctgtggcaatcagtgccatcatccaggtatggtcaggagctatgggagtccagagcctggcagactatagtcatgtctgagaggcgagtcagggccaattttcaggtgaggtgacgttggagctgagtgctrcagcatgagctagagttgaccaggaagctgagggtggctgttcaggccaagcaaggccacagcagctacaaaggcacaggggcaagtaa

SEQ ID NO: 617538 - DNA, 573 bp, Homo sapiens
gcggtggctcatgtctgtaacgccagcatttcgggaggagggattgcttgagtccaggagtttgagaccggacgggccaacatggcgaaaccctgtatccactaaaaatacaaaaattagccaggtgtagtggcgcgtgcctattgtcccagctactcgggaggctgaggtgggaggatcacctgatcctgggaagtcaaggctgcaatcagccagatcacaccactgcactccagcctgggtgacagagtgaaattctgtcaaagaaagaaaagaaagagaaagaaaaggaagaaaggaaggaaggaagcgtatctccattttcatccaaacagstatttttctctgctactacgtacctcctcagagcccatcccccctactggtctgaggcttttttttaaacaactttctggacatagcccctcttaagactaacaacctatagccaggcgtggtggctcacgcttgtaatcccaggattttgggaggccgaggcaggtggatcacctgaggtcgggagtaccagaccagcctgaccaatatggagaaaccccatctctgctaaaaaca

SEQ ID NO: 617539 - DNA, 582 bp, Homo sapiens
acagtatgcatacatatttaaatcttaattcaccaaaaaagcacacttttttctatggagcataagagataagcattaagaagtatattttggctaatattaacttgagcttttaaaagttagacttaagtaaacttgtttaaaattaaattgaaaagttaagttcaagacaataaactaattttaaatatatttttaaaactaatttttaaatattaaactaatattaaaaactaagtaataatttccctattttaaacacagtgtctaactgaccttactgtatgtatctcaataagtaaaattctatcytatcagcattaaaagtcctccccacctccaaataaaacccaactctaacacaagcttttttcttcatattaggcaagaaccctctggtaatatgtaaatagagaggtcagttttcaaacaggctggtttctgaatatgggttttaattatttaaaacaaaatttaatttttctagaaggtttctgagatgaagttttagttgatatcctcagaaaacctcaaagtatttgttaatagaatttagcaccctaatgatctagattttggtca

SEQ ID NO: 617540 - DNA, 547 bp, Homo sapiens
gggatttttgtggcaccaacagcaaagcgattcatgagtgaaaagccttctctggtgctgccatttccatcactgtttctgcctccttttgcttttgttaggcrtaggccctttatttattcagacaaaagtttttaaaagattagagcatacttccatattaataacatcccatgagttaccattttgagggaaatgtgcacatttgtgtaggggttttgctgaggaaaaggaatgaggagtgaaaggagtctcacccagttggatagtggtatgccttggaaatgcactgaacctttttttttttttttttttttttgatgcagctcttcacagatggataaggtaaggcactgtctgcaatgcgtgaagcactttttaaaaagtgagaactcccagtagacctgtggtgttgcaggagcaggtcaagtgctttctttctttaatatttagctaagagagatcacttaggtgaaccgttccctataactagatcatcctttgctttttcctgttcacattatgattgaactcttgtttttgtaca

SEQ ID NO: 617541 - DNA, 558 bp, Homo sapiens
cattcccagcgctgcctgggaggaggatgaatttcctgctgtactggagtagccctgggcaaaggacccaaaagaactgctgwattaaggaaacctggaaactaaaaaacacaagagttttgttttttttttcccctgtcagatattggtcttttgtattccagtggtattaaatggaaatgggttttttcagaggaaaagtaatacttgagagaactccattatctatcagatttatatattttgccttagagaaatgcaacctgttcattgtgtaaaaagccgtcgtgtgtatacagatttgctcttctggaagccatcaatagccagctagggttaaacaggtttcccttcccctaaatggttttgttattatttatttattttgtgttcttttaaaatttatttttccatataatctctgtgagggcagggatcatacagctctcaaggtacacatcacagtatgcagataggcccaaaataaacaaacatctttatttttaaagttttttaattataaaaagtaatacgaggccaggcacagtggctcatacc

SEQ ID NO: 617542 - DNA, 570 bp, Homo sapiens
actaaacatctgcttgtgaattttaaagaagctcattttctataacattaaaaagaggctgtaaaacatcgtttttactaacaatttcattttatacattgcagttgtccttattgataaaagagaactttgtggtttgatgcataaaagaaaatttactattcagtatagttgggactgtatcttcaggcacagacactgcattcagacctgcagacccccaccctgctcagtgtctgggttgcagcccagactgaggttgagccagaggaagaaggaggccgtgtggttaaaccacttgtggataatcgaaagtagaccatacttattttcaatttggcagctgcattagytttttactaaagtgtgcagctttgcctggttctgctaatgttgccttcacactgtggcctggtcaccattagtggtctggcagagatatctgaggaggctcaccattgctcctcttgactgttccactgcccatcccagtattttccctgacttttcctatgttctgtggtatcaggcagttggatcaattgcagtgactgcatcgaaagaaaaaga

SEQ ID NO: 617543 - DNA, 526 bp, Homo sapiens
taaaggcattattcagaaaatcacacacataaatgtaatatgaaaactgtgttaaactgattcaaaatcctacacaaatgactttccaataacctttacaacttattggcaaatgaaaagaatgatttcaatcgcctttcaagtaactttttttttggtgaaacagcaagtgtaagaaaagcagagtakaaatgtaggagaaagaaagctggacaaggaaccgaacatcaaggctctcagttctacaatgaatctgctattggatgcatgaaactttacttttctgtgcttcatcactcttgtgactaatgcctggagcagtatctgccatacagcagatgtttaataaataaatattggttgaatgagtgaatataatatgggaagatttcatgtgaagatttttgtagttcaatgtaaacattaagaaattggagatgagaagagtcaagtaacaaagatgcatgtactgtgcttacacacctgcaaatcaaacttctctagtaaactgtgtcaaagtgaccaa

SEQ ID NO: 617544 - DNA, 526 bp, Homo sapiens
taaaggcattattcagaaaatcacacacataaatgtaatatgaaaactgtgttaaactgattcaaaatcctacacaaatgactttccaataacctttacaacttattggcaaatgaaaagaatgatttcaatcgcctttcaagtaactttttttttggtgaaacagcaagtgtaagaaaagcagagtagaaatgtaggagaaagaaagctggacaaggaaccgaacatcaaggctctcagttctacaatgaatctgctattggatgcatgaaactttacttttctgtgcttcatcactcttgtgactaatgcctggagcagtatctgccatacagcagatgtttaataaataaatattggttgaatgagtgaatataatatgggaagatttcatgtgaagatttttgtagttcaatgtaarcattaagaaattggagatgagaagagtcaagtaacaaagatgcatgtactgtgcttacacacctgcaaatcaaacttctctagtaaactgtgtcaaagtgaccaa

SEQ ID NO: 617545 - DNA, 425 bp, Homo sapiens
catttaggatctaaaatctttatccatctggaacatactggatatgcctccatggcggcaacaaatatattttccccgtggatgtggaaagatcgtcgcctcaggtggaaagcacttggtgtgcagtggtcaatggtgyggccagttctagtactgatactgatggtatctcatcctcctcatcatttcagagccccgcagcacccacaaaaagaatgcataccttccactgttgctagagtatgcatagtatgtatccctggatacttctaaaagatcttaatacacaatactattgcccaaaaattcccacacacatttatctggtgaacaagtacaaatttagcaattttaatcaatattcttgcagacaagtgtggatatgtatatgcatatatacatatatatatcaaaattgagaattt

SEQ ID NO: 617546 - DNA, 425 bp, Homo sapiens
catttaggatctaaaatctttatccatctggaacatactggatatgcctccatggcggcaacaaatatattttccccgtggatgtggaaagatcgtcgcctcaggtggaaagcacttggtgtgcagtggtcaatggtgcggccagttctagtactgatactgatggtatctcatcctcctcatcatttcagagccccgcagcacccacaaaaagaatgcataccttccactgttgctagagtatgcatagtatgtatccctggatacttctaaaagatsttaatacacaatactattgcccaaaaattcccacacacatttatctggtgaacaagtacaaatttagcaattttaatcaatattcttgcagacaagtgtggatatgtatatgcatatatacatatatatatcaaaattgagaattt

SEQ ID NO: 617547 - DNA, 425 bp, Homo sapiens
catttaggatctaaaatctttatccatctggaacatactggatatgcctccatggcggcaacaaatatattttccccgtggatgtggaaagatcgtcgcctcaggtggaaagcacttggtgtgcagtggtcaatggtgcggccagttctagtactgatactgatggtatctcatcctcctcatcatttcagagccccgcagcacccacaaaaagaatgcataccttccactgttgctagagtatgcatagtatgtatccctggatacttctaaaagatcttaatacacaatactwttgcccaaaaattcccacacacatttatctggtgaacaagtacaaatttagcaattttaatcaatattcttgcagacaagtgtggatatgtatatgcatatatacatatatatatcaaaattgagaattt

SEQ ID NO: 617548 - DNA, 614 bp, Homo sapiens
ccccacccctaccagccagagaacaaccccctttgactgtaattttcctttacctacccaaatcctataaaacagccccacccctatctcccttcgctgwctctcttttcagactcagcccgcctgcacccaggtgaaataaacagccttgttgctcacacaaagcctgtttggtggtctcttcacacggacgtgcatgaaactcagaaggattatatccattttctcttgtcttccccgcaaacgagtgagacaaagaacaatcccagggatttggctactgaaggctggaaaaggatggcagggcccattcatactcagccatcactcatgcacaagggcagctcccagccctcagctctggagggatggggagggctcgtcctcctgggctgtgctaggaatctgcttggtaccttggaggactccctcaagctgagtaaaagagcagtgagtgttccttccatttttggtagagaattaaaaatgaagtacttgaacaagctggacatttgagttccacttgtcttgcaatgttgaagactcctaatttagaaacatggatctaggggacaaatgatcacacaacttgcaatggaatagcatgcaatttt

SEQ ID NO: 617549 - DNA, 614 bp, Homo sapiens
ccccacccctaccagccagagaacaaccccctttgactgtaattttcctttacctacccaaatcctataaaacagccccacccctatctcccttcgctgactctcttttcagactcagcccgcctgcacccaggtgaaataaacagccttgttgctcacacaaagcctgtttggtggtctcttcacacggacgtgcatgaaactcagaaggattatatccattttctcttgtcttccccgcaaacgagtgagacraagaacaatcccagggatttggctactgaaggctggaaaaggatggcagggcccattcatactcagccatcactcatgcacaagggcagctcccagccctcagctctggagggatggggagggctcgtcctcctgggctgtgctaggaatctgcttggtaccttggaggactccctcaagctgagtaaaagagcagtgagtgttccttccatttttggtagagaattaaaaatgaagtacttgaacaagctggacatttgagttccacttgtcttgcaatgttgaagactcctaatttagaaacatggatctaggggacaaatgatcacacaacttgcaatggaatagcatgcaatttt

SEQ ID NO: 617550 - DNA, 614 bp, Homo sapiens
ccccacccctaccagccagagaacaaccccctttgactgtaattttcctttacctacccaaatcctataaaacagccccacccctatctcccttcgctgactctcttttcagactcagcccgcctgcacccaggtgaaataaacagccttgttgctcacacaaagcctgtttggtggtctcttcacacggacgtgcatgaaactcagaaggattatatccattttctcttgtcttccccgcaaacgagtgagacaaagaacaatcccagggatttggctactgaaggctggaaaaggatggcagggcccattcatactcagccatcactcatgcacaagggcagctcccagccctcagctctggagggatggggagggctcgtcctcctgggctgtgctaggaatctgcttggtaccttggaggactccctcaagctgagtaaaagagcagtgagtgttccttccatttttggtagagaattaaaaatgaagtacttgaacaagctggacatttgagttccacttgtcttgcaatgttgaagactcctaatttagaaacatggatctaggggacaaatgatcacacaacttgsaatggaatagcatgcaatttt

SEQ ID NO: 617551 - DNA, 513 bp, Homo sapiens
agctatgatcgcaccactgcactccagccttagtgacagggtgagactctgtctcaaaaaaaaaaaaaaaaaaaaaaagaacgtaacaaagataaactttgaaatcagaaagattaataaaaataaaagtggacaacatacacagcctaatttcagtaattaataaaaagcttcagtaatgaaggctgtgtggtggtattggccttagagcagacaaacagatcgatggcacagaattagaaccacacatayattgtcaactgattttttttttatatagatgccaagttaatcctatcctgaatgacagtcttttcacaaatgatgctgagacaaatgggcagcttttatgaaaagggaatggacctctatcgatactgcccaacaaatacatgcgtatggatcacaggcctaaatgtaagatcaaaactattagcttagaggagaaaacagagatgactttaattgtaaccttggagtagtcaaaatatttcttaggataagaaggcacta

SEQ ID NO: 617552 - DNA, 624 bp, Homo sapiens
actaagtctgtgtatagtttcttcctgcttgcttgctttctgtactctttttttttgcatgtggatatccagcaacataygttgaaaagactattctttctccaacacattgctttttcacctttgtcaaaaaatagttgattatatatgtggtctcttggtgggtatttgatttgtctgttattttctaataccacagtcttatttattgtagctcatagtaagtcttgaagttggttagtgttaattgtctgactttgttcttcttcaatattttgttatctaagtcttttgcttccccatataaactttaaaattaatctgttgtcataaaataatatgcttggattttgattgatattgtattgattcaacttaggaagaaattgcatcttgacaatactgactttttccatttttattcttccaataggaggtactgtgatctggagtatataatgtgaaaaatatatctgtaaaaaatgaacatacggagagttccttcatatcggtatcagtttactagggctgccataacaaagtcatacaaattgaatggatttgacaatagaaatatattgtctccaattttggaggcgaaaagcctaaaatcaagacgttgtc

SEQ ID NO: 617553 - DNA, 319 bp, Homo sapiens
aattgcatcttgacaatactgactttttccatttttattcttccaataggaggtactgtgatctggagtatataatgtgaaaaatatatctgtaaaaaatgaacatacggagagttcmttcatatcggtatcagtttactagggctgccataacaaagtcatacaaattgaatggatttgacaatagaaatatattgtctccaattttggaggcgaaaagcctaaaatcaagacgttgtcaggtttgattccttctcagggccaggaggaaggaataatctgctccagacctccatcccagcatttggtgttttgctgg

SEQ ID NO: 617554 - DNA, 564 bp, Homo sapiens
tgctccaattcccaataagtttgtcatttatatttgtgaccttgtcaccgtggacgtcactgtccatatcactatcagcatttcagtcacaaccatttaaccagtctctaagaagttccaaattttccctcatcttcctgtcttcttctgagccctcaaaattcttccaacctctgctcattatccagttccaaagctgctttcacatattcaggtatctttatagcaatgccgttctcaattttctgtagtatgttatgctcytcttgtattgctataaagaaacacctgagactaggtgatctatgaagaaaaaaggtttaattggctcatggttctgcatcctttacaggaagcatgatgctggcatctgctctgcttcttgggaggcctcaggaagctcacaattatggcagaaggtgaaggggaagcaggcatgtcatgtagtgaaaccagcaactagagagagagtgggcaaaaaggtgccacacacttttaagtaacaatttctcatgagaactatcatgggatctgcccgcatgatccaaacacctcccaccagac

SEQ ID NO: 617555 - DNA, 564 bp, Homo sapiens
tgctccaattcccaataagtttgtcatttatatttgtgaccttgtcaccgtggacgtcactgtccatatcactatcagcatttcagtcacaaccatttaaccagtctctaagaagttccaaattttccctcatcttcctgtcttcttctgagccctcaaaattcttccaacctctgctcattatccagttccaaagctgctttcacatattcaggtatctttatagcaatgccgttctcaattttctgtagtatgttatgctcctcttgtattgctataaagaaacacctgagactaggtgatctatgaagaaaaaaggtttaattggctcatggttctgcatcctttacaggaagcatgrtgctggcatctgctctgcttcttgggaggcctcaggaagctcacaattatggcagaaggtgaaggggaagcaggcatgtcatgtagtgaaaccagcaactagagagagagtgggcaaaaaggtgccacacacttttaagtaacaatttctcatgagaactatcatgggatctgcccgcatgatccaaacacctcccaccagac

SEQ ID NO: 617556 - DNA, 578 bp, Homo sapiens
tgaaggggaagcaggcatgtcatgtagtgaaaccagcaactagagagagagtgggcaaaaaggtgccacacacttttaagtaacaatttctcatgagaactatcatgggatctgcccgcatgatccaaacacctcccaccagacccaacctccagcactggagattacaattcaacrtgatattgaggcagggacaaataactaaatgatatcatataattactgtatttccattatttttcacctgaattgagttagatataactgtcctgatgaaagagaaacagtgacaggctgcttccctcctcaagcttgacagattgggttaaagctgtttccagaaaaattatatttagttgagtcttgcattcttaaggatagagtcatctaactgtattatttataactagggagaagtatttatttgagagatgcttcccattcataaaaagattttctttagctggtagattgtgagatattttatgaatagcaatatggtttttatataaattattaattcagacaaaaccatatttcagcttctcaatcttccagttattagtgtgaaaatttgc

SEQ ID NO: 617557 - DNA, 568 bp, Homo sapiens
gtcagacactgttgtttggaaataacacaagatgagcaagctcctattttcttggagttcataatgcaataggcacagtggagatggatgacagcaatcaaatcacagtgggataaatgtcatagtaagggccatatagggtataaatgaaactcaggaggaattggcatgcactgaaatgggtgacacatggttgcttggagaaatgatttctaaactaagcatgaaaatgtagttggaattacataagcaatcamagagtggaatacttttcagtaggaagaaaataaagctttctaattcctacatgaccatttatataggagtgtttttatattttgtatccagctttgaagtggacaagtaccagtttactccagagcttagtatgcattaaatgcttaatatgtgttaacttttttatcaccacatcgtcatcatcctagcatcattgatatcttgtgagtttctccatggttttcttaaaaaaaaaaaaaaaaaagaaaggccctgaagaagaaaatagcaatagcaacattaggtgcagagccatgatgaaatgagccgc

SEQ ID NO: 617558 - DNA, 433 bp, Homo sapiens
gagtcaagattagtcacccactctaatcacattgagaatgaccttcacgattaaacatagcatatattgtgtatcttcgtgctaaaaggcatgccggaagccaggcagcaaaatcaaatgataatgccaactctactctctaccaccactgttgrggggctaattttgtcatcagtgtgtacatgcttagagagtagggtacaaaggtgcttattagttaacgtagactatgctagcgcaggacagccatttaactttgatgttactctgatatcagagaaaacagtttggccaattcattcattgtgtaccacagattactttgatatttattttcaaataaaattgctcctcatgtcctactttccagttctgcttttagcaaatcttgcctgagcagtctcatcacaataattaaataagtttacacagc

SEQ ID NO: 617559 - DNA, 433 bp, Homo sapiens
gagtcaagattagtcacccactctaatcacattgagaatgaccttcacgattaaacatagcatatattgtgtatcttcgtgctaaaaggcatgccggaagccaggcagcaaaatcaaatgataatgccaactctactctctaccaccactgttgaggggctaattttgtcatcagtgtgtacatgcttagagagtagggtacaaakgtgcttattagttaacgtagactatgctagcgcaggacagccatttaactttgatgttactctgatatcagagaaaacagtttggccaattcattcattgtgtaccacagattactttgatatttattttcaaataaaattgctcctcatgtcctactttccagttctgcttttagcaaatcttgcctgagcagtctcatcacaataattaaataagtttacacagc

SEQ ID NO: 617560 - DNA, 543 bp, Homo sapiens
gtcatcagtgtgtacatgcttagagagtagggtacaaaggtgcttattagttaacgtagactatgctagcgcaggacagccatttaactttgatgttactctgatatcagagaaaacagtttggccaattcattcattgtgtaccacagattactttgatatttattttcaaataaaattgctcctcatgtcctactttccagttctgcttttagcamatcttgcctgagcagtctcatcacaataattaaataagtttacacagctcaatttagacgatgtcattgtcctgttcaaactcctctacaacttcctgaaataaaatgcttatcattcaggctggcgtagtccttcacaatctgaccatacccaacctgccacttttcttttcttgtccctcatattataatgaatatcttgtatctacacgttgcactgccctatgattatttctcaaatatgttatttaatttcacttttccaactttccacacacagtttcgttccaacgaaaactttgaacctttattttctctgtctata

SEQ ID NO: 617561 - DNA, 543 bp, Homo sapiens
gtcatcagtgtgtacatgcttagagagtagggtacaaaggtgcttattagttaacgtagactatgctagcgcaggacagccatttaactttgatgttactctgatatcagagaaaacagtttggccaattcattcattgtgtaccacagattactttgatatttattttcaaataaaattgctcctcatgtcctactttccagttctgcttttagcaaatcttgcctgagcagtctcatcacaataattaaataagtttacacagctcaatttagacratgtcattgtcctgttcaaactcctctacaacttcctgaaataaaatgcttatcattcaggctggcgtagtccttcacaatctgaccatacccaacctgccacttttcttttcttgtccctcatattataatgaatatcttgtatctacacgttgcactgccctatgattatttctcaaatatgttatttaatttcacttttccaactttccacacacagtttcgttccaacgaaaactttgaacctttattttctctgtctata

SEQ ID NO: 617562 - DNA, 596 bp, Homo sapiens
aaccgaatttggtgcatttcagtctatgcatttcattttattgtaaaatgttgatattaaaggccatatctgcttgctttwgtgagtactagttctgcaattcagcctggtgctttgcacatactaggcactccagcaacaataaaatgtttgctaaaatagctcatttacaataaaatgctaattcagattatcttcagctgaatacatttaaaatatttacacatattgaaagggatcatctgtgatataattgtttattggtgaattctttctggcttaaagagattagcagcccctcccctgtccaagcaggaaactgatgatgccaaaagaaactttgccctcaggacactgggatgattgcagagacagaccttcatggactttggccagcagaagtttcctggctattattatcttgaaacatctaaaaacataaatttatgcttttataaaaagagagttattaaaaaatgtttatagacaatgtgtctaaatgaccttttgttaattatgtgggttgcagaaaaatacattttgttctgaatttgattttacatccctcatattcactttagtcaatagaagtttct

SEQ ID NO: 617563 - DNA, 634 bp, Homo sapiens
aaccgaatttggtgcatttcagtctatgcatttcattttattgtaaaatgttgatattaaaggccatatctgcttgctttagtgagtactagttctgcaattcagcctggtgctttgcacatactaggcactccagcaacaataaaatgtttgctaaaatagctcatttacaataaaatgctaattcagattatcttcagctgaatacatttaaaatatttacacatattgaaagggatcatctgygatataattgtttattggtgaattctttctggcttaaagagattagcagcccctcccctgtccaagcaggaaactgatgatgccaaaagaaactttgccctcaggacactgggatgattgcagagacagaccttcatggactttggccagcagaagtttcctggctattattatcttgaaacatctaaaaacataaatttatgcttttataaaaagagagttattaaaaaatgtttatagacaatgtgtctaaatgaccttttgttaattatgtgggttgcagaaaaatacattttgttctgaatttgattttacatccctcatattcactttagtcaatagaagtttctctcacacacaaaaaaggtcttattaatgaagtgtcagt

SEQ ID NO: 617564 - DNA, 634 bp, Homo sapiens
aaccgaatttggtgcatttcagtctatgcatttcattttattgtaaaatgttgatattaaaggccatatctgcttgctttagtgagtactagttctgcaattcagcctggtgctttgcacatactaggcactccagcaacaataaaatgtttgctaaaatagctcatttacaataaaatgctaattcagattatcttcagctgaatacatttaaaatatttacacatattgaaagggatcatctgtgatrtaattgtttattggtgaattctttctggcttaaagagattagcagcccctcccctgtccaagcaggaaactgatgatgccaaaagaaactttgccctcaggacactgggatgattgcagagacagaccttcatggactttggccagcagaagtttcctggctattattatcttgaaacatctaaaaacataaatttatgcttttataaaaagagagttattaaaaaatgtttatagacaatgtgtctaaatgaccttttgttaattatgtgggttgcagaaaaatacattttgttctgaatttgattttacatccctcatattcactttagtcaatagaagtttctctcacacacaaaaaaggtcttattaatgaagtgtcagt

SEQ ID NO: 617565 - DNA, 619 bp, Homo sapiens
agtcttatcttatgaggtgctgtggaggtggggcccaccgagtgacactgcttggcccctggattcagtcagcttcctagtggtacgtacagtcctcctgccttgcctgaattgcagtcacctttgctgggsatcccaggcatgaatatttacaactcctgggtctctgtgcatgcctcagcagcagctctgctgagactccacacagctctgtgtgtcagacccagggccctgatggagttagttaatgaggggctctcctgatccaaggttgcaaaaatccataggagaagcgtggtttcccaggtcatacattcagttaccactttccttggctgggggtgggaattcccttggcttgatgttgctttcaggtaggctgtctccttgccctccttttcttcattcttcatgggttgagtagtttccctgaacagtcccagtgtaagttcctggatgtttcagttgaaggtgctgcatttactcaccccttttgttcctcactgtgagtgccacacacaatagctgcttctgatcggccatcttggccctgactgattctgattttttccttaattttaggcagattagaatcataactttggataaaggcaagaat

SEQ ID NO: 617566 - DNA, 555 bp, Homo sapiens
attgttggtcaagttatgcttgattagaaagaagaataaaacaagcagaggatgaaaaaacctggggcacatgaaaataagattcttcttagtttttactttttgttgccatgatatcctyatacttacagctaataagaatcttagtccacatatatctgctctcacaagttcaatagaagcctttcttaaactcatttgagcttatttcttgcatgatcatctattagtgtgtgacaaatacctcaaaactcagtgacatacagtagtagcatgttttgtattgcttacacatttgcgtcaactgggatagctctgctcaatgtatttctcattcttccggcagaagcagctgtacagaacatttcattcttgttctgatgacagaaaagcaggagagcatgtaatttcaagcctatgtttaaataacaccactaacttctcattgatcaaatcaagtcaaatacccaaacccaacattggtgggacatggaaacattctctgcccacagtgggaggcaggggtacacaaatatttgctaaaaaaaaaatgaa

SEQ ID NO: 617567 - DNA, 621 bp, Homo sapiens
ttcagtataagtttatacctttagctaattaccagatcttcagaaactcacttgacccttctcttgatgacaaggtggttaaatcagaataatagttgttagtgaatacaaattcccaatgagatctgtagcactttgatcattattctgggaacattaaaaaaagaaaaaaagaaaagtcttttctacatgtcttcttttactagatcaccttctaatcagtgtgtttccacaaaggcgctgttcaaagaacttaacmaaatcatgtccaagcttaagaggccctcatttaaactcaaatataagacaaatgttcagctgcctgagtctctttttgtctaaatgtgatggcatcattgatacactagagaaccttagcactgggaaagccacccaggagaaaagtatatgatttatgcttcaatttgaatttaagctttcaatttaagctttaaatttaagaaagtatgttccagacatactttcttggctttttaaataatttttcccatgtaactataaaaccaaaggaaatgactgggacaaatctcaatcaatttagaggtttattttgccacagttgaggacgtgcctgggaaaaaggaacacaaaatcacagga

SEQ ID NO: 617568 - DNA, 543 bp, Homo sapiens
ataaaaaggaaatttgacaagtgttgataggagatcaaggtcaacatcaacagagataattcatgttgatattatgtacccttcatatgatgtgataagaatgtcaatttacctctgtggttttcctcctgaaaaccaaaaactacagtctaatcatgagaaaaacatcacacttttctaaactgaggaatactgtacaaaatatctaatcagtactccttaaaagagttaagatatcaaaaacaaacgaaatctgagaaactgtcacagccgaaagmagcctaaggaggcatgaaaatgaaatgcaatgtgtatactggatgaaatactaggacttaataaggacattaggttaaaaactaaggaaatctgaatagagtatagaatttagttaacaatgtgtcaatattggtctattagaactcttctgatgtcagatgttaaatacagaacaaactgttcccgggttatatgaggactctactatttttgtaacatctttgtaaatcaaactattctaaaattaacagtttactaaaacat

SEQ ID NO: 617569 - DNA, 638 bp, Homo sapiens
tatacaggaatcaagatgaaggaatgcccagaaataaaactcctctttgtggctgtaaaccaaaaagtgtctgagacaggtgtcaatcaatttagagatttattttttcaaggttgaagacatacctgggaaaataagacacaagtcaccataggatctgtggcccctgctttttccaaagagggttttgaagactacaatatttaaatgggaaagagtggcttggggggaaaaaggaaagatactgtattagtccattctgatgccactatgaagaaatatttgaggctggataatttataaagaaaagaggtttagttgactcacagttccacatggctgtggaggcctccagaaacttacaatcatggcgaaaggcattttttcacagggtgccaggagagagaatgagtgccaagcgaagggagaagcccctaataaaaccatcagatctcaygagaactcactcactgtcatgagaatagcatggggggaaactgcccccatgattaaattacctcctactaggttcctcccacaacatatggagattatgggattacaattcaagatgagatttgggtggaaacacaaagctaaaccatattagatacaaaagggagggtaggtagtgagat

SEQ ID NO: 617570 - DNA, 646 bp, Homo sapiens
tggtggacaaatttaggcaaaactgtttttctacagtaatttgtgaataaacttctattgtctttcaatgtctctttgggttgctccagatttctctttatttttcatattttcaaaagggggagcatctcacattctttgtgattatactttctcctctatatgtctcttcagaaactcatttgagtcagagcgagtgtatcccttgcgaggtataggagatttgtgaagaacaaaaataaaacacttaactctttctagaagccaaagagattacaagtgaatgaaacagtcttagtttaagacaaatggcatctgttttgcatacaactttttaaaattcttcacttgaaagcgtgttcaccaatcttccctaaaatatgcagcctctaagtctaaattttatttttctagttgtgatagggagtttgttrcagagaaatattttcctaccataaaaatatagttgttcaaggaaaacaataaatgataactgatttttggcatcactgctggcgagttaattattaagaagtgttggagaatgttttgaaatgaattgcacattgcactctctcagtagagggaagttgttattcatattaagcatcttttactttgtgggaatatgggcctagtgatgcca

SEQ ID NO: 617571 - DNA, 496 bp, Homo sapiens
agtgtaagggtgttacttcggaatcatagaagggaatgagtcaatatgcagctatttaattttaattatttcacattttctttatgtatggaagacaagtcaaaaaaacagaagtggcggtcttcaggggtgactttaaggtgcactgcagtaacaacccccatcccagtcgccttattgatatagacaaaccagatgactatgcaaacagagtccacagtaaaagctatcataaatgaatatacattgtagctatgttataccaagctagccacacctacttatttctatatagatattgtgtatagatattgttgccaccraatatggtctaaacaaaaagagtctttagtttgtttgggtttttttggggggggttataagagcttgattatcgctctataaaagtatagctttgaaaaaattaggagataaacagtaggcctttttccctatatgtctagaaaaaagaagggcaggagataaaagtgaagag

SEQ ID NO: 617572 - DNA, 567 bp, Homo sapiens
gtcataacaagggagatatgaaagcagagtggataagtgcctcaatcctcagttggaccacatgtttttgacatggatctatagtttccttcaagattygctgtggcaggaatacttgaatatcggtgggcaggtgagtagtggcagaacggacctgaaacagcccacatatgtcactacctgtagctagagaacaagtgcttcttatgttggtgggttgctgtttttgttcaaagttgaaaacttcctgctctttttcaattattttctgctccattttatttctcttctctatatgagtccctggttacaatcatgtcagacagcttaatgttttccctcatgatgttgattcttttcattttctacaatctcttttctctctgtttgacttaagaaaatttccattgatctactcctcacattttctgtttcttccccttgtatgtacaaactacttttaagtttatcctttgatatttttattgatattatgctttccagttttttagatttcctatttatcttttgaaatacttatttcttacccttcatattgagttttct

SEQ ID NO: 617573 - DNA, 567 bp, Homo sapiens
gtcataacaagggagatatgaaagcagagtggataagtgcctcaatcctcagttggaccacatgtttttgacatggatctatagtttccttcaagattcgctgtggcaggaatacttgaayatcggtgggcaggtgagtagtggcagaacggacctgaaacagcccacatatgtcactacctgtagctagagaacaagtgcttcttatgttggtgggttgctgtttttgttcaaagttgaaaacttcctgctctttttcaattattttctgctccattttatttctcttctctatatgagtccctggttacaatcatgtcagacagcttaatgttttccctcatgatgttgattcttttcattttctacaatctcttttctctctgtttgacttaagaaaatttccattgatctactcctcacattttctgtttcttccccttgtatgtacaaactacttttaagtttatcctttgatatttttattgatattatgctttccagttttttagatttcctatttatcttttgaaatacttatttcttacccttcatattgagttttct

SEQ ID NO: 617574 - DNA, 567 bp, Homo sapiens
gtcataacaagggagatatgaaagcagagtggataagtgcctcaatcctcagttggaccacatgtttttgacatggatctatagtttccttcaagattcgctgtggcaggaatacttgaatatcggtgggcaggtragtagtggcagaacggacctgaaacagcccacatatgtcactacctgtagctagagaacaagtgcttcttatgttggtgggttgctgtttttgttcaaagttgaaaacttcctgctctttttcaattattttctgctccattttatttctcttctctatatgagtccctggttacaatcatgtcagacagcttaatgttttccctcatgatgttgattcttttcattttctacaatctcttttctctctgtttgacttaagaaaatttccattgatctactcctcacattttctgtttcttccccttgtatgtacaaactacttttaagtttatcctttgatatttttattgatattatgctttccagttttttagatttcctatttatcttttgaaatacttatttcttacccttcatattgagttttct

SEQ ID NO: 617575 - DNA, 567 bp, Homo sapiens
gtcataacaagggagatatgaaagcagagtggataagtgcctcaatcctcagttggaccacatgtttttgacatggatctatagtttccttcaagattcgctgtggcaggaatacttgaatatcggtgggcaggtgagtagtggcagaacggacctgaaacagcccacatatgtcactacctgtagctagagaacaagtgcttcttatgttggtgggttgctgtttttgttcaaagttgaaaacttcctgctctttttcaattattttctgctccattttatttctcttctctatatgagtccctggttacaatcatgtcagacagcttaatgttttccctcatgatgttgattcttttcattttctacaatctcttttctctctgtttgacttaagaaaatttccrttgatctactcctcacattttctgtttcttccccttgtatgtacaaactacttttaagtttatcctttgatatttttattgatattatgctttccagttttttagatttcctatttatcttttgaaatacttatttcttacccttcatattgagttttct

SEQ ID NO: 617576 - DNA, 595 bp, Homo sapiens
gcatagttcaaaacctgaaaatacatggcatagcaaagatgtgtaacaccaagagaagcgagttgtgttcactattgtatttacattttactattgtctacattgtattaaattttacttgaatctactttttatttgttttcatttattacttctatttatttttatttcaataattttagggtaatakgtagtgcctggttgcaaggtaaagtgctttagtggttatttctgagattttggtgcactcttcacccaagcagtgtacactgcacccaatgtgtagtcttttaatcatcacccccccaacacacttccccacaaatccccaaagtccattatatcattcttattcctttgtatcctcatatcttatctcccacttataagtgagtaaataggatgtctggttttccattcctgagttacttcacttagaataatggtctccagctctatccaggttgctgtgaatgccattattttgttcatttttatagctgagcaatattccatgatctatctatcatctatctatctatctatctatctaattatctaattatctatctatctatctatctatctatctatt

SEQ ID NO: 617577 - DNA, 595 bp, Homo sapiens
gcatagttcaaaacctgaaaatacatggcatagcaaagatgtgtaacaccaagagaagcgagttgtgttcactattgtatttacattttactattgtctacattgtattaaattttacttgaatctactttttatttgttttcatttattacttctatttatttttatttcaataattttagggtaataggtagtgcctggttgcaaggtaaagtgctttagtggttatttctgagattttggtgcactcttcacccaagcagtgtacactgyacccaatgtgtagtcttttaatcatcacccccccaacacacttccccacaaatccccaaagtccattatatcattcttattcctttgtatcctcatatcttatctcccacttataagtgagtaaataggatgtctggttttccattcctgagttacttcacttagaataatggtctccagctctatccaggttgctgtgaatgccattattttgttcatttttatagctgagcaatattccatgatctatctatcatctatctatctatctatctatctaattatctaattatctatctatctatctatctatctatctatt

SEQ ID NO: 617578 - DNA, 595 bp, Homo sapiens
gcatagttcaaaacctgaaaatacatggcatagcaaagatgtgtaacaccaagagaagcgagttgtgttcactattgtatttacattttactattgtctacattgtattaaattttacttgaatctactttttatttgttttcatttattacttctatttatttttatttcaataattttagggtaataggtagtgcctggttgcaaggtaaagtgctttagtggttatttctgagattttggtgcactcttcacccaagcagtgtacactgcacccaatgtgtagtcttttaatcatcacccccccaacacacttccccacaaatccccaaagtccatyatatcattcttattcctttgtatcctcatatcttatctcccacttataagtgagtaaataggatgtctggttttccattcctgagttacttcacttagaataatggtctccagctctatccaggttgctgtgaatgccattattttgttcatttttatagctgagcaatattccatgatctatctatcatctatctatctatctatctatctaattatctaattatctatctatctatctatctatctatctatt

SEQ ID NO: 617579 - DNA, 595 bp, Homo sapiens
gcatagttcaaaacctgaaaatacatggcatagcaaagatgtgtaacaccaagagaagcgagttgtgttcactattgtatttacattttactattgtctacattgtattaaattttacttgaatctactttttatttgttttcatttattacttctatttatttttatttcaataattttagggtaataggtagtgcctggttgcaaggtaaagtgctttagtggttatttctgagattttggtgcactcttcacccaagcagtgtacactgcacccaatgtgtagtcttttaatcatcacccccccaacacacttccccacaaatccccaaagtccattatatcattcttattcctttgtatcctcatatcttakctcccacttataagtgagtaaataggatgtctggttttccattcctgagttacttcacttagaataatggtctccagctctatccaggttgctgtgaatgccattattttgttcatttttatagctgagcaatattccatgatctatctatcatctatctatctatctatctatctaattatctaattatctatctatctatctatctatctatctatt

SEQ ID NO: 617580 - DNA, 521 bp, Homo sapiens
tgtttctaattgaacttatttggatcttctctattcttttcttggttaatactgctaatggtctatcaatttgtttatcttttcaaagaactagtttttactttttgtttcatttaccttttgtatttttttggtttcaattttatttagttctgctctcctcttcaattttatttcttctgctgagtttgggttwgatttgttcctgtttctgtagtttctttaggtgtgtccttagattgtctatttgtgctctttcaaactttttcatgtaggcattcaaagctataaactttccttttagtatcacttttactgtattgtagaggttttgataagttgtgtcactattatcatttggttcaaataatttttaattcccattttgatttcattgttgacccaaagatcattaaggtgcagattatctaatttccatttattcgtataattttgagagttccttttggagtttttagttactttccatgtggtctgagggggtacttgatataatttca

SEQ ID NO: 617581 - DNA, 568 bp, Homo sapiens
gggtatttctctatatttctgaaaagcatcatatgactgaattctgtcttataggtgttttaagcttagctttcacccgtggcttcattcggttgaagaatctgacaaatgtgttgagaaggagaattactttcattttgattcctctcaacttgccaattttgtcaattcagcctagtgtgaccaccaacacttgtttctttgctaccataaaagtttccctgtatttgggctaagtccagattttcaacatcagtgtgcatcaaatactttcaaatytcctcagagaaatttggccttggatagaaagaatcattgttaaataagcttataaaattctaaaaaaattgttcccccttttcagctgttctgaataagataaaaaaaatttcctacatatatttaggtagaattccagcccaactggcaatagtagcctttgtctacctgtatttattctacctttcaagtcttccttgcttcaaaagatctttgatagctttaacaacaattagcttatcttgtaatttcttaacttttccagttgaattgctgcaaaatttcattt

SEQ ID NO: 617582 - DNA, 374 bp, Homo sapiens
ctttttagaagcattacaataagtgagtccaattaatttgacttcaacatttctaaatgaattaattcatgagaactatactagtttgttagggatgcacaacaaagtgctgagtggtttaagcagaaatgtactttctcaaagttctagaggttatatggcagtgttctttcttctacggcctatttgccttggagatggcagtctttaccctctgtctccttatggtctttcctcagtscctgtctgtgttttaatcttttcttcctatagggtcattagtcacatttgattaggaccaccgtaatggttctcatttaaacttaattacctgtttaaaaactctatctccaaataaagtcacatcatgagat

SEQ ID NO: 617583 - DNA, 412 bp, Homo sapiens
gacttgtagatccaagacaatccaagtcaaaatcccagacatttattattgcagaaattaacaacaggaatctaaaatttccattgaattttaactgttcaggaaaagagtcaaactctgtaaaatattttaagatatttattctgmgccaaatatgagtgaccatggcccatgacacagccctcaggaggtcctgagaacatgtgtcaaaggtggttgggatacagcttggttttatatattataggaaggcatgagacatcaatcaaacacatttaagaaatacattggtttggttcagaaagacgggacagctcaaaggatgggggcttccaggccataggtaaatttaaacatgttctggttgacaattggttgagtttatctgaagaccggggatcaatggaaagga

SEQ ID NO: 617584 - DNA, 469 bp, Homo sapiens
ttactagctgctaatctgtctgcagctcctttaagcactccagttcctgttattaaggtcaggtgtgcctgggatgctttaaatatttgttcttttaattttgtwatatccaaaaacaagtttgtagagtatccttttagatacttttttattctttcccaaattttgatcttattaagagcatttaatagtttccacaattgtttcttcttcttttaagtatcagataatggcagtgccacttttaactactccaaatgtaagatgacaatttccatttcaaaagtgggtttttctcttctatcgcactgtcaggctacaaattttccgcatttttatgctctgtttctctgttaaaactgaatgcttttaacagcacccaaaccgcctcttgaatgctttgctgattagcagtttcttctgccagataccctaaatcatcttcctcaagttcaaagtttcacaaatg

SEQ ID NO: 617585 - DNA, 469 bp, Homo sapiens
ttactagctgctaatctgtctgcagctcctttaagcactccagttcctgttattaaggtcaggtgtgcctgggatgctttaaatatttgttcttttaattttgtaatatccaaaaacaagtttgtagagtatccttttagatacttttttattctttcccaaattttgatcttattaagagcatttaatagtttccacaattgtttcttcttcttttaagtatcagataatggcagtgccacttttaactactccaaatgtaagatgacaatttccatttcaaaagtgggtttttctcttctatcgcactgtcaggctacaaattttcygcatttttatgctctgtttctctgttaaaactgaatgcttttaacagcacccaaaccgcctcttgaatgctttgctgattagcagtttcttctgccagataccctaaatcatcttcctcaagttcaaagtttcacaaatg

SEQ ID NO: 617586 - DNA, 451 bp, Homo sapiens
ttttctttcatggcaaacctgcagtactgcattctcagcagggaggattartggtaaaagaccaggcatggagcccccttccctctccctcgaagcaagctctgtggtctctcaatcatctttaaaacaccttcttcccgggagcctcctacattctcctggcttccctcccacccccaccctcagctcctggggcctcagcagccccacccccaagcctctaatcttcccagggaagggaacaagaagaaccacattttaaacgaaatttatttttctttcctcaggctcccagttcacatttctccctcaggagtctagggaagcttctgtctggtatcggcctcctcttcacctgggcccccgccctcctcaggtgtaccagaagccagcacactcccccttcccccccagagccacagcagccctgtctcctgggtggtcttgtgtg

SEQ ID NO: 617587 - DNA, 606 bp, Homo sapiens
aggggctgttctgtaggtgctcaggaagtcacaagacacgtcctgaagaatatgtggctagggacatcccagactcagaagacactcagtggtgcctcttcttggaggacataagtgggggtggcattccctgatgtggcgtttcagagcattctcacccaaaaaaagcttctaaaacctccaagtatataacagtttataatactccaacaagagggccttgtagcctaaacccgggacactccttggcccattccttttaagcttcagggagtgtgggccagccccagactcaccccattcctgaggcatcctggaggttgaaatatttccagaggtttagaacctcaycaagtgggactctaggagcctgctgcctcccagcctccctcaggaactgcacctccagaacaggtgcggggctgacatgtatgtgctttcctgggcagattctagaccgtacacatgaaatctggctttcaggattgctctccagagggacctgtggggcctcggctgagacagagagtaggagtgaggcagtgattcaaggccctgagaaagagctcctcctctgcttggtataaccagctaattcattctgtt

SEQ ID NO: 617588 - DNA, 500 bp, Homo sapiens
ctgggccatgaggagctctggaagtgactcgatatgtccagaataggccactccagggaagggctgaggaaggatgaagttggagaggggcacagaccagatgcagaagggcctcagaggccaggatgagggtttggactccttcctggaggcagcagcagtgggaaaagagttaaaagctggtttgtaaagtggagccatgttgctcgctggtccaggcaattcccccgaaagttcatgtttccctacaaaacccgagagagctactagtaggcgtgaagttcgtggccctggtctgaggatttcctgtttccttgtcaggtatggaggaatttccaytggaggaaagctcccagtcgtccccatcacgggggaagcacttgttgggtttttaagcgaccttggccggatcatgaatgtgagcggggtatgtaaacagactggagatttgagtaggatttttgacttgcttaattaccatgaatgagaaactctcatga

SEQ ID NO: 617589 - DNA, 542 bp, Homo sapiens
ccccaaaccaacttctgtgcctgtgtgccctttctgtggctggcaccactttctgtctgggacccatcatgggttcttcccatcccattgtctaaatctccagcctggagatccagaaattggtgctgggaatgagtgtggggtaggatgagcccttagatagcagagggtaaccaagggacatctgaaaggctactttaggaggaagctggcatcaaagactggaatccaaagaagctatgcagacaaaragcaaccaggtcctagataataggaaggcatctaaggggggtaggagcccagaggcacaacctaaggaacagccacactcatgtctccagggaggctgcgcataagtaaatcagtcacaagctcccatcagttttgattattttctcttctttctgaatttgtttcctgtcttcctcacttgagtgtgggtgggagattgcccatggccatgtggacaatcttctctccatcccctctcctttacttctgcaggccccaggcacactctggtcttgaaactccaccacaca

SEQ ID NO: 617590 - DNA, 557 bp, Homo sapiens
tgcatgttttttcacagcttagagaaatacagtggttactggttaaagtacaattttatgccttgatcagaggtattttcgtattaaaatctggctgaattcagcttcctatatcagcttcctgatgtgaaattcaagacctgaaaatcaaatataytatgaaatgaaaatacactgtgaactctgaataatatttcatctgtgccaggcctaaccttttgctaaacaaaaaatccaaaggggaggggtgtgtatgcttgttttagctgaagggcaataagaagaataatgtattaatttttctaattgagcttttctccagaagctaaatatatgtgaataaagacacatataaattataactataaatgaatacacataccagtttaagatatttgcctgtatgaggacccatttgtcctgtgtccttagatttggagaaaagggtgattggaaggcccatgggaatgaatgtctccccatgagtgatgtgaggctccccaaaccaccatcatctattttcctactccactgcctgccttctaactgggccgtct

SEQ ID NO: 617591 - DNA, 557 bp, Homo sapiens
tgcatgttttttcacagcttagagaaatacagtggttactggttaaagtacaattttatgccttgatcagaggtattttcgtattaaaatctggctgaattcagcttcctatatcagcttcctgatgtgaaattcaagacctgaaaatcaaatatattatgaaatgaaaatacactgtgaactctgaatartatttcatctgtgccaggcctaaccttttgctaaacaaaaaatccaaaggggaggggtgtgtatgcttgttttagctgaagggcaataagaagaataatgtattaatttttctaattgagcttttctccagaagctaaatatatgtgaataaagacacatataaattataactataaatgaatacacataccagtttaagatatttgcctgtatgaggacccatttgtcctgtgtccttagatttggagaaaagggtgattggaaggcccatgggaatgaatgtctccccatgagtgatgtgaggctccccaaaccaccatcatctattttcctactccactgcctgccttctaactgggccgtct

SEQ ID NO: 617592 - DNA, 466 bp, Homo sapiens
tgctgttgacatcagttgaaaattatttttaaaaaccacttgcagttgcaaatcctttttataactctgtaactcagaatatagaattgggtagcaaaattgtttcccagaattaccaatggtctccccacccctgcctggcatgttccatcttaaaggactaatcccaccacatcacctatgggccaggcagaacatcaggggtgctgatgttctgtgatctacagcagttaattccaaacttttmtcccttattggatgagatcatttttctattgtgttttttacatttttgttcacaaagattagaaaacctgcaacacacttattggcatatttttctgataattttcatccaaaacctaattctgactttacaacatactatctttacaaaggtttgcaaaaattctttcatatagcattgtatatgtctgtcatgaaataatagtaagtatattattgt

SEQ ID NO: 617593 - DNA, 543 bp, Homo sapiens
tcctataaatatcctatttcattacttgcaaattctaccttccacaaggcactagaacatgaacacaatttaggcaagttctttgctgctttacaacaaagctcacttattttccattgtttaataagatattccycattttcagttgagacctcatcagaatggccatttttactatctgtgtttctactaacactctgtacatgattatctgtgtattctctaataagatggaaacttcctctacatctctcctttttccttcctgagcactcatcagaatctcctttaaaaatccctttatgatcatctcagtttcttagagcaagcacttcagaattcttcctacctctacttattacccaatgcccacttcacttccacatttgtaggtgtttgttacaatagcacttcacttcttggtaccagtttctgtgttagtcaggactctccagagacacagaaccaataggagattatatatgtatataaaatgaggaattggctgtattagtccattttcatgctgctaataaagacata

SEQ ID NO: 617594 - DNA, 503 bp, Homo sapiens
gaagtgtaagaaaatgaatcttcagagcattacagatagagaaataccttagaaaagaacaaagtatcccccagattttgagkcctgccccgacatcctctctatagcctcctaattctccgactcagcggcgactcaatttagaactccaggctcatcttgggggactccagttcatcaaggcttgggtggatcttggcttgagagccatgctggggaccctgctgcacagtgtcactgagattgttgcagaggaggtgtgagagaggagctgtcagcacagctccaaccacagccctggggacaatgacagcagagtcacaggatttttagcagcagaacgtcttctccacactccctggaggaaggctcaagggcggagcatgtcctcggtgccacccttcaggtgaagagtcagcctggggccagcatgctggtgacaggctaattctttctgttcaagagcagcacaggccattgaagggacatgtgccccgagaact

SEQ ID NO: 617595 - DNA, 560 bp, Homo sapiens
tgccttggcctcccagagtgctgagactacaggcatgagccaccgtgcccggcctatttttgagtgctttctgtgaacagctactatgctagtcattagaattatgagcagagagagaaaatctaggcactgctgcttacagtggtgggaagggtttccagggtcctggttgagttatcatcacacttttcctcaagagccaactctaggctaggcattgtaccaggtcctttatttatagatttatttwtttttggtgtaaaagatatattttctccaaaaccctgtgtcagcatatttttgtgtagctataaaggaataccagagggagagagacatcagtctgaggatcccagggacagaggtacaactgctgtgagcttcagaagagcagctcaaggtcacatgagagtcagtaacagggcacttgactaagggtggtcagcagagagttccatgaggaaggtattttgagctgagagctgaaggaagcacgggaagaagagagaagaaaggcagatgaaacgttatatcaggcagatagaacagcttgtgcaaaa

SEQ ID NO: 617596 - DNA, 560 bp, Homo sapiens
tgccttggcctcccagagtgctgagactacaggcatgagccaccgtgcccggcctatttttgagtgctttctgtgaacagctactatgctagtcattagaattatgagcagagagagaaaatctaggcactgctgcttacagtggtgggaagggtttccagggtcctggttgagttatcatcacacttttcctcaagagccaactctaggctaggcattgtaccaggtcctttatttatagatttatttatttttggtgtaaaagatatattttctccaaaaccctgtgtyagcatatttttgtgtagctataaaggaataccagagggagagagacatcagtctgaggatcccagggacagaggtacaactgctgtgagcttcagaagagcagctcaaggtcacatgagagtcagtaacagggcacttgactaagggtggtcagcagagagttccatgaggaaggtattttgagctgagagctgaaggaagcacgggaagaagagagaagaaaggcagatgaaacgttatatcaggcagatagaacagcttgtgcaaaa

SEQ ID NO: 617597 - DNA, 583 bp, Homo sapiens
ctctcccataatgttaggacagtgggcctggtgcagtagctcacacctgtaatcccagcactttgggaggctgatgtggaaggatcccttgagaccgggagttcaagatcagcttgggcaacatagaaaaccccgtctctacaaaaaatacaaaaattagctgggtgtggtgatgcacacctatagtcccagctgcttgraaggctgaggtgggaggatcacctgagcctgggttgtcaaggctgcagtgaactaagatcacgccactgcactacagcttgggtgacaaaatgagactctgtctccaaaaaaaaaaaaaaaaagcaaaacacagggttaagatactatcagcaccttgtcaaaattcctaccaaaaggccttcctctgttaagccagtgaaggaggaggtctggactaagatcaactcaactatattttcttatgaccacactactgaatggttaattttcttgtattattagtttacacagggcctaggctaactggcatagctgtgcacctctctaaaaggagtcttttatgtcttaacattgtctgagaatccacctcatctacactgtg

SEQ ID NO: 617598 - DNA, 387 bp, Homo sapiens
gtcaacagttcgagaccagcatggtcaaaatggtgaaaccctgtttctactaaaaatacaaaaattagccaggcatggtggcacattcttgtaatcccagctgcttgggaggctgaggcatgagaattgcttgaacctgggaggcagaggttgcagtgagytgagatcgtgccactgtactccagcctgggcgacagagcaagattccatctcaaaaaaaaaaaaaaaaaaaggaagttgctcaggttagagtttatgggatggatgagggcatgggaggtcaggcagaaggaataatggatgcgaacacctggaggcaagagcgaacaatccacctttaggattgaggtcaacagattgttttggctgatctgtgacaccaggaag

SEQ ID NO: 617599 - DNA, 516 bp, Homo sapiens
  misc_feature 417: n = A,T,C or G
atgtttagctttatctgagtgaaactgaccaactcagagcattctgagtccttttgtttctcctaccaagtgcaactgcttttaccatgaggtgggatcagtggaactaaccaatcttttttttattttttatttttgagatagggtctctctctgtcacccaggctggaatgcagtggtgcgatcacagctcactgcagcctcaacctttccaggcgcaggtgrtcctcccacctcagcctcctgagtagctgggactattggctcacaccaccacacccggctaatttttgtattttttatagagacaggattttgccatgttgcccaggctgttattccagggctcaagcaatctgcctgccttggactcccaacgtgctgagattacagatgtgagccaccatgccaggacanaactaaccaatcttatgccctgtgtacctggttacaatttctttggagggccacatcagtaacaacaaaaacaatgaaactgaaaagtgtattgtgcgt

SEQ ID NO: 617600 - DNA, 516 bp, Homo sapiens
  misc_feature 417: n = A,T,C or G
atgtttagctttatctgagtgaaactgaccaactcagagcattctgagtccttttgtttctcctaccaagtgcaactgcttttaccatgaggtgggatcagtggaactaaccaatcttttttttattttttatttttgagatagggtctctctctgtcacccaggctggaatgcagtggtgcgatcacagctcactgcagcctcaacctttccaggcgcaggtggtcctcccacctcagcctccygagtagctgggactattggctcacaccaccacacccggctaatttttgtattttttatagagacaggattttgccatgttgcccaggctgttattccagggctcaagcaatctgcctgccttggactcccaacgtgctgagattacagatgtgagccaccatgccaggacanaactaaccaatcttatgccctgtgtacctggttacaatttctttggagggccacatcagtaacaacaaaaacaatgaaactgaaaagtgtattgtgcgt

SEQ ID NO: 617601 - DNA, 578 bp, Homo sapiens
aagcttttacctgaggcatctgggcagactggtggcaatcttagacttcttccttattcttttttcaaaggtttgtttgccatgtatggagggcactcatacttttatttatttatttattttttggagagggtcttgctctattgcccaggctggaatgcagtggtgtgatcacggctccccrcagcttcaacctcctgggctcaagcgatccccctaccacagcctcctgactagctgggcacacaggtatgtgccactatgctagactaatttaaaaaaatttttttttgtagatactgggttattgcccaggctagtctcaaattcctggactcaagccatccccccacccagccccccaaagtattgggattacaggcatgagccactgtgcccagccttatacacttttataacctaacctactataacataaaataaaatcctgtattgtgttttgtgctatagatacattttaatacaggaagacagtggagtattggaagatgtggtaaggagagttatagggataaagctattctttaatttattctcaaactaacatttggaaaaga

SEQ ID NO: 617602 - DNA, 456 bp, Homo sapiens
  misc_feature 288: n = A,T,C or G
aggtgggatttggggatgggtactgagcctcccctcaactgctctcactcaactgctgcctcctgactctccagctggtttctggctacctcttttgagagagactgtcctcagccctcagctgctggagggcagcttttacccattgtttcctaaatccagcctcctcctgctcacggtcttccagtgaatgactctttgccttggagaggatatccggggcggaggcagtcagacgaggaaggaagtttatcctgcagagggtgtagtgtgggttagaggagaggnaaggagagaactgtctgcaaggcctgagatgcccaggatggagggtatggggaagaagcaggagagaaactaaagagaaggcccatcaactctgcaattggcctgctaataaaatgggaaaaacaggggtgctgtggcctatttgcctstggtctgtcttagcacctg

SEQ ID NO: 617603 - DNA, 582 bp, Homo sapiens
aaccagccgtcctcctggctgcggaaacttgtccggagcacctttcgtgggccaccccctgtgctggagccagaggggttaccaagatggagcccttgaccccgattgcagaactcccagccagagcccaccctgggctggcattccctgaactcctccagctcttctcccggtcatcttgtacttttctattgctctgcaccattgatgggtgttatgcatgcataggtgcctttctcagagtccaggaggggcctctgtcaaggccactgttggagctggtcatctgggaaataggtacacgaggccttgttgttattaaagcatctgcttttgttttgaaaacttagtgtgggcacattttcgagaagggctgaagcaragcagcacagccccaacgcatcaggcaggtatgcctaagatgaaggatgccgcaacccctcacatgaacctatttccaaaaaaaaatgtggccttccacggacttgctgtgggggccctaacagcacagcaggctgagccaggcccctccaccacacccctcctaggcagaagtgagctttctagatttgacgtgaaagt

SEQ ID NO: 617604 - DNA, 582 bp, Homo sapiens
aaccagccgtcctcctggctgcggaaacttgtccggagcacctttcgtgggccaccccctgtgctggagccagaggggttaccaagatggagcccttgaccccgattgcagaactcccagccagagcccaccctgggctggcattccctgaactcctccagctcttctcccggtcatcttgtacttttctattgctctgcaccattgatgggtgttatgcatgcataggtgcctttctcagagtccaggaggggcctctgtcaaggccactgttggagctggtcatctgggaaataggtacacgaggccttgttgttattaaagcatctgcttttgttttgaaaacttagtgtgggcacattttcgagaagggctgaagcagagcagcacagccccaacgcatcaggcaggtatgcmtaagatgaaggatgccgcaacccctcacatgaacctatttccaaaaaaaaatgtggccttccacggacttgctgtgggggccctaacagcacagcaggctgagccaggcccctccaccacacccctcctaggcagaagtgagctttctagatttgacgtgaaagt

SEQ ID NO: 617605 - DNA, 582 bp, Homo sapiens
aaccagccgtcctcctggctgcggaaacttgtccggagcacctttcgtgggccaccccctgtgctggagccagaggggttaccaagatggagcccttgaccccgattgcagaactcccagccagagcccaccctgggctggcattccctgaactcctccagctcttctcccggtcatcttgtacttttctattgctctgcaccattgatgggtgttatgcatgcataggtgcctttctcagagtccaggaggggcctctgtcaaggccactgttggagctggtcatctgggaaataggtacacgaggccttgttgttattaaagcatctgcttttgttttgaaaacttagtgtgggcacattttcgagaagggctgaagcagagcagcacagccccaacgcatcaggcaggtatgcctaagatgaaggatgccgcaacccctcacatgaacctatttccaaaaaaaaatgtggccttccacggacttgctgtgggggccctaacagcacagcaggmtgagccaggcccctccaccacacccctcctaggcagaagtgagctttctagatttgacgtgaaagt

SEQ ID NO: 617606 - DNA, 559 bp, Homo sapiens
aaggcctgagggggaggagctgtgagaaggagagtctgtccccaatcagtgaacaggaacagagtcaaagaaagttaaatgaagcccatttgtacagcacattgcaattcacaaagcactttcccatatgtgcttgcagatgagcctcataacagcttttcagagcagagagggaaagggatttgcccagagtccagcgggtagccagtgacccagtcacaatgcgaaccaggagtgccagtgcccagtctgggtgctcgagcctccccacagaccccaacatcctctttctacactcaaggatggaagcttgtggggatgtgcctgacggtctttttttgccctctctccctgcaggacagtagcccacacttccagccttgcagaccatgaatgggatggccaatgtgaatccygccagccgccctcactacgcctccgccatcccggtgcctcgtgcctcttcccagaccaggattcctacaccgggcgcttctccccagctgcggccacgccaggccggcctggccctgagcccacagagagcagcctcccccag

SEQ ID NO: 617607 - DNA, 483 bp, Homo sapiens
gtttcttccccaggaaaagtggaatgaaaatgccttactcctgggacaatgttttccaacttgcctcagctttcagtcctaacctcttccttctcctcctcgtcattccacaaccccacacctgcatagattcctatgatctggcaatttcaaaaaatacagtcaaagagtgattgcatgaatcaagtgagaccatgtcagacctgactcagtctctgggatgctcaatgtgtgtgcttaataaatgccagatttaatcttttttcttttcttttttttttwaattaatttatttatttttatttatttattttttatttgagacagaatctctctctctgtcacccaggcatgtagctttttctattccagatacatgttggccaggctggtctcaaactcttggcctcaagtgatctgcctgcctctgcctcccaaagtgttgaggattacaggcgtgagccactatgcccagtctcatcc

SEQ ID NO: 617608 - DNA, 338 bp, Homo sapiens
ccagctggaggactgaggcgaagcgagccagagctcagccacccctcttggttctactgaaaatattgctcagggaggcatctcagggatccatatggtctaactgaatcagtaatgagactctacygtgtgtgtagacaatattgatgtgcccaaggctgtcagaggcacagggagatggaactcacagtgccctggggtctctgttccaatccagtgtggccagggtctacctgccgctgctttgtggaggaaggtggagactgtctctccaacagcacagacatgtctacccatgagagactatggctttctcccaagccataggtacctgcctc

SEQ ID NO: 617609 - DNA, 565 bp, Homo sapiens
atttacttctcagttgctgttttacttgtgaaataatgagaaagacaacacctgccctgtccagctcctggggttattgtgaggatcaaatgagatgacggatgtggaaatattttaactgtaaaataccattttcattttatttattatgattaagaagaggcactatagycatccggggtgagcgcttctctggcctcttgtgtgccctgattaggctgacctgaaaaacaccaaacaaaaaaatcagagcaggtggaaggaagcagactctctccccacctggttggagcccatggcccacatgtaggctgtgcccagggctgctcttccttcccttctagggcagactcagcagacccaaagatcaagcaactgccagggtcaggcgcctccttacagccgtcaggagaatgcttggcaagacagccctgaattctgttcctctctagttccaggggcatctggtcaccacccccaacccttgcctcttgccctgcaggcccagccaatgagaagtacaggtctgcagatgggaaagggctctccagccagccagcaagca

SEQ ID NO: 617610 - DNA, 443 bp, Homo sapiens
ttactgagcaagtgggaaggctgcagaaccaggcttgggaaacctgcagcttccaaggaaagctggtagccagaaccacagcccaattcrtggcacaagaagcctgctcagatcaattctgttgccactgccagaaactagctggagccaccattgcgcctcctaccaccaccgtcaccagcgttgggagccctgaccctccctgcctctgtttatcctctgcacagacagattcagtgtctcaggtggaaggaaggagagctgcggggcttgttgcccccgccacacattgctcggcctctgctcagactggggtgctcatggcacttggctagggaggcatggaagacagacagtgccagaggccccacactctctaacatggggagaggaaagctgcaaagtgcccaggccattgtctaatccttgcctggaaaagccaa

SEQ ID NO: 617611 - DNA, 550 bp, Homo sapiens
tagattaaggtttcctgtttctcttcctgctttcaagattgtttctttgtctttaactcgcagatgcttaatttgtgctttctttaggtctatcttgtttggcatttgctcagattcttgaatctgtgggtttatgtctcttgccaactttgcaaagttttcaactattttttcttggagtactttttcagcaccatcctctttcttttctcttaccagaacttcaataacacgaaagttagatcttttgttatagtcccacaggcccctaagaatctgctctgctttttgttttggtctattttctttctgttgttcatattggttaatttctattgttctatcttccagttcwctgattgttctccttaattctactgttgatcccatccactgagatcaacacttcagttactgtatttttcagtttaaaattttccatttggttcttctttatagcttctgttctttgttcttcattacccctgggctaggggtaggagttccagctccctacttggtttccaggggaactgagctgagggtggct

SEQ ID NO: 617612 - DNA, 450 bp, Homo sapiens
agcacctgcagaggccaacagaggttggcattaactccttccctgctggagataggaatctctgagtgggtgaaggaggcagctgaagctggtaggaatggctctgggacagagggtggcacttggggccctggaatggttctgttacaagcttgctgggtgtccttgggcaaacaattgaccttttttgagcctttgaaatcctctttctcctttcttcccaaggaagccatggaaataaataaggagctgttgaagttgccagctccctggagtaactgtgtaaacctccggtcttctattctcatggccaatagtgcttccactggtcaaaactcaagcctcaagataaagcatgtaaatagcttaagaagagcagygctggtgcctgggggagaggagccagtcaggaccttcagcttcccagggaaacttggattgagtagaatg

SEQ ID NO: 617613 - DNA, 413 bp, Homo sapiens
aacccacatttatgagactgtaaaaccattgctctttttcatgayaccatgtttttagggactgcccatctaatggttccttacaagacagagctgcatatagagggggaaatgtaacctactctatatgcagctataaaaacaaagaatctggattctaaccacttagattctccagagtcataatgtgttaggaaggagtgaatgagaaagaatttttttgcccctctggtctcccatgtgactgagattgcctgagatgtgtgtgcagactctcaaagaaaaagttgtataattgtcaggcattggatcttgttttcatcttggtaaaccaaatcctggagatggaatacagctgctatctcagcagctggttccagcttgtgatgtgcctgtgtccagcagagcccacg

SEQ ID NO: 617614 - DNA, 413 bp, Homo sapiens
aacccacatttatgagactgtaaaaccattgctctttttcatgacaccatgtttttagggactgcccatctaatggttccttacaagacagagctgcatatagagggggaaatgtaacctactctatatgcagctataaaaacaaagaatctggattctaaccacttagattctccagagtcataatgtgttaggaaggagtgaatgagaaakaatttttttgcccctctggtctcccatgtgactgagattgcctgagatgtgtgtgcagactctcaaagaaaaagttgtataattgtcaggcattggatcttgttttcatcttggtaaaccaaatcctggagatggaatacagctgctatctcagcagctggttccagcttgtgatgtgcctgtgtccagcagagcccacg

SEQ ID NO: 617615 - DNA, 610 bp, Homo sapiens
cagggaggttgcttgttttctggcttctgctttttttttttttttccttccccctgatcctgtcttctgcttctctcccatgcctttgtgttgcccctagggtgtttctctactttccaccttccctctmcatcctgtctgctcctttagaccttggcagccaatcctgtacctccagcatctcgttgcctagcaaccggcttcctacctgccccattgtgttagaatctccatgacaacaagtattgccaaaagagagaaaaaaaagttaggtggtagcaggaggtgatgagaccctttattttaggacatttgtgcagttttgccagcaataatttgctcactctcaggattccccagagggtgtcacaaatggactgaacccagacctcatgagataacaagtcacgagactgacagtctgtctgtgtgtggggatataaactctagcatagaggcattcatgtgaggggcaagaatgagagccacgggcattttttgtttagacagatgggactgggtcacatgatcccctttctgtgggtcagttcaggaaggcagcctgaatgagggaggattttttaatagttgcacaagtaaggtaaaggag

SEQ ID NO: 617616 - DNA, 548 bp, Homo sapiens
aatgaatgttttacgagagtgagcgagtcactgccttatcgggaagatgctgtttctcactctctctctgttaccaggaagtgagatgtactgaaagccatcgtggtgtttttccaaagatggcctttgaagaggaggtgtttctttaaggggcccaggagaataggggttgggtttgcagggagaaaacctgcccctttaagaagcctggttctggctgtggcaatcctgtggtatggaagataataatagtccctacttayatagcatttgctgtgtgccaactgctatgctaagcatttaacatatattaacccatttaatctccacaacaaccctatgaaatctgtaccactttttatctccactttacaggtaaagaaattgaggtcaagtgtcttgtctgggtctcagctagtaagtgatagaggtaggatttgaactgaaggagtctggctcctgagtccatgttttcaaatactacatatatgcagaggaaaggagtcttgatagtctccatagcagtgtggagagcttgatcatgtact

SEQ ID NO: 617617 - DNA, 616 bp, Homo sapiens
gcttaaactaagtcttcagttagtcttccagaaattgaccattccccaaaatagcctacctttctcaagaytgggtctatatttggaagcacaccagtttcaaactgttgaaaatgtttagaaaccagttttcactgaaactgcttcatctaacaaagcagagactcaaactctgctgctgaggaatgtaggtgccctgagacagctctaatccctgcccatgtccctaaatcaaataatgatcagctcttttgattcacagaggtttgtggagggaatagttttctttccccaaaattattttcttaaacacttctcatgggttactattctttatctataatgattctgcatcaaaatatatattcaatacttgttaaatttgacatttcaaatgttcatgatgtcttgcaaatatcctcctgatttccagatgcagcctcagcagaacacatctgggatgcatgcataaccatccgccaaccaaagcatcccccacaggggaatcgtgtaaacatgatatatttgtaatatgtgggtacgtaacaatgtgtaagaagctgtaaacatagttatatttcccacaagcagaatttttattctgtagtgggctata

SEQ ID NO: 617618 - DNA, 583 bp, Homo sapiens
aaaaaatgaaccttgactcttacctcacaccatgcataaaaattaatttgaactggatgataaacctaaatgtaaaagctaaagtaggatataatctttgtttttgttttattgttgttgttaatttttaatttgtttattttagagtcagggactcaccctgctgcccaggatggaatgcagtagtgcaatatgtcactgtaacctcgaactcctggggtcaagcaatcctcccgcctcataatccaaagtaggactaaaggtgcatgcctctacaccagctaatatttttactttttgtagagrcagaagcttgctatgttgtccaggtttatcttgaactcctggccccaagtgaaccttccacctcggcctcccaaagtgctggaattataggcatgagccaccacatccagcccaggcaagctttgttaccttaaggtaggcaatgattacttagatataacatgcacacaaaaatacaaaccatagaagaaaaattgaatactctggacttcaccaaaataaaatacttgggcttattaaatggtatcattaagaaaatgaaaatgcaagtcacaaa

SEQ ID NO: 617619 - DNA, 583 bp, Homo sapiens
aaaaaatgaaccttgactcttacctcacaccatgcataaaaattaatttgaactggatgataaacctaaatgtaaaagctaaagtaggatataatctttgtttttgttttattgttgttgttaatttttaatttgtttattttagagtcagggactcaccctgctgcccaggatggaatgcagtagtgcaatatgtcactgtaacctcgaactcctggggtcaagcaatcctcccgcctcataatccaaagtaggactaaaggtgcatgcctctacaccagctaatatttttactttttgtagagacagaagcttgctatgttgtccaggtttatcttgaactcctggccycaagtgaaccttccacctcggcctcccaaagtgctggaattataggcatgagccaccacatccagcccaggcaagctttgttaccttaaggtaggcaatgattacttagatataacatgcacacaaaaatacaaaccatagaagaaaaattgaatactctggacttcaccaaaataaaatacttgggcttattaaatggtatcattaagaaaatgaaaatgcaagtcacaaa

SEQ ID NO: 617620 - DNA, 483 bp, Homo sapiens
ttattattattattatttacacacacagttctaatagacaaaatgtgcagaggaaatgagctcgcatttctgtccttcacagccctcatcttgtggctaaagctgcagccggcctccctcctgtccaacatacataaggactcatagtggctgctttatgytacgattgtaatgcattttgtgtgtttcatagtgtatacacgctcttttctctctctctttttaaagcagttgttaatggtcaggggtaccacccttccactagcatcagttgctacctcacaatcagatagtgaggaaatcttccagttaggagcaattgattgataggagttggggggtgagggaggtggtggccagggctggaataaccactgcatggctgcactctggcatcagagtgacgacagaagtaagtcaggagagcgtggagagtacagttgcgagttaagctctctttgtgagacaatgtgaggagaattc

SEQ ID NO: 617621 - DNA, 603 bp, Homo sapiens
gaattcattgaggatgattaaaatcaccttatggattagaatggatataatccaattattttacagataactctagtatgcctatgtgaaacatagtccctcaatgtggggccctaacggagaccagtttcaaaatttttagatttttaacttttggggggtaatagagctagcagcttctctgtacgggcaggaatgggggttccgttggagcatatctttttttttaatcctgctaaaatagacataaaataaaagttagcatttaaaccatttttgaatgcacaatttagtggcattaagtgcattcatcatgttgtgccaccatcaccaccatccatttccagaacttttcatcattccaaaccaaaactctgtactcattaaatgctaatgcyccatttcctatcctctgctcccaggccctggtaaccaccattctattttctgtctctatgaatttgactactctaggtacttcatgtaatagaattatataatatttacccttttgcatctcatttatttcacatagcataatgtcctcaaggttcatccatgttgcaacatgtatcaaaattcccttctctttaaggcaggaat

SEQ ID NO: 617622 - DNA, 603 bp, Homo sapiens
gaattcattgaggatgattaaaatcaccttatggattagaatggatataatccaattattttacagataactctagtatgcctatgtgaaacatagtccctcaatgtggggccctaacggagaccagtttcaaaatttttagatttttaacttttggggggtaatagagctagcagcttctctgtacgggcaggaatgggggttccgttggagcatatctttttttttaatcctgctaaaatagacataaaataaaagttagcatttaaaccatttttgaatgcacaatttagtggcattaagtgcattcatcatgttgtgccaccatcaccaccatccatttccagaacttttcatcattccaaaccaaaactctgtactcattaaatgctaatgctccatttcctatcctctgctcccaggccctggtaaccaccattctattttctgtctctatgaatttgactactctaggtacttcatgtaatagaattatataatatttacccttttgcatctcatttatttcacatagcataatgtcctcaaggttcatccatgttgcaacatgtrtcaaaattcccttctctttaaggcaggaat

SEQ ID NO: 617623 - DNA, 416 bp, Homo sapiens
ctgttaaatattcctgcctctcttcctrtgggtataaaagagctggcataataaacataaacataataaacattttcttaatagaaaatagtatgccaacatcaattccatttcagtggaagaaatgctttgccactcataacagcaatgctttggctatggaaaataataggacgcctcacactgtattcggaatcctataaaaacaaaggaagccactgtggaaaaaaaacattagggaagagatttctattcatatgtagatcttcttttaaaattgagaaccattttctctctcttaaatgaagtttcccatcacccaccaaccccttgcacagcccctagagtcccataatgtagttttctacatgagtgattagtttctttgtctatgcagattttggggaattgtcatt

SEQ ID NO: 617624 - DNA, 595 bp, Homo sapiens
ttgatgaaatgcaacatggtcaaaaacattttggtggagaataatttaatcaactagaccatttggtgaaaaataaatcccagttactagacttcccagtattaataattttggtatgccaggaatttttaaaacatttctaacaaattttttcagaaatcagaatgactgaaakgtataacaataggaaattaggaaatcaataagtaatcattgaaaagtgagtgattgaattagttggaacaatctatgccatccatcctgtgggggaaaaaatgaaaacagctaaacaagcagagcagacatcatcaacttagaaaaacaatatagtaaataatttgaactagaaaattttccaaaattgaaaattccagttttaaaaaatttgtgttttcttattcaaaaagcaatacatatttcgttacataaaagtcagaaaatcagagaagcagaagaacataataaatacccactgtcctactcaatagagactataactgctatctctgtacaaatcctttaaaatcctgtcttatgtgtatttattttacatctgtacatatgattccaaaattaggtaatactgtacgtggtc

SEQ ID NO: 617625 - DNA, 382 bp, Homo sapiens
tatacaatttgttggtatataattgttcaaagtagtctcttatgatcatttgtacttcttcagtatctattatagtgttttctctttcatttatgattttgtttgagtattctgtttttcttagtttagataaagtttgtccattttaattatctttttaaaaattatttcttagttttgtttctcttttttatcatttttctagtttcttgttcttctrtttctgctgtgatctttattatttccttttctctactaacttttgggttagtctgttctcctttttctagttttttgagatataaatgttagcttgtttatttgagatctctcttcttttttaaaataaatatttatttttatttttcactttttgtttgtt

SEQ ID NO: 617626 - DNA, 636 bp, Homo sapiens
gagtccgaaaaaggagtcagcaaagggtggtgggattatcattagttctcacaggtttgggataggcataaaaagtacattctcaagggtgggggagaatatattgtatctcttagggtggggcaggaacaaatcacaatggtggaatgtcatcggttaaagctattttcactttttttgtggatcttcagttgcttcaggccatctggatgtataygtgcaagtcacaggggatatgatggcttagcttggctcaaaggcctgacagggctgattcatttacaatgctcataccctgaagaatcttttcattagtttctgctacctgggcacccagtcttcttatattcctgttctgggtttgaatcttggctccaccacattccagacatgtgaccttgggtgagttactgtgcttctttgagcctctattttctcatatgtaagtgaggataatacccaacgcatagagtggttgggttccgtaaaagaaggcacaccttgttcttagcatagagctctgcacatggtacatgctcagtgaaaggtgggtgcattatcctcatgagaatagctttaattcctaaacacagagtttaggaactaaacccacattcacataaccagtcagcaaca

SEQ ID NO: 617627 - DNA, 622 bp, Homo sapiens
aaaaaggcccagggctcccaggcattttcttttctttggtgtytcctgccattccccacccccagggttcttctctttctatgattggctgctactcccctcatctttgctgcccagatggcaagcacaaaggaaaaaggtctttttttccttttaaggcttttattgctaattataagagaaaaagcaatagggccacaggactgaaaatttaatgaagttcatactctctttttttctctgttagcttgttcctaactatgagtatggatgaaaaatgctctctgcttttatttgtgagggttggggctgctcatctctttgaactgtcattagcaaaaggctctataactccctctaccttggcatctttcatgcctgtgttacccgccccttgtagcaagtgtggagttttcattttttagagatctccagacttgttaataacaagttcactgggcctcagctctgcccaggagggactaattgcaaagtaaatcccaggccataataaggaattgatgaaagagcaccatctttaatcctttctttggcttcagccacttgttattaaaaaggtgtatttgaatcaactaaagatgaacagctttagttcatttgt

SEQ ID NO: 617628 - DNA, 587 bp, Homo sapiens
  misc_feature 515, 578: n = A,T,C or G
gctatgtaggcattgcgttttttaattttatgtgaataatatttatttggatttatatatgtttaccatttgctttgctctctattccgccttacatctcagaccttccttccaagtttctttctttctgaaatacctcattcagtatttctggtagtgtttgtgtgtggatgataaacacactcagttttactattccacyatgttctcatttgtattgctcttatagagaagcatgctttcagtccaattgttcctctgtaagcaatttatctttttcttttgtatttttataatatattttcttattttggattcggcactttcattaaaatgtgttcaggtgtatatatttttaaatttatgctacttaatataggttgaattttctttacctgtgactttttttggcggggaactggagtcttactcagttgcccagactggagtgcagtggcgtgatctcggctcactgcaacctccaccttctggttgaagtgattctcctgcctcancctcccgagttattgggattataggcacccgccatcacgcctggctaatttttgttttgtggnaaaacaagg

SEQ ID NO: 617629 - DNA, 587 bp, Homo sapiens
  misc_feature 515, 578: n = A,T,C or G
gctatgtaggcattgcgttttttaattttatgtgaataatatttatttggatttatatatgtttaccatttgctttgctctctattccgccttacatctcagaccttccttccaagtttctttctttctgaaatacctcattcagtatttctggtagtgtttgtgtgtggatgataaacacactcagttttactattccaccrtgttctcatttgtattgctcttatagagaagcatgctttcagtccaattgttcctctgtaagcaatttatctttttcttttgtatttttataatatattttcttattttggattcggcactttcattaaaatgtgttcaggtgtatatatttttaaatttatgctacttaatataggttgaattttctttacctgtgactttttttggcggggaactggagtcttactcagttgcccagactggagtgcagtggcgtgatctcggctcactgcaacctccaccttctggttgaagtgattctcctgcctcancctcccgagttattgggattataggcacccgccatcacgcctggctaatttttgttttgtggnaaaacaagg

SEQ ID NO: 617630 - DNA, 435 bp, Homo sapiens
caatttttttttttttgttttcttttgagtcagagtttcactcttgtcgcccaggctggaatgcaatggtgtgatctcggctcaccgcaacctccgcctcccaggtttaagcaattctcctgcctcagtctccctgggattataggcatgtgccaccatgcctggctaattttatatttttagtagagatggggtttctccatgttagtcaagctggtctcaaactcccaacctcargtgatctgcctgccttggcctcccaaagtgctgggattacaggcgtgagccactgcgcccggcctctactattcaagttattaacgttgtgtacctctcaatgttttacatcttctgataaaatcaaaatcatggtattcagaagactagagatgattcaaccaagcctgtgaatctccctcatttagaatcccgctg

SEQ ID NO: 617631 - DNA, 435 bp, Homo sapiens
caatttttttttttttgttttcttttgagtcagagtttcactcttgtcgcccaggctggaatgcaatggtgtgatctcggctcaccgcaacctccgcctcccaggtttaagcaattctcctgcctcagtctccctgggattataggcatgtgccaccatgcctggctaattttatatttttagtagagatggggtttctccatgttagtcaagctggtctcaaactcccaacctcaggtgatctgcctgccttggcctcccaaagtgctgggattacaggcgtgagccactgcgcccggcctctactattcaagttattaacgttgtgtacctctcaatgttttacatcttctgataaaatcaaaatcatggtattcagaagactagagatgattcaaccaarcctgtgaatctccctcatttagaatcccgctg

SEQ ID NO: 617632 - DNA, 509 bp, Homo sapiens
tctacctcagttgtaaataaagagtgaaaaagaacgtgtctactctatgactcaaaatgagtctgtttttcgaaataatagtttagtgacttctttctctttctttaaaagacaacctacagagaaaaacaagcatctgtattacacaccatgcagaattaaacattggtattttgacttttttttcttttttatttcatacatagaatacaaagaaaaacctctttattccctgyttagtcctatttcatgccttcttcctcctagactgtattgtgtagcttttcaatatatagcattgtatatgtattttttctacaactgatctttttccctctggctttttaaaaaacttttacatgtatttttccccatccatcttgatacatacagacttaatttattatttctgtaataatatcaaaatttttctattaatgtttctatgatgcatatatatatttttgtattataattattttgaagagtgttgcagttgaacactcttg

SEQ ID NO: 617633 - DNA, 509 bp, Homo sapiens
tctacctcagttgtaaataaagagtgaaaaagaacgtgtctactctatgactcaaaatgagtctgtttttcgaaataatagtttagtgacttctttctctttctttaaaagacaacctacagagaaaaacaagcatctgtattacacaccatgcagaattaaacattggtattttgacttttttttcttttttatttcatacatagaatacaaagaaaaacctctttattccctgtttagtcctatttcatgccttcttcctcctagactgtattgtgtagcttttcaatatatrgcattgtatatgtattttttctacaactgatctttttccctctggctttttaaaaaacttttacatgtatttttccccatccatcttgatacatacagacttaatttattatttctgtaataatatcaaaatttttctattaatgtttctatgatgcatatatatatttttgtattataattattttgaagagtgttgcagttgaacactcttg

SEQ ID NO: 617634 - DNA, 495 bp, Homo sapiens
aaagaacgtgtctactctatgactcaaaatgagtctgtttttcgaaataatagtttagtgacttctttctctttctttaaaagacaacctacagagaaaaacaagcatctgtattacacaccatgcagaattaaacattggtattttgacttttttttcttttttatttcatacatagaatacaaagaaaaacctctttattccctgtttagtcctatttcatgccttcttcctcctagactgtattgtgtagcttttcaatatatagcattgtatatgtattttttctacaactgatctttttccctctggctttttaaaaaacttttacatgtatttttccccatccatcttgatacatacagacttaatttattatttctgtaataatatcaaaatttttctattaatgtttctatgatgcatatatatatwtttgtattataattattttgaagagtgttgcagttgaacactcttgtgtttctccttgta

SEQ ID NO: 617635 - DNA, 603 bp, Homo sapiens
ccaaaccacacaaatatatttatgttttctgatttattcctttcaaaatgtcactgtcccctatgttgaacgctttgctatagctgattgatagtaggacatttctgaatagttgcctatgtggcaagaattcctaaaaacactgtcttaaaaaatactgaacacctgaaatgtatgccctttgcttatcaaggttttctttcctccaaggtactggttttagtgagtccaaacctaggccactttcaccatatttagtaaacccgtgtccagttattgttttacatagttctgctttgggctttgcctgtactcctgccctaactgaaactctgtacacacctaattgttcagctgataycactttgtcattcactttcataatcaacacacttagtttattccctgtttttattttacatactcaaggaacgtataaaactaggccaaatatttaagaaaacagttttgccattgaaaattcctgatacaacttgctgtaagcactatcacctgccttctgttaaaagaccattttcaaaaggtgaaatcctgactccaatataaaatgacatgtgaaagagattttatttaactcattaa

SEQ ID NO: 617636 - DNA, 613 bp, Homo sapiens
aagatggcatttgagagacattaccctggttgctgagaggagaatggataggaagtgagggaaaatatgggcaaggagaccactgtgtgatttttactcagtgatgtgtttgtggtctttgcctgctcacacccgcaacccarcatccaccctcctccccctctgctgccttgcagcagcttccaagtgtgctgctgttggaggactgactgtcaccctgctgaacacaatggaggtagtccaggtctctcaacaactcagcttgtgaaaatccacatggcccagagttcccacgttctttctacagccaggactggcttggtgagtctacggcctggtacagttgcatagagccctgtgctccagagagtccccacacttgctttaatgttctattgtcaccatcttgaaattcttaattttcaaatgagtggcatcacattttcattttacatgaaaccccataaataatgtagagggtcctacttcactccacggatggtggcctcctgataattctttaaactctaaggcaaaatggcctgagggctttggagtcagtccaagattaagaaagatcagactttccaaagacagagcttagggggtcttg

SEQ ID NO: 617637 - DNA, 412 bp, Homo sapiens
aactggctggatgctgatcaaaatgcatatctctgggctctacctgaacctattaaattggaacctgtgtgtgtaggaagatgggggtaggrgcaggacagggagcaatgctgcaaaatctgcatttttcaaccagcaccttagaacaagagtccccaccttgtgggccatggactagtgccagtcagtgtcctgttaggaaccaggtgacacagcaggacatgagccatgggagagccagtgttattgcctgagctccacttcttcttgaatcagtggtggcattcgattctcaccggagcttgaaccctattgtgaactgtgcatgcgaaggatctaggttgcatgctccttatgagaatctaatggctgatgatctgaacggttttatcctgaaaccatgcccctgctt

SEQ ID NO: 617638 - DNA, 575 bp, Homo sapiens
actcttggtcgtggaagttgctggccatgtctaatcttgaacaaagttactccttgcccatatctgtgcctactgtacattgttgcacgtgaagttggggtttattggctgccctggagggagaggcccagagttacactttgatctggggcttgacagtgcactcctgggctggcagggagcgtggaggtggatggagtggccgggactgggagggtatagtgggggcatagttgatactcctcttggaggtaccctcaggatttgcctcacaatcttctaaatatctattatgataacaacatctgcatctttgagagragtgtaaattttttgagaaaatgaaattgatccagacccatgggtataattaaccatgtacatcaaggtagtttttgttttgaaaaattgggtgtaacttgaaagctctgaatacagagctctagagatagacctaaagtcatgaggtcagccgagtgtggtggctcacgcctgtaatcccaacactttagggggccaatgcaggaggatcacttgagcccaggagtttgagaccagcctaggaaatacagtga

SEQ ID NO: 617639 - DNA, 591 bp, Homo sapiens
agttctaggtgacactgatgctgcccgctggggatactcctgagaaccattctctggtctaagagaaagcaggctatgagaaattcatattgttgcagactttcatatgtaaacaattatcagcatagatgatagaagtgattccacgaatgtgacttttttatttcaccctttttaaattagttgttggggaaggggtggctgcataacatttcccacaatgtggtgaagtagaagacagatagggctggctctcctgcccagactacctcaggaagagagagtcacattatcaccagtgccaggcaaagctttcatgctgtgaagaattatccttggcagtgcccagcagcatgttgtcatggaattcaaagctgccttgcccatgccgtgttcagggatatggctgagatctaagaactaggaaaccttatccacaaatccaatgtgtcccttggcagcacatcacactgaggaactcctttgctctggtttcgaacatcaggtcagaattccaaaggggmgttgcctcccatttggttggcataatgtagctgttggcaatgttttatctacaatttctacccagca

SEQ ID NO: 617640 - DNA, 517 bp, Homo sapiens
ggctgtttgcttatatttcagactgagacactataaagctgatttgatggttggattgtctgtgtatgaggactcttggccttcctgtagggtgattatctggaaaaataattccttagtaaatattcaaagtcagtatcttcaatgtttcctcctgttataatcagattctccagagatgcctgttcagacttgacttgggtcggctgtgtccccacccaaatctcatcttaaattgtagctcccataattcccacrtgttgtgggagggacccagtgggagataattgaatgatggagccagttttacccattctgttctcatggtagtaaataagtctcaaaagatttggtggttttacaaggggaaacccctttcatatcgttttcactccctttcttgcccgctgccatgtaagaagtccctttactcctcctttgtcttccaccatgattgtgaggcttccccagccatgtggaactgtgggcccattaaacctttttttaaaataaatta

SEQ ID NO: 617641 - DNA, 517 bp, Homo sapiens
ggctgtttgcttatatttcagactgagacactataaagctgatttgatggttggattgtctgtgtatgaggactcttggccttcctgtagggtgattatctggaaaaataattccttagtaaatattcaaagtcagtatcttcaatgtttcctcctgttataatcagattctccagagatgcctgttcagacttgacttgggtcggctgtgtccccacccaaatctcatcttaaattgtagctcccataattcccacgtgttgtgggagggacccagtgggagataattgaatgatggagccagttttacccattctgttctcatggtagtraataagtctcaaaagatttggtggttttacaaggggaaacccctttcatatcgttttcactccctttcttgcccgctgccatgtaagaagtccctttactcctcctttgtcttccaccatgattgtgaggcttccccagccatgtggaactgtgggcccattaaacctttttttaaaataaatta

SEQ ID NO: 617642 - DNA, 557 bp, Homo sapiens
gctatatagagttcaataatttaacagctgaattataaaattaaataaaatatttgaaacaaagagcatgtacttatcaggaaagataaatgtgtttacatacattatatatttttctactcattagttcatcattcatttgtccattaatttaccatctcatattgaatgcctttgtgtgccagatgctgttctggcactgggaatattggaaggaaaacttccattccttgctacagtctatgccacaaggaaaccaaaccaaggtgggaaaaacatgttcttattatattcagtagatagaccagtgatagtttttcaattttcactggtattaaggcacactgagttctgaaaaaaaaaagctacaaaaataagaattaaaaatatttgaaactttcaaagcaaaataattaattttctagaattcagggctcagcaaacatttaatgctataamcctttaaaaaaatcataaggtcagggatcatggcacttaaaattgcatcctgtaccatttggagataggaattttaggttgtaacatactcaatatac

SEQ ID NO: 617643 - DNA, 321 bp, Homo sapiens
atatcattggatcatgttatcttctttgccaatctctgtcttttaattggtatgtttagaccattttcatttattgtatctattgataaattagtgcttagttctgccaatttattttggtcttctgttggtgctctggtttttkgtttttctattttcttttttctgacttcttgtgggttactcaaacaatgtttagaattccatttggttcatgtatagcatttttgaatctatcttttgtatagcatttttagggatcactctaggtattacattatatatatgcataacataataatctactgggtgtcaacattt

SEQ ID NO: 617644 - DNA, 496 bp, Homo sapiens
aaaaaaaaggagatcatgtcctttggycctttgcataaatgtggatggagctggtggacattatcctaagtgaaaagaacaaaagtccacaaactgcatgttctcacttacaagtcagaggtaaacatcgagtacatatggacataaagaggggaacaacagacactgaggcctacttgagggtggacggagggaagagggtgagaatcaaaaaactacctatcaggtactatgcttattacgtgggtggcaaaataacctgtacaccagacccctgtgacatgcaatttacctatatatcaaacccgcacatgtaccccttgacctaatttttttttaaaaagtagaaaaaaaaaaaaacaaggaagaagaagaagtaaaacgattgcagttgacatgattgtctatctgaaaaatctcaaagtatctacagagaaactgctagaactcatacatgagttcagcaaattctcaggatacaagatcaacatataaa

SEQ ID NO: 617645 - DNA, 496 bp, Homo sapiens
aaaaaaaaggagatcatgtcctttggtcctttgcataaatgtggatggagctggtggacattatcctaagtgaaaagaacaaaagtccacaaactgcatgttctcacttacaagtcagaggtaaacatcgagtacatatggacataaagaggggaacracagacactgaggcctacttgagggtggacggagggaagagggtgagaatcaaaaaactacctatcaggtactatgcttattacgtgggtggcaaaataacctgtacaccagacccctgtgacatgcaatttacctatatatcaaacccgcacatgtaccccttgacctaatttttttttaaaaagtagaaaaaaaaaaaaacaaggaagaagaagaagtaaaacgattgcagttgacatgattgtctatctgaaaaatctcaaagtatctacagagaaactgctagaactcatacatgagttcagcaaattctcaggatacaagatcaacatataaa

SEQ ID NO: 617646 - DNA, 555 bp, Homo sapiens
aaagtcatgaatatcaggacatgggtatcattgagaaccttcttagagactgctactataacccccatattgaaaaaacccccatactgaacttcccacagagtcctcgccattgaaaaatttctctctcaaccgaagggattgaagccattgaaaagaactgtcaaagatgcaaatgtgtcacatgggcagggttatattaattcatgtatatcatctctcaaattattttattacattagctagtcatctcaatatttattcatgaaatgttattaataactgaccagagtgagtatttccagggatacaagataagtaaaaaaggggactgcccccaagatgcttttagtcytaaaggagaggtaaattactgttgctgttaaatttctatgcccaaaatccttactgtgaactacttctggaaactaaagcacaggatctcctaaaggctactattaaatgcaactgtattatcccaggagagagaactcaaatgatatattacattttagcaagatttggctgctagtcacagaacaggtataaatggaa

SEQ ID NO: 617647 - DNA, 555 bp, Homo sapiens
aaagtcatgaatatcaggacatgggtatcattgagaaccttcttagagactgctactataacccccatattgaaaaaacccccatactgaacttcccacagagtcctcgccattgaaaaatttctctctcaaccgaagggattgaagccattgaaaagaactgtcaaagatgcaaatgtgtcacatgggcagggttatattaattcatgtatatcatctctcaaattattttattacattagctagtcatctcaatatttattcatgaaatgttattaataactgaccagagtgagtatttccagggatacaagataagtaaaaaaggggactgcccccaagatgcttttagtcctaaaggagaggtaaattactgttgctgttaaatttctatgcccaaaatccttactgtgaactacttctggaaactaaagcacaggatctcytaaaggctactattaaatgcaactgtattatcccaggagagagaactcaaatgatatattacattttagcaagatttggctgctagtcacagaacaggtataaatggaa

SEQ ID NO: 617648 - DNA, 605 bp, Homo sapiens
ctcccaagcctcggtttccttatctctaaaatgggactctcattatcccaacaggattgataaggagattaaatggcaaaatgtgcataaatccctaagtcctgactctggcctatattctgagtgcacaaatgattctccactgcctttgggatcaggtgcaaaccccttaccctgtgactgtaaacctttacacaaacaccattagagtaatttaattttatactcagaaatttattttttaaaatgattttcagaatacacactataagatataaagctcaacaaaatcttgctggtagaaatatacataaaaatttacagtcctgttcatagcaggggtcagaatttggccggcataaaattgtcgtgcycctcagtagaggataagagtgtataaaggaaaaccctggactcaggagttgcctcagggtccctctgactgcaagattcaaagtctcactggagcaaggccaagaggagtggaagacagaatcatatgcctctgagcctgaaagggattgaagaatgagtattgtcataaggatttgtcttccacacacattttgcgtaagtctggctctggtcccaggccacactgcaac

SEQ ID NO: 617649 - DNA, 605 bp, Homo sapiens
ctcccaagcctcggtttccttatctctaaaatgggactctcattatcccaacaggattgataaggagattaaatggcaaaatgtgcataaatccctaagtcctgactctggcctatattctgagtgcacaaatgattctccactgcctttgggatcaggtgcaaaccccttaccctgtgactgtaaacctttacacaaacaccattagagtaatttaattttatactcagaaatttattttttaaaatgattttcagaatacacactataagatataaagctcaacaaaatcttgctggtagaaatatacataaaaatttacagtcctgttcatagcaggggtcagaatttggccggcataaaattgtcgtgctcctcagtagaggrtaagagtgtataaaggaaaaccctggactcaggagttgcctcagggtccctctgactgcaagattcaaagtctcactggagcaaggccaagaggagtggaagacagaatcatatgcctctgagcctgaaagggattgaagaatgagtattgtcataaggatttgtcttccacacacattttgcgtaagtctggctctggtcccaggccacactgcaac

SEQ ID NO: 617650 - DNA, 462 bp, Homo sapiens
caaggctggtttctcctacctgtgggacacttttagatgcctatgcttaaggataaggcataccatccatgagaagtatgcccagttctatggctgccttctcagtgtgaggcagcaaacagaggatgggaagccaacatgttgaagartagccaagtagagggatggaaggagcccaggcccctggaggcatcactgagcttctgaaccagtcccagaccctctcattatgtacctccagactccttattatggaagataattaaatctcttattattgttgttacttgctgaaataaacccttcatggtctggtcccaacctgactcgtcagcctcagtttcctctcttcatcacaatatatcttgcctgccagccactacaagctacttcaacagtctcatgcttctttatctttattcatgctcctctcactgcctagaatgctctccttctgcttct

SEQ ID NO: 617651 - DNA, 581 bp, Homo sapiens
attaaataaaacaatatgcataaagtccttgatacagaggctggtgttcagtaataactcataatcatttgctattattatcattgtcaatgtatcttatcttctagacgtagttagtgctggatgctgagctggacgccataaaatattatttcactggttctcacaacttgaagggggagatattattttgcattttacagatgaagaaactaargtgcaagaggatgatttcttccagatcagggctgggactcacacccatgctctctaaccccaaagctggtgctttttcatttctaactagatgaaataatatgtgtggaagtacaatcctgttgataactcttattattactatttcactaaagatcctggcttcctaagatactctctattagttaggatgtgtgtggctgcatgcaacagaatgctcaactgccagtggcccaggtgataaaggcattacattattttacataaaaacaagaacaggctgagctcggtggcccacacctgtaatctcagcactttgggaggccaaggtgggcggatcacaaggtcaagagatctagaccatc

SEQ ID NO: 617652 - DNA, 502 bp, Homo sapiens
ctggcagccaagtgggctattcagcaggcacaagccctacggttaattaaccaggacatccatttaaacttgatgttcatgtgaccacagatagttttggctgaggcctatagcagcrcatggagtgcttgagaatgccaataggctttcagtcccaactttggaaaggagctgaattccagtattcattgatagagaaggagttagtaactgcatatgctgccctttaggctcatgagagcatggcaggacaggctacagtcgttgtgctgatgacttacttgacagtgggaggggtgcattcatggataatgacccctcaggctgggatggtgcagacttccactttagcaaagtaaggcacctacttagagcagcggaatacgctggatataagtcccttagcagcagagttgcaagagatcttgggaactgtagtcctaatgcaagataaggccatggtgcctgaggcacctctagaccctgagccttcaccatttaa

SEQ ID NO: 617653 - DNA, 621 bp, Homo sapiens
cagcaggcacaagccctacggttaattaaccaggacatccatttaaacttgatgttcatgtgaccacagatagttttggctgaggcctatagcagcacatggagtgcttgagaatgccaataggctttcagtcccaactttggaaaggagctgaattccagtattcattgatagagaaggagttagtaactgcatatgctgccctttaggctcatgagagcatggcaggacaggctacagtcgttgtgctgatgacttacttgacagtgggaggggtgcattcatggataatgacccctcaggctgggatggtgcagacttccactttagcaaagtaaggcacctacttagagcagcggaatacgctggrtataagtcccttagcagcagagttgcaagagatcttgggaactgtagtcctaatgcaagataaggccatggtgcctgaggcacctctagaccctgagccttcaccatttaaggaagggtgtccccacattcctgatgaagcatgatacacagatgggtctagccaaagtgctgcttctgactggaccactgtcgcagtccaccctagtactgacagcatatggtttgaaactgggtgtgggcaaagtagcc

SEQ ID NO: 617654 - DNA, 557 bp, Homo sapiens
ctccagattgggacctattagtgggtcttaataatttagcaacaacattttaaataagaatggatcagaattaaacatatcaggtatcagagtgcatttaagtgtaagtattgttttgtgaacgcttgtgtatgtacattwaatgtctatgtaaaattcctttctgaggattgtgatctaaaagtttgttaaatatgacttaataacttaatcacctctgaaatctcaattttaatttactcatttcttcactgccccttccccttggagctcccttactccaataggtccatttgaacactttattactccatgaagaactcactgatctcaacactttttagttttcagttgttcctccttcctacttttctgctctccaaagtctgtcacaatcattataattgactgtagctgtttgttgctctttccttccatttcacttgactgacaaaacaaattctctgctcactgcagactgtttctaatcagcctggaaaatggctgcagttacggaggcatacatttgccaattgatctcactttgagtctatgac

SEQ ID NO: 617655 - DNA, 557 bp, Homo sapiens
ctccagattgggacctattagtgggtcttaataatttagcaacaacattttaaataagaatggatcagaattaaacatatcaggtatcagagtgcatttaagtgtaagtattgttttgtgaacgcttgtgtatgtacatttaatgtctatgtaaaattcctttctgaggattgtgatctaaaagtttgttaaatatgacttaataacttaatcasctctgaaatctcaattttaatttactcatttcttcactgccccttccccttggagctcccttactccaataggtccatttgaacactttattactccatgaagaactcactgatctcaacactttttagttttcagttgttcctccttcctacttttctgctctccaaagtctgtcacaatcattataattgactgtagctgtttgttgctctttccttccatttcacttgactgacaaaacaaattctctgctcactgcagactgtttctaatcagcctggaaaatggctgcagttacggaggcatacatttgccaattgatctcactttgagtctatgac

SEQ ID NO: 617656 - DNA, 557 bp, Homo sapiens
ctccagattgggacctattagtgggtcttaataatttagcaacaacattttaaataagaatggatcagaattaaacatatcaggtatcagagtgcatttaagtgtaagtattgttttgtgaacgcttgtgtatgtacatttaatgtctatgtaaaattcctttctgaggattgtgatctaaaagtttgttaaatatgacttaataacttaatcacctctgaaatctcaattttaatttactcatttcttcactgccccttccccttggagctcccttactccaataggtccatttgaacactttattactccatgaagaactcactgatctcaacactttttagttttcagttgttcctccttcctacttttctgctctccaaagtctgtcacaatcattataattgactgtagctgtttgttgctctttccttccrtttcacttgactgacaaaacaaattctctgctcactgcagactgtttctaatcagcctggaaaatggctgcagttacggaggcatacatttgccaattgatctcactttgagtctatgac

SEQ ID NO: 617657 - DNA, 557 bp, Homo sapiens
ctccagattgggacctattagtgggtcttaataatttagcaacaacattttaaataagaatggatcagaattaaacatatcaggtatcagagtgcatttaagtgtaagtattgttttgtgaacgcttgtgtatgtacatttaatgtctatgtaaaattcctttctgaggattgtgatctaaaagtttgttaaatatgacttaataacttaatcacctctgaaatctcaattttaatttactcatttcttcactgccccttccccttggagctcccttactccaataggtccatttgaacactttattactccatgaagaactcactgatctcaacactttttagttttcagttgttcctccttcctacttttctgctctccaaagtctgtcacaatcattataattgactgtagctgtttgttgctctttccttccatttcacttgactgacaaaacaaattctctgctcactgcakactgtttctaatcagcctggaaaatggctgcagttacggaggcatacatttgccaattgatctcactttgagtctatgac

SEQ ID NO: 617658 - DNA, 599 bp, Homo sapiens
atacttttaaatataaacatttagattggtttacaagtaaaaatgtattaaaagacaaagcatgcatacattaattaagagacatagcatgcatacattaattaaaagaaaagagtaactatgttaatacctaataattcaaaattcaaaacaaagaatagtactagagataaagaagggtgttacctattgataaagggctcaattcaccaaaaagacatgcttatgttcctaacagtagggcttcaaaatacatgatgcagactaaaagaagggaaggagaaataggtaagtctacacttaaagttgaggacttcagcatttttctctaaataaattgataaaacagaaagatggaaaaatcagaaaggatatggaacatctgaataacattaaaaactactctgacttaattgccacccaaaagcatcagagtacacagttttgcaagtacacatagactattcaccatggtagatcatattttgggggaaaaaatcaaagcttaacaaaatagaaggatttaaatcttataaaatatgacctatratcataatggaattaaactagaaatcaataaaagaaagatagctggaaaa

SEQ ID NO: 617659 - DNA, 564 bp, Homo sapiens
gagagtaaacaacttgaaaatcatctgcgtggatatagtctatgagaatttcttcacctcactagaaagtcaacatgcaaattcaagaaattcagaaaacttttgagagaaccccatatacaagatgactatgcacmaggcacatagtaatcagattcatcaaggtcaacacaaaagcaaaaatattaaaggcagttagagaaaagggttaggtcactacaaagaaagtcccaccaggctaacagcatatctctcagcagaaaccttacaagccagaaaagttagaaagctatttttaacatccttaaagaaaataaatgtcaaccaagaatttcatatcccaccaaactaagcatcataaacaaaagagaaataaaatcctttccagacaagctgaggtccttaagatccagagaggtctttaagagggttctaaacatggaaatgaaagaatagtaactactaccacaacaaaaacttaagcacatagcccaaagaccctataaagcaatgacacaattgagtttacaaaacaactaacaacatgataacagtatcaaaacc

SEQ ID NO: 617660 - DNA, 613 bp, Homo sapiens
tgtgatcctcacaattgcaaaataagatggacggctggagcttaaaataacgttatatttcctttatctcataaatgtgtttggattaccaaagatccttttaaaatactatattctctgggagttctacttctgggaaaatagactgtctatacttttccctattcctcccactgagcacaactggacattatatgtaaaatgaagattgtaagactgaaaagcaaaaagaaggctaaggacatctggacccaagaaagagtgtcttggtgaattccttgagtgttgtttttgcctcatatgtcccagacctggaggtgaaaaagaccacaacctggaaatgccaatgtgtcataacaacaatcaaaaaaagtcccaacaaaaatcttctccctcaagccaagggaccagaaaagaagcaaccaagtaagacagaaaactttcagacaataacttttctactctagccaaacaccacaggaaattgtgatcccatctatacccacaccagcaaaaggtgaaaggaaagcytaaacttccatcctcactagggtataatgagatgtcccaccatttccacagcagtggtgtcaaagaggaccaagtaggaacc

SEQ ID NO: 617661 - DNA, 537 bp, Homo sapiens
gtaagagaaaaccaattagaatgacaattaatttttcattagaaaccagagtggtgaaagcaaaagtatcaacccagaattctaaatctaaggagactgtccttcaggaatgaaggagaaatcaagacattctctggtgaaagaaaactaagaatttgtcatgagcaaatatgcactgaaagaatgcctaaaagaaattctctaaacagaaaggaggtaataaaagaaatttgggattcaggggaaaaaaggaacacagtaagcaaaaatgtgggctaaaatagtaggtttttcttcttttcttgagtttarttctaaagtatttttgacaattggagaaaaaattgcaacactatctgatatggttctaaatatgtaaaaaataaatatgttagacaactatacatgggagagggtaaaagaatatgagaggtatggtttccatacttcaaactgataaaatgataacatcagtaaactgtgttaagttgtgtatatataatgtaataaacaggcaaaacactaaaataaaagctt

SEQ ID NO: 617662 - DNA, 684 bp, Homo sapiens
gtgcctggcaagataatccagctctgaagatgaaagacctggtttctgccatcatgaaacttatatcccagacaataaaaaaatgaaaaaattgtgtttaatattattatttcatcaaattacttgcacaagggtactcacctagagggacttagctcttacagttctgatgttttctctacaaatggctcacagagctttgaaaattggtcaactgatgaaactatgaaagcttgtttccataagaataagactgcttcagcttgggatctctgggaatgacacttattattacctgtcttacttggcaagtctgaagctcacttttcgccatctgtgagatggagatgagacaatcttataagatgatgattaaatgagataacgcaggtaaagtacaaattggttagtgctcaataagtcttagctactactgccatcatcattaaacattaatatatttttattaatgcccagagacaaagaaagtagggtaattatcttaggtagcatagtaagaaggaagctctggcaacytctcttttaaacttcttgctgattgctgacttataaaataattttgttgcaggcaaagtttagaatatctgttttgactttacagttattgatcaagtgaactgcagtgcactttggttatttgataatttaagggagactatataa

SEQ ID NO: 617663 - DNA, 585 bp, Homo sapiens
tttggatggctactgatttgcaataatgcaaatatgcaaataatgcaaatcagtatttatgtacatttgcataaatactagagtctttatgcaatgcacagtatgaacaactactcagagacctcaagcaatgtgactcccattagtgttggccagttcttcagaagttgggggatcaatgccatctaatcaagccaaacagaagcagcacattgctttcccacagacagtgtgaaaattagggcaactgacatttttattgtaggcaagatgaatggtcaggaatgcttatacattcatagggatactagagttaacaaagcacagactgaatgagatcacagtggtctggaatgttggctttaaaccagtggttgaaggtgacacagagaaargatgtaatttgattgactctttttgaatcaagggccttggcaggctgaggtccaagtagtgtcagaggcttgatgaagtcaataaactgcatgtttgctcagtgtttaagtggtatggccctgagcagctgacacagaggcttgaagctctaagtattaggggcctatataatgagtgttccagcacccc

SEQ ID NO: 617664 - DNA, 585 bp, Homo sapiens
tttggatggctactgatttgcaataatgcaaatatgcaaataatgcaaatcagtatttatgtacatttgcataaatactagagtctttatgcaatgcacagtatgaacaactactcagagacctcaagcaatgtgactcccattagtgttggccagttcttcagaagttgggggatcaatgccatctaatcaagccaaacagaagcagcacattgctttcccacagacagtgtgaaaattagggcaactgacatttttattgtaggcaagatgaatggtcaggaatgcttatacattcatagggatactagagttaacaaagcacagactgaatgagatcacagtggtctggaatgttggctttaaaccagtggttgaaggtgacacagagaaaagatgtaatttgattgactctttttgaatcaagggccttggcmggctgaggtccaagtagtgtcagaggcttgatgaagtcaataaactgcatgtttgctcagtgtttaagtggtatggccctgagcagctgacacagaggcttgaagctctaagtattaggggcctatataatgagtgttccagcacccc

SEQ ID NO: 617665 - DNA, 536 bp, Homo sapiens
gaattcacctgggcacaaattgaaggtgaggctttactagtgcagaaataattgattatacttatcatctgggacacactttgcaagagttatactttggggtaattggargtagacacaaagaattaggtaaacattcctgcattgccatcttttttttagctgtgtcacctttggcaagttatttaatttctctatgcctcagtttctccacttgtaaaatgggctgtaattcatacttactttccaagatcatgactaacattagaaagtgtgttaaaagcccccagtgtgtgtgaactcttgctcaatagtagctcttctaattaagttgcaattactgttttaagaccaggtgcaataattagaaaaatcatttcggtaatcctctcatagtcttttgtttttacatgaatcatgaacaccgaaactttcctaaggatttaaaaatatgggaatgaaaaaagtgctttaaaaattagtgtgcttcaatattttatgtaagaaaatattagaatgctacacttgttaacttg

SEQ ID NO: 617666 - DNA, 583 bp, Homo sapiens
ccacatcataaatgtgtagtttatcaggcggtaaaaaatacatttaagagaatgccatttcctatttctattgccctaaaaatttagttttaatttttcttactgagtatggtgattattgcctaatatggagtattacacaattcagatacttgatgcaaaagatggtgagaatatgaaaaaaacacttaatsatatttggtaaaacaggagctggcttaattaggaggcagacactcataatgatcctcaatttcacttgcacttattcctttttatttttgatacaaagctatttttctggattacttcccactccttttccttggcattcaaaacattccatgttttgaaacatgatgtaatcactgaaatgaaaattttgtacacaagaaaagaaatctctagtttatacacaagatgtcagtgcgttaggcacagaaacaatgttttcatttagtcttgattaatgactgggaatcgccttagatttcagtactttccttgcttttctcaaacaactttgacctctgctgataattttcctggctgatccaagaactgagagccactacataatggc

SEQ ID NO: 617667 - DNA, 583 bp, Homo sapiens
ccacatcataaatgtgtagtttatcaggcggtaaaaaatacatttaagagaatgccatttcctatttctattgccctaaaaatttagttttaatttttcttactgagtatggtgattattgcctaatatggagtattacacaattcagatacttgatgcaaaagatggtgagaatatgaaaaaaacacttaatcatatttggtaaaacaggagctggcttaattaggaggcagacactcataatgatcctcaatttcacttgcacttattcctttttatttttgatacaaagctatttttctggattacttcccactccttttccttgrcattcaaaacattccatgttttgaaacatgatgtaatcactgaaatgaaaattttgtacacaagaaaagaaatctctagtttatacacaagatgtcagtgcgttaggcacagaaacaatgttttcatttagtcttgattaatgactgggaatcgccttagatttcagtactttccttgcttttctcaaacaactttgacctctgctgataattttcctggctgatccaagaactgagagccactacataatggc

SEQ ID NO: 617668 - DNA, 579 bp, Homo sapiens
acaatgttttcatttagtcttgattaatgactgggaatcgccttagatttcagtactttccttgcttttctcaaacaactttgacctctgctgataattttcctggctgatccaagaactgagagccactacataatggccatttcttctgcagagagaactgagtgtctgctaggaatgcactgatttaatgtgaggtgatgtatgatatcttctgagttacaatgatctgtggccttggctaaccaaaaagtcagtaagtgcatttcaaagatttaaaacatcattgggaragaggattgtggctgaaatgactgcagaccaagtttgggtctttgatgcctttcttcctgatgcagccctgtgactccagactgcccagtagccccagtctcctcacacaattttctggctttctaactaggtatttactcttgtgttctaacgctgtattttcttctcttacccagaatgtgcctattaacaagtccagcacccgttctagaggctgatcatttgtatcagataaaatcattcctacactatccaaaaggatgaaaatagctacaatttactgat

SEQ ID NO: 617669 - DNA, 534 bp, Homo sapiens
tttgagagacctgttttcaagctccgaagttttttattctgcttgatctggtcttttgttaaactttcaactatatcttgtaattccttcaataaatttttcacttttagaagttctgttattaaaaaatatgtatctctttagtaaatttttattcatatcctgaattgtttttctggtttctttgtgttggtttccaacttttttttggatctcattgagcatccttataattcatattttaaattctgtatttggcatttcagaattttcatttgattaggatccattgctatagagctagtgtgatctgtaggggttgttgtaacaccctgtgttttcatattgccagaattcttacactggttctttctcatttgtggaatctttcatttcttacttttgaatttactttcrtttggatgggacttttttcccccttgagagtgtgattgtaatgtatattgagtagggtcatttggctttgcttctgggtgctttcatggggccaaggatctgtttgaattccttagt

SEQ ID NO: 617670 - DNA, 576 bp, Homo sapiens
tctctttcaaggaatataaaggcctgtaattggatgaatgcaacccagtatatacagtgacttggatcaactctcacatgggattgaaggggaagaaaacaaagaagattgtgtatctactacacaccaggaaatagaaaagcaggaaaattgcctcagtgtctgaaactgaaattggtattatggtgtgactgactctatgactggcagtgattaattttagaaagagatagaaacaggtaaatgttcttcattagacaaagtattctattttttataatagaactttcatctgtagttattccttcactttattctccctcagaaatggtgtctttgtaagcaaggatggtagcttgtacattcttccatttgaagacttacaatgcttttgtgtagttcaagagtcattcttgttggatttggggctaaataagagttagactctgagattctcctgtattcttacatttttaaattcagagatataaggtgaagaactagtagsatagtgttgttcttttctcttcctttaaaatcaaatctagggaattgttttattcctattatatttat

SEQ ID NO: 617671 - DNA, 541 bp, Homo sapiens
aggagagaagtgggtatgtttaaataacggcaacaagagagatccctgtggaaatgggaatattttgttttccaatttaattaatcaaacacatttctaagttggaacagtttattccaatgtcaatgtcaaagagtggaagaaactgtgaactagaaaagtcatgtggtttgatcaaatgtaacacctttgttacagagttatgacaggagtctacagagtctacaatgcccaactcatactttcygccaaagtattaggttgaactatttgaaattaccaatattgaaccattgttacctattaaaaaggtaggttcaactgagtatataatctgccattgaggaaagacttcaaaaactgttatattttcctaataagcatttatttagcacctactacatacttaattaaatatttaatgtgtaattctaaggaatgtgtcatttaattctcctttgatatatagttattagcattgttcctaggacttggactccctcaggagcttcctaaaatcttatttattctatcccagact

SEQ ID NO: 617672 - DNA, 630 bp, Homo sapiens
ggaaggctgtattttccactatctattgcagttagattcgtgctatagaatgtgggcagaaatgaagtaagccacttcttagacttgactttttaaaaatgtcatttattccagctctctcttgccctttatgtcaactccacctgctgctaaaaaatgcctaatgagggcccttggatcactctttggaggtgagctgagcaacccatattaatgtgagcaatacctaaactttcagtgtgttataaaaatgagattgtgaggttatttgttgctatagcatagcctacctcatccagaccagtatgtactgagaagggcttctttacaattgagggcttcctgggccattcgtatgacaagagagaggctttgattaagaagtcagtgtgctgaagaaggcagtaacagagatccagcagaaaagagatttggataaaattattttgtttttgaaattctgacaagttgggcctaggtttatggcttcctaggggagaaatattacctgaaacatrtctgaatttccagagttgctaggagaatattttaagtgtgaagccattagcctcccctctcgggctctttatgccatctaagacagattggaggtgtttttgagatagtata

SEQ ID NO: 617673 - DNA, 568 bp, Homo sapiens
ttataagggtgctaatcctaattatgagagcactgccttcatgatctaatcacccccaaaggccccacctcctaataccatcatcttgggaattaggatttcaatatataaattttaggagtggggaaacaaacattcacaccacagcaataacattcacaatgtttggcatctcctaaaagatagttaacattcaaagaagcagaaaaatgtgacctataataaatagaaaaatcagtcaatataaacagatcaagaaatgacaaagatgatggaatcattagaaaaagcttatatagaaattatatatatatgtttagaaagtacatatatatgattaaaattttataggaacaaataaatataataaggaaagaaatgggtaaagtaaaaaagaaacaaatggtactcacagagctaaaaatacaattaaccaaatggaaaattcattaggtgagttaaacaacagattagacactgaagaaaaaatgrtaagtgatcttaaagacatagcaacagaaactatccaagataaagacttttaaaaaaagactgaaataatatgaaa

SEQ ID NO: 617674 - DNA, 601 bp, Homo sapiens
ctccagtgattaataagattttgatgttaagaggcacgtggagtttgaataaaattatttcataaaatttgcaggtggaaaaaagtaatattttaaatgtaatgctttcattcacagggtgtgttatttaaaataaatatgcaactaaatcaaatgcatacatatttaacttttaaaatttatttttttattagtatatattttcaagtcaggctcttgtcgtcatttttattgtatatgtcttcccatatggatatcgaaggatcacattgtattctgggttgttttatgttcaggcatatagggtaactagtcctgttgggcctcaattttcttacctrtaatagagaataaaatagtatatcctttaaggttattgtgggaatgaaattagataagtaaagtgtttagcattactgttaataataactcagtaattatgtagttgtatatatatatactttatatatatacatatgtgtgtgtatatatatatactttatatatatacatatgtgtgtgtgtatatagatactttatatatatatacatatgtgtgtgtgtatatatatatatacacaaagtatgttttcagggtaaa

SEQ ID NO: 617675 - DNA, 549 bp, Homo sapiens
cgtaaggacgttcatgactgcactgtttcaggagcgaaggatgaaaaacaacccagaaatgtatcaatagaattgattaatttaatctggcacttccatttaaaggaattctatgcaatattttaagaaaataaggcagttctcattttatgtatagagcaatcatcaagaaatattaagcaaaaagaggaaagtgcaaaagtatctgatgtgctactgtttctatatgaaaaagggatctatattttaaaatatatatatttaaatatatagattcccccataagaaatatacacatgaagaaaacaggcaaccacattgcctttragaagaaaaacctaactatcacactagcctttaagtgaaaaaaaaaaaaaagaaagaaaaaagcaaaaaaaaaagaaggaatcactgctaaacgaccaagcaggagaattattattcttattgtgtaacctttagtacctttggaattgtgtgccatgtttacataacaacaattcgaaattcaacttaaaaaaataaattccctgcctctagacccagtac

SEQ ID NO: 617676 - DNA, 520 bp, Homo sapiens
attattgagaccagctatatgcagggcactacattaagtctagtgataggaacatgcttctgggtggccatggggattatagcaagtgaaatcgtagtcgtgaaaatgtggaccagaacacrgtatatactcagtaagcgtctgctgcatgcatacgtgtctgaatgaaagaaaagttcatccagagacatttctaatcaaagtctagaccagaggttctcaaactttgctgatcagaaacacctgggaagcttttacaaacgaattgatcactagaaataggggcccccagaatatacatttttgaaaagcttcccaggtgattgtgacaataggttcaggaacctaagatctagattctctatggaccactgttgcaggcaagtcactggttgaaaactgctagaataggtgttaatccaagagctgccctaaagtagtctaagattggttaccagataatggatgtggacagtgatcagagatgataggaggaaaggttggaaggacctgggaaagc

SEQ ID NO: 617677 - DNA, 468 bp, Homo sapiens
tattcaacaaatggtgctgggataattggcaagccacatgtagaagaatgaaactggatcctcatctctcatcttattcacagatcaactcaagatggatcaaagacttaaacctaagacctgaaatcacaaaaattctggaagrtaacattggaaaaaccattctagacatttgcctaggcaaagacttcatgaccaagaacccgaaaacaagtagatgggacttaattaaactaaaaagcttctgcacagcaaaggaaataatcagcagagtaaacagaaacccatagagtgggagaaaatctccgtaaactatgcatccaacaaaagaccaacatccagaatccacaaggaactcagatcaacaagaaaaaaacaaacaattccatcaaaaagtgggctaaggacatgaatagacaattctcaaaagaagatacacaaatggccaataaacatatgaaaaatgct

SEQ ID NO: 617678 - DNA, 470 bp, Homo sapiens
aatttctacggggcatttcttctgctatgtctaatcattggttagttgcattaaaccagtttttaatatcaaatrttataatttttagtcccaagattttcagtttattctgattttacagtgttcatatctcatttaggatttcccactcttttatccattaaattcatcttttttgtagattctttaaaatatttactatagctttttgttgtagttttgcaaaatggggataatactcatctgacaaaagcataagaattaaaaaaaattaatgcatgtgaatcagctattacagtatttggtacaagataaatattagtgtccttcccaaccataaaataatgcaaaatgtaacaaaagattgttcttatagggaaaaaaaagtgttcaaaaggcttttcatataatttaatttttaaagactataaaatgttaaagtcaatgttagaagccatctatttcaactc

SEQ ID NO: 617679 - DNA, 476 bp, Homo sapiens
aatggcgtgaacctgggaggcagagcttgcagtgagccaagatcgcaccactgcactccagcctgggtgacagagggagactccgtctcaaaaaaaaaaaaaaaaaagaaaagaaaagaaaaaaatatatatatatatcgatagatagatagatagatcttattcattgatttttctctaatcctcagtgagccctttctatagaatttatttaacaaatatttattaactaccttttttgtgctagtcactgttctaaactctaagaacacaaatatgaacagaaaagacaaacatctttgccttcatgaaacttacactctagttggaaagaaataaaactaaataagcaatagattatgctaaatgaaactgctgtttttgtaggtcaaaatggtttactttcagctatttcatayggctcaacatattaaatttatagtgggttagatggtggtaagtgctagggagaaaaa

SEQ ID NO: 617680 - DNA, 559 bp, Homo sapiens
  misc_feature 338, 415, 416, 417, 418, 419, 420, 421, 422, 423, 424, 425,426, 427, 428, 429, 430, 431, 432, 433, 434, 435, 436, 437,438, 439, 440, 441, 442, 443, 444, 445, 446, 447, 448, 449,450, 451, 452, 453, 454, 455, 456, 457, 458, 459, 460: n = A,T,C or G
  misc_feature 461, 462, 463, 464, 465, 466, 467, 468, 469, 470, 471, 472,473, 474, 475, 476, 477, 478, 479, 480, 481, 482, 483, 484,485, 486, 487, 488, 489, 490, 491, 492, 493, 494, 495, 496,497, 498, 499, 500, 501, 502, 503, 504, 505, 506, 507: n = A,T,C or G
  misc_feature 508, 509, 510, 511, 512, 513, 514: n = A,T,C or G
aattattttgatattttccattataatacagttacaaagtgggcattcattttaaaacattaaagcatttttttacaaacacttacaaacacttgccataaggaattccagggttctcyagattgttaatgaagccctagcatagaagagcaatcaatgggcctattttcttcagtttcctgtctgccacatctgcctgtttctataactatgctgtaatttcaagaaacatgtgtgaactacgttttacagtaggatacattgtccaaaaggtccctggctagcatcatctaggcggcagaggtccatcagactgctaccttggcagatggcagctnttcggaaacctagtgacatatggtctgcatgcacagtggtgaggcatgcttgtcaccctgtggccagcttgctgcannnnnnnnnnnnnnnnnnnnnnnnnnnnnnnnnnnnnnnnnnnnnnnnnnnnnnnnnnnnnnnnnnnnnnnnnnnnnnnnnnnnnnnnnnnnnnnnnnnncttcgaatcgaaaaagcccccctactgggcaccacagcgctggtc

SEQ ID NO: 617681 - DNA, 580 bp, Homo sapiens
tatatattatatagtaatataaaatatatttaagacatttttataatctatattgttatacattatktaaatatatgtatatataaattatatacttataaatatgttatatgttatgtatattatatatgctatatgtattatatgttatgtcatatataatttattgaatatatttatagtatatgaaacatatatagtctgtcttcttggaaaagcatacaaacaatgagactccagatccagatttctttttttttttgagacagagtcttactctgtcacccaggcaggagtgtggtggtgtgatcttcgctcactgcaacctctgcctcctgagttcaagcaattctcctgcctcagccttcggagtagctgggattacaggcaagcaccactacgcctggctaatttttgtattcagatccagatttctaaatgtctttctccagttaaaaaaaaaatagggctcctgggagaaatggctgatttctgggctagggtagggaaagtaaaagatgaacctggaaatatcttgtggtatcacaaattaagtgttctgaaaataagtgctgaaaaa

SEQ ID NO: 617682 - DNA, 550 bp, Homo sapiens
aggaattcagaaggagaactccaggattaatgagagcctgtatcaaggggttggatgtcctggggagtccaggaaggcttcctggaggaggtgctgagagagaagggatagtgttgtagttttctgggtggagaggaggaggagaggagagactgaggcaggcaggtgcgcacaggcaaaggcactggcgctggaagcagcacagagcattaaggagcagaaggtggtggccaggtcaccaggagggagaggacctggctttgagatgaagctgcctcagcagctcctggagccgtgagggccaagtcctgggatgaagtcggagaaacgagggagaacacggattccaggcgtgtcaagggtggggacagggagaggcgtctgggaggctgcagccacaaccaccagagacagggtgacgatgtgtgtgcaagctctctccaggcaaaccatakagtctgctctggctataagcgtgctgtgaacaggagaaaagaaaagagccgaccacctactacacccaagcacaaggttcacagctgcataaaac

SEQ ID NO: 617683 - DNA, 520 bp, Homo sapiens
atgtcactggaacaagtttggcctttacagataatcagagtcctacttgaaaaactcactgttcctctgaggaaccactgcaaccatcatgacttcttccattctgtatgctcatgtggacccccatgagagcagggcaaaccatccaagccacctgcaggtccccatacacttatgcagggcacctaattattctttgtcaagagtgggcatggcttcaggaaaagtgtcatctcaacaagcaggaggctagtgctgggtggttcataccagctatccaagtagcccaggacaaaagacagccctagttgattgatttttcaaatgcagagttgcacagggctctctaggctgcccgggtagactgccatacaaggctttaacgttatcaccactattacatttaactgattaaagtcctgactgccagaggcattaatgacagtgttgtgygagttctagcaggaaagaatacactcttcttctgtctggtctcatttttgacaacatgaaaatgctg

SEQ ID NO: 617684 - DNA, 581 bp, Homo sapiens
gaaacatattacagagctccccacgttaagtgttttacatatrgtttgcttttaggatagcatctcaagtggagggttttgctgattaacacaattgattttcttagtcccagtgttcctgtaaatgttggagccaagagctggagtcagcgccttggacctgggagaggccaggaggccagggagcctcaagcactctggaggaagaagcctgaaatgaaaaggtgggggccatcggtaccggggttgaatgccaggtgcttctgattacgctcctgtgtgacactagttgtcagcatggcagaggcatcatggtgtaactgcagcagggagtgtaatctactagtgggcaggagagagggcgggaaggagggacttcaggctttgcctcacatagagggtaagggaatggtgcagggtggagaaaggggatggaggtgcaactaaaacaggaggggctccttagctcttgctttcctccaaagaggcagaacatcctcctgccaggagcccctgggagctcctgttgagaactggaacccttcaggcccttttgtgtcaagaagggcatggaggagaat

SEQ ID NO: 617685 - DNA, 581 bp, Homo sapiens
gaaacatattacagagctccccacgttaagtgttttacatatagtttgcttttaggatagcatctcaagtggagggttttgctgattaacacaattgattttcttagtcccagtgttcctgtaaatgttggagccaagagctggagtcagcgccttggacctgggagaggccaggaggccagggagcctcaagcactctggaggaagaagcctgaaatgaaaaggtgggggccatcggtaccggggttgaatgccaggtgcttctgattacgctcctgtgtgacactagttgtcagcatggcagaggcatcatggtgtaactgcagcagggagtgtaatctactagtgggcaggagaragggcgggaaggagggacttcaggctttgcctcacatagagggtaagggaatggtgcagggtggagaaaggggatggaggtgcaactaaaacaggaggggctccttagctcttgctttcctccaaagaggcagaacatcctcctgccaggagcccctgggagctcctgttgagaactggaacccttcaggcccttttgtgtcaagaagggcatggaggagaat

SEQ ID NO: 617686 - DNA, 553 bp, Homo sapiens
tatattcatatttgtatacaatgtatattaatatatgtgtgtataatatatatcaatgtacctatttatattaaataatagagcaaatacattatttgctagtagaacatatatatttatttttattctgtatgttaacatatatattaatatatatatagaagcatgcatatatagcctaatatgatggaagtataatagatttaactatatttcaagaaatagtatctatgcatagatagataaatatgtacatatttctaaaggagaagaatcaggaattttaaaatttctttcctcatagaactatggcattatttttgctataaccatttacataaagtactatattgttacagatatcaaaaatgttcaaatttatggttgcttatgaaattgtcattagattttaaagcctgtgaagaaaaggccatacatattttatcatctttgaatcttctatagtcctggaaatatagtttaccatgtyaactttcaataaaatgaattaatagtaagtacatcttaaaataatccagagaaaaataaaact

SEQ ID NO: 617687 - DNA, 598 bp, Homo sapiens
gtgctgtggcaggcgcctgtagtcccagctactcgggagactgaggcaggagaatggcatgaacccaggaagcagagcttgcagtaarctgagatggtgccactgcactccagcctgggcgacagagctagactccatctcaaaaaaaaaaaaaaaaaaaaaaaaaaaaaaaaaaatcctaaataagtataaatatgaaatagattcttataaattaagatatataagtcctaaatcaaccacaaagaaaataacaaaaaatacaaagaaaaatcattaaattaaaatgttacacaagaaaatattatcttaatgcaaaactggtaaaggagagaggacaaaagagacattagaaagataaaaattaattggcagatgtaaatttaactatatcaataataacattaaattctaatctgttgtacaatcaaatcaaaaggcagtttatcacactggattaaaaataaaaaaaaaattcaactgcctgttttatctagaaaacccagtttatattcaaagatacaggaaggttaaaaataaagatagcaaaagatatgtcaggcaaatggccatcacaagacagagaggctatacagaa

SEQ ID NO: 617688 - DNA, 354 bp, Homo sapiens
aggctgaggcaggagaatcgcttgaacctgggaggtggaggttgcagtgagccgagagcacgccactgcactccagcatgggcaacagaacaagactctgtctcaaaaaaaaaaaaaaaaaaaaagatttgttttacctagggtggggggcggggggktatcaaaaacaaatcagctgatttcttttctgattgattagaagatccagtgattgaagtatttactattcaaagtgtggtcagcagaccttagaaatataaaactgcaggtttattaactcaaaatctgcattttaacgagattctcaggtgattcaggtgcaggtgagagtttgtcaagtaccaatttaagaca

SEQ ID NO: 617689 - DNA, 567 bp, Homo sapiens
atcttttaaaaagacattggaatcactatccatgaattcagaggtgaattctctgaaactcctccacactatagactaaattcttttcccaagacgaacaaaacaaatagtaataacttgttcaccattttctgaccgcatagcaaatgcaactaccaatgggtttcaatgaacggtgtaaaacagaatcctacaattatttaaccaatcaattttgtgccttatatggatgttattctgtcaactagaatattacccactagccctcccgacccacccctgggagagacctggtttgtaacatcagatctctgggtcattctctccagcctgtagcattctcctctctcctcctctccagcatagaccatggcttttccacacttcacttacaaagcaaccttgttcctcatgggattcgcctttccttttttctcatttattacctttgtattaatggttttgttttttttttccttcacactcaaactacacccacaactttcccaatttaagaaactttatcrgggccggcctcatgggcatgtgatctgtgcaattgcacag

SEQ ID NO: 617690 - DNA, 539 bp, Homo sapiens
caacaattcctctaattccaatcccccctgcttagtggaactaaaaataacaaaatatctttcatcttcataagtaccaaagacatgctagtgatccatccartctccccgcaaacctaacaaaatccatccaaagaaaatagccccggctgagcatggtggctcacacctgtaatctcagcattttgggaggccaaggcaggaggattgcttgaacccaggagttagagcccagcctgggcaacatagcaagactccattttttaaaagaaaggaaaaaaaagcaggctggagactggcagaagcagcccacctacagccaggtaggccaggagccccagcgtcaagccagacatcagtggacctgatcaagagggcccctgcgctggagctcccacacgcttcaaagaacgcctatggcccttctctggccactgtgatccccccaccatgaagcaagaaatctgctagtttaggatgggcccaccaggagcccagatcctcttttggaggccacgctctagggtcctggggcccca

SEQ ID NO: 617691 - DNA, 539 bp, Homo sapiens
caacaattcctctaattccaatcccccctgcttagtggaactaaaaataacaaaatatctttcatcttcataagtaccaaagacatgctagtgatccatccagtctccccgcaaacctaacaaaatccatccaaagaaaatagccccggctgagcatggtggctcacacctgtaatctcagcattttgggaggccaaggcaggaggattgcttgaacccaggagttagagcccagcctgggcaacatagcaagactccattttttaaaagaaaggaaaaaaaagcaggctggagactggcagaagcagcccacctayagccaggtaggccaggagccccagcgtcaagccagacatcagtggacctgatcaagagggcccctgcgctggagctcccacacgcttcaaagaacgcctatggcccttctctggccactgtgatccccccaccatgaagcaagaaatctgctagtttaggatgggcccaccaggagcccagatcctcttttggaggccacgctctagggtcctggggcccca

SEQ ID NO: 617692 - DNA, 488 bp, Homo sapiens
tgtagttttttaaggaacctccatactgttctccatggtggctgtactagtttacattcccaccaacaatgtataggagttcccttttctctgtwtccccaccagcagttgttattttttatctttttgataatagatatcccatctggggtaaggtgatatctcattgtggttttgatttgcatttccctgataattaatgatgttgagcattttccatgtatttgttggccaattgtatgtcttcttttgagaaatgtctattcaaatttttcacccatttttcaatttgatggtttatttttttcctgttgagatgattgagttccttgcatattctggatgttaatcccctgttggatgagtagtttgcatatattttctcatattctgtaggttgtcttcttactctgttgattgtttcctttgctgtgtagaagctttttcatttagtataatttcatttatttttccttgtgttgcttgtg

SEQ ID NO: 617693 - DNA, 522 bp, Homo sapiens
ggctgcaggcatttctggaatgcagttaagggaaagatgaatgagtgacaagtttagcttgtgttcatgaagatatatatttgtgtaggtcacagccacctctacgcatagttatgttactgccagccattccagagcacaaatggctttctgaaatactccctgtcaccgctgtgctgacgcacccactgcttastatcagatgcgaggctggaggtcatggggaaatgagaacgtgtccttcagctcccagcaccggttacagatggaaagtggaggagaaataaagtctgaaatgtatcaagccaaagattgtatatagagaattctttcaaacagcagatgtggaaagttgtaagtggaagattcagttctcacaacacctcatcagactgcaaactctctcttatcataaagatgcctgaaaatgtagtgtatacaattacaaaaaaattagccccttttgctgttattttgaatgagagttttgagaaatagtttatgagaattcctacgtttgta

SEQ ID NO: 617694 - DNA, 465 bp, Homo sapiens
agctgggaaggatgatcaggtgatwggggagggcattcttgacatcagaaatatcttttgaaaggtcgagataacactcagaggactgataggaaatgaagctgagatcagatcctagagaaccttaaaaggcaagctagtgaggctgggttttattctccagaagaacgggagccattgaagagttttaagcatgatagtaaggtgggcagatttgcagttataaaatgatcactcaggtagcagtgtgaaggatgaattagatggggatgagacagaaggcagagagcatggttaggaggttgctgcaatagttcaccagagagattaagaaagttggatctgagggagctgcagtagtgagagaagagaagagaaggctggagagatgttacagaaatagaacgcataagacttggcaactgactagatggaaggatgggaaaggagtcctgtgtaattggg

SEQ ID NO: 617695 - DNA, 637 bp, Homo sapiens
atatattgggaacagtagcagctctgccacattgacctttggccagccatttctcctctttagccctcaagctcccacctattgcaaaagaatagaaatatttacctgccytatctcacagagcttattggaggataaaattaaattaaatacatcagtgttttgaattttttaggattttttaaagtgctgtgctagaatgcaaaatgctacaaccactctttaaaaaccttgtcagtttcttataaagttaaacaaacacctaccacgtgacccagcaattccactcctaggtatttgcccaaaaaagtaaaaaattatgatcacacaaaaacctgtagacaaatgttaatagtggtttattcatggaaacaacccaaatggataaagaaagtatagtacatccctagaatgaaatattactcagcaataaaaaggaatgaattcctggatatatacattaacctggatgaacctcaatgcattatgctaagtgaaaaaaagccagactcaaaaggcttcctgctgtatgattcaatttatatgacattctgaaaaaagtaaaactataaaggcagaaaacaaatcagtgattgcccctgtattggtgcttgcacaactgggtttctgtcaaaac

SEQ ID NO: 617696 - DNA, 557 bp, Homo sapiens
aacaatttatgagagattttgtcaaatactgtgacatatttcctataaaacatgtccaaagatgtattactctgttaaaatattttagggggaagaggttggtttgttattcttttattcattaaattatctagtatttattgagcattggctctgccatttattagctgaaaggccctgggccagttatttaaatcaccaatgccttaattatcttatctgtaaaatggagataataacctcccataccttacatagctgatgttgaaattaaatcagataataaacctaagttacttagaatggttcctggcaggtaataaatgctcagtaaatataaactataaaccccaattgaactatttagtgcttatttttctcagttaacactactttccctccttttctggttactgsgtccaaacctcctgcagtgtttatgtatttttaaattgatacacaatatctgtacatatttatgggatacatgtgatattttcatacatgaatacaatgtgtaatgattaattcagggtcattaggatatctatcacctc

SEQ ID NO: 617697 - DNA, 575 bp, Homo sapiens
cagcatgcaggagtgggtatattttgtaaagcctaamaactcacctaatgccaatgttctgagatattccatttaccaaagcagtaaagaatacatgagtgacaaaagaccattcatatcatgaagagtgcattgggggctctcccttacaaactatggctagagatgtcacagaactaggctctcaaatggcaatgcaaagataggatcataaaatgataaatgcaaagtggtgtgtttctttggctgcctattaccaactgatctcacactgagatcaggacttccataagccagtatgtacctgtaaggacattcagtgagttacaatgtttaaatatttctgcactagtcagtaaatagccattgtcgtaagcactgtgcacctcccaacttctagtgtcccatctccccataaccaaaggtttaattcctggcacagcattaaacaggctcctatggtagctctgtctggtagggccctgtgccatacaaattgtttaccactgcaatattttgaagtcttatttattaagtacattatggagatttgaagaaaacattaactattactt

SEQ ID NO: 617698 - DNA, 503 bp, Homo sapiens
ttgcgagaactcactatcacaaggacagtactaagaggatggtgctaaaccatttataggaaatttgccccattatacagtcacctcccaccatgccccacctccaacactggggattacaattcaacatgagattttggtggggacacagatccaaaccatattagcccttgtgtatcaatagtaaccttgaatataaatgagttccccacttaaaagctatagaccaactgaatggattttttaaaaaatgactcaagtatatgtagcctatggaaattcaaagtaaaaggatagaatttaaaaattccatgcaaacaaaaaccaaaagcaagcaagaacagctatatctatatcagataaaaaagactctaagtcaaaacagtaaaaagtgacaaagaagatcattacataataataacaggatcaactcagccagaggatataacarttctaaatatatatgcaaacaacatcaaagaacccagatatttatagtaaat

SEQ ID NO: 617699 - DNA, 597 bp, Homo sapiens
agacaaaaataaagaaaacaattaagaaaaatgaacaaaacatcccagaaatatgggattatgtaagaaggcaaaattaacaattcattggcattcctgagagaggagaataagcaacttgtaaaatatatttgaggatatagtccacaaatattttcctactcttgctagagaggtcaacatgcaaatccaagaaatacagagaacttcagccagatacgatataagataatcattcctatggcaattaatcatcagattcatcaaagggattgcaaaagaaraatccttagaggcagctagagagaaggtgccagtcacctagagaaggaattccatcagcctagcagcagacctctcagcagaaacattacaagacagaaaagattgggggccaattttctttatttttcttcatcttttattttaagttcagggatacatgtgcaggatgtgcaggtttgttacatagctaaatgtgtgccatggtggtttactgcacagatcatcccatcacccaggtattaagcccagaatccagtggctattcttcctgacactctccctcccaccacaactcccacaggtgcccagtgt

SEQ ID NO: 617700 - DNA, 612 bp, Homo sapiens
tcatttgaatttctctgatgattagtgatgttgaacattttttcatatatttgttggccatttgtatgtcttcttttgagaaatatctattcacatctttagcccatttttaaaataagatttgtattagtctggttccacattgctaataaagaaatacctgagactgggtaatttgcaaagaaaagaggtttaattggctcatggttctgcaatgaatactatccagttgtattcgtacactttcatgttgctgataaagacagatctgtaactgggcaatttacaaaagaaagaggtttaatggacttacagttccaggtgactggggaggccttacaatcatgtcagaaggtgaaaggcacgtctcacatggtggcagccaagagaagagaatgaggaagaagtgaaagcaaaaaccccttataaaaccatcagagctcatgagacttattcactagcagcagtatgggggaaatcgccctcgtgattcattatctcccactgggtccctcccacaacatgyggaaattataggagtacaattcaagaagagatttgggtgggaacataggcaaaccatatcaccagccataaaacagaaatggtgcc

SEQ ID NO: 617701 - DNA, 612 bp, Homo sapiens
tcatttgaatttctctgatgattagtgatgttgaacattttttcatatatttgttggccatttgtatgtcttcttttgagaaatatctattcacatctttagcccatttttaaaataagatttgtattagtctggttccacattgctaataaagaaatacctgagactgggtaatttgcaaagaaaagaggtttaattggctcatggttctgcaatgaatactatccagttgtattcgtacactttcatgttgctgataaagacagatctgtaactgggcaatttacaaaagaaagaggtttaatggacttacagttccaggtgactggggaggccttacaatcatgtcagaaggtgaaaggcacgtctcacatggtggcagccaagagaagagaatgaggaagaagtgaaagcaaaaaccccttataaaaccatcagagctcatgagacttattcactagcagcagtatgggggaaatcgccctcgtgattcattatctcccactgggtccctcccacaacatgcggaaattataggagtacaattcaagaagagatttgggtgggaacatagscaaaccatatcaccagccataaaacagaaatggtgcc

SEQ ID NO: 617702 - DNA, 598 bp, Homo sapiens
tctggtcccaactgactccctcactttcatcttccaaattgttggaattatagatgttagccactacccccagctgttattatttaataagacttgttatatttcctaactgaatacgtcatgtgcaaataagaatattttgtattctttgacttttaagtagaaagttttgtacatgtctgttaaggggaaaaatacctcataaatgccttgacactatctttttgataatcagaaagttttcactccattaattcaaatgagagctggtttattcaaagaacctracttcttcacctcacacttactgtaatcccagcactttgagaggccaagatgggtggatcacaagatcaggagttcaagaccagtctggccaacatggtgaaaccccatctctactaaagatataagaaattagctgggtgtggtcacatgcacctgtaatcccagatgctcaggagactgaggcaggagaatcatttgaaccctggaggtggaggttgcagtgagctcagatcacaccattgcattccagccattttcacctgggcaacaaggcaagactccatctaaaagatggcacttataagaatgt

SEQ ID NO: 617703 - DNA, 526 bp, Homo sapiens
acctgctcctgagtgatcattgggtcaacaataaaatcaagatggaaatttaaaaattatttgaactgaacaataatagtgacacaacctatcaaaacatctgggatatggcaaaggtgaagctaagtggaaagtacatagccttaaatgcctacatcaaaaaatctgaaagagcacaaatagacaatytaaggtcacatctcaaggaacttgagaaacaaaaacaaaccaaacccaaacccagcagaagtaaagaaataaccaagatcagaaaggaaaaaaaaaaaaaacttcttttatcaaaaacactgcatttaattactcatcacagaagagagaaaaaataatctaagttaataaatgaagtgtgtgtgtgggtgtttgtgtctgtgtgtttggttactattatagattactaaaatgggttaggaccttttttttttggtcaaatatataatcctgagaagacaatcaaaactttatgtacatttctgatgcctgatgggctatgtaaatatttatacaa

SEQ ID NO: 617704 - DNA, 526 bp, Homo sapiens
acctgctcctgagtgatcattgggtcaacaataaaatcaagatggaaatttaaaaattatttgaactgaacaataatagtgacacaacctatcaaaacatctgggatatggcaaaggtgaagctaagtggaaagtacatagccttaaatgcctacatcaaaaaatctgaaagagcacaaatagacaatctaaggtcacatctcaaggaacttgagaaacaaaaacaaaccaaacccaaacccagcagaagtaaagaaataaccaagatcagaaaggaaaaaaaaaaaaaacttcttttatcaaaaacactgcatttaattactcatcacagaagagagaaaaaataatctaagttaataaatgaagtgtgtgtgtgggtgtttgtgtctgtgtgtttggttactattatagattactaaaatgggttaggaccttttttttttggtcaaatatataatcctgagaagacaatcaaaactttatgtacatttctgatrcctgatgggctatgtaaatatttatacaa

SEQ ID NO: 617705 - DNA, 555 bp, Homo sapiens
atcccgattaccaggctgctctgcgacctatcagagggaaagcacatttagttgattatatcaaggccagtgatggtattagaggtaatctgcataaagctactctggtagaacaggcaatggcaggactgagagtggataaaggaaataaatccattttctggagcttgttttaactgtgggaagcatggtcatactaaaaaggaatgtagaagtcaggccgccagataggggaaaaaagaaaattgctgatcctgaaatatgtcaaaaatgtaaaaaaggaaaacattgggctaatcaatgtcactctaagtttgataaagaagggaacccaatttcaggaaacgccatgaggggcccttcccaggccccgttctaaaagggggtatttcyagctcaggccattccgtcacccccgtacaatgtctgtcccctgccatagccagtactgccacagtagatttatgctgcatgaaacctgtgagccttctgcctgggcaacccccgcaaaaggtcccaacagcagtctgtggaaccttgccagtggggacaata

SEQ ID NO: 617706 - DNA, 585 bp, Homo sapiens
cttagaggaaatcctagtcttactagcccttggcaattaacaaagcaggctaaggaagggttacaactaattaaaatgcaagtccataaagctcaagtaaatagaatagatccagagaagactctagatttgctaattttttcaactcagcattcacctactggtgttattatccaaaaacaggacttagtagagtggctttttcttccacatactaattcatggactctaactccttatttagatcaaattgcaactatgataggaattgggagaactcggattgttaaattacatggatatgatcctggaaaagttattgtctctctcatgaatgcacaaatacagcaagcttttataaatagtcttacttggcaaactcatttagctgacttcrtgggtattctcaataatcattttcctaaaatggagctgtttcagtttttgaaattaactaattggattctccctgaaataactaaatttaaaccaattgaaggtgctgagaatgtttttacagataggtctagtaattgtaaagctccttattctggctcgaaaagtaaagttttccagatgccctat

SEQ ID NO: 617707 - DNA, 585 bp, Homo sapiens
cttagaggaaatcctagtcttactagcccttggcaattaacaaagcaggctaaggaagggttacaactaattaaaatgcaagtccataaagctcaagtaaatagaatagatccagagaagactctagatttgctaattttttcaactcagcattcacctactggtgttattatccaaaaacaggacttagtagagtggctttttcttccacatactaattcatggactctaactccttatttagatcaaattgcaactatgataggaattgggagaactcggattgttaaattacatggatatgatcctggaaaagttattgtctctctcatgaatgcacaaatacagcaagcttttataaatagtcttacttggcaaactcatttagctgacttcatgggtattctcaataatcattttcctaaaatgragctgtttcagtttttgaaattaactaattggattctccctgaaataactaaatttaaaccaattgaaggtgctgagaatgtttttacagataggtctagtaattgtaaagctccttattctggctcgaaaagtaaagttttccagatgccctat

SEQ ID NO: 617708 - DNA, 539 bp, Homo sapiens
cccatacaattctcagggacaagccatagtggaaagaatgaatctctccctaaaacagcagttgcaaaagcagaaagagggagacagagaatatgaaaccccacagatgcaattgaatctagcattattaactttaaattttttgagcctacccaaaggccagatgttatcagcagctgaacagcatctacagaaaccagttgcaaagacagaagcagaacaactgatttggtggagagatccaataacaaaaagttgggaaataggtaaaataataacttggrgtagaggttatgcttgtgtttctccaggactgaatcaacagccaatttggataccatcaagacatctgaaaccttatcatgagccagatgccaaggaaaagactctgggaggatcctgaggaccccccggttgcagccatgttgagagtgatgctgaggaggaccccaactgtcatgagcaacacccattgaacacagccacccacctggggacaaatcaagaagctgtcataaatggcagaaaaaaacctgaga

SEQ ID NO: 617709 - DNA, 514 bp, Homo sapiens
tggatcctgactcctgcgggaagtagctcactgtgacaaagctgcctttgcttttatcgatttgcaaatcagagaagggggacatgttgggagcaggcctcycaaaatctggccatatactggccccaaaactggccataaacaaaatctctgcagcactataacatgttcataatggccctaaagcccatgctggaaggttgtgggtttatgagaatgagggcaaggaacacctggcctgcccagggtggaaaactgcttaaaggcattcttaagccacaaacgatagcatgagcaatctgtgccttaaggacatgttcctgctgcagttaactagcccaacctgttcctttaatttggcccattccttcatttcccataagggatacttttagttaatttaatatctatagaaacaatgctaatgactggtttgctgttattaaatatgtgggtaaatctctctttgggtctctcagccctgaaggctgtgagacccctgatttcccacttc

SEQ ID NO: 617710 - DNA, 514 bp, Homo sapiens
tggatcctgactcctgcgggaagtagctcactgtgacaaagctgcctttgcttttatcgatttgcaaatcagagaagggggacatgttgggagcaggcctcccaaaatctggccatatactggccccaaaactggccataaacaaaatctctgcagcactataacatgttcataatggccctaaagcccatgctggaaggttgtgggtttatgagaatgagggcaaggaacacctggccygcccagggtggaaaactgcttaaaggcattcttaagccacaaacgatagcatgagcaatctgtgccttaaggacatgttcctgctgcagttaactagcccaacctgttcctttaatttggcccattccttcatttcccataagggatacttttagttaatttaatatctatagaaacaatgctaatgactggtttgctgttattaaatatgtgggtaaatctctctttgggtctctcagccctgaaggctgtgagacccctgatttcccacttc

SEQ ID NO: 617711 - DNA, 514 bp, Homo sapiens
tggatcctgactcctgcgggaagtagctcactgtgacaaagctgcctttgcttttatcgatttgcaaatcagagaagggggacatgttgggagcaggcctcccaaaatctggccatatactggccccaaaactggccataaacaaaatctctgcagcactataacatgttcataatggccctaaagcccatgctggaaggttgtgggtttatgagaatgagggcaaggaacacctggcctgcccagggtggaaaactgcttaaaggcattcttaagccacaaacgatascatgagcaatctgtgccttaaggacatgttcctgctgcagttaactagcccaacctgttcctttaatttggcccattccttcatttcccataagggatacttttagttaatttaatatctatagaaacaatgctaatgactggtttgctgttattaaatatgtgggtaaatctctctttgggtctctcagccctgaaggctgtgagacccctgatttcccacttc

SEQ ID NO: 617712 - DNA, 514 bp, Homo sapiens
tggatcctgactcctgcgggaagtagctcactgtgacaaagctgcctttgcttttatcgatttgcaaatcagagaagggggacatgttgggagcaggcctcccaaaatctggccatatactggccccaaaactggccataaacaaaatctctgcagcactataacatgttcataatggccctaaagcccatgctggaaggttgtgggtttatgagaatgagggcaaggaacacctggcctgcccagggtggaaaactgcttaaaggcattcttaagccacaaacgatagcatgagcaatctgtgccttaaggacatgttcctgctgcagttaactagcccaacctgttyctttaatttggcccattccttcatttcccataagggatacttttagttaatttaatatctatagaaacaatgctaatgactggtttgctgttattaaatatgtgggtaaatctctctttgggtctctcagccctgaaggctgtgagacccctgatttcccacttc

SEQ ID NO: 617713 - DNA, 553 bp, Homo sapiens
aggcacatagtacattctatgtccttgtaccttaaccaagatatttgtgctggacatgttcacaggcacgttccagctcgcagcstatgccccttccctatctggcataaacaacttcctcctttcctttgttctcccttgcctttacctatttaggaaagttttaaattattagccagttgggttagcttagattgtgtggtccagctccatctaatggagacaggatgcagtagcagggacaagctgcataagggataaaagttgtttccctcctttgttcaggtgtgctcttgccattgttccatctggggagcaccctttctgcagaaagtaaaattgccttgctgagacaattttttgtctgaatgttaatttttccttgcggtaccaaggaacaagcattctgtttctaaataaacattttacttataacatttatagactttaaattttccgcctaagtttgttctaaataatagaatttctctagattacttactggataaaaagagaagtatctgtgcagttgctaatacttgtagttgcatgt

SEQ ID NO: 617714 - DNA, 553 bp, Homo sapiens
aggcacatagtacattctatgtccttgtaccttaaccaagatatttgtgctggacatgttcacaggcacgttccagctcgcagcctatgccccttccctatctggcataaacaacttcctcctttcctttgttctcccttgcctttacctatttaggaaagttttaaattattagccagttgggttagcttagattgtgtggtccagctccatctaatggagacaggatgcagtagcagggacaagctgcataagggataaaagttgtttccctcctttgttcaggtgtgctcttgccattgttccatctggggagcaccctttctgcagaaagtaaaattgccttgctgagacaattttttgtctgaatgttaatttttccttgcggtaccaaggaacaagcattctgtttctaaataaacattttacttataacatttatagamtttaaattttccgcctaagtttgttctaaataatagaatttctctagattacttactggataaaaagagaagtatctgtgcagttgctaatacttgtagttgcatgt

SEQ ID NO: 617715 - DNA, 548 bp, Homo sapiens
gcctactttcaaagtggggtggccccctgaaggtacaatagacaggaaaytaattggctatgtgtttaaggtggtcactggagttggaggacaaccaggatacccaggccagtttccctatgtagactcttggcttaatgtgccacaaactcaccccaagtggctacagccctgcctatgatattgcaaggcattagtggcttggggcagcccaaccaaaggaagcagaggaacctaaagtccctagcatctcccaggaaaaggaatccccaaagcctcagctgaaaccagttcttcaggccccacctgaggaaatgggatgtctgccccccatatgtgccagtctacctgtttttggcaagaatacacaggaggcagagttgggagcatctgaagagtcgggctcggaggaaagtgaggctcagtctccccaccaagtggaacagaagcccccattagaaaaaaacaaagaagatggaaagggtgatgcagctaggcacctctgctctggccaaccatgggctttgcagatgccactttgagagacc

SEQ ID NO: 617716 - DNA, 548 bp, Homo sapiens
gcctactttcaaagtggggtggccccctgaaggtacaatagacaggaaattaattggctatgtgtttaaggtggtcactggagttggaggacaaccaggatacccaggccagtttccctatgtagactcttggcttaatgtgccacaaactcaccccaagtggctacagccctgcctatgatattgcaaggcattagtggcttggggcagcccaaccaaaggaagcagaggaacctaaagtccctagcatctcccaggaaaaggaatccccaaagcctcagctgaaaccagttcttcaggccccacctgaggaaatggratgtctgccccccatatgtgccagtctacctgtttttggcaagaatacacaggaggcagagttgggagcatctgaagagtcgggctcggaggaaagtgaggctcagtctccccaccaagtggaacagaagcccccattagaaaaaaacaaagaagatggaaagggtgatgcagctaggcacctctgctctggccaaccatgggctttgcagatgccactttgagagacc

SEQ ID NO: 617717 - DNA, 595 bp, Homo sapiens
ttggctgtccaactctagaatgctgaagtatcaagggcttctgtgtgcaaatccctagacaacattaagactgtaaataccttgaacccagctaccctgcagcctrtggaagaacctgattggaaggatggtgagttacctcactgctagtaggaccttccccactgttgcataaatacagtgggcaaagtgttctcaagccaggaagatctcagagatacccccttggagagcccagatgttgaatacttcactgatggtagcagtttcataacacatggggtgtgatatggaggatatgcagtagtgacacaacacttggtggtcgaggctcaagccttaccttctgggacttctactaggaaggctgaattaataacattaactagagcacttttattggccaaggggaagaaagtaaatatatatacttctcaaaatatgcttttgcaactctgcacacccatggggtgacatacaaagagagaggactttagactatgagaaaaaaagaaataaaaaataaaaaggaaattctacaattattagaagccttatgggctccagagaaggtggctgccattcattgcagagg

SEQ ID NO: 617718 - DNA, 595 bp, Homo sapiens
ttggctgtccaactctagaatgctgaagtatcaagggcttctgtgtgcaaatccctagacaacattaagactgtaaataccttgaacccagctaccctgcagcctatggaagaacctgattggaaggatggtgagttacctcactgctagyaggaccttccccactgttgcataaatacagtgggcaaagtgttctcaagccaggaagatctcagagatacccccttggagagcccagatgttgaatacttcactgatggtagcagtttcataacacatggggtgtgatatggaggatatgcagtagtgacacaacacttggtggtcgaggctcaagccttaccttctgggacttctactaggaaggctgaattaataacattaactagagcacttttattggccaaggggaagaaagtaaatatatatacttctcaaaatatgcttttgcaactctgcacacccatggggtgacatacaaagagagaggactttagactatgagaaaaaaagaaataaaaaataaaaaggaaattctacaattattagaagccttatgggctccagagaaggtggctgccattcattgcagagg

SEQ ID NO: 617719 - DNA, 557 bp, Homo sapiens
tcattcttcgtttttttttktttgtttttttttttggtgggtagggtatttcatactaattcagttttggagcttgttattgctatattcggggattcaatttcttatttgttcagtctttggaggatgtatctttgctccaaggttacaatcctcaagcttggcctagattaactctctacttatatttatgttgcctcagttttttccttttaggtagacgtgttacttagaatgtgctagagcagcctgtatgaaggaatctcccctttgattgtactgtgcttgctgtaacacccaaggatgcagagtcccgttgatcccacctagaatctgcacataaggtctggcctctgcctgggatttacaagacagggctgtactttggattgagaatgtactgaaaaccaacagaaggcattttctgcattgttagatgtcaacatagacatcttaaagctcccctttgagattgtggctctttaagcttttcaatcttgttcagtgacctgctacagtttgtgagaggctccaggtgtaaatagaatctgatgaca

SEQ ID NO: 617720 - DNA, 557 bp, Homo sapiens
tcattcttcgtttttttttgtttgtttttttttttggtgggtagggtatttcatactaattcagttttggagcttgttattgctatattcggggattcaatttcttatttgttcagtctttggaggatgtatctttgctccaaggttacaatcctcaagcttggcctagattaactctctacttatatttatgttgcctcagttttttccttttaggtagacgtgttacttagaatgtgctagagcagcctgtatgaaggaatctcccctttgattgtactgtgcttgctgtaacacccaaggatgcagagtcccgttgatcccacctagaatctgcacataaggtctggcctctgcctgggatttacaagacagggctgtactttggattgagaatgtactgaaaaccaacagaaggcattttctgcattgttagatgtcaacatagacatcttaaagctcccctttgagaktgtggctctttaagcttttcaatcttgttcagtgacctgctacagtttgtgagaggctccaggtgtaaatagaatctgatgaca

SEQ ID NO: 617721 - DNA, 667 bp, Homo sapiens
agtttataaggggaaccaaaaccagtttcccattcccctggaaaccacataaaaggatcattaaggggatcagtggcatgcatgtcttgtaaccatttagcttgtttggaaatttctcctgttcacaatcagcagtattatcaattgcaaagatgactctttgttttggtaggaggaaatataatgcaatatgattattcagaactamctggaccagagagtttaaatcattctgctagcaggtttcttcagttcagcagtttaatgttctgtattttggggtatagcttcatgagccccactttctccttgtctgaatttctttttgagtttatacactgaagtctgcattggtggataaatcgagttaatagctgagtggtgaagaatcccagtaaaccagtctcccattcctgggcataggtcagttccattaaacagctacatctcatttaaggagatggcattgcagacaagctttcaaacagaagaaaaacaaatgtcaatgtttggagcaacttataaaccagtttccttagagtgggcagggaagtcgtttcaagtttctggatgttagacttcttcagttaaaatgaaagtaggaggtggcaatctgacagatttttcttgactgtagtttgtgtatcacaaggtatgcttgcatagc

SEQ ID NO: 617722 - DNA, 581 bp, Homo sapiens
atctctccctatgccaccccttcctcctctccctcctggacttagtaatcttttgttctactttttacttctgatatcaccttgtgatagcttccacacatgagtgagagtaagtggcatttaactttctgttcctggtttatttcattaacataatgtcctccagttccatccatgttgccacaaatgatgagattccattccatctgatggctgaatagtaatttcattgtgtaaatatgccacattttctttatccattcatctgttgtagacacctaggttggttccgtatcttggctatcatgaatagtgctgtaataaacatgggggtaaaggtttctcttcaatctcttcaatatactgatttcctttcctttgtataaatgccaagcagtgagatcatttggatcatatagtagctgtatgtgtagttttttgaggatcttccatactcttctccatagtggctgtgctagtttacattcccaccaacaatgtataaaccttcccttttctccacatccccaccagcatttgttgttgttgttgttgytttgttgttgttgtcattttccatt

SEQ ID NO: 617723 - DNA, 578 bp, Homo sapiens
cctgtcctggctggtcgggctttttcgttctctcccaggagaaaaggcctccctgagcaggggcagtgggaaaagggggcgggggcaatttcccggccacaggcacatcccccagcaagcagcctaccctgtgctctggtggggtggagcagccccgggagggggattgtgggaattggccagccccccctccccgcaggccagccaatctcagcccccacagccccaacttcccctcaaaacaggggggggaagctgctaagtgctcagacgatttcttatggccacgataatctggtctttttgtccctccagaaaaagaaggggggcagtcaagtctccacaccggacgaagcctgagccctcgcaactgccggcagagccacgcccgcccggccacagttcctgtaaccggcagctgcrctgtttgtaatcactgcttggcagacatttatcattcgctccgggaagcagagaggcctcagtgcaggcgggtggcctggccgagggctgggctgccccgggaagccgcatggcctctctgtgcctagcctaaggccctgcaggtgcccagcaag

SEQ ID NO: 617724 - DNA, 571 bp, Homo sapiens
caccaccacgcctggctaatttttgtattattagtagagatggggtttctccatgttggtcaggctggtcttgaactcctgacctcaggtgatctgcccgcctcagcctcccaaagtgttgggattacaggcatgagccacctcgcctggccttatgctgattttttaaaaacaatcagtgagtctcctgatgtgatgccctgacaaatacaaaacatcacctgtgtaatttttctaataataataatatttcacgaggatctgtccttgaataaattatcagactaaccaaattgtgagacattctacaagacaactggcctgaaacattacmaactgtcagtatcatgaaaggcaaaaaagaagactaaagggctaaaatgactaaatataatgtgtgatcccggattggattctatataaggaaaattaaagcaataaaggacatagttcaggaaaatcaaggaaatttgaatatggactctgttagataataatgttgtataaaagctgttttccaggtattttattcatataagaatccccttgttttgcagagatacatggtgaa

SEQ ID NO: 617725 - DNA, 585 bp, Homo sapiens
aggaagaaaatgagacacacttggagctcacttgaaccagctgyacctgcagcttgaaatgaagcttagctcttttgctgactgttagccctccctgccccaacctaaaagacacatgagcaagcccagaataagaggtaaagaaatggaggatgagttaggcacatgcaattattaaacactcactccatgcaaggcactatatcttagggtcctaagcatgagaacagtaagaataggatgctagatcagagtatggcttattaataatagtattcactatagctaccattattgagtgcttcctttggatcagtctctgatacagtttggatgcttttttcctccaaatctcatgttgcaatgtgactttcaatgttggaggtaggcctagtgggaggcgtttgggtcatgggggcaaatccctcatgaatggcttggtgctgttcccttggtaatcagtgagttttcattctatgagttcatgcaagatctggttatttatttatttatttatttatttatttatttatttatttatgtatttttgagacggagtcttgttctgttgcccagactggagtg

SEQ ID NO: 617726 - DNA, 578 bp, Homo sapiens
gcaatcatttttgtgtaatagcagaaaagaagaaataaagtgaatgctcataaaaggaaaatagttgaatacactatggtatatccgtactctgggatattatgttgctattatcaagaataaatcaggaccaaaccagctgcattgtaggcatttccttagtgtagttaagtgaaatgcactgaggaacatatataagatggccccattcatagaaaagcaacaaccaaagaacttacatatgtatctatatgtagatatgtatacataaatgcatatgtgtgattatgattatatgaataaaggagaaggtatggaaaatatactgtattttagaatgtgggggtaagyggaggaggaaagaactaaggagaaagcaaaaaatctgtattaaaaaaagtcatcttgagctttcaaagaatgtatatgaccgttttatcaaattgcattatgtgtatataaccataaaaaacacgcatgagattgtcatacggagcttgagggactccaacttattttattttcttattatagattgtttataaaattggcataaaactcctacaatatgtgaacct

SEQ ID NO: 617727 - DNA, 528 bp, Homo sapiens
tgttcccagagcccaccttgaataacaaagacatgcctatcatttgagaaattataaggatttagaggttccctttctgggcaaaggaaaaaacctcagtttaggtaaagctaaattccttactacacactgtgctacttacccttcaaaaatgccaaaatatgttacactttgttgaaccgttttgctgctagtggtgctagtcttagtgatgaatcatgctttcctgattcctcttttaaattgtctggccaaggtgatgttacatgtagaaccaaagaagttttcatcatgagaaattgacttggatgggcaggacaccaaattactactttggtagcagcatrctttacaaactagagcaaatagctcaaatatattttaatgatatgagtaaatgttttcagtcctataatatttttaacttatcaaatcagtatttatactgtcttatccatggaatacctgctgctgtgaactttctgagtatactttaatcccttttgcttccttgatgcatctctaaat

SEQ ID NO: 617728 - DNA, 440 bp, Homo sapiens
aagctttatagcaagttttaaatctgtttaagtaggtcttctagcttagtgttggatttttggttttttttttttttctttaggattgttttggctagtctaggtcttttgcattttcatatgaactacagattcatattatcagtttctacatacaaataattaagcctgctgggattttgattgggattctgttaaatctatagatcaattttagggggaaatgatatctcaaaaacaccacgctggtggtttatctctacacttatttaggtctttaatttttttttttgttttgagtctcactctgttgyccaggctagagtgcagtggcacaaacactggctcactgtcgccccgattcccctgggctcaagcctcctgagtagctgggactacaggtgtgccaccatgcccagctaatttttttttttactaga

SEQ ID NO: 617729 - DNA, 631 bp, Homo sapiens
gaagcttaacgcttatgttttacagtgtttcttaagttatgtcaaatatacaaaattcagaaaggcaaagactcccttgttgctagtttgtgaggcaaagttccagctagactcgttgggaaaaataaaatgtaaatttcccctcactttaggggggatgttaagcgataaggaaagataaaccatcaagagcaaatgtgagaaagcggggaagtgaaaagtacatttacagagtttggtaagctgatttaatggtttcatgtatataagcagttgaaagcaactgagactaagaatgccaggttacctagggttccaaattttgaaaaatgtttggaatttatccatcaggcaaaccagagataacaggattttcgatctcaatatttgcgtgatcaatgtcctactttagaaggattcatttgaaggtaatatattggatagattgaatgaaaaaactttgggagggggggaggcacaaataaatcagctaaaagttttctgtaattctstggatgtaaggctacagacccttacttaagactgtaatttttggcagtggtaatagaaaggaagggacaggtttgagatattgtgtaaaataaatggaatgagtctcatgaacaattga

SEQ ID NO: 617730 - DNA, 549 bp, Homo sapiens
ggatagattgaatgaaaaaactttgggagggggggaggcacaaataaatcagctaaaagttttctgtaattctctggatgtaaggctacagacccttacttaagactgtaatttttggcagtggtaatagaaaggaagggacaggtttgagatattgtgtaaaataaatggaatgagtctcatgaacaattgaaaataatgggcttaaagctttcattttttgttgcgtctcagctaagtttttgtatcacaatgatgctggcctcttaaaatgaattagggtaggargtaatgtcccctttatcatttctgattgtgtttatttggattttctatttgtttctttattaacttagctagcaggccatcgatcttatttattctttcgaataaccagcttttggtgtcattgatcttttgtataatttttcacatctcaatttcattccgttcagctctgattaggttattaattttcttctgcagctttggggtgggtttgctcttgtttttccagttcctctaggtgtgatggtagattgttaactg

SEQ ID NO: 617731 - DNA, 598 bp, Homo sapiens
atatacatgcatacatatatacacacacatacatatacatctatctatatatagatakgtatctacatagagagagacagatgtatatatgtatatatatatatatgtatatatatacagagagagagggagggagagagagaacatgttagaatagggaaaatatagactaaaataaaaacaacaatacaaacttgtgaaacaatcagaaatatttgaacttgttacttgataacgttaaagaattaatgctaatttacaagtttgaaatgattttgtgcttgcttttaaaaataactttttatcttagagatcctcactaaaatacttgtgggtgaaataatatgatgtagggttttgttataattttagattctgggggtgcatgtgcctgattattacatgagtattatatgcttaatggtggggttaagcttctagtgcacatgtcacccacccaaatattggacactgtagccaacaagcaatgtttcaaccctcccttccctcccaacctcccccctttggagtccccagagtagattttctccatctccatgtccatgtgtaccctttgtttaactcccacttataagtg

SEQ ID NO: 617732 - DNA, 598 bp, Homo sapiens
atatacatgcatacatatatacacacacatacatatacatctatctatatatagatagstatctacatagagagagacagatgtatatatgtatatatatatatatgtatatatatacagagagagagggagggagagagagaacatgttagaatagggaaaatatagactaaaataaaaacaacaatacaaacttgtgaaacaatcagaaatatttgaacttgttacttgataacgttaaagaattaatgctaatttacaagtttgaaatgattttgtgcttgcttttaaaaataactttttatcttagagatcctcactaaaatacttgtgggtgaaataatatgatgtagggttttgttataattttagattctgggggtgcatgtgcctgattattacatgagtattatatgcttaatggtggggttaagcttctagtgcacatgtcacccacccaaatattggacactgtagccaacaagcaatgtttcaaccctcccttccctcccaacctcccccctttggagtccccagagtagattttctccatctccatgtccatgtgtaccctttgtttaactcccacttataagtg

SEQ ID NO: 617733 - DNA, 598 bp, Homo sapiens
atatacatgcatacatatatacacacacatacatatacatctatctatatatagataggtatctacatagagagagacagatgtatatatgtatatatatatatatgtatatatatacagagagagagggakggagagagagaacatgttagaatagggaaaatatagactaaaataaaaacaacaatacaaacttgtgaaacaatcagaaatatttgaacttgttacttgataacgttaaagaattaatgctaatttacaagtttgaaatgattttgtgcttgcttttaaaaataactttttatcttagagatcctcactaaaatacttgtgggtgaaataatatgatgtagggttttgttataattttagattctgggggtgcatgtgcctgattattacatgagtattatatgcttaatggtggggttaagcttctagtgcacatgtcacccacccaaatattggacactgtagccaacaagcaatgtttcaaccctcccttccctcccaacctcccccctttggagtccccagagtagattttctccatctccatgtccatgtgtaccctttgtttaactcccacttataagtg

SEQ ID NO: 617734 - DNA, 413 bp, Homo sapiens
agctgagactgtgccagtgcactccagcctgggcgacagagagagactccatctcaaaaaaaaaaaagttaatgaaaatctgggtgcagtggctcacacctgtaatcgtggcaattcaggaagccaaaatgggaggattgcttgagkccaggagttcaagaatagcctgggcaacatagcaagaccccacttctacaaaaagtaaaagacaaaaaataattagcctggtgtggtgtcatgtatctgtagtctcatttgcttgggaagctgaggtgtaaggattgcttgagctcaggagtttaaggttacagtgagctctgatagggccatgcactctagcctgggcaaaagagtaagatcccatcaaaaaaaaaaaaaaaaaggcatagacccttaagaaataaagatttgga

SEQ ID NO: 617735 - DNA, 604 bp, Homo sapiens
tattatcccaaataatatataaataattttttttgaggcagagtctttgttgttcaggctagagtgcagtggcacgatctcagctcactgcaacctccacctcccaggttcaagcgattcttctgcctcagcatcccaagtaactgggattacaggcacccaccactgcacccggctaatttttgtatttttagtagagacagggtttcaccatcttggctggctggtctcaaactcctgacctcatgatccccctgcctcagccccccaaagtgctgggattacaggcgtaagccaccacgcccggcctataaataaaacttatctccttagatttacaaatttttctcttgttttcttactaatattgttaataacaatttaagtggtagaagtccttccaaaatcgtttttcaggaatgaaaaatctaacttgcttaaagcaaaccatggacttattgcttcaycattcttgcttgcggagctgaatgatgtcaccaagacgctggttcctctgctttctgatgtcctctgtgctggtctcatgctcaatcaggatacccttaatgctgaacccttctcaccttctcaaagcttcccatgc

SEQ ID NO: 617736 - DNA, 572 bp, Homo sapiens
ctttgtgactgctgccaatcaccttgaagattttatgacagagaaatcctcttttttcttaaaaatgtatacttgaaagatgtatactatcattctaaaacttcacttttccaatacaaaaaccagaaaatttaatcttaatcttttaccaagtatctttatcgctggataaaaatatattcccttctcagaaaacaaaagtttcaaattagaaatacatctaaacatatgaaaccttatcaaaaagaaatagagaagaatgttatttggctttaaactgtcttaaagttggtacccccacctctgtttcaatactctttggtcaattagtccattatcaaggttttcagctggatagaaagatggcatctgctccccatgcctggctggactggaggactcttcatccctgtaactaagaaagaagaggtgggtcaggcactattcaagaggtgatatgaccattgatctcacagyagctctgaaggtagcaccagcccagagtaaacatcatggtctgtgtccacttcccagttccacgttagactcatgactaagagaatggaaagaag

SEQ ID NO: 617737 - DNA, 580 bp, Homo sapiens
attttttggttttttccttttttttttttttttttttaaatcgagaggagtcttgctcttctctcctgggctagagtgctcactgcaacctccgcctcctggcagaggcgattctcctgcctcagccacctgagtagctgggattacaggtgcccgccaccacgctcggctaattttttttgtatttttagtagagacttggtttcaccgtgttggccaggctggtctcgaactcctgacctcaggtgatctgcccacctcggcctcccaaagtgctgagattacagacgtgagccaccgtgcccagcctgaattcattctgtatcgctgagcagacttagagccacatagggagctgttggtctgtcttggaaaatgtcatgtwgtcattacctttgaaaataataaagcatttttgaaaataaatttataatgcatctcttttataacttctgtttttttattctgttgttatctagataatccctataggtttgctctattattcagtttgagtaagattcaagtttaaattcaaaatgagatgctattttttgagtaattttttttattcatggca

SEQ ID NO: 617738 - DNA, 568 bp, Homo sapiens
aacaggagaacatttctcatacctgccgcttaacggtgctacacttggagattaacactggaacgtctttccttctagtttacaacagcaggatgtctttttactgaaattagcacactttttccacataattgttacttgaagaagttgtgtaagatgactccagttcttactgatgaagcatttaggcagtctatatttacaggtctttcatttttaaaggagagaggaaaatcttaagaagtagcaatttaattatatcagccttgtttagagaactgtttgcagaatttagagttgtcttagtttgctagggccaccataacaatgccaaccacaaacsggtggcttaaatggcagaaatgcatcgtctcacagttctagaagctgagaatctgaagaaggctagaagtcagggggttggcagggttgcttcctcccgagggctgtgaggaaagaatctgtcctgggcctctctccttgacttgtagatgtgacttgtagatggtggtctctctttgggtctttacgttgccttccctctatatgtgtctctttctccagatct

SEQ ID NO: 617739 - DNA, 428 bp, Homo sapiens
gctaaacacgttattgtcacatgagtattctaattttttaagagtgtccttatagtaatgaacactatgaaacaccccaaaaaattatgtagaaacattagtggtggcagataaaagctctgaagtttggggacggttttatttgtttgttttttaatcactgacttctgcaatgaaaagaaatgataacaggatttataagattaaaaatttcattttacacatccatctatgccctgggatcatttcagccattctgatttgatttttccattttcaagatttttttgaagggtttctaagattaaataaattttaatgattttgatgawtgataaaatctatgtttttacgttaattttttgagattagagtggtaataatagagatttctctttctccttgataaataatataatggtagggac

SEQ ID NO: 617740 - DNA, 560 bp, Homo sapiens
agtcccgtgatgagtttcctcatgcttcggccgtgcatggaccagtcagcttccaggtgtgactgaagcagggcttgttatcttcttcagagccactttgcaggggttggtgaagctgctcccatccacgtacagctctcagtctactgctgtttaaggatggtttggaggttgggcccactagaataaactgagtccaatacctctacacagttatgttcaactgggctctctgataccaggagcaaggtggcggggtttagggtgttgtaaacttcaatggttatgcggggattttcatagatcaagctttgatatctagttagtctagcattcattagctaatgatgtcctttggtatttattaaagtcaccacagcatgggggtactttatgtttaggttttgcctaagagttagcttatctgcttcttgtgctaacaaggccattgctgccagggcccttagacatgggggccagcctttggaaaccccatctagttgttttgagagataggccactggcctttgccagsgccctacagtctgggttaaaactcc

SEQ ID NO: 617741 - DNA, 410 bp, Homo sapiens
ccaccttaaaaacccttttaattgtaatttttattgtatatttttatacaataaaatatacaatatacaataattgtatatttttaacaattaggcaacatctccagttttctaagttctcgcacaatcattttcgcaytctgtcctgacaaaaaacagttaaaaaaaaaaaaaaaaaaaaagaaaaacacacgaggcaggctctatcaggccactgtgcattgcatgaatgcccagcagttaagagcagggacttcagtgccttacaagcctgggttgaattctgattccgccaatgtacaatctcaggtgcttccttaagcatttcaattctctgtctcctcatctataaaacaagaactagaaaagtgcctaacattcacagagctcctgtgaggaccaaatgaggt

SEQ ID NO: 617742 - DNA, 410 bp, Homo sapiens
ccaccttaaaaacccttttaattgtaatttttattgtatatttttatacaataaaatatacaatatacaataattgtatatttttaacaattaggcaacatctccagttttctaagttctcgcacaatcattttcgcactctgtcctgacaaaaaacagttaaaaaaaaaaaaaaaaaaaaagaaaaacacacgaggcaggctctatcaggccactgtgcattgcatgaatgcccagcagttaagagcagggacttcagtgccttacaagcctgggttgaattctgattccgccaatgtacaatctcaggtgcttccttaagcatttcaattctctgtctcctcatctataaaacaagaactagaaaagtgcytaacattcacagagctcctgtgaggaccaaatgaggt

SEQ ID NO: 617743 - DNA, 688 bp, Homo sapiens
ccaaggtgggcatgtcatatgtgtgataaacttttgtcactataaagtgtgggggttatcaggtgcggcagtgtaatcttgcctgttgcaggtaataccagggactccgaacacactgtcaagcattcgatccacttctctgtgattctcctgtgcctgtgctgcttcatgaagcaatgaaggcattttttgaggatcaggctagtcctaccatcctcccttgtggttttacaatctgtgtccttgtactatctttagcrtggggaaatatatgagagttactgccatttgttgtaataagaacacttagaacataggaaaaaatgattttgctttaagtaaaaacacctagttttcatttttacagctaatttatttgaagattctttctaagccctcagtactaggaattgattgtctcctttgtgaccttaatgttaaggacatttctctaagtctgaaacatagaggaaaaaatacctaacattttgccgcattctgatgtgaaatattctatcaaatatatactggaacaacatggcaatttctttagagaggttaacttgtgcctctttttttttttttttcaacctactttatgtgtaggatactgatgcatggatttgataaatgcttttaggatgttcttgtattccaaagccttccacataaactaccaggtgttaaa

SEQ ID NO: 617744 - DNA, 578 bp, Homo sapiens
tctgggaggctaaggcacgaggatcacctaaacctggggaggtcaaggctgcagtgagccatgactgagccactgtactgcagcttggtgacacagtgagaccctgtctcaaattttaaaaaataaataaataaataaatatatatatatatatatgaaatttaatgggtaaatcaatcaaatacccttccatttagttcacttagagtggccattcaaggttctttcacaattttagtgtaatttttggtggtggtatataatgaaagatcatcaaaggttttacccgagaacatatttcatggagaaattctatgtattcaattaaccaaattaaacatgaaacatctamatatttttcttctgagcaaagggaaataagaattgcctgtattattttaatagaaacataagtagcaaatatctgaatgcttctctgtaacagcatgttctcagtgctttccacggattaatctacctaatcctctcagcaaccatactgtggctttcgcttgtttccccttaatcttcaggttgtaaggaactgtaatagccagtcatctctggctgttagaaaa

SEQ ID NO: 617745 - DNA, 469 bp, Homo sapiens
atgggagccaggaatctcactgttgaagagagttagaagcttgggaaggggaaggttaggaaaagccctgtggtattggtttggaattgaaagtatcaatgtgaattcatggttttagtcttwatgtatggctatttaatatttacatatatagttattggtgtttctggatcaacgggtgcctttgtttatgtaaattcaaacatttcctagatttcttctatgagaaagtctaaagcaataacatctccgtagcaagttgcacaccagggctgaaatcttggttttttttggttgggttttttttgagaaagtctctctgttgtccaggctggagtgtcatgatcatggctcactgcagccttggcctcccagggctcaggtgatccttctacctcagcctcctgagtatctgggactacaggcatgtgccaccatacctggcaaatttttgtattttttgtagaga

SEQ ID NO: 617746 - DNA, 469 bp, Homo sapiens
atgggagccaggaatctcactgttgaagagagttagaagcttgggaaggggaaggttaggaaaagccctgtggtattggtttggaattgaaagtatcaatgtgaattcatggttttagtctttatgtatggctatttaatatttacatatatagttattggtgtttctggatcaacgggtgcctttgtttatgtaaattcaaacatttcctagatttcttctatgagaaagtctaaagcaataacatctccgtagcaagttgcacaccagggctgaaatcttggttttttttggttgggttttttttgagaaagtctctctgttgtccaggctggagtgtcatgatcatggctcactgcagccttggcctcccagggctcaggtgatcctyctacctcagcctcctgagtatctgggactacaggcatgtgccaccatacctggcaaatttttgtattttttgtagaga

SEQ ID NO: 617747 - DNA, 502 bp, Homo sapiens
gtgggtggctaataatctgataatgccactgtcaaaaacaggagggggagtggtggtggaatcctctgagggggaagagttcaggcagtggtaggatggggtagtttgaggaaagggacttccataaagtaaactggttttgctttgamcttgtagtcaaatctgcacatacattgtttctttttctttcttttcttttgagacagggtctcactacgttgcccaggctggagtgcagtggcacagtctcggttcactgcagtctcgatctccccgggctaaggcaatcttcccacctcagcctcctgagtagctgagactatacacgtatgttgccatgcccagctaatttttgtgttttgtagagacagggtttttctgtgttgcccaggctggtctcaaactcctgggctcaagtgatcctcctgccctggcctcccaaaatgctgggattataatcatgagccaccgtgcccagccatatatcgtttttcactgttta

SEQ ID NO: 617748 - DNA, 507 bp, Homo sapiens
aaatatcaacctgcacaaaggttgtatttggcttgcgcagtgttttcaattttttaaaaaaaatgcctttagatgggaaggtcctatcaaggtctatattttctattcctcccttttctctcttttatttttatttttttgagatggggtcttgctatgttgcccaggctggtctcgaaatccttgggctcaagagatcctcctgcctcagcctcctgagtagctgggattacagggttgagccactgagcttggcttccaccgtytgtcttaccccaagcctgcatctctcacttcagagatctccctacaatcatggtgccctatattctctgttaaaacttagactatatcccagggatggagtggtgagagttttcaccttcttgaggtacagtgaattcctcaccaccctacagatgcttaatgccttgcctctaacatgtaacaacatgttgcatagaatgagtggatgtcttcaataagattttaaaaattgcccgggag

SEQ ID NO: 617749 - DNA, 567 bp, Homo sapiens
ccagcaatgtgaatgaaaagcaaatgaggtcatcaaggatcccgagctgaacagaggaaaaaatgtcaagcatctggttgagtttctattcaacagcgatttcttaggaaggaatcactttaaaaagcaagacaggctgaaaggtgatatttgttctttggggtatgctggtttctctttttaaatcaaaaccctgaaatagaaccacttgaattctatcatcatggaagcttatgggctgaatttayaagatgaatctagtgttcaaggtgtagaaatcaactttgttttaaaaattaatcttatgacacattctctctaatacaaactagttgcttttgcaattaagatgaaattacttccttttaaaaagtggggtttatggataatcttttcatatactctgcaacctgaatatagccccatacaatgctgcatatgtcatttattacaagtatcacaatttgtagaatgaattccccagagaatgaatgccaggttaaaattaaatgcatttgtcatttttgcagaaattttggtagaaattgccaaactgccctccatagg

SEQ ID NO: 617750 - DNA, 611 bp, Homo sapiens
aaaattaatcttatgacacattctctctaatacaaactagttgcttttgcaattaagatgaaattacttccttttaaaaagtggggtttatggataatcttttcatatactctgcaacctgaatatagccccatacaatgctgcatatgtcatttattacaagtatcacaatttgtagaatgaattccccagagaatgaatgccaggttaaaattaaatgcatttgtcatttttgcagaaattttggtagaaattgccaaactgccctccatagggatttatcatttatttttcattgctattagcaacacagaagagtgatgtctaactctcatcctyccttgtcattcattggaagttgccaaactatgggatttttgtcacttgtatgtagttagctgaggcttaatttttgcttctcttatgtgtaaatttaattatttcttcatatggtcaaaatccatttttatttatttatttatttatttatttgaaacggtgtttcactcttgttgcccaagctggagtgcaattatttatttttatataaagtacatatttctctattaggttccttgactatttcttctcaatatcaataagagatttct

SEQ ID NO: 617751 - DNA, 611 bp, Homo sapiens
aaaattaatcttatgacacattctctctaatacaaactagttgcttttgcaattaagatgaaattacttccttttaaaaagtggggtttatggataatcttttcatatactctgcaacctgaatatagccccatacaatgctgcatatgtcatttattacaagtatcacaatttgtagaatgaattccccagagaatgaatgccaggttaaaattaaatgcatttgtcatttttgcagaaattttggtagaaattgccaaactgccctccatagggatttatcatttatttttcattgctattagcaacacagaagagtgatgtctaactctcatccttccttgtcattcattggaagttgccaaactatgggatttttgtcacttgtatgtagttagctgaggcttaatttttgcttctcttatgtgtaaatttaattatttcttcatatggtcaaaatccatttttatttatttatttatttatttatttgaaayggtgtttcactcttgttgcccaagctggagtgcaattatttatttttatataaagtacatatttctctattaggttccttgactatttcttctcaatatcaataagagatttct

SEQ ID NO: 617752 - DNA, 570 bp, Homo sapiens
  misc_feature 407, 408, 409, 410, 411, 412, 413, 414, 415, 416, 417, 418,419, 420, 421, 422, 423, 424, 425, 426, 427, 428, 429, 430,431, 432, 433, 434, 435, 436, 437, 438, 439, 440, 441, 442,443, 444, 445, 446, 447, 448, 449, 450, 451, 452, 453: n = A,T,C or G
  misc_feature 454, 455, 456, 457, 458, 459, 460, 461, 462, 463, 464, 465,466, 467, 468, 469, 470, 471, 472, 473, 474, 475, 476, 477,478, 479, 480, 481, 482, 483, 484, 485, 486, 487, 488, 489,490, 491, 492, 493, 494, 495, 496, 497, 498, 499, 500: n = A,T,C or G
  misc_feature 501, 502, 503, 504, 505, 506: n = A,T,C or G
actcagtgctcttcttctgatgttttctagaactttttatcagaggccccatggtaattgttttctgtttgatcatttttgcgtcccgagaagttttcccaaggtcttttgtgaagaacactaaatgcttaatgttcccatttgagtcctggcacaattcctctttcaaacccaaggctgaaggtcagacagatgtgctccattctggagccctctagtgaacctacaggtgcccaccagtgttcattctcatttccattcctccagtggcagaagcagccctttcaaacctarcctggctggggtggcctggggttgggagagaatgccccttgcagtgtgggtagcatttattctaagaggagacttgagaaaccaccctaaagttgctttacaatgtcaagagnnnnnnnnnnnnnnnnnnnnnnnnnnnnnnnnnnnnnnnnnnnnnnnnnnnnnnnnnnnnnnnnnnnnnnnnnnnnnnnnnnnnnnnnnnnnnnnnnnnntaacaaagatatttccctcccccccaccctttcttctgttaattgtgtttagtacagtagagta

SEQ ID NO: 617753 - DNA, 538 bp, Homo sapiens
attgggatacccaggtttatattatcaactctgaagctaaatggcatgtgatctctgcaacatcccaaacctgagatgttttggggacatagaagaggaagaagccaggggaggcttagatatctgtttaaagaatttgctgtcattttatcctaggayagaagatgttatggtacacatcccttccaaatagggaacaaactttaccaaactacaagtgaatcagaaattctgcttctgagttaattatgccagtaacctgggaattaccttctttatcttggcaagagtagctactgctaagaaaacaaacaagaagttttgaagagctcaatagagacacgtgccaatgaacaaggtgagatgctgtctctgaagatattgaacaatgtcacttcaaagcacccctaaactatgaagaaaatgctgttttgttgctgcaactgatggtacccaccgtgaattctgaaaaatgtttgagccacattcctataattttgatgtttgcttttaatttatgttttatagcccagggctc

SEQ ID NO: 617754 - DNA, 538 bp, Homo sapiens
attgggatacccaggtttatattatcaactctgaagctaaatggcatgtgatctctgcaacatcccaaacctgagatgttttggggacatagaagaggaagaagccaggggaggcttagatatctgtttaaagaatttgctgtcattttatcctaggatagaagatgttatggtacacatcccttccmaatagggaacaaactttaccaaactacaagtgaatcagaaattctgcttctgagttaattatgccagtaacctgggaattaccttctttatcttggcaagagtagctactgctaagaaaacaaacaagaagttttgaagagctcaatagagacacgtgccaatgaacaaggtgagatgctgtctctgaagatattgaacaatgtcacttcaaagcacccctaaactatgaagaaaatgctgttttgttgctgcaactgatggtacccaccgtgaattctgaaaaatgtttgagccacattcctataattttgatgtttgcttttaatttatgttttatagcccagggctc

SEQ ID NO: 617755 - DNA, 538 bp, Homo sapiens
attgggatacccaggtttatattatcaactctgaagctaaatggcatgtgatctctgcaacatcccaaacctgagatgttttggggacatagaagaggaagaagccaggggaggcttagatatctgtttaaagaatttgctgtcattttatcctaggatagaagatgttatggtacacatcccttccaaatagggaacaaactttaccaaactacaagtgaatcagaaattctgcttctgagttaattatgccagtaacctgggaattaccttctttatcttggcaagagtagctactgctaagaaaacaaacaagaagttttgaagagctcaatagagacacgtgccaatgaacaaggtgagatgctgtctctgaagatattgaacaatgtcacttcaaagcacccctaaactatgaagaaaatgctgttttgttgctgcaactgatggtacccaccktgaattctgaaaaatgtttgagccacattcctataattttgatgtttgcttttaatttatgttttatagcccagggctc

SEQ ID NO: 617756 - DNA, 605 bp, Homo sapiens
ctcataaatacccagtgggtcgaagtgaccatacaggtgtcaaatacatgaatattaacagaaaagccatgaaggttgctgttattttcactaagagatgaggcacatgattcatatagagtgaaatttgaagggacactggaaggcaaaaataaatgtatacatgtatacataatcacaaataatattcattcatattaccaattacagaaaaaatgagacacacacaagtgtcaaatagatggaggttggttatcagcttgattcctgaaacagttgttgaatatgtaactatagccacatcttaaattatcwcagccttatagcttaaacccgtagtattgacaggtggtagagtcttccagcaaaccctaatctgttgtgctgacagaattgctacataaccctcatatttgctgggtagtgagtcaactatagataggtttcctgagctgtgtattaaaattcatccaggaactctaacccaatggtcctgtttcataaaaatcagagaaagagaggatagcatctttatcctaaagcagtctatcctaaaaagagaagaaaagaacttcaattttatattcctagaccttgtttccaat

SEQ ID NO: 617757 - DNA, 625 bp, Homo sapiens
gactataattgtggtgagattaactgtattttcaaatataaaaaatgaaattgcagtatatcatatactattcttacttaaatttgatagcaacctagtgaaacttatgaatttttaaaatgaatttaattggctcatttcacattaggaagtcaatgcttgttaaattatttaaaaaagacatataatgattgggtcaaattctattatgaaaatgtctttacagtgaaatattcactrcaatgagtacattttcaatgcacaagttaataaactataaggctttggagggtccttaaaataataatatcaagaaactggtaattcagtatgacaaataattttaaacagactgctagaaattattatcgtgtctccttttcattcttttctttgttaacctttatttaaatacaaaagtgctatgtgggaaacagactttaagtgtgacactcgtacctttaaggaaaattacactaatcatattctcttactgaccaattaactaaatcatcttttctaatagtaacacaatgagctcatcacctccttaatgtcttgggaacaaaatacatagctaaaatttttttttccaaagaaagagatatcagcctgagccctgata

SEQ ID NO: 617758 - DNA, 515 bp, Homo sapiens
agcatgatcaactaattaggtgatgttaacaagccccactataataatacacagaaaaaaaaaaactataaccttcaaaggcaagttgcaacattttatcagagctttgcaatgtatttatagctgttagtagtagcaataaaatatcaaacactaccatcaaatgattcttgtcaccttttataacattaatgccatcttcatatgtcatttwtggatttatttaagaaacctaggtgttaagtttttctcttgcactctctctctccagctcctctatatatagaaaaaaaattgaaaaaaattaaatctcataaagggagccaggcattttatgaacctttcattactaatattataatggtttaatttgcattttatttagtgttaattctaataaatgaattttcataattttagagaaaaatatgatgcataatgaaataataaaagtttaaatggcagtggagatgcatgcttaacttctcctgctattcttttaggtgttggagtag

SEQ ID NO: 617759 - DNA, 515 bp, Homo sapiens
agcatgatcaactaattaggtgatgttaacaagccccactataataatacacagaaaaaaaaaaactataaccttcaaaggcaagttgcaacattttatcagagctttgcaatgtatttatagctgttagtagtagcaataaaatatcaaacactaccatcaaatgattcttgtcaccttttataacattaatgccatcttcatatgtcatttttggatttatttaagaaacctaggtgttaagtttttctcttgcactctctctctccagctcctctatatatagaaaaaaaattgaaaaaaattaaatctcataaarggagccaggcattttatgaacctttcattactaatattataatggtttaatttgcattttatttagtgttaattctaataaatgaattttcataattttagagaaaaatatgatgcataatgaaataataaaagtttaaatggcagtggagatgcatgcttaacttctcctgctattcttttaggtgttggagtag

SEQ ID NO: 617760 - DNA, 549 bp, Homo sapiens
cagtaaggaatagaaaaatgggaaaaataattagaaatggcaatgtggttagggaaagaggaggctgcctacgatctgagctgcatatggtataaaattaacattatttcaactttaaatggaaaagggaataaatgtatatctaccttcctactagcaattttaggtaaatattcttygcaaatatctagaaagattaactataaaattcttacttgtgttttaaagctaattgaagaaattctcccagagaggtggaacatagtctactttaccccagaaaactcttttaaaaatgtgatgaataacattcttaacactcaaggttttatactaaatttctctagcttggcctggagacatattgatagatagctcaaatcatccactagaaaagaacaatgtatctccattctcttgatggatttactctgaagttccacttttttagcttgatcagtcaatgcggtttcagaagaaatgtagtattcaagtttgaagagtaggtaatgttttcccatattttatagaatactgacttatttaaat

SEQ ID NO: 617761 - DNA, 550 bp, Homo sapiens
ggaaaacaggaagtcaaattgtccttgtttgcagatgacatgattgtatatttagaaaaccccactgtctcagcccaaaatctcctcaagctgataagcaacttcagcaaagtctcaggatacaaaatcaatgtgcaaaaatcacaagcattcttatacaccaataacagacaaacagagagmcaaatcatgagtgaactcacattcacaattgcttcaaagagaatattgttttattttcaaacatttttaaaatcacactgcagaggaaagtatgggcccacctatgaggaacagtactgtatatattctaagcctagaaattaggaggtatctccctcttcaatttctcataataaaaagataacttttaaacactgaatgagatttcataaggaaaggaaatttccaacttcagttttcttatatgaaatcttctgttaattaaacttcctaaaataattatctgctcaagagtgatggctagataatgtgttcatgaaaaataatctaggcccttgagcaaagtaatatattcagcccaaaaata

SEQ ID NO: 617762 - DNA, 550 bp, Homo sapiens
ggaaaacaggaagtcaaattgtccttgtttgcagatgacatgattgtatatttagaaaaccccactgtctcagcccaaaatctcctcaagctgataagcaacttcagcaaagtctcaggatacaaaatcaatgtgcaaaaatcacaagcattcttatacaccaataacagacaaacagagagccaaatcatgagtgaactcacattcacaattgcttcaaagagaatattgttttattttcaaacatttttaaaatcacactgcagaggaaagtatgggcccacctatgaggaacagtactgtatatattctaagcctagaaattaggaggtatctccctcttcaatttctcataataaaaagataacttttaaacactgaatgagatttcataaggaaaggaaatttccaacttcagttttcttatrtgaaatcttctgttaattaaacttcctaaaataattatctgctcaagagtgatggctagataatgtgttcatgaaaaataatctaggcccttgagcaaagtaatatattcagcccaaaaata

SEQ ID NO: 617763 - DNA, 368 bp, Homo sapiens
aaatttcctttatttttttccttattgtcrttgcctggaaatctttcaggaaatcattaatattgggattaaaattattatttttatactcaagattcctgaaatgtttatataaacaatgatttttcttctacttttctgactcatctgcactggtgcattattgcaatcatgtcccgggaggaaaatgaagttgaagaaaattcaacatcatcataataattggacaaatcaaaatatgtcacatcagctagccaaatgaacagtaatacagtactctgctgctctcgttggagtcagacaaacctgagtttaagttccagttgtactatttaataacttagtaacaaagagaggatgacatcatc

SEQ ID NO: 617764 - DNA, 471 bp, Homo sapiens
ctggtgattaaaatatctcactatctaatcaggcaatagcatctggcctgctgcaattcagaggttttcaaacagtagggaccacaatttaatttaattatcaaaattgaatttgtaaagctagccaatgagtagaaattcagaagaccctgccacagtatcccccaacttttcacgataagaaattaaacataataaaacatgccttttgataattagactccatatattgcaaaactaaagtttgataaaagtttaatcaaactcagtgggtgtcattaaaaaggcaataatcaaatgattacataaataataacaaacttctgcatttccctcaaattgtctaaggaaaaaacagataagttgtmatttgaggaacaacaggcagaaatatgcagcattaaaattatctagatcaaaattttaaaagctatgatgcccatgattatttctatctccattttaattcac

SEQ ID NO: 617765 - DNA, 597 bp, Homo sapiens
ggtcaggagtttgagaccagtctggccaacatggtgaaaccccatctctactaaaaatacaaaagttagccaggcttggtggagcgtgcctgttatcccaactactccggaggctaaggcaggagaatcacttgaaccccagaggcagaggttgcagtgagccgagatcgtgccactgcactccagcgtgggtgacagtgagattccatataaaagtagtaataataataataataacaattttctgtgagtcccaagataaaatagcattacagaacactgaataatcctgagtttggttttcttggttgcattctgctttatatttagttttgttcaccttgaccagtgggcttgtggttcttaggtgcaacagggttttcatttttaggttcaagattttaaagctttaatgtggtaatttctctaatttttttgacagttatttctcaggttacaagttaaaataaaatttccatttcactgaagtctttggttyattaatgatttcatgacttaatatacaatgagtaataaggggtgctacaaattttcagaaatcaacactaaataacttactcatggaagcaaacacta

SEQ ID NO: 617766 - DNA, 416 bp, Homo sapiens
tgatgcacagagtgatagctgatagtctcttaaaacaaygtttacaattattttgacagtttaccgtgttttgttctctcaacaatacttagaatttgtctgagttatagttgcatagacggcaattttcctgacctagttttctgactatgatttatgggtcagtaaactccttaaatgatggaatataacatctcaggccacagggaacacttactatcacatgctcactgttgcaggacggatgcgtggccagcctcaggttgctaaatgttagggtgatctgccttccttctggggcggtgattctccacttgtagatccggccatgaggatttaggttcgggtagttgggagaagtagatgttccagcagagccctgaagatccccaccacactctgatgtgggggaagaa

SEQ ID NO: 617767 - DNA, 416 bp, Homo sapiens
tgatgcacagagtgatagctgatagtctcttaaaacaacgtttacaattattttgacagtttaccgtgttttgttctctcaacaatacttagaatttgtctgagttatagttgcatagacrgcaattttcctgacctagttttctgactatgatttatgggtcagtaaactccttaaatgatggaatataacatctcaggccacagggaacacttactatcacatgctcactgttgcaggacggatgcgtggccagcctcaggttgctaaatgttagggtgatctgccttccttctggggcggtgattctccacttgtagatccggccatgaggatttaggttcgggtagttgggagaagtagatgttccagcagagccctgaagatccccaccacactctgatgtgggggaagaa

SEQ ID NO: 617768 - DNA, 416 bp, Homo sapiens
tgatgcacagagtgatagctgatagtctcttaaaacaacgtttacaattattttgacagtttaccgtgttttgttctctcaacaatacttagaatttgtctgagttatagttgcatagacggcaattttcctgacctagttttctgactatgatttatgggtcagtaaactccttaaatgatggaatataacatctcaggccacagggaacacttactatcacatgctcactgttgcaggacggatgcgtggccagcctcaggttgctaaaygttagggtgatctgccttccttctggggcggtgattctccacttgtagatccggccatgaggatttaggttcgggtagttgggagaagtagatgttccagcagagccctgaagatccccaccacactctgatgtgggggaagaa

SEQ ID NO: 617769 - DNA, 416 bp, Homo sapiens
tgatgcacagagtgatagctgatagtctcttaaaacaacgtttacaattattttgacagtttaccgtgttttgttctctcaacaatacttagaatttgtctgagttatagttgcatagacggcaattttcctgacctagttttctgactatgatttatgggtcagtaaactccttaaatgatggaatataacatctcaggccacagggaacacttactatcacatgctcactgttgcaggacggatgcgtggccagcctcaggttgctaaatgttagggtgatctgccttccttctggggcggtgattctccactygtagatccggccatgaggatttaggttcgggtagttgggagaagtagatgttccagcagagccctgaagatccccaccacactctgatgtgggggaagaa

SEQ ID NO: 617770 - DNA, 573 bp, Homo sapiens
ggctttttggtataccttaaagggagcaacaatcattttccaatacaaatcttattccaaagtctttgctccactaaacaaagataattgctttggtcctgctcttgattcagatttttttgctgatctcaagactacattaagtctattttccatgtgctctcttatgatacttcatcctttacccatccatgggctgtatttttttgtacrtagctggttactctattttctctaccgagttagtcaactgagtcccttccactcagtgcctctctctctctctctctctctctagaagtgtgtgtgtactgctctactaatttttcctgattgttttttacccaacctttgctcatacatgaatagatcattaatcaacaaacctatacttaataacattactaataacatagcagagagtaggaagaaaactttcaattatgcttttgtatttttatttacttgcttttatattttatttttcaatccgtatgcctttaaaggaatcatttaaagccattattctggccaggagtggtggcgcacacctataaccccagcactttaggg

SEQ ID NO: 617771 - DNA, 450 bp, Homo sapiens
ctgagtctggtgagaaagacaagtgcacaaacatgtaatactaataacatctgctatacgtattctaccataagaataaaatgaagggaagaattaatyctgcttcaaaagcagagaaagcagttttgtcttgaatgatgaatagccatctgccaggaagtcaagaaaagcaggagaaactacatggggtattaaaaatacttggttccatattatgtttaatgagtaaggaaggaagagagaatgactgaaaatgaagttcagtacatttagaatttttttattcaagtgtaaaaaacttatactcatttaaattgagatgatttataattttatgaataaattattttatagttttggagatataatacaaatataagctagagcttttttgataaagaacataaaaatatttctgattaacttatttataaaataaatttgaaggca

SEQ ID NO: 617772 - DNA, 579 bp, Homo sapiens
ggaagaattaattctgcttcaaaagcagagaaagcagttttgtcttgaatgatgaatagccatctgccasgaagtcaagaaaagcaggagaaactacatggggtattaaaaatacttggttccatattatgtttaatgagtaaggaaggaagagagaatgactgaaaatgaagttcagtacatttagaatttttttattcaagtgtaaaaaacttatactcatttaaattgagatgatttataattttatgaataaattattttatagttttggagatataatacaaatataagctagagcttttttgataaagaacataaaaatatttctgattaacttatttataaaataaatttgaaggcaactgggtagctaaaaaaaaaaaaactaaagagaatcataagatctaagaaagggcaggctgaaaacttgtgtagaaggaagtaatgtacattttcttcaatatgttttcattagaatatcccagtttcaaataagttatattgttgtgtctttcttgtaaagtttaactttcatgggagaaagtgcccagttgaattagcttgggtcatagactc

SEQ ID NO: 617773 - DNA, 561 bp, Homo sapiens
atatagccaaaggaatatacatcattctattacaagcatacatgcacgtgaatgttcatcgcagcactattcacaatagccacgacatggaatcaacccaaatgcccatcaatgacagactggataaagaaactgtgtacataatcatcatggaataccatgcagacataaaaaggaacgagatcatgtcctttgcagggacatgggtggagctggaagccattatcctcagcaaactaacacaggaacagaaaaccaaacaccacatactctcacttataagtaggasctgaagaatgagaacacatggacacagagagaggaacatcacacactggggtctgttggggagtgggtggggagagggttctttatagatatcttacagcaacatgtgtctacaatcagtgtttcctttattagcagtataaagaggaaatatacactaattttagtagaacctgataaggaaacaccataatacttccacaattgtacaaatctataacttgtatttacagtattcctgcccttactttcctcttcctcgtgtctaataac

SEQ ID NO: 617774 - DNA, 561 bp, Homo sapiens
atatagccaaaggaatatacatcattctattacaagcatacatgcacgtgaatgttcatcgcagcactattcacaatagccacgacatggaatcaacccaaatgcccatcaatgacagactggataaagaaactgtgtacataatcatcatggaataccatgcagacataaaaaggaacgagatcatgtcctttgcagggacatgggtggagctggaagccattatcctcagcaaactaacacaggaacagaaaaccaaacaccacatactctcacttataagtaggagctgaagaatgagaacacatggacacagrgagaggaacatcacacactggggtctgttggggagtgggtggggagagggttctttatagatatcttacagcaacatgtgtctacaatcagtgtttcctttattagcagtataaagaggaaatatacactaattttagtagaacctgataaggaaacaccataatacttccacaattgtacaaatctataacttgtatttacagtattcctgcccttactttcctcttcctcgtgtctaataac

SEQ ID NO: 617775 - DNA, 461 bp, Homo sapiens
aaatatacactaattttagtagaacctgataaggaaacaccataatacttccacaattgtacaaatctataacttgtatttacagtattcctgcccttactttcctcttcctcgtgtctaataacttagctgtttgaaatactttgcctaaaactatttgaaaaaacttgaaataatccagcctaaataacactttagaatttacaatcttttaaaatttayaactgctatgttagtttaaaatagcatacccccaatcttacatttttctttactttctttgtctaacagaaaagctatttaccagcaattcaaattattttttgtctatggatctggtaccatgaaatgcctaaaatggccccatagcattatcaacttccaatgtaatgtaaccatgtttgtttgctctattggaagccgactctagagtggcaaagatgggatttactttagagaag

SEQ ID NO: 617776 - DNA, 461 bp, Homo sapiens
aaatatacactaattttagtagaacctgataaggaaacaccataatacttccacaattgtacaaatctataacttgtatttacagtattcctgcccttactttcctcttcctcgtgtctaataacttagctgtttgaaatactttgcctaaaactatttgaaaaaacttgaaataatccagcctaaataacactttagaatttacaatcttttaaaatttacaactgctatgttagtttaaaatagcatacccccaatcttacatttttctttactttctttgtctaacagaaaagctatttaccagcaattcaaattattttttgtctatggatctggtaccatgaaatgcctaaaatggccccatagcattatcaacttccratgtaatgtaaccatgtttgtttgctctattggaagccgactctagagtggcaaagatgggatttactttagagaag

SEQ ID NO: 617777 - DNA, 586 bp, Homo sapiens
tttctttctcaacgtgggatcctactctccaactgtgagagcaacgcttctcaaagactatctccagttggccatagacactttgagaatcactgcctccgtcgtgtcttcagactagttgaaaaaccatcagcaatgtaacctgatattgctttgtctaactgtgtgacccacaattttcacagttttttattgcaccagataaatgggttatagcaggacatcttgttgtatttaaaaccctaagwagctttccaaatattaggctttttaatttgagatggagtctctgttgccaggctggagtgcagtggcactatctctgctcactgcaacctctgcctgctgggttcaagcgattctcctgcctcagcctcctgagtagctgggactacaggcacgtgccaccatgcccacctaattttttatttttagtagagatggggtttcaccatgttggccaggatggtctcgatctcttgacctcatgatctgcccacctgggcctcccaaagtgctgggattatagcatttcacttactacagaggtcatatcttgatcagcctaccgaacattcaaactcca

SEQ ID NO: 617778 - DNA, 531 bp, Homo sapiens
gaaataaaatacttataagaccttctgttttgctgggttgtctcccaccctataatactcttgtttgtacacatctatatgtaacataaaatactcctctaggattaacatcataatattctcattgttatatgatggtcactgtaagagtaaggccacactaggaatgaaattgtgatacagagcaaggatacaggagcgtgagaggctgacagctccaaaatacatccacactgtaatccctataacctggaaatacattttttacatasaaaaaagtctttgcagagatgattaagttcaggattttgagatggagagattaccctatattaacccagtgcccagaaggtcatcactagggtgcttataagaggataccaggaatttcagagtcagactgaagatatgatgagggaagcagaggttggaatgatacgttgccactagctaaggaattcagacagcctttagaatgtggtaaagacaaaggaaatgattttcttcagaaagaatgtagccttgcttatc

SEQ ID NO: 617779 - DNA, 531 bp, Homo sapiens
gaaataaaatacttataagaccttctgttttgctgggttgtctcccaccctataatactcttgtttgtacacatctatatgtaacataaaatactcctctaggattaacatcataatattctcattgttatatgatggtcactgtaagagtaaggccacactaggaatgaaattgtgatacagagcaaggatacaggagcgtgagaggctgacagctccaaaatacatccacactgtaatccctataacctggaaatacattttttacatacaaaaaagtctttgcagagatgattaagttcaggattttgagatggagagattaccctatattaacccagtgcmcagaaggtcatcactagggtgcttataagaggataccaggaatttcagagtcagactgaagatatgatgagggaagcagaggttggaatgatacgttgccactagctaaggaattcagacagcctttagaatgtggtaaagacaaaggaaatgattttcttcagaaagaatgtagccttgcttatc

SEQ ID NO: 617780 - DNA, 527 bp, Homo sapiens
tatcagatttctcaaaaaggagtacatcccaaactaacccatttttccttttaaaaaatctgtttcttctttggttactgtcttggtaaatgataacatctatgcaatcatccaaaacaaaagcataaatcactttacattttaattcattcagtaacagtccttttgattcttgcccttcaacatgttttgtattcataccctatattctatcttctcctgctgcagtttaaggatgcattgtattttrcattggcaattgaaatagtattttaaaatgttggttgttttatagtcccatagctctccaacactttctctgcaatatctaaagataactaaataaaatgtgaatctgatcccatcccttcttctcttgcttaagtgttttaaatatcatcattgctaattagatataacccacatttattagcattatgaatagctatatatttttcaggaatttgctcaagctctaacttctttaggaatacattttctgttacctgattcataagtacacccga

SEQ ID NO: 617781 - DNA, 527 bp, Homo sapiens
tatcagatttctcaaaaaggagtacatcccaaactaacccatttttccttttaaaaaatctgtttcttctttggttactgtcttggtaaatgataacatctatgcaatcatccaaaacaaaagcataaatcactttacattttaattcattcagtaacagtccttttgattcttgcccttcaacatgttttgtattcataccctatattctatcttctcctgctgcagtttaaggatgcattgtattttgcattggcaattgaaatagtattttaaaatgttggttgttttatagtcccatagctctccaacactttctctgcaatatctaaagataactaaataaaatgtgaatctgatcccatcccttcttctcttgcttaagtgttttaawtatcatcattgctaattagatataacccacatttattagcattatgaatagctatatatttttcaggaatttgctcaagctctaacttctttaggaatacattttctgttacctgattcataagtacacccga

SEQ ID NO: 617782 - DNA, 543 bp, Homo sapiens
gagtgggctaatttagcggcaaaaccagcagtgagaaagaaaaagtactgaaaatatatctaatagatctgctcaagtttagttcattcaggaaaataggtgtttttacaaaaggaaatcttaggcaataatattaataagatatgagatggaaatcaaaatgatatgcataacatgtaatctgttgaattacataattaatcttcctggaaagttacctttttaaactgattctatcacatttgatgtataagtgaaatatctcaaataccatagagtgtatttgttagtgyaatgaagatttataagaactcattctcactgtccttcatctactttgatatagtggtaaaacctcagaagtttctccagtttgtttcatagagtttcttactccacatctttttatctgtaagatagtttctgagtgcttacagttaaaatgagctcattattgaaagctgcaaccttcttagttgaatgatctaagactatgcaataagtcctcacagatcctcattttacttttacagcagctgaaat

SEQ ID NO: 617783 - DNA, 600 bp, Homo sapiens
ttctaaacttatcagttaatatgatgactctggtatcaaggtttctaatgaagttatagactagtagacacattatgtgggaaagaaaactgcagaggccaaggaataaattcaaacagctatgaataatctgaatgaaatgtgtgcaaccgattgagtgggctaatttagcggcaaaaccagcagtgagaaagaaaaagtactgaaaatatatctaatagatctgctcaagtttagttcattcaggaaaataggtgtttttacaaaaggaaatcttaggcaataatattaataagatatgagatggaaatcaaaatgatatgcataacatgtaatctgttgaattacataattaatcttcctggaaagttacctttttaaactgattctatcacatttgatgtataagtgaaatatctcaaataccatagagtgtatttgttagtgcaatgaagatttataagaactcattctcactgtccttcatctactttgatatagtggtaaaacctcagaagtttctccagtttgtttcatagagtttcttactcyacatctttttatctgtaagatagtttctgagtgcttacagttaaaatg

SEQ ID NO: 617784 - DNA, 452 bp, Homo sapiens
tcattcttaggcttttgcatcctcatagcgcagctcctacttacaagtgagaacatccaatgtttggttttccattcctgagttactcacttagaataatggtctccaattccatccaggttgctgtgaatgcgattatttcattcctttttatggccgagtagtattccatggtatgtatgtgtgtgtgtatatatacatcacattttctttattcacttgttgatgggcatttgggctggttccatatttttacaattgtgaattgtactgctataaacatgcatgtgcaagtatccttttgcgygtaatgacttcttttcctccaggtatacctagtagtgggattactagatcaaatggtagatccactttcagttttttaaggaatttccagactgtcttttattcattcccaccaacagtgtaagagtgttttcttgtcaccacat

SEQ ID NO: 617785 - DNA, 614 bp, Homo sapiens
gtgttttaaaaagcagaaacttactctctcagttatggaggctagaagtctgaaatcaaggtgtcaacaggattggtttcttctagccattggagaaggatccatttcagatcctttctccttggcttatagatggctgtcttttccctatgtcttcaaattatcttccattttctcatttgtctataaaatgtcctcttcttataaggatacagtcatattgggctagggaacaccctaatgactcatattaacttataatctttgtaaagaccctacctccaaatacaatcacattctcaggtaccaggaattaggacttcgacatatgaatggcagaggtgtaaaattcagactataacagcacagtccaaaaattctgttatgtgcacatttatgaatgtaaatttcttaataaaattaacaatttagaattcgaaatacgatggtaaaaaccactggaaaacttaatatatwgacttaaataaatacataaatgtatatatatacacacacacacaccaatgtgtgacttaatatattgacatatatatacatacatatgtacatatatgcatacatatatacacatatatatgcatatatatatatat

SEQ ID NO: 617786 - DNA, 639 bp, Homo sapiens
ggttcaaatgccaagtttctcatatcaaaatttaattttcatttgaatatgtatttttaaattaaatagatatttacaaatcaaatctaacaactytgtaatagatatttgttgcctatattatacattatcaagtaaattttatactgggaatgtaagatatagaactatatcaaaagtttgatcaatgtaatctattaaatcagtagcttaaaggctataacctgtacctttcaacagaatatacaatttaacattcattcatgattaagataacaagcaaacaaaattaaacaaaatttctaactatatcagaatagccaggaacatccttaattttataaaagaacattaacatatgtatggtaaaactcacattgccattaaagtcaagaagaagctaaggaagccctccttcccctttatgacacggtattagaaatcagcattgtagtaagatatataaactgaaaaagaagaaataaaatctgtattatttaaagttaatgtgagtatcttcatgggaaatcaatataaaaataaactagaagaatataagaaaattttatcatgattgttggaaacataactaatatgcagtaattaatggccttatgatacaccagctataagaaattt

SEQ ID NO: 617787 - DNA, 639 bp, Homo sapiens
ggttcaaatgccaagtttctcatatcaaaatttaattttcatttgaatatgtatttttaaattaaatagatatttacaaatcaaatctaacaactttgtaatagatatttgttgcctatattatacattatcaagtaaattttatactgggaatgtaagatatagaactatatcaaaagtttgatcaatgtaatctattaaatcagtagcttaaaggctataaccygtacctttcaacagaatatacaatttaacattcattcatgattaagataacaagcaaacaaaattaaacaaaatttctaactatatcagaatagccaggaacatccttaattttataaaagaacattaacatatgtatggtaaaactcacattgccattaaagtcaagaagaagctaaggaagccctccttcccctttatgacacggtattagaaatcagcattgtagtaagatatataaactgaaaaagaagaaataaaatctgtattatttaaagttaatgtgagtatcttcatgggaaatcaatataaaaataaactagaagaatataagaaaattttatcatgattgttggaaacataactaatatgcagtaattaatggccttatgatacaccagctataagaaattt

SEQ ID NO: 617788 - DNA, 639 bp, Homo sapiens
ggttcaaatgccaagtttctcatatcaaaatttaattttcatttgaatatgtatttttaaattaaatagatatttacaaatcaaatctaacaactttgtaatagatatttgttgcctatattatacattatcaagtaaattttatactgggaatgtaagatatagaactatatcaaaagtttgatcaatgtaatctattaaatcagtagcttaaaggctataacctgtacctttcaacagaatatacaatttaacattcattcatgattaagataacaagcaaacaaaattaaacaaaatttctaactatatcagaatagccaggaacatccttaattttataaaagaacattaacatatgtatggtaaaactcacattgccattaaagtcaagaagaagctaaggaagccctccttcccctttatgacacggtattagaaatcagcattgtagtaagatatataaactgaaaaagaagaaataaaatctgtattatttaaagttaatgtgagtatcttcatgggaaatcaatayaaaaataaactagaagaatataagaaaattttatcatgattgttggaaacataactaatatgcagtaattaatggccttatgatacaccagctataagaaattt

SEQ ID NO: 617789 - DNA, 525 bp, Homo sapiens
agcttaattaaaactgcaaagatactgaatagacatttttccaaagaagacataaaaatggccaacagttatataagaaggtgctcaacatcactaatccttagagaaatgcaaattaaatctacaataagatatcacatcaaaactattaaatgactagtaactgaatgttgaaagatgacaagtattgatagggatgtggagaaaatggaactcttgtatactgtcagcaggaatataaataagtatagccattatgaaaaacagtatggaggttcctgaaaagaattaaaaatagaactttaatatgaccctgaaatcccttggttaagcatatacccaaggaaatggaagcagcacctcatagagatatttgcccttacatgttcattgaattgttatagtcaagatattgaaacaacctaagtatttattgacaaatgaatggataaatagatttayatatatgtgaccaggtggggtggctcacgcctgtaatcccagcactttgggaggctgaggtgg

SEQ ID NO: 617790 - DNA, 607 bp, Homo sapiens
tttactataaaacacctgtaaatattagtgtggttttaattaaaatataatactgcwtagtgccactcacatcaagtcaatatctgggatagagataagattttacaaaatttaattaatatgactccaaggacagaaactcaaggtcgccctattttatgctaaaaaaaaatagttgcaatgtagagagcaaaagatccattctcaattcagaaaagcatgttactctttattgtgcattgattatgtgctaggcatggtatatacattatcattgaatgttctataaatccaaacacgctaacttacgtaatatttatactttgcaccaggccttgaggtaagtagtagtattaattccagtttatagatgaggaaactgatgtatccagaagtaaagtaatttactcatgattcttttggctagtaacaaaggtcaaaattaaaatagaattgttggcagccatgctttccaagatattgtaaagcaaaaactcaaaatgttcaataagtaatgagacaaacagcttaacttcactaatgcttataattttaaaatgtagttttgactgagagacatgtattttagtttgaaaaaagaaaaatt

SEQ ID NO: 617791 - DNA, 565 bp, Homo sapiens
attaaactctgttaaatttgatttgtttaaagttcttaaaaaatttaatgggtacataataggtgtatatacttataagatacatgagctattttgatgcaggcatacaatatgtaataatcacatcaaggtaaattagatatccatcccctcacatcacctcaagcatttattgcttctttgtgttacagacattccaattatactcttagttattttgaaatgcacaataaatttttgttggctgtaattaccctgttgtgctatcagatactagatcttattactcctatctatatttttgtactcattaaccatttttattctcccccaccaccattacccctctgagcctctggtaatcctcagaatgggagaaaatatttgcaaattattcatctgacaagggattaatacccagaatatataaagaactcaaacaactcaataggaaaaaaatgtactacgccatttaaaaatgggcaaagatctgaatagacatttttcaagagaagacrtacaaatggcaaacaggtatataaaaaggtgctcaacatcaccgatc

SEQ ID NO: 617792 - DNA, 565 bp, Homo sapiens
attaaactctgttaaatttgatttgtttaaagttcttaaaaaatttaatgggtacataataggtgtatatacttataagatacatgagctattttgatgcaggcatacaatatgtaataatcacatcaaggtaaattagatatccatcccctcacatcacctcaagcatttattgcttctttgtgttacagacattccaattatactcttagttattttgaaatgcacaataaatttttgttggctgtaattaccctgttgtgctatcagatactagatcttattactcctatctatatttttgtactcattaaccatttttattctcccccaccaccattacccctctgagcctctggtaatcctcagaatgggagaaaatatttgcaaattattcatctgacaagggattaatacccagaatatataaagaactcaaacaactcaataggaaaaaaatgtactacgccatttaaaaatgggcaaagatctgaatagacatttttcaagagaagacatacaartggcaaacaggtatataaaaaggtgctcaacatcaccgatc

SEQ ID NO: 617793 - DNA, 542 bp, Homo sapiens
gtagataagatttagtaaataatkgttgagtaagtctaaatgatgtcagtttcatgtttaagtcattagagatggagactctgttaccttgcccctccatctaacattgcagggcctgttaaaggaaaataagcaagccattagcctttagtttctatttgcttgcataagggttccaggcatacaaacagaaactaaaggtagaagcattctttgtaactgattaattgtgaaggaagcttcagccaatcatagacagccaaatagctgattggttttgtaacctgggacctcccactggacaatatccaaataaggcaaacacctagctctagccaatcaagtagtttgttttgttttgtttgttttttaaattttgcttccatctccagcctataaaagttgaatgctcaggccgccacagcaaaacccacaacctccctttggttttggtgcttcctgattcatgaattgatcttcgctcagataaactgttagattttcattttgtctccagtttttccttaaacaggcttataagt

SEQ ID NO: 617794 - DNA, 606 bp, Homo sapiens
tagctagagcaatcagacaagaggaaaaaagggcacttaaattggaaataaataaattattcttgtttatggataatatatttggaaaaacctaaagactaccaaaaaagtgttagaactgataaacaaattgcataaagtttcaagatacaaaatcaacataaaaaaatcagtagtttttctatatgccaacagtgaataatctgaaaaagaaatgaagaaagtggtcccatttagaatagctacaaataaaatacatggaattaaattaaccaaagaagtgaaagacctctacaaggaaaactataaaacactgatgaaagaaactgaagaggaaacaaaaaaaaaggaaagatattccttgtgcatggattagaagaatcaacattgttaaaatatccatactatccaaagcaatctacagattcagtgcaatctctatcaaaataccaagataatcttcayataaataaaagaaatagtcctaaagctatgtgccaaccacaaaagactcagaatagccagagttatcttaagaaaaaagaacaaaactggagggaatcacattacctgatttcaaattatactctagagctatagtaacca

SEQ ID NO: 617795 - DNA, 503 bp, Homo sapiens
acagtatatgtgtagatatatttctggttgctttattttgtcccattgatctatttctctctccttaggccaattaacactgtattaagtcctgtaactttagagtaatttttgaaattccatagtataaatcctctagctttgttcttttaaaacactgacttagctagtttgcatcatttattttctatataaattttagactaaacttgtaaattactaaaagaaaagcccrctggggttttgattacaattacaatgattctacagaacaatttgaagagaactgacaccacttaattcatgaacatcatgtgtttctctatttaggtttcctttatattctcttaacactatattctagttgtcagtgtagatttcttgcacattttttaataaatctacttgtatgtatttagtgcttttaggtactattgtaaatgtaattttaaaatattcattctccagttgtttgctactgtatataggaatatcctagaacc

SEQ ID NO: 617796 - DNA, 503 bp, Homo sapiens
acagtatatgtgtagatatatttctggttgctttattttgtcccattgatctatttctctctccttaggccaattaacactgtattaagtcctgtaactttagagtaatttttgaaattccatagtataaatcctctagctttgttcttttaaaacactgacttagctagtttgcatcatttattttctatataaattttagactaaacttgtaaattactaaaagaaaagcccgctggggttttgattacaattacaatgattctacagaacaatttgaagagaactgacaccacttaattcatgaacatcatgtgtttctctatttaggtttcctttataktctcttaacactatattctagttgtcagtgtagatttcttgcacattttttaataaatctacttgtatgtatttagtgcttttaggtactattgtaaatgtaattttaaaatattcattctccagttgtttgctactgtatataggaatatcctagaacc

SEQ ID NO: 617797 - DNA, 467 bp, Homo sapiens
tgactagtctactttctgtctttataaatgtgctaattctggacaattcaagtaatggaatcatgcaatccatggtcttttttgattgctttttttgatttagcacaatgttttcaaagttcatccatacaatgtagagtaccatacaatgtatgctactgatatactgtagcatgtatcactacttctttcctttttattaataatattccactgtatagatataatacattgtgtttatccattcatcagttaatgaacatgcgaattgcttcyacttttgagctattatgaattatgtagctacgaagattcatgtgtaagtgtttttgtggacatatgctttcatttcccttggttatatacttaggaatggcattgctgagtcatatggtaactctgcttaacattttgagaaaattttcaactgttttagagagtgactgcaccattttacattcctacca

SEQ ID NO: 617798 - DNA, 427 bp, Homo sapiens
ttgaacttctagtgacattttttaacttaaaatcacaaaatatggatattatgcttttattaaaatattctaatagttactaaatgcactgtcttaaatcagtgaataaaaagatcacccaaaaccaagattcaagattttaagaatctagcatgtaagaccaaaagttagatcttacattataacaatatggtaagtgccctattagaaatagaaacaagtgctatggaaacctagaagatgtattaattccrccaagggtggccatggtacctgggagtgcccaggtatgtctttagttggaaatgacacaatggcctggcctttaaatatcagtaagatttcaccagaatataaagataaaaaaggcattttggatgaggaaagaaataatttgaaactgtgctgtttcatatccagttaggtt

SEQ ID NO: 617799 - DNA, 427 bp, Homo sapiens
ttgaacttctagtgacattttttaacttaaaatcacaaaatatggatattatgcttttattaaaatattctaatagttactaaatgcactgtcttaaatcagtgaataaaaagatcacccaaaaccaagattcaagattttaagaatctagcatgtaagaccaaaagttagatcttacattataacaatatggtaagtgccctattagaaatagaaacaagtgctatggaaacctagaagatgtattaattccgccaagggtggccatggtacctgggagtgcccaggtatgtctttagttggaaatgacacaatggcctggcctttaaatatyagtaagatttcaccagaatataaagataaaaaaggcattttggatgaggaaagaaataatttgaaactgtgctgtttcatatccagttaggtt

SEQ ID NO: 617800 - DNA, 591 bp, Homo sapiens
taaccaatacacatgtctaagatagacagaattttgcataagtgaggaccaaatactctgagcaagggaggaaactggcccgattctcatccctggaagaataygggaagaaaaaatagcaagggattggaaaatgaaatagtcatgcttatgtgtctgacttacaccttcagccaagaaaaggggctgtgccttatgtaaatagggtataactaagaccacaagactctactttcctgtttaatattctgtaaagacatcacagtttagcttctttctgcactggcctaggacaggaccacattaagttgatgcaacaataaatctaggaaggggaaggctttgaaattaaacattcctcaggtgtgctcatttagccaggaggtataagccttgatctgagagccagaaagcctgccatagaatctgccaaggcacagcaagtggacctcacagaagacgccgggatggacagccaggacagacagctacatgaaggatgacagagactcaaatgcctacaaccagctagagtggagatgaggttggaacaaataaaggtaattcctggtttcttatcaagccaagaga

SEQ ID NO: 617801 - DNA, 478 bp, Homo sapiens
atggaaaaagaaacaaacaaacaaacaaacaacaacaacaacaaaaactgagaccctagagggcagagacacaagcagctggatgtcgaggggaatgcactgtgtaacagcacactgacagacgtcagcaggctggcaggccattgcccggtggaatgaaggggagtttggccggggcagtcagaggagagcctaggccactaagtggyccaactccaggggaaaaccaccttcccacttcaattcccttctcactcccccatctgctgagagctacttctactcaataaaaccttgcactcattctccaagcccatgtgttatctggttcttctggtacaccaaggcaagaaactccaagatactgaaagccccctttccctttgataaggcaagggatataattgtgctgtgtttagccccctacggatggctaaactaaaagagcacatggtaacacaagcccactggggcctca

SEQ ID NO: 617802 - DNA, 465 bp, Homo sapiens
agatctccctacacaaaatgaaaatcactgttcagtacatccaaacacagatagtctatccctcrgattttctttcattttttctcctttggagatactgtctctaaaatcatttgtttcccattccaatattattatttgttctccatgtctctctagtctatttatctatattaatcttaattatgaaatgtgaatttataacccactttataaaaattataaacatgatgtatacattgtgtcatatctatgaatattttttctttagcatcattcctagtgactgaatacttctttcagttgtgtgatggatttttttttagttgctccttcagaggatatgtaatcattctcaactctgctctagtccctagaatcagacccatatgggctacatccactgggatcttgccttctggcccccaattgagttctgccaattggagactccagcaggagatc

SEQ ID NO: 617803 - DNA, 502 bp, Homo sapiens
aaaccttataattcagaagggattatggaactatttccagcatgctcaagaaaagaaattccaactaagaatttcacaacccaccaaattaagctcataagtgacagagatattaaatccttctcagacaagcaaacaccaagggaatttgttaacactacatcagccttacaagaggtccttaagggaatgctaaagattaaaataaatattgatacctgttaccacaaaaggcatttaaacacataacccayagaaaatataaagaaattacacaatcaggtctacaaaacaatcagctaataacatgacaatagaataaaaatcttacagtttaataataaacctgagtatatatggcctaaatgcccccacatgaaatgcacagggtggcaatctgcataaaaagacaagaccacactttccgctgtcttcaagagatccatctcatgtgtgacaacacctacaggctcaaagtaaagggactgacaaagatctacaa

SEQ ID NO: 617804 - DNA, 551 bp, Homo sapiens
tttctatctaggaaagcaaattggcttataattaaaggctttaaaaagtgaagtttcaaagtctccttttaaattgttcggaaagatgaaggatgaaattatagagcagactttttcttataaatgtggccatcaaagaagtccatatgctatttggytcctaagttactacatttcataatggactttgaatgtataaggattaaagtgagcatctttaaagcagatgattaagtgtctttaaagacacttacctactgatgaaagatgtcagtatcattatgcagttgtaaagtgaaaaggaattaaaactttagaacctagaaaaatgtaagattgcattacctagaaaccaaccttaaaaattctatctaattatactaattaaatagaagatctggaggtagtaggcattggttgccagagactaggctgagttataaacatatgtttcaattagtctatctttattcattcattcacttgttcatttgattaatttttattgaataaatatggataaagaagcaatcatgccaactagctactta

SEQ ID NO: 617805 - DNA, 551 bp, Homo sapiens
tttctatctaggaaagcaaattggcttataattaaaggctttaaaaagtgaagtttcaaagtctccttttaaattgttcggaaagatgaaggatgaaattatagagcagactttttcttataaatgtggccatcaaagaagtccatatgctatttggttcctaagttactacatttcataayggactttgaatgtataaggattaaagtgagcatctttaaagcagatgattaagtgtctttaaagacacttacctactgatgaaagatgtcagtatcattatgcagttgtaaagtgaaaaggaattaaaactttagaacctagaaaaatgtaagattgcattacctagaaaccaaccttaaaaattctatctaattatactaattaaatagaagatctggaggtagtaggcattggttgccagagactaggctgagttataaacatatgtttcaattagtctatctttattcattcattcacttgttcatttgattaatttttattgaataaatatggataaagaagcaatcatgccaactagctactta

SEQ ID NO: 617806 - DNA, 593 bp, Homo sapiens
ttacttctgcttccaagatgggaaaaatacaatgaaatcaatttgtttcaaagtgggtgctcttctctgaaagaaaaatggtgctatagtggggctcagcactggcctctattaacagcaagttgtatattcagcattagtagtagctatatcagacatggtgagtaggaggcctggcctccaagattcatggaccattgtaccagccctgtgatggctgatgatagagtctggatgacatcaaatgctctctactgggttgtttagtgcctcttatgtggtaaagtctctgatgggtataaatgtgattttaaaatatttcttccactcctatgggtggatccacatgatctttccccaaactactttctcatcatttttccagtctttatctaacaagaccctggccaataagccaaatcatttaccactccacaagacgcagttacctctggaagctacttctrtgaatgcctactatcagcccttgtctaaagaatacagtcattctgagtttcttattgaggctggtgcccctttcaccagtgcattccttagtgatttggtacattgagtaactcctggtcatttct

SEQ ID NO: 617807 - DNA, 540 bp, Homo sapiens
tcacacatatgtaggtcagctcatctagctgagttagctagtcatgaatacagtccataagctgttttcaggccttttatatgtgtctctcattcaatcatgcaaacatgttctgaggctttactttcattatgtctgctaacatcacattggctaagtcaagacaaatggccaaagctaaaaaagatatgaatatataatggtactacagcagaatacaaaattagagccaacaatgaaacttyaccattcttttctctattggtcacacattcacatctctgctacataaaaaaatattctctcattttaagatctctgaaagtgtcatccaatctttttctcaggttcaaagtccaggatcaaagcacactatataatattcaaagtacattgagtctggaggtagatcctcttgaacaagaaatcaaaaactaagacacatattcaacacataagggtgtaacagagacagaaaacaatatgataaactcttccattcaaaaaggggaagaagcacatagcaatctgtggttcata

SEQ ID NO: 617808 - DNA, 633 bp, Homo sapiens
tcctagttttgtgttttgcttgaagtttaacactttcgcattttacatttaagtctatgatccacattaagccaagatttgtataagatgtaaggtctaggtctaggtcttttgttatgcatacggatctccaattgttccagcatcaattatttatgaagactaccatttctctgccattgtgcacccatcagaaattagtttattatttagtatgactttatttgcagcctgtctgtcctgttccattagtctgtatttctgttatttcaccaataacacaatgtcttaattactatagcatttcagtaagacttgaaatcaggtattaygaatattccaactttgttcttctttatgaccaagttgcctattacaggatgtttgtttctttatctaaatgttagaatcagtctgactgtatctacaaaatagcatgctggaattttgattgagattgtattgaatctataggtcaagttgggaaaaaatataaataagcagtattgaatctttaattccaaaaatgggaatatgtcttcatttatttagttcttctttgatttttccatcattgttttgtcattttctgcatatagattctatacacatttatttgggatatgcgtaagt

SEQ ID NO: 617809 - DNA, 259 bp, Homo sapiens
ctttttgttctagttttattatttctttcttctgccagcctcatattaagtttctgctttttctttagtttcctatggtaaaaactaacattatttatactaratggttttttaaagaaaatatttatatttaatgctataaattttcctctaagcactgctttatgtgcattttataaacgttaatgttgtatttctcttctcttttattttcattaaaaatattcttaaaacctcttctttgatatttgatttattt

SEQ ID NO: 617810 - DNA, 574 bp, Homo sapiens
gtggtaacagagacttctctttcaaaaaacttcaaatatgtcacctgaaaatgggtctcagagtgcgattacctctgcttacctccctttatatttactccaaatgacttgctcatttgaaagtaaaccagagtttgatatatataccagtcactttcaaaacatactttcctcaaaatattttctttgctcaaccaattacaatcctaccaagtttgagatgaaatttgaccctctgttcatacccccttccttataagaatgtctgaaatattgtctaaattttcccatgtcctttttcaaccttttctatggaggctaagtttttaagcaaattasacacacactcaaaaattctgagttggataggaatcttagagtttcatgtctcaggcacttagtaagagggaggaagaacatagtctatggattttcaggagaagatcaaaatgatatcatttagccacacacttagcaacctttaggaacatcactgtttgctcctaaatatgtaagtgtgtatatctgtctatttataaaagattaaatcttctctcctctccaattttgatcg

SEQ ID NO: 617811 - DNA, 662 bp, Homo sapiens
tgatagttgcagtggttggtggggaagaattctaacagggtttcccaaagaatatacttgtgtggattagcatttggatgcctgtatctcagaacacatggatacacactccaacagtgcacaaccaggtagcacaattttgatctcttttatgtagttctctattctctttacctgagcctgcaaaagccaaaaataaaatcaaaacrataacaaaaaagtatatggaaaagaaagggagaaagtttagctggaacaataaagcagaagaaagtcttttccttcaatgcaggtctctggggctacagattgggtctagaatgagaacaaatggtataggggaaaattagatttgacataagaatgaagttttcaactgacttagatagaaatagagtttttaatgcctgaaaatgactgaaaagatagaagatatgcccaagattgtcaagaggttaaaaaaaaaaaggaactacaagagagtctgtttgaaagcagtaactcgagaaaaaaaattctcctctgtatccccaccaaatttaaactgtgaaagatagcaactttttacaaattatacaaaatatgttaaaagcattgcttcagaataaatatgctgcaaaatcaaaaatcatgtggcaaaagaaataaattaaaaacaaaaa

SEQ ID NO: 617812 - DNA, 586 bp, Homo sapiens
aagggcatgtgcttattctttcagcaccaccattttttgacaatttctggtaaaaaaaaaatttcatttcttgtttaaatgtcagaaatgctcagttttcattctttaatttctttggtatatggattttaagaatcagaaatgtatattgcttatttgcctgtccacatgcttatatagcacttggatttgctcatttagaatttgattacctgaaaatctccatttgtgtacttttgttaatgtgtatacaaattttcatcaccactcctgagtcactggccttgaatggtgtgctactttaaatcagatgactcaaaatgtctcttctcactctcagaacaggtatttgtgacaagtatttgttgatttgattggttgtttttgttcttggtccttttgatgcaatgcaatatattaacaaaattctaatgttcagcctcctatgaaggacatgcctgattactgcatrtaattattaataaactaaaataatttgaaaataaattttaaaaattgttaataaaattgtaataaaaacttaataaatatttgatttctcggcattttactttaaaagttttca

SEQ ID NO: 617813 - DNA, 631 bp, Homo sapiens
aagacttacgcttcagggaatcaatgagtacttgaaatttaatgtaaattttagtgtgactgcatatttttcctgcaagaatatttatatatttttcataaggttctcaaagaaatgtatgaatcaaaagatgattaagaatctgtcatccataatttttgttattagttctgtaagtcagattttgtgacagttttataaaatgaaaagtataaaaaggtactaaaaatattattgggagatttgggagatactgccaattttcctttaaattaataatattaattaattaataatatttttcaaagtgctagttgatctagcatcagtagccaccagtcggaatttatattaaaaggaggaaaaaaaggtttgtaattgaggaattcttcaatttttttttcttttttttttttttttttttttttttttttgagatggagtctcactctgtcacccaggctggagtgcagtggcacgatttcggctcactgcaacctccacctccctggttcaagcaattctcctgcctcatcctcctgagtagctaggattacaggyacgtgccaccatgcccgactaatttttgtatttttagtagacacagggtttcaccatgctggccaggccg

SEQ ID NO: 617814 - DNA, 519 bp, Homo sapiens
gttctaaatattacttagacctgaggtcaaaattaggtgatggtgaaaatgtgcagcatcactccaagcattctctaattcccctgattaggagcaggattatttccaaagtacaatgaaaagttgagactgcagatgtaatgacacagcaacacttgtggatagtagacaaattctaggtcaggggaacaggcagtttataaataacctaattttttcatcataatacttcatttgcttaatttcccaaagccagttagctgagacattttatctaatagatttagagacctaatccatagaaaatattagcgagattggctttgccacccagcctctttcgtttttttcaggaaaaacaaacgaaaaaaggatttccattatttcccataaacacattccttttgccagtttatttttattttggctgctgtgttaaactctagaaytaaaatggggcagaatctcttttctaggattgcaaatgaacattgatacattaaaaaatacttcctaaaa

SEQ ID NO: 617815 - DNA, 566 bp, Homo sapiens
atggagaatgaggaaggtttcactaaatcaaaagatatataacaaattgagaatgttccaaaaaaagagagataagccctgaaacaaggtaaatattaaatttaaaayattgtaatatatgaataaaacattcaaagcaagtgtcacaaattaagtttaatagaaaaacataaaacataattataatgtataataataataataatatcagtatattgaatgaggtagacctctaccagttgcttttggatgcaaacttaactaacaataaaataatattgataataataattatttttattggctcacagaactgctctattcagaaggtaacactaattaagacactaaaagaaagtaactaaggtccacggtctttagcctcagtctttcctttctacatatttttgcttctctttgcatgttgacctcattgtgtcctaatgaaaattgctttattcatttaaccatgaaatacagcagttacaccttatgttattcataaactttgtggaaaaaatgtttatttctcatccaaaagccatgtgctccccaacatcctcagc

SEQ ID NO: 617816 - DNA, 564 bp, Homo sapiens
ttgattgccaatgtacaatctaaacttatctctctaaatgaactgtctttcctgatggttctagttaacaaggcacaatgaagacacacactattttagcttgaataatgtgttaacctagaagaaatcattgtagcgagagagatttggtattcygataggccagatatttgatatgtgcccactcttgggaagatagaggtgatctcttaataaagcctgaaatgcggtcctccgaggagagaaaggtcttgttattagacggaaaattagtaatggttgataataatagtaaatgactactttatgtcccctaaaatgttttcctcactgttatgggatgaattgtattcccccaaaattcatattaaatctctaagccccagtacctcagaatgtgactatatttggaaatagggtgtataaagtgtaattaagttaaaacgaggctgattagagtgggccctaatccaatctaaggacagctgtccttataagaaaagaaaatttgaatacacaaagacatgcaggggttttcttacacagatgaaaagtcatgtgaag

SEQ ID NO: 617817 - DNA, 564 bp, Homo sapiens
ttgattgccaatgtacaatctaaacttatctctctaaatgaactgtctttcctgatggttctagttaacaaggcacaatgaagacacacactattttagcttgaataatgtgttaacctagaagaaatcattgtagcgagagagatttggtattccgataggccagatatttgatatgtgcccactcttgggaagatagaggtgatctcttaataaagcctgaaatgcggtcctccgaggagagaaaggtcttgttattagayggaaaattagtaatggttgataataatagtaaatgactactttatgtcccctaaaatgttttcctcactgttatgggatgaattgtattcccccaaaattcatattaaatctctaagccccagtacctcagaatgtgactatatttggaaatagggtgtataaagtgtaattaagttaaaacgaggctgattagagtgggccctaatccaatctaaggacagctgtccttataagaaaagaaaatttgaatacacaaagacatgcaggggttttcttacacagatgaaaagtcatgtgaag

SEQ ID NO: 617818 - DNA, 564 bp, Homo sapiens
ttgattgccaatgtacaatctaaacttatctctctaaatgaactgtctttcctgatggttctagttaacaaggcacaatgaagacacacactattttagcttgaataatgtgttaacctagaagaaatcattgtagcgagagagatttggtattccgataggccagatatttgatatgtgcccactcttgggaagatagaggtgatctcttaataaagcctgaaatgcggtcctccgaggagagaaaggtcttgttattagacggaaaattagtaatggttgataataatagtaaatgactactttatgtcccctaaaatgttttcctcactgttatgggatgaattgtattcccccaaaattcatattaaatctctaagccccagtacctcagaatgtgactatatttggaaatagggtgtataaagtgtaattaagttaaaacgaggctgattagagtgggccctaatccaatctaaggacagctgtccttwtaagaaaagaaaatttgaatacacaaagacatgcaggggttttcttacacagatgaaaagtcatgtgaag

SEQ ID NO: 617819 - DNA, 633 bp, Homo sapiens
tgactatcaacctttagaaagtgtttcagacacagaacagaataaaaaacatgatgaacactataaaattaaacagtgtaattcacatacatagtattttacacaaatagtataaatatattaatttcacaaataatgatttcacaacaratatgttatttttgttttcatcccagaaaatgtagaaagtacaaaatgtttaaagatagtgaatattacaaatgatatttgtgaagactctgcattctattatgttcccatgaaaagtgaattttgttctatcagacaattaacttggctgaacccaaactccaatctatacctcctttttgttaggcagcagctgaaacatactccatttttttttttcagtttctagttgctacgtttacctaaatctcctgtgttctcccaagcatttatacattgacagataaccacatagttgagcacatttcaaatgtagatttgggggcctgtcatttctgtgacttcatcctttccagaatttccctctgagctttttgtctcctcttttaggcacaaactctatcctctgacctcaagccaagtatgcatgtgtaaatgtgtatatatgtgtatcaaagtgatgggccagcaactgcaggaaac

SEQ ID NO: 617820 - DNA, 545 bp, Homo sapiens
cagaacagaataaaaaacatgatgaacactataaaattaaacagtgtaattcacatacatagtattttacacaaatagtataaatatattaatttcacaaataatgatttcacaacaaatatgttatttttgttttcatcccagaaaatgtagaaagtacaaaatgtttaaagatagtgaatattacaaatgatatttgtgaagactctgcattctattatgttcccatgaaaagtgaattttgttctatcagacaattaacttggctgaacccaaactccaatctatrcctcctttttgttaggcagcagctgaaacatactccatttttttttttcagtttctagttgctacgtttacctaaatctcctgtgttctcccaagcatttatacattgacagataaccacatagttgagcacatttcaaatgtagatttgggggcctgtcatttctgtgacttcatcctttccagaatttccctctgagctttttgtctcctcttttaggcacaaactctatcctctgacctcaagccaagtatgc

SEQ ID NO: 617821 - DNA, 601 bp, Homo sapiens
aataatgatttcacaacaaatatgttatttttgttttcatcccagaaaatgtagaaagtacaaaatgtttaaagatagtgaatattacaaatgatatttgtgaagactctgcattctattatgttcccatgaaaagtgaattttgttctatcagacaattaacttggctgaacccaaactccaatctatacctcctttttgttaggcagcagctgaaacatactccatttttttttttcagtttctagttgctacrtttacctaaatctcctgtgttctcccaagcatttatacattgacagataaccacatagttgagcacatttcaaatgtagatttgggggcctgtcatttctgtgacttcatcctttccagaatttccctctgagctttttgtctcctcttttaggcacaaactctatcctctgacctcaagccaagtatgcatgtgtaaatgtgtatatatgtgtatcaaagtgatgggccagcaactgcaggaaacctcatccaattatccagctttggaagagcaactctggatgccacctttcatcttttactttcaaattttctaaccctaagagtcagaaacaattaatat

SEQ ID NO: 617822 - DNA, 601 bp, Homo sapiens
ggtaggatttggaaggaaaatttctgagaaaaagaatcttattattctaaaactctatatctaaacatagaaatgtatttaaggaaaaaaaggcaaggctcaagttagcttaaaacaaatgttcacaaaatactattaatagatagatagatgaagtgtgacaatgtaaccaagtatgtggttgataatgtatgcaaaccacattaagttcaatatggataagattcaaaaacagagcagagaacttgttcaatttgtcattgtatcagtgtaatcagaaaacaattggtacatayttaaatcatgataattcaggaggatttaataaagggattaattaaaaagctgtaaggaagatgaagggtaagctcaaggtatactgaagcctctaatgcaattagggacagtgtggttgttaccactcctaggtctaagagatacggaaaggaggctcttagaatagtctcagagaaaggactgcagagggaggcaagaccaacagcctaagactaacagagacaagatcaggaaaaaaatacccagacttcacattcctttttcccttcaacctcccactctccttgctagccagacccaacta

SEQ ID NO: 617823 - DNA, 601 bp, Homo sapiens
ggtaggatttggaaggaaaatttctgagaaaaagaatcttattattctaaaactctatatctaaacatagaaatgtatttaaggaaaaaaaggcaaggctcaagttagcttaaaacaaatgttcacaaaatactattaatagatagatagatgaagtgtgacaatgtaaccaagtatgtggttgataatgtatgcaaaccacattaagttcaatatggataagattcaaaaacagagcagagaacttgttcaatttgtcattgtatcagtgtaatcagaaaacaattggtacatacttaaatcatgataattcaggaggatttaataaagggattaattaaaaagctgtaaggaagatgaagggtaagctcaaggtatactgaagcctctaatgcaattagggacagtgtggttgttaccactcctaggtctaagagatayggaaaggaggctcttagaatagtctcagagaaaggactgcagagggaggcaagaccaacagcctaagactaacagagacaagatcaggaaaaaaatacccagacttcacattcctttttcccttcaacctcccactctccttgctagccagacccaacta

SEQ ID NO: 617824 - DNA, 601 bp, Homo sapiens
ggtaggatttggaaggaaaatttctgagaaaaagaatcttattattctaaaactctatatctaaacatagaaatgtatttaaggaaaaaaaggcaaggctcaagttagcttaaaacaaatgttcacaaaatactattaatagatagatagatgaagtgtgacaatgtaaccaagtatgtggttgataatgtatgcaaaccacattaagttcaatatggataagattcaaaaacagagcagagaacttgttcaatttgtcattgtatcagtgtaatcagaaaacaattggtacatacttaaatcatgataattcaggaggatttaataaagggattaattaaaaagctgtaaggaagatgaagggtaagctcaaggtatactgaagcctctaatgcaattagggacagtgtggttgttaccactcctaggtctaagagatacggaaaggaggctcttagaatagtctcagagaaaggactgcagagggaggcaagaccaacagcctaagactaacagagacaagatcaggaamaaaatacccagacttcacattcctttttcccttcaacctcccactctccttgctagccagacccaacta

SEQ ID NO: 617825 - DNA, 597 bp, Homo sapiens
tcatgaaaaatcctgtatggcattaatattaaacctttaaactttatagattgtttaccattatacatatatttaaaattatattcaacagtattacattctataataaaaacaccttcttcataacatgattaaatgaaacaattgggataatctcagttcaatcatattcaaataggacaaattctaaaatatctctataatttaacaaatctaatgtttagtttttaaattaatctatgttatgcagttcaatgtcttaaatttattcattaaaatgatggcaacatttaaaaatatttaacactgcaagacatgttatcaaaccattccagatggaaaataataataattttatgtactacaaatgggaaaatgctaataaaagcaattgaatttctatgagccaaatcatcaataaaatcctgcaagcgagttatatttgaatatattattttaattatgctgattatctgagatttgtagctattccctaacaaaaagaacaatatgtatgacatccttcaataattataaaaatactactaattatygctaacgtttattaaatggttcctgttgctaggcctaatacta

SEQ ID NO: 617826 - DNA, 618 bp, Homo sapiens
agatcttaactaaccacagatatctagcttatgaagtagatggagaaggtgagatggaaattttaaaggactttcagagtgcatrgaattcccatggtctaagatgaggaatgcttttcttctaccttaggaggggaaaattgatgttaaaaaatcacactcagaatttcacatgtttaccctggagcttcggatagaggtaacatcttaaggaattgatttctcatttgagtctgagaaagaatagtcctggaattgacttagatggtgcccattataatttcttggagggatgaagctgccatcagcagaaagaagctagaggtgaactgccaatgcatagatggcaagaaaactgcttgagctaccaattggaggagatacatttacttcatagtgagaggaagagaaggaggttgataacgaaaccatcagccaaaatagagtaaactttcaacatctgccaaacccgaagaagtcaatgcttgaacaccccaacaaaaccatgaggtaagatcctacccactgatacagcctcctcttttccagttttaaccttacgagagaaaccaagatactagagacgggggaatttgaacactatatattttcagtcca

SEQ ID NO: 617827 - DNA, 549 bp, Homo sapiens
gagatcataccatacttgtctttctgcgcctggtttattttacttagcataatgtcctccaatttcaattgtgttgtcacagaagacaaaatttccttctttttagaggctgtatagtattccattcagtatacataccacattattgtcatccatctgttgatggacacttaaattgcttccatctcttggctattgttgataatgctaaaatgaacatktgaagtgaatgcagctatccttttgacataccaatttcagttcttttggatatttaccccagaagtatgtttgctggatcatatgctaattttagttttagtttttaataaatttccatactattttccaaattcactatattaatttacatttccaccaacagtgtacagatataaaagaaaatgttcaatatctctaatcatcagggaaatgtaaattaaagccacaattagatatcagccacacctgttagaatggctattaacaaaaagatgaatgatagtacatttctatataatcatagaagtcagatgtaatgggaactag

SEQ ID NO: 617828 - DNA, 613 bp, Homo sapiens
gataggaagaattaatatcacaaaaatagccatactgcccaaagtaatttatagattcaatgctatccccatcaagctaccattgacactcttcacagacttagaagaaactattttaaatttcatatggaatcaaagaagacccccctatagcctagacaatcctaagcaaaaagaacaaagctggaggcatcacactacctgacttcaaactatgctacaaggctacagtaaccaaaatttactgactcttaaggacaaaatggaatcatgtttctaagtatctcaactcagtgtccattcctaccaaacattaaacaagttgaatctgtagtgctttatggattgtatattgttttgycactatctggagcactttccttctatttaattctcacagcaaccccatgaggtagttactacgattatccccatcttatggatgagaaaattgaggctcagagaaggtaaatgccttgcccaaatcacatcactctaatttatggaaccaagatttgcatacaggtagtacaagtccagagctgtttcttaaacatgacactatattgtagcaccatcctttccctggagcttccccagccctgtggaaggc

SEQ ID NO: 617829 - DNA, 613 bp, Homo sapiens
gataggaagaattaatatcacaaaaatagccatactgcccaaagtaatttatagattcaatgctatccccatcaagctaccattgacactcttcacagacttagaagaaactattttaaatttcatatggaatcaaagaagacccccctatagcctagacaatcctaagcaaaaagaacaaagctggaggcatcacactacctgacttcaaactatgctacaaggctacagtaaccaaaatttactgactcttaaggacaaaatggaatcatgtttctaagtatctcaactcagtgtccattcctaccaaacattaaacaagttgaatctgtagtgctttatggattgtatattgttttgtcactatctggagcactttccttctatttaattctcacagcaaccccatgaggtagttactacrattatccccatcttatggatgagaaaattgaggctcagagaaggtaaatgccttgcccaaatcacatcactctaatttatggaaccaagatttgcatacaggtagtacaagtccagagctgtttcttaaacatgacactatattgtagcaccatcctttccctggagcttccccagccctgtggaaggc

SEQ ID NO: 617830 - DNA, 615 bp, Homo sapiens
gatttcaccatgttggccaggctggtcttgaactcctgacttcagatgacccamccgcctcggcctcccaaagtgctggaattacaggcatgagccactgtgccaggccgatctactaatctgtctatatagattgttttgcagagattgcagccaactactgcctgcagactgtgatagactgaagttcacgttgagcacagcagatgcaaagggtggactgtgtcagacttttttttacaaactgttttatttcctcttggtgtacttttttgccccagctgttgtggtggcaacctacagtcagttatatcctgacagaaacttatctcagctacgttatctcttgctttgcattgcgggttttctctgcccccataaaatgctttggaagcccattcaaccattgtcgtgcatacatgttagtcagggatctccagagaaacagaaccaatacaagatacatatacatataaaaggagatctattataagaaattggctcacaattattatggaggctgagaggtcccacaaacagccatctacaagctggaggcccaggagactaatagtgtagttccacccaaagtccaaagacctgagaaccaggaaa

SEQ ID NO: 617831 - DNA, 562 bp, Homo sapiens
cttcttttctttcttttttttcttcaattatttagggctggaatatccagtactatgttgaatagaagtgggtgagwgttcctgatcttagaggaaagtcttccagtctttcaccaatgagtatgacactatatgtgggatgataaggatgtattagaaacaagtgcatttcaaaaaactgttgatacggtttggctgtgtccccactcaaaactcatcttgcactgaagtttccataacccccatacgtcatgggagggatctggtgggaggtaattgaatcatggcagtggttacccccatgctgttctcgtgatagtgagtgagttctcatgagatctgatggtttataaggagcttttccccctttgcacagcacttctctctgctgccatgtgaagaaggatatgtttgcttccctttccatcatgattgtccgtttcctgaggcctcttcagccatgcagaactgtgagtcaattaaacctgtttttttaataaattacccagtctcaggtatgttttcatagaagcatgaacaaacaaatacaactgtttttagt

SEQ ID NO: 617832 - DNA, 562 bp, Homo sapiens
cttcttttctttcttttttttcttcaattatttagggctggaatatccagtactatgttgaatagaagtgggtgagtgttcctgatcttagaggaaagtcttccagtctttcaccawtgagtatgacactatatgtgggatgataaggatgtattagaaacaagtgcatttcaaaaaactgttgatacggtttggctgtgtccccactcaaaactcatcttgcactgaagtttccataacccccatacgtcatgggagggatctggtgggaggtaattgaatcatggcagtggttacccccatgctgttctcgtgatagtgagtgagttctcatgagatctgatggtttataaggagcttttccccctttgcacagcacttctctctgctgccatgtgaagaaggatatgtttgcttccctttccatcatgattgtccgtttcctgaggcctcttcagccatgcagaactgtgagtcaattaaacctgtttttttaataaattacccagtctcaggtatgttttcatagaagcatgaacaaacaaatacaactgtttttagt

SEQ ID NO: 617833 - DNA, 562 bp, Homo sapiens
cttcttttctttcttttttttcttcaattatttagggctggaatatccagtactatgttgaatagaagtgggtgagtgttcctgatcttagaggaaagtcttccagtctttcaccaatgagtatgacactatatgtgggatgataaggatgtattagaaacaagtgcatttcaaaaaactgttgatacggtttggctgtgtccccactcaaaactcatcttgcactgaagtttccataacccccataygtcatgggagggatctggtgggaggtaattgaatcatggcagtggttacccccatgctgttctcgtgatagtgagtgagttctcatgagatctgatggtttataaggagcttttccccctttgcacagcacttctctctgctgccatgtgaagaaggatatgtttgcttccctttccatcatgattgtccgtttcctgaggcctcttcagccatgcagaactgtgagtcaattaaacctgtttttttaataaattacccagtctcaggtatgttttcatagaagcatgaacaaacaaatacaactgtttttagt

SEQ ID NO: 617834 - DNA, 621 bp, Homo sapiens
gggctttccaattagacatatcaccccttcccattatgaagtgtatgaccaactatgtgtgagttacttgaacttcatttatttcatctgtgaaatggagataatgatatctactctcttggtttattgtaaagattaaataagataatatatgtagrctgtttagctccaagctggtgcattgttggccttctataatgatggtcattattctgccacacatgttcacagggcagccctctgtttccatttccatcctccatgattcattgatggtgacaggagccatttgttcccacaatctggtctccggataggataaaatcgtaatttactaccacccagacagcattatctttactgcatgcttcttaatgattaacaatcaattacaatatcatcctttaaatccaattcatagcactgtcaaatgattatgtactataattaaattaatgatattgaactttaatttgagttgcatggctgcttttatttgatttctgctacactcactgagtgaacattgggttcttgtgtaaagttatcatatttattttacagccacaaaagagcaaacccttaatataatttaaaaagataaccacaaataggaatatt

SEQ ID NO: 617835 - DNA, 567 bp, Homo sapiens
attactatgattctgtcttctggcattcattgttgctgctgagaaatcaacagtcagtgtgtttgctgttgtttacaggtgatctttttttattttaaggtgttttgacattgctttttctttggtttgcttcaaattcagtatgatgtatatttgtgcgtatctttttatttttaatcctggttgcattcataggaattcctgtttcagaatgagaatttwaaaataaacctggaaaactgagtcatttctttctttgaatattgcctatttcccacgtccctgtactttctaatatgtcctaatatgtccttatggaattatactttatacattttagacatttacactctattctttaaatttcttcactttcttccttaaattctgtctcttggtttctctggctagcattccatttaattttttttaggcagagtctcgctctgtcacccaagttggtgtgcagtggtgtgatctcagctcactgcaactttcacctccagggttcaagcgattctcatgccacagcctctcaagaagctgggattacaggcatgagccacc

SEQ ID NO: 617836 - DNA, 567 bp, Homo sapiens
attactatgattctgtcttctggcattcattgttgctgctgagaaatcaacagtcagtgtgtttgctgttgtttacaggtgatctttttttattttaaggtgttttgacattgctttttctttggtttgcttcaaattcagtatgatgtatatttgtgcgtatctttttatttttaatcctggttgcattcataggaattcctgtttcagaatgagaattttaaaataaacctggaaaactgagtcatttctttctttgaatattgcctatttcccacgtccctgtactttctaatatgtcctaatatgtccttatggaattatactttatacattttagacatttacactctattctttaaatttcttcactttcttccttaaattctgtctcttggtttctctggctagcattccatttaattttttttaggcagagtctcrctctgtcacccaagttggtgtgcagtggtgtgatctcagctcactgcaactttcacctccagggttcaagcgattctcatgccacagcctctcaagaagctgggattacaggcatgagccacc

SEQ ID NO: 617837 - DNA, 446 bp, Homo sapiens
ttttatgctacagttaaatttttccttaatagtacttataaactttgtttatactgggtccttattattattattattattattactttctaagaaaaatgttctgaaacgttactggatgtctctagccatttctctccataaagcacatgaaggcataccaattaaatttgttcaaacaagtcatcatagtttataggagaaaattaacataagttttaatcaaattgaaaaaatggagaatttcgcttgtagcttatgacttagtcaaaagcttttataactgttgttgttattgtgtttgtgtgattttatatttttcarttgatagaaaaaggcaccattgactgatgtctatctttgataccaggtatgtgagctaattgccaaattactgatgtctatctttgattccaggtatgtgagctaattaccaaattaaactg

SEQ ID NO: 617838 - DNA, 538 bp, Homo sapiens
tctaaactttatttttgactgtaggaaatgaaaattatatacatgacgtattatcatatgaarcatgctcattgaaaagtataagatacccttaatgacagagatcatatatcatttcaatcctttaatgctatgtaattttacttaaaaataaaataatacgtggataaattaaattaataaaaataaattaaaataatttaccatatttctgaaggtaagaaaatgtttttctaaggttaggaaacggaggaggtggtctatgtacaagggaagggaatgggaagaaaacattctatttgcaaataattgagacaatcatcatctcagttcgtgagttgttacctcctaacttatcttccattttctactcatgcctcctcaatctattctccagagagaagccagagtgatcttctaaaagcacaaccagataatagcacttaattgttgaaaagtcccctaatgtcatttcgttatgcttagaataaaataaaaacgtcttaccctagttaaaatctacatgtgaactgacttc

SEQ ID NO: 617839 - DNA, 603 bp, Homo sapiens
gaaacactgtaggtatgcttaatatgggtatggctattgtaggttcgatgttacactaagggaaaggaagcagagatctaggactggttagctacatgaatagaatagataaagggaagtcacagaggaaaattggggagggaaaaggaatgaatttgaagattgatacgawgtatgtaccactcagagaaaagggagtcagaattattgaatgttatgcatatttaatgctattggcaaaattgccatttttttagatgaattaatcaatgttgattttagcgctaataccattaaatgttggatttctttatctccccttctgattccatggtcaccaagcaaccttctcattgtgatctggtgttctttacaagtctaactacagagaatgaatggctgatcctacagacttcaacaattttctgtcctcagacagtgatttatcataatgaattaataaaatgacttctgactttgatgtggcttctcttgtagttcattttaagaacagaatgagctgatcatgccaatatgaatattataaaccaagtcaatttcttattataaattaataaattgatattctagggtctactcaga

SEQ ID NO: 617840 - DNA, 566 bp, Homo sapiens
gcctatgctttagcttctaaaacaatttactattctatttccatgatgggtactttttacacatttacaaccaagggccttcttagcctgtggcttcaagaaaggaattattttcgtttgagacccgtgtttttaatgcaaatgactattgttaggagtggtcttgaaaatcctaaaaaagcattttaactattttcgtaatagaaaaattgtaaaaaaaatagaactatcacttgcaartgagtcatatataatgttcttgagtgatggtaagttttagaaaatcagattatctgaagtatttacgttcatttgtgcattcacatggaggaacagtgatagtgtttaatattagtggagggtaacatggaatgagacagttgactaaaccgttaacttcttgaaggtagaggctgtctctagttttttattgaatccaagacatcaagcacaagctctgtcaaataaacacatttactcatttaagaaatgaatgagtcctgtataagaattttgactttatcttgtaggcaccaaagaaccaactgaggttcaaaacaaaatgc

SEQ ID NO: 617841 - DNA, 589 bp, Homo sapiens
aatgactagtaatcagataagggtgtacagtcaattgattaaaaaaacacaataaatgaaaatcaaagacctcaatctaatacaaagaaataagcaagcaacgtaaaaagaatgaggtggaaaaagaactcccatttcatacacagagttggctaagaatttctgaaatggaaagctttttaagttgttgacgtaatttttcagttttagaaaagaaaagtttgtgcacatgaatattaggctattttgaaatattttaaattgcttcatgttttctaagtatgtgtatatgtcttcataaatattccaacaagtattttagttaaattaaagactgtagattaaaaggagagtaaagaggtatagattcatagactgtttacagtcaccattttctctttcttccttcatccctttattaaaattttaatgaattatgtgcctgaaaaacatttgaattttaaatacaaaaaaagtgaagaaaacaaaatatttgtaagcattaactaagtcagagctttgagttctcagacctagcatcagtgaatstactttgaaatgggggcagggaggtcaatgagtcagtgaa

SEQ ID NO: 617842 - DNA, 422 bp, Homo sapiens
gaattcaacatagattagccactttaaaaaggtaataatgtgaatctggctaataacaatgacacttattgttactaagcagaagcttgctagggtgactgtttagaagaccttggcattggattaagtcacgatgccctctaatagaccgttgtggcaactgctactttccctctgtgatgcctttcacaactcaaatgagacaatcatttgcataataaacttctcagyatcttctagactgtgattctgagtacctatagaactctgtgagaacaaggacaggtctgtcttgtttaccattctatctattgccctgcaacccaccctcatcaagtaatatatgtcacaaaacaagaattggtgcttcactagatacttccatcctttaggatgttggttttgtgattaggtactgattt

SEQ ID NO: 617843 - DNA, 461 bp, Homo sapiens
ccataaagcaaaagaacagaaactgggtaaaaaagataccaggaacgctgaagagtctacagcagtttcatggatacagtggacaaagacaaaaggcaatgtattactcatagcaatagaagtagtcagagtgttgtcattttcttgcatcagttccttaagacccagttactacaaggtgataagatgagggctaggtgacaactgtacatagtgggtttatgtcatagttgaagcatcctgagctttggaaaactcttttwaaaaaaaatatataatggcagcaaacaaacctgccctttgccatagagagggaaattatctttattaaactggattgtaaacaaatctgccctttactccatagggagaactacttctttcttccaagactgaaaagataggaacaaaagctgtcagtgtctctgcttacaaagtgtgcagaaatgtgaaagacccat

SEQ ID NO: 617844 - DNA, 567 bp, Homo sapiens
ctctcatcactgccaaactctcagctgtttattgtgtaagtgctgctaataatgagtgtaatatggccaggagaataaaagtgcttaagccaatgttaaaatgtttaaaccatggaaaacagataacttataaagctgataatgttagaaagaaaggaagaatgaatgaagtgtaattcattgaatgtggagaaagaaagaaaagagagaaagagaaggacagaaagagaagaagaaaaggaagagtgggagagagaaaaaattgggggggagagaaaaagagagaatagaatgaaagagatcaactttgtaagcccttgctctctcaaagatgatctcacaatcactttcccataatcttkctgtaacaccaatcagactctatttaccaaggaacccaacttaagacagtaattcaataaaggactatgcagtcaaaaaaaaaaagtgatttgagatcacaaatcaatgaaggaagtacggtttttgttgctttgtttaatctgctttttcatttgtttactcagtagactcactagaactaatcaagtaacatggtctttcttt

SEQ ID NO: 617845 - DNA, 630 bp, Homo sapiens
tgattgaacaaactatttacctaagtcaaccttaccatttcctccctccacttcttaacagtagatttcatctaatcctcatgcaaaaaagtgggtaatatcaacatttattaataattattttattggttacaatgttctatacgttctttggtcttttgaaactgtctttagctcttactcactgtcatccacaggaattgcaccactaagttttagaaactgtagttttaactggaacatttttattccaacttcctatggtcacctgataatattaaaattctgtgaccttaaaactagaaggacttccaatagccataattagatattacattaaatcattattaatctctgcattctctataaaatgtttcattttcatacaattgaaacatagattttcctttctgtaaattacagaattttctacctgtatcatgcacaggtgatgccttattatctatgatctatatctgagcrtctttgtacctgtcccccttacacagctacacaaaattgaaaacctaggcaacttcttattaactttctcctctgacctgttaacatcatcccttctaatcttagcagcactggtggtgaatatgttttcattctttcctccatttt

SEQ ID NO: 617846 - DNA, 466 bp, Homo sapiens
ggaactaaaatacatatgaagaaataatggctgaaaatttctcaaagtggtcttgagatayaaacttatagacgctttcaagaagctaaaataaatccaaacagggtaaacccaaagaaatctgtctaaatagatcacaatcaaacttctaaaagacaaacaagcaacaaaacgaaatctaataaagaggatctaggcctaaatggcttcaatgatttaatagtatcaatcatgtaaggaaaacaatatcagttgtatacaaaatccttcagaaaatagtagataggggaaagtatttcatttcctgagaccatgaaagcacagataccaaaaccagacaaagacattctaagaaaagagaacttttttttcttgcaaatttgtttgagttcattgtagattctggatattagccctctgtcagatgagtaggttgcgaaaattttctcccattttgtaggttgcc

SEQ ID NO: 617847 - DNA, 466 bp, Homo sapiens
ggaactaaaatacatatgaagaaataatggctgaaaatttctcaaagtggtcttgagatacaaacttatagacgckttcaagaagctaaaataaatccaaacagggtaaacccaaagaaatctgtctaaatagatcacaatcaaacttctaaaagacaaacaagcaacaaaacgaaatctaataaagaggatctaggcctaaatggcttcaatgatttaatagtatcaatcatgtaaggaaaacaatatcagttgtatacaaaatccttcagaaaatagtagataggggaaagtatttcatttcctgagaccatgaaagcacagataccaaaaccagacaaagacattctaagaaaagagaacttttttttcttgcaaatttgtttgagttcattgtagattctggatattagccctctgtcagatgagtaggttgcgaaaattttctcccattttgtaggttgcc

SEQ ID NO: 617848 - DNA, 567 bp, Homo sapiens
aatgaacaatcaaattgaaataattaaaaatagtaccaattgtaataatataaaatataaaatatttagaaattaatctaagcaaccctgtacaagactgattaattgatctctttataagtataaaaccaattgatctctttataactataaaaccaattgatctctttataactataaaaccaatgaataaatatgacacatatgtgggtagtttatacatacacacatgcttgtgcatgcagacacacacacacacacacacacatattttcatataagactcaataattttcagatactaagtttccttaaacttcaackgagctttgaaataggttcaacaaaattctcttcaaaaccacagcagaacttttggcagaaatagacaatgaattttgtagagataaaatctttagtagaaatagactgtaaattatataaagctaataggatagacaaacgcaattttgaaaaagaacaaaattcaacactcacactgatttctagactgaagtaatcagtaatcatgtttgatattgagatatagccaatggttttacattt

SEQ ID NO: 617849 - DNA, 567 bp, Homo sapiens
aatgaacaatcaaattgaaataattaaaaatagtaccaattgtaataatataaaatataaaatatttagaaattaatctaagcaaccctgtacaagactgattaattgatctctttataagtataaaaccaattgatctctttataactataaaaccaattgatctctttataactataaaaccaatgaataaatatgacacatatgtgggtagtttatacatacacacatgcttgtgcatgcagacacacacacacacacacacacatattttcatataagactcaataattttcagatactaagtttccttaaacttcaactgagctttgaaataggttcaacaaaattctcttcaaaaccacagcagaacttttggcagaaatagacaatgaattttgtagagataaaatctttagtagaaatagactgtaaattatataaagctaataggatagacaaacgcaattttgaaaaagaacaaaattcarcactcacactgatttctagactgaagtaatcagtaatcatgtttgatattgagatatagccaatggttttacattt

SEQ ID NO: 617850 - DNA, 597 bp, Homo sapiens
tggtgtgctgcactcattaactcgtcatttacattaggtatatctcctaatgctatccctcccccctccccccaccccatgacaggccccggtatgtgatgttccccttctttctcagccttttggctaagatctagtgtagtatctgttcttatcagtttaatatttgtctttttcttattgtttataggagtgcyctgcatattctggatgtgatccctttgtcagttatgtgtgtatatatattttcttccactctaaaacttgcctcttcacttccttaatgatgtcttttgataaataaaaattattaatttgaatgcggtctaatttatcaatctcttcctttatagctactggtttttgtaatctgtttaaaaaatatttccctactcaaagttataataatttattttattttttaatatttatgtttaaagctacattccttctgaaactgatttttgtgggtagtttagggtatgtttcaagactttctgtttacacatggctatctaattgatctgtcagcattaatttcttaattatatttttaatttttttgtattttttgtagagatggggtcttgctatgtt

SEQ ID NO: 617851 - DNA, 597 bp, Homo sapiens
tggtgtgctgcactcattaactcgtcatttacattaggtatatctcctaatgctatccctcccccctccccccaccccatgacaggccccggtatgtgatgttccccttctttctcagccttttggctaagatctagtgtagtatctgttcttatcagtttaatatttgtctttttcttattgtttataggagtgctctgcatattctggatgtgatccctttgtcagttatgtgtgtatatatattttcttccactctaaaacttgcctcttcacttycttaatgatgtcttttgataaataaaaattattaatttgaatgcggtctaatttatcaatctcttcctttatagctactggtttttgtaatctgtttaaaaaatatttccctactcaaagttataataatttattttattttttaatatttatgtttaaagctacattccttctgaaactgatttttgtgggtagtttagggtatgtttcaagactttctgtttacacatggctatctaattgatctgtcagcattaatttcttaattatatttttaatttttttgtattttttgtagagatggggtcttgctatgtt

SEQ ID NO: 617852 - DNA, 597 bp, Homo sapiens
tggtgtgctgcactcattaactcgtcatttacattaggtatatctcctaatgctatccctcccccctccccccaccccatgacaggccccggtatgtgatgttccccttctttctcagccttttggctaagatctagtgtagtatctgttcttatcagtttaatatttgtctttttcttattgtttataggagtgctctgcatattctggatgtgatccctttgtcagttatgtgtgtatatatattttcttccactctaaaacttgcctcttcacttccttaatgatgtcttttgataaataaaaattattaatttgaatgcggtctaatttatcaatctcttcctttatagctactggtttttgtaatctgtttaaaaaatatttccctactcaaagttataataatttattttattttttaatatttatgtttaaagctacattccttctgaaaytgatttttgtgggtagtttagggtatgtttcaagactttctgtttacacatggctatctaattgatctgtcagcattaatttcttaattatatttttaatttttttgtattttttgtagagatggggtcttgctatgtt

SEQ ID NO: 617853 - DNA, 564 bp, Homo sapiens
agcaagagctctcttaaaccctctcattttaaaagttgaggaacactaatttcacataaaaataataaataaaaaakattgaggtcaaagagataaagaaacagaataagactattcagaaaatgtctgagtcccagaaagacagaaggaaaacattccttaatatttcaaaatgagcaaaaagacatcaaaaaatgataaaatatataaaaagaaaatatgcatctgaaatagaaaatatcagaaaggtgacaaaactcaataaagaattagaaatatagacaaatcatttcagaaatgaagactaagttagaaggaacacaaaagaaaataaacataatagataatgccttaagacaaatagaacactaaaaagttaaaattttaaaatgaagagaaagataagttggattaggcagaaagtaacaaatacaaaagataggtgaagaaaatgcaattaatgaataatagatattcctgcagaacaaattaaagcaagaaaacagaacaagcattgttttcctgaaataaagagatttaaaactacctatacatttgtaaggt

SEQ ID NO: 617854 - DNA, 564 bp, Homo sapiens
agcaagagctctcttaaaccctctcattttaaaagttgaggaacactaatttcacataaaaataataaataaaaaatattgaggtcaaagagataaagaaacagaataagactattcagaaaatgtctgagtcccagaaagacagaaggaaaacattccttaatatttcaaaatgagcaaaaagacatcaaaaaatgataaaatatataaaaagaaaatatgcatctgaaatagaaaatatcagaaaggtgacaaaactcaataaagaattagaaatatagacaaatcatttcagaaatgaagactaagttagaaggaacacaaaagaaaataaacataatagataatgccttaagasaaatagaacactaaaaagttaaaattttaaaatgaagagaaagataagttggattaggcagaaagtaacaaatacaaaagataggtgaagaaaatgcaattaatgaataatagatattcctgcagaacaaattaaagcaagaaaacagaacaagcattgttttcctgaaataaagagatttaaaactacctatacatttgtaaggt

SEQ ID NO: 617855 - DNA, 564 bp, Homo sapiens
agcaagagctctcttaaaccctctcattttaaaagttgaggaacactaatttcacataaaaataataaataaaaaatattgaggtcaaagagataaagaaacagaataagactattcagaaaatgtctgagtcccagaaagacagaaggaaaacattccttaatatttcaaaatgagcaaaaagacatcaaaaaatgataaaatatataaaaagaaaatatgcatctgaaatagaaaatatcagaaaggtgacaaaactcaataaagaattagaaatatagacaaatcatttcagaaatgaagactaagttagaaggaacacaaaagaaaataaacataatagataatgccttaagacaaayagaacactaaaaagttaaaattttaaaatgaagagaaagataagttggattaggcagaaagtaacaaatacaaaagataggtgaagaaaatgcaattaatgaataatagatattcctgcagaacaaattaaagcaagaaaacagaacaagcattgttttcctgaaataaagagatttaaaactacctatacatttgtaaggt

SEQ ID NO: 617856 - DNA, 546 bp, Homo sapiens
tggtacctttggataatggttgaagttttaattgtgtatttttttaatttttagaaaaattaatttgaattcaccaaccatccacttaaaacccaaacacagtatattccaaaatatctgaacctctaatttatgtatgttacatcaatcctttcctttacatctttcaaagtgtgatccaagaaccacctgcattaaaatcacctggaatatttgtttataatgtgtgtccatgggtcccaattccaaagattgtgtttcagagggcctgcaatagaagctaggactctatttgtttccttgattcttaggggcagtaaagtttgtcagtcacatagttttcctttytcgctagttaatgagttatgtgttggctgaatgaatttcaactaaccagccttaagacttccagcagtgcagagccttggaaaaaactctagtaacatgacattttggctgctctgtggacaatgatcttactcaatttttccttcaacatttagaaaatactggatctgagtggaagagggttatttcaagcctaaa

SEQ ID NO: 617857 - DNA, 636 bp, Homo sapiens
aatgaaaataatgatattactccactatttccagagacttaaactggaaaatctttataaaatgaaatatatgaagcaattatcattttattattattgttacctaatattaaaaccacccataagaagtaatcaatcaaacaaatttggataacaggtataaagacataaagaaacatggtctacttcagattttcattgtttagctgggtgtgttaccatcccataaggaaatccaraaagagtaagagaaaaagaggacaaaaaacattagcaatgtagacagaagagatttgtctatattgttcattcaaataaacttgtttatctaaataaatttaagtcagtgcaggaaacacagtctgtaataactagtttttactaacatcaatgcttactctatgaaggcaatgtcactattttctgaaaggagattgccttctgacctcataggaaatatattgtagatccagagccagagagacagaaacaaaagcttcttgtttttcggctttagaaaaatctcttcattgtctgtatacatttatcatttttgtctgctaaattacattgatgattaacctaaaataatatctcagttaaaaatgtatgtaagtgtaatacaaataaaataat

SEQ ID NO: 617858 - DNA, 585 bp, Homo sapiens
cttccaatacaaggcagttttgtctacatggaaaatcactgtctaatgtagccaccatcatcaatgatcttagttagatcttctgaataacttgctgcagcttctacgtcagcacttgcttctcgttttgtgcttttatgttgtggagatggcttatttccttaaacctcatgaaccaactgcttctagcttcaaacttttttcttctgcagctttccccctataaaccaaaagtatctgagacaggtctcaatcaatttagtggtttattttgccaggattaaggacatgcccatgacatagccttaggaggtcctgagaatatgagccaaaggtggtcagtctacagcttggttttatatggtttakgaagacacacgacatttatcaatatgtgtaagatattggctgggcgtgatgactcacacgtgctatcccagcaatttgggaggccaaggcaagtggctcatgaggtcaagagttcaagaccaacatgaccaagatggagaaaccctgtctctactaaaaaaacaaaaaaattagccagacgtggtgatgggtgcctgtaatcccagctactcagga

SEQ ID NO: 617859 - DNA, 536 bp, Homo sapiens
gctgctgatcaccagctccaggtgttttcaatctcttgggaaactaggttcccttggtgctagctgtgaccaattatcattttagagagagagtttaacaaccatctgactatcacttgacattcctggagggggctctcctgctctgctcatgtctacttaactacccactctaacataaccactgtggttatctctttcacaggacagaaattacttgcttctctactgggtaaaaatctgcaagctaacctctgttcctacagatgagtaaaatagccaagactttcaataaagttctcataatttttttgatatccttctgtattttccttctcactatagttcattactgatcattaatctctatgctatatgagaattttctctctgtgtctatccttcttaatgctggaacaggaattcttagtatatttcccaaatgtttttagggcagtagtgataatatgagcatgrttttctttcttctctttatatatcaaactctattaaggtgatagattgtttactgatgg

SEQ ID NO: 617860 - DNA, 621 bp, Homo sapiens
taaaaccattatgccctatatttataatcatgtataatataaagtagaaagtaaaacttgatcatttaggagatctagcttggtcctggaatttaaatcagccaagtaaagtcttctaaacatgtgtatgagttgtagaaaatgaccataagaaacttacatggcaagatactagaagggttaggggaaattacagcaatactaaaggaataatattttagccaaaataaaggagcaaagtcaaaaagtggcttaaaaagtataaattattcatgatgtaggtggaatataaaagataaatagrtataaatataggacacaaaatatgtaataataacaattaaaattaaacaaaagaatgtaatgttggcattttaactatgttaacctaagactattcaccaatcagaaaataaatttaagtgtattctgatttaatgattccatatgtttatgatttcttagtggtttctttttaatattcccatccaagggtctgccagtgaacaccaaattgtccttctggctatcaattgacaaggccctcagccaatgaaacatcattagattgcactgttatatctatggaataatgttactgatccttagggcacaacattg

SEQ ID NO: 617861 - DNA, 555 bp, Homo sapiens
ctattcagccttaaaaaagaaggaagttctatcatttacaataacatggataaaattggagaacattgttstaagcaaaatcagtcaggcacataaagaccactattgcatgttctcacttatatgtggtatccaaaacaatcaaactcatagaggcagagaatggaatggtggttatagatgttggggtgtggggataatgggtttatgactgtcaaaggatatgaaattttggtgaagcaggaggaatatgttttccatttttagagttctagtgcacagcacaataaacatagtcaataacatcgcacatttcaaaattgttaagggagtaaattttaaatgttctactcacaaaaaacttaagtatttgaggtgatagatatgttaactagcttgatttcattatcccacattgtatccataaattacaacatcacattgtaccccataaatttatacaattataagttgtcaatttacaataataaaaataaatataaggcattaatatcattcatgagggttctacctccatggaccaatcactgacca

SEQ ID NO: 617862 - DNA, 555 bp, Homo sapiens
ctattcagccttaaaaaagaaggaagttctatcatttacaataacatggataaaattggagaacattgttctaagcaaaatcagtcaggcacataaagaccactattgcatgttctcacttatatgtggtatccaaaacaatcaaactcatagaggcagagaatggaatggtggttatagatgttggggtgtggggataatgggtttatgactgtcaaaggatatgaaattttggtgaagcaggaggaatatgttttccatttttagagttctagtgcacagcacaataaacatagtcaataacatcgcacatttcaaaattgttaagggagtaaattttaaatgttytactcacaaaaaacttaagtatttgaggtgatagatatgttaactagcttgatttcattatcccacattgtatccataaattacaacatcacattgtaccccataaatttatacaattataagttgtcaatttacaataataaaaataaatataaggcattaatatcattcatgagggttctacctccatggaccaatcactgacca

SEQ ID NO: 617863 - DNA, 553 bp, Homo sapiens
ttcacatgcagttcattctatttttgacatactgtaaagatctttatatctgttaactcccacccatatgcagagagaatcaaagtattgtaattattttcccaacagccagccttctaagatccacccatgttgtacacagaaatttctaagtgtacatggtacagtacaagaccaaatgaaatttgagcaatgaagagaaaaggctccgtaaacacttgattgtcataatcattgaacttgcactggtatcattccattttattcaaaatggtttcccatgttagctgtataatgtattttacatgtcaacagtgaaagtgagattagtagtgtgtgcattttgagagactgataatttaaacactttaaccatccacagaaaaaatctgaaagtaccacctctgtgagaattggtgttctcatttctttcctgttcaggcaagaggatgacagcaacaggagagctgcaatcatgctccttctttcaaagcagtctctatgctgggtcactgtctgcggtmaaaatgtgaatgtctgcttccatctgatt

SEQ ID NO: 617864 - DNA, 562 bp, Homo sapiens
ttccacattttcaggtatctttatagcagcaccccactctacaagtaccaatttactgtgttagtccattctcatgctcctaataaagacatacscaagactgggtaatttataaaggaaagaggtttaatggactcacagttcagcatggctggggaggcctcacaatcatggtggaaggtgaaggaagagcaaggcatgttttacatggtggcaggcaagacagcatgtgcaggggaactcccctttataaaaccatcagctctcatgagatgtattcactatctcgagaacagcatgggaaaaacccaccaacataattcaattacctcccactgagtccctcctgtgacacatattacaattcaaggtgagatttgggtggggacacagagccagcccatatcacttgtcaaccatcacttaggccttggggcataataggtgtacagctaagccctggagccctcagggaatcttccatggccctagtcttccctcttgctctaggatttatttgtatttcattgctttgggtatggattttcttcccaattaattg

SEQ ID NO: 617865 - DNA, 562 bp, Homo sapiens
ttccacattttcaggtatctttatagcagcaccccactctacaagtaccaatttactgtgttagtccattctcatgctcctaataaagacatacgcaagactgggtaatttataaaggaaagaggtttaatggactcacagttcagcatggctggggaggcctyacaatcatggtggaaggtgaaggaagagcaaggcatgttttacatggtggcaggcaagacagcatgtgcaggggaactcccctttataaaaccatcagctctcatgagatgtattcactatctcgagaacagcatgggaaaaacccaccaacataattcaattacctcccactgagtccctcctgtgacacatattacaattcaaggtgagatttgggtggggacacagagccagcccatatcacttgtcaaccatcacttaggccttggggcataataggtgtacagctaagccctggagccctcagggaatcttccatggccctagtcttccctcttgctctaggatttatttgtatttcattgctttgggtatggattttcttcccaattaattg

SEQ ID NO: 617866 - DNA, 533 bp, Homo sapiens
tgcccagggttaagttaggaagcagccaaactggagctgggggacctgggtkgggggagctggctccagctacttggctttttaccaccccctccctgcagaccaggctgtgtgacaggccttgggattataacgatatcagagatgcagttccttgagaagcggagaaacacacccatcaccgtggagctgggacttggagggccagttgtttgtttaagtctaaaggagcaacatagtaaagactaacctaaaactgtcaagaaagactatcaagaaaagttccctttcatagagtattaattcctggaaaatggtcccaaagagctgattgcctatggcgatgatgagaatatagagaaaggcatagagaaacaggcaggtgtggccttgggatgaaaacagaactgaaggctgtaatgtcaggttgcctggggatcacagatgaggcagctggatccccacagagaattgcacccgaaagaacctagcaagtctggagcttggtggacaatcaaataaatggtgattac

SEQ ID NO: 617867 - DNA, 533 bp, Homo sapiens
tgcccagggttaagttaggaagcagccaaactggagctgggggacctgggttgggggagctggctccagctacttggctttttaccaccccctccctgcagaccaggctgtgtgacaggccttgggattataacgatatcagagatgcagttccttgagaagcggagaaacacacccatcaccgtggagctgggacttggagggccagttgtttgtttaagtctaaaggagcaacatagtaaagactaacctaaaactgtcaagaaagactatcargaaaagttccctttcatagagtattaattcctggaaaatggtcccaaagagctgattgcctatggcgatgatgagaatatagagaaaggcatagagaaacaggcaggtgtggccttgggatgaaaacagaactgaaggctgtaatgtcaggttgcctggggatcacagatgaggcagctggatccccacagagaattgcacccgaaagaacctagcaagtctggagcttggtggacaatcaaataaatggtgattac

SEQ ID NO: 617868 - DNA, 533 bp, Homo sapiens
tgcccagggttaagttaggaagcagccaaactggagctgggggacctgggttgggggagctggctccagctacttggctttttaccaccccctccctgcagaccaggctgtgtgacaggccttgggattataacgatatcagagatgcagttccttgagaagcggagaaacacacccatcaccgtggagctgggacttggagggccagttgtttgtttaagtctaaaggagcaacatagtaaagactaacctaaaactgtcaagaaagactatcaagaaaagttccctttcatagagtattaattcctggaaaatggtcccaaagagctgattgcctatggcgatgatgwgaatatagagaaaggcatagagaaacaggcaggtgtggccttgggatgaaaacagaactgaaggctgtaatgtcaggttgcctggggatcacagatgaggcagctggatccccacagagaattgcacccgaaagaacctagcaagtctggagcttggtggacaatcaaataaatggtgattac

SEQ ID NO: 617869 - DNA, 515 bp, Homo sapiens
atctcagctcactgcaacctccacctccctggatcaagtgattctcctgactcagcttcccaagtagctgaaattacaggtgcccaccaccccacccagctaatttttgtattttagtagagatgacatttcacaatgttgaccaggctgrtctccaactctcggcctcctaggaggccctatctttagaggacatatatacagatacactatgttgaataggggattcccattagggtattgagtttgacccaattattattctcttaacggtttaaaggaaccttgactcaactctgaccccgtctctatttagctgtgaataatttttaatgagtctgtttgcctcttgctcctcagattttccaagtgtgaaacgagcaatctgaactatgagctctcacttagtttatgagtcaaaccttccatcaaaatcagtcctgaagaccaaggttttgaaggaataatgccatctttacaagtgtaacttttgctgaaaatattcaaactcttcc

SEQ ID NO: 617870 - DNA, 222 bp, Homo sapiens
cacctgagtagggtctcataggaactgctttagttaccgtccaatcctgaatctaccacactggccaggagtagagggtaagaagaaaaaatactctgattggccagcctgggttatgtgtccatcctgaaagctgaaagtaatccctatggcctgtargaagaagtgaaggtgagcatgaagtgaaaaggaacaagctgactgatcaggcctgactcataa

SEQ ID NO: 617871 - DNA, 572 bp, Homo sapiens
tgagccaccacgcccagccgagactcaggttaaatgtgacctcaatgccaaggttctgagtcactgtaggtgagaacctatgtggtgcctgcacacttcgacctcaccgagttcattgagggcctcctgtgtgccagcctttggggttacagggatccatagcccatgtcctcccgcctccagtctcctccattatgggtgggtgagggatgttaagtggaataaagatgaggtcagcacagtgcctcgcacaaggtggatgcttctgtttagcccttttacctggatcttcccactcgttcctcacaacagcttgcaaggtgagtgcattctgtcatgttatatgaaggaggaaactgaggcatagggaagtgagttactgtgaaggtcacgatgtcagagagtggattgaaattcatgcagggaaccctgtaattggtacacagccagttcactctgctgcactccgggccagccatcaagagatcaagtgtggtcatacatagtttcaagatacctacagaataacagcaatggggcstacttgtaggtggagggcaggaggagggtga

SEQ ID NO: 617872 - DNA, 537 bp, Homo sapiens
aacaaacgctgtctctcaggtttgccaacccagtgagtgtttcaacttccctggggtgaaggaaagaggctggagagaggcttccaggatcgcccacatggagctctctccaatgggcagaaatgccgggcttggagaagaagtgctcctctgtgtcatgtacacaaaatacattttggatggattaaacacctgaatataaaaagccagtagtgcaatatctttccaaagaaaacaggggagacaattcacaggacatcagataggaaaggatttttaaacaagatgaaaaaaacaaaccagaaaacagaaggttgatatgtttgaccacttttgaatagaagatttcttgtaagattatcttataaaaataatcatataagagacaccaccatgaacgtgggaatggaagatgttcataacccaaatgtcttagtgggctcaggctgccataacgaaagaccacagacctggcrgctcaaacaacagaaacttattttctcacagttctggaggctggaagtctgagattaagat

SEQ ID NO: 617873 - DNA, 578 bp, Homo sapiens
attttatttttattgtggctgttgtaaaggggttgagttcttgatttgattctctgtttggccactgttggtgtatagaagagctactgatttgtgtacattgatttttgtatccagaaactgccgaattctttgatcagttctaggagctttctggagtagtctttagggttttctaggtaaacaataaatcatcagcaaasagtttgacttcctctttaccgatttggatgccctttatttctttctcttgtctgattgctctggctaggacttccagtgctacattgaagagtagtggtgagagtgggcatccttgtcttgttttagttctcagagggatacttttaacttttccctattcagtattatgttggctgtgggtttgtcatagatcgcttttattacattgaagtatgtccctcgtatgccaattttgctgagagttttaatcataaagcgatgtggaattttgtcgagtgttttttctgcatctattgagatgatcatgtgatttgtggttttgattctgtttatgtggtgtgtcacatttattgacttgcatatgttaaaccatc

SEQ ID NO: 617874 - DNA, 462 bp, Homo sapiens
ttgctccacatcctcatcaatacttgattttatctgtctttttaactttagccatttcagtggtgtaaagtgcaattccactgtgcttttagttttcatttccttaatgtttagtgataatgaacaccttttcttgttcttatttgccataaatatctcttcttgagttaagtgtctgtttcaatctttcacttatttgttaatatttgggtttattactttttaattatwcatttctgagaaccttttatatattctggatacaagttatcaggtatatgttttacaaatattttctcccaattggtatcattttgagtttctttaacagtgcctctcagagagcaaaatactttacttttgacaaagatcttttatcacttttaattttttaaattatatatatatatatatatatatatacttttttgaaacagagtttagctcttgttgcccaggctg

SEQ ID NO: 617875 - DNA, 554 bp, Homo sapiens
cctaagaaatgagacagacagtaacacaatgatagtggggaacttcaatgctccactgaaagcactagagaggtcatcaggatagaaagtcaatgaaaaaatggatataaactattctgtaggataaatggaattagcatatatacacagaacattattcccaacaactgcwcaatatacattcttctcatcagcacatgaaacattctccaaaataggacatatgacaaaacaagtctcaataaatttaaaaaataaaaattaaatcaagtatcttctgaagccatagtgaaataaagctagaaatcaacttcaaaaggaatgctcaaaataatacaaatacatggaaattaaataatctgctcttgattttggggttaacaatgaaatcaagatagaagttaaaaaaattgtaatgaatgacaatagtgacacaacttatcaaaacctccggaatacagcaaaagcagtgctaagaggaaagttcatagcattagatggctacatcaaaaagtctgaaagagcactaatagacaacctaatgtcacacctca

SEQ ID NO: 617876 - DNA, 663 bp, Homo sapiens
tctgtggcatttaatgaagaaattgcagcacctcttgaaagaaaaagatgactaagaaacttaaaaaaataaactgaaaggatgagtgaggaattaaggaattagtaataacttattttcttttaatttcttgggagatttcaatccaagtcatatgtttttcaaatgcatacattgagtcacattggctgtagcataacaaaattgaaggtcaaattctggaaattctagtgactgctcggtaacagaagaggggtatcccccagtgcaaaaaacaagaggatttagctctcagcacaatctgtatgaaataccactcaacattctcattttatttgatctgattccatacttacagcaaaacattttattagcatctcaaaaatgctgttgttgggatggtgttacyatggatgaattacagctaccagggtaaatatacctcttatattagtgcgttagttgagtagtttataatcttggggctcttgtgaattgacctgcctgagtctgcctcttctaggctttgagacattcatcagtctgaggcacctggtcatatacaactacacagtgtttgggctacattttgtttcccattatctagttttgtgctctttactcaatcctctagataattaacagtatatgagctaagaaaat

SEQ ID NO: 617877 - DNA, 663 bp, Homo sapiens
tctgtggcatttaatgaagaaattgcagcacctcttgaaagaaaaagatgactaagaaacttaaaaaaataaactgaaaggatgagtgaggaattaaggaattagtaataacttattttcttttaatttcttgggagatttcaatccaagtcatatgtttttcaaatgcatacattgagtcacattggctgtagcataacaaaattgaaggtcaaattctggaaattctagtgactgctcggtaacagaagaggggtatcccccagtgcaaaaaacaagaggatttagctctcagcacaatctgtatgaaataccactcaacattctcattttatttgatctgattccatacttacagcaaaacattttattagcatctcaaaaatgctgttgttgggatggtgttactatggatgaattacagctaccagggtaaatatacctcttatattagtgcrttagttgagtagtttataatcttggggctcttgtgaattgacctgcctgagtctgcctcttctaggctttgagacattcatcagtctgaggcacctggtcatatacaactacacagtgtttgggctacattttgtttcccattatctagttttgtgctctttactcaatcctctagataattaacagtatatgagctaagaaaat

SEQ ID NO: 617878 - DNA, 541 bp, Homo sapiens
aaaagagtatttcctaatagaaagaaaaataatacaatatctcaaaataaagttaaaaataccattccttagaatacaccataattcaaaaaaatctggatttttcctccttggttgaataggttagttactgaaatctgcattcgttatttccaacgtcacattgcttttaggaactgaaactctgtaaccttgatgcttaataattggctggaactttattatgtccatgtctcacatactgagtctaggtgtacacacttatttccaaatatgtattccacactgtttttctcccccagaaaaggtaggaatgaagaagccaacaattaaaaaaaaatctgtgtgcatgattttttttcaaaatttcttcagtaagcccacrctaagcatattgaaataaagcaagaaagtcaatgttaaaaacaaacaaacaaacaaacaaaacaaacaacaatgcaaaaaaacacagaacaaaacaagaaccagtttgaatactgtggtgccactgcagtccacctccaaactcactagtttaatt

SEQ ID NO: 617879 - DNA, 587 bp, Homo sapiens
aattatacaaaaaataaattaggaaaatgatttcatttacaaataacatcaaaatgaataaaatccttagtaatcaatttaaccaaggaggtgaaagatgtgtacatggaaaactataaaacactgatgaaaaaaattgaaggagacactaataaatggaaagwcatcctctgttcatggactggtaaaattaacattgttaaaatgtccacactacctaaacctatctacagattcaatgcaagccctatcaaaatgtcaaaaatatttttcacagaaatagaaaaacaatcctaaaatttatatggcaccatagaagactccaaaaagctaaaataattttgagcaagaagaacaaaactggaggcatcatacttcctgatatcaaattatatcagaagactataataattaaaacagtatgctactagcataaaaacagacatgaagaccaaggaaacggaatagaaattactgaaataaactcacacatatacaattgacacttttttgacaaaactgtcaagaacacacaattaggaaaaaaatcctctcttcaataaattgtgttaggaaaactggatatc

SEQ ID NO: 617880 - DNA, 591 bp, Homo sapiens
cccagtactttgggaggccaaggagggtggatcacctgaggtcaggagttccagaccaatgttggcaaaaccccttctctactaaaaaaaaaaaaaaaaaaaaaatagcaggcatgctggtgggcacctgcaatcccagctacttgggaaattgaggcaggagaatcacttgaacccaggagggggaggtttcagcgagccaagattgggcctctgcactctagcttgggcaacaaaatgagactccatctcatatatatatgataatcgttaatcattatgaaggacaaaggcagtgtgctatgagaagtgcaagatctaatttagtctarataaatgtcttcagtatttctctgaaaacacttgtttttgatgttttcattgagatctaaaagagaagtgattagctacaaaaaaaagagagggagaaaaataagacaaaatgtttcagacaaaggggacacagggtgtgatggtctaagacaaaaagcagtattggtcatgagaaaatgatggaaggtcagtgtggaaagaaataatgagagggtattataaggtaaagctagagagaagtcaaaatcagctaatggt

SEQ ID NO: 617881 - DNA, 419 bp, Homo sapiens
ttaaagactaaatgtaagacttgaaactataaaaattctagaggaaaacataggaaaaactcttctggactttggctcagacaaagaatttatgttttgctttcttatcatttctgtgttcaccaaagtagcacttttaatttcctttacgagcttttcctttgccttcacaagatggttaactgtgtggcacagtaggcctatctttcagcctatcttgactttcaaccatamcttcttcgctaagataatcatgtctgccttgaacttaaagtagaagaggtgctactaatcctcttttaacttgaacacttagagaacattatagggttattaattggcataattttaatattcctgtgttcaggaaatagggagaccaaaggagagggagagagatggaggaaaagccagtagta

SEQ ID NO: 617882 - DNA, 392 bp, Homo sapiens
gtgttgtttatttgccttgctttacgatatttttaagcaatgctcacaagttttctgccctgagaggattccaaggtaggtaaagcagaaaagagcaccttgcatcattccttcaggcagcccccagacagttagaaartagtttgcatgtgaggtctgctatgcttcttccagaaccagagtccagtgttccacactgagagtgtagctgctatcttcaagatgtagctaagtgtacctaaggcctgatgtggtggctcacgcctgtaatcccagcactttgggaggccaaggcaggtggatggcttgagctcaggagttcgagaccagcctgggcaatatggcgaaaccctgtctctacccaaaatacaaaaattagccaggtgtggtgg

SEQ ID NO: 617883 - DNA, 595 bp, Homo sapiens
acagagaattcaaaatagctgtgttgaggaaaactcaaagaaattcgagataacagaggaggaattcagaatcctatcagataaatttaacaaagagattgaaacaattaaaaagaatcaaacagaaatttgggagctgaaaaatgcaactggcatactgaagaatgcttcagagtcctttaatagcagaactgatcaaacagaagaaagaactagrgagcttgaagacaggccatttgaaaatacacagtcagaggagacaaaacaaaaacagaataacaaacaatgaagcgcacctacaggatccagaaaacagcctgaaaagggaaaatctaaggttattggccttgcagaggagagagaaagagatacggatagaaagtttattcaaagtgataataactgagaacttcccaaatctagagaaagatatcgatatccaagtacaagaaggctgtagaacaacaccaagcagatttaacaccaagcagatttcaaagaagactatctcaaggcatttaataatcaaactcccaaaattcaaggataaagaaaggaccctaaaagcagcaagaggaaagaaacaaataacata

SEQ ID NO: 617884 - DNA, 544 bp, Homo sapiens
gttttgtgtattctttgtttcttactttctctcttattatttttgcagttgggtggttttctgtagtgataaggtttgattcctttctctttcaaaaaatatattggctctaccagtgrgttgtatagttttgcatattttcatgatcatagttgttatcttttcacttccagttgtaagacttcactgagcatttcttgtaaagccagcctagtgctgatgaattccattagtttccatatgcctgtaacagattttatttcttcttcatttctgaaggataactttgctaggtacagtattcctgactgacagttatttccttgcagggcttggaatatgtcatctcattctctcctggctgagaaatccactgttactttaatgaaaattcccttttatgtgacctgacttttttctcttgctgattttgtttatttattttttttgtcattgactttcaacaacttgactgtaagatgccttgaagaagatctgtttgggtttaacctatctggtttcctggaccttgatgtccatctct

SEQ ID NO: 617885 - DNA, 454 bp, Homo sapiens
cctctggctggagttattggagatcctacagggaagccccacccactgaggaaggatgggtcagggttacacctgaacaggcactgtggccgcctactgccattgccggtgtgttgggctgtggggacaagtcttgggaccaagctgtgtagcctccctggctccacaraaatttttgtgtatttttggatttttagtagagacagggtttttccatttcggccaggctggtctggaactcctggcctcatgtgatccacctgcctcagcctcccaaaggctgagattacaggcatgagccactgtccctggctgccttgatttatcttgattgatcaactgatggatcaatcacttagccaacaggcattttcagagtgcctactatgaagtgttagccactatgctggatgctacaaaaacaaagataaaggacactgtactctctctcaaa

SEQ ID NO: 617886 - DNA, 600 bp, Homo sapiens
aagaagatgagaatattaatgaaggggatataggttaaatttgttcaattttatggtgattcgttggggttgtctagagtaaattaagactgttttcttttttaaaatattaacattttattttatatccttcctatttttctatgaatatttatacatgtattatttttttaaaaactacaaagaatatcatgagcattttttttatttttattttttatgtttttactttaagttctgggatacatgtgctgaacatgcaggtttgttacataggtatacatgtgtcatggtggtttgctgcacccatcaacccatcatttaggttttaggctccacatgmattagttgtttgtcctaatgttctccctccccttttctcctacccgctgacaggccctggtgtgtgctgttcacctccctgtgtccatgtgtactcatttttcagctcccacttacgaatgagaacatgtggtatttggttttcctttcctgtgttagtttgctgagaatgatagtttccagcttcatccatgtccctgcaaaggacatgaactcattattttttatggctgcatatattattccatggtgtatatg

SEQ ID NO: 617887 - DNA, 600 bp, Homo sapiens
aagaagatgagaatattaatgaaggggatataggttaaatttgttcaattttatggtgattcgttggggttgtctagagtaaattaagactgttttcttttttaaaatattaacattttattttatatccttcctatttttctatgaatatttatacatgtattatttttttaaaaactacaaagaatatcatgagcattttttttatttttattttttatgtttttactttaagttctgggatacatgtgctgaacatgcaggtttgttacataggtatacatgtgtcatggtggtttgctgcacccatcaacccatcatttaggttttaggctccacatgcattagttgtttgtcctaatgttctccctccccttttctcctacccsctgacaggccctggtgtgtgctgttcacctccctgtgtccatgtgtactcatttttcagctcccacttacgaatgagaacatgtggtatttggttttcctttcctgtgttagtttgctgagaatgatagtttccagcttcatccatgtccctgcaaaggacatgaactcattattttttatggctgcatatattattccatggtgtatatg

SEQ ID NO: 617888 - DNA, 600 bp, Homo sapiens
aagaagatgagaatattaatgaaggggatataggttaaatttgttcaattttatggtgattcgttggggttgtctagagtaaattaagactgttttcttttttaaaatattaacattttattttatatccttcctatttttctatgaatatttatacatgtattatttttttaaaaactacaaagaatatcatgagcattttttttatttttattttttatgtttttactttaagttctgggatacatgtgctgaacatgcaggtttgttacataggtatacatgtgtcatggtggtttgctgcacccatcaacccatcatttaggttttaggctccacatgcattagttgtttgtcctaatgttctccctccccttttctcctacccgctgacaggccctggtgtgtgmtgttcacctccctgtgtccatgtgtactcatttttcagctcccacttacgaatgagaacatgtggtatttggttttcctttcctgtgttagtttgctgagaatgatagtttccagcttcatccatgtccctgcaaaggacatgaactcattattttttatggctgcatatattattccatggtgtatatg

SEQ ID NO: 617889 - DNA, 476 bp, Homo sapiens
tctaataaactgccaaaaccttggagtagctgagttgatagtacaaaatacacctgccatttattccccatcatactttgatcatggctgttgatctcggttatcctcagaagcttcacctccctggtcatcatcattacctagatttataaaactccacttcctttgccattccatacatctgccacatgctatgaaacttgagttatattttccagtaaaataaaaatatccttgtcttcattaacttttccttaaaaacaccactttctttgcaggcctttcaaattcaagctcttttattctatcaggcactgtatttctcaaaggccaaaaagtggcattagtgacattcttgctaccagtttccacttcaagaatatcactgtcatctcctgacaaatttccttaaaggcttgctggtctcgtgaagggcctgaccaggcaccttggytctgggaactcacttgaggttt

SEQ ID NO: 617890 - DNA, 590 bp, Homo sapiens
gagccacaacacaaagataataaaacatcttctatccttagaataacattatagatgtatcatataaaaaagtaaatcatactctaattctctccataaaaggtgtattgaaaatatgtttaatttgttatgtattttaaaataaatattatatagtaacaatgatttttggcttagttagttataacagcatttgttaaattatgtatcagaattaaatggaatcatgtacctagagatgttaagatatatttccaaatgtatgtttggatcacagtcaaaatggagttaaatcaaattagtaggctttttgtctttggattttaaaataatacattttatttttaagtatatgttatgwattcctaaaaaagaatttcccacaccacacttattttgctagagtcatactcctactgtactttttttttttttttttttttggctagaatgcagtgacacaatcgtagctcactgcagtatcatactcccaggttcaaacaatcctcttgcttcagtctcttaagtagctaggactacaggcatgcactaccatgctcagctaatttttcaaatctttttgtaaagat

SEQ ID NO: 617891 - DNA, 588 bp, Homo sapiens
tttctttcttttttttttaaattccattggttcactgcctcctttttggcactagatggctactgaagccttgcctctagcaaatgattagagtactgctcatactgaatgggggtsttcccaaggtggatattcctagcagtgtggggaggctagctatagatttgtgccaaaaggacctgtggaacgtacctcctatagcaagtagctgctgaacagtcaatgacatttggcatctcctttggaagagttgcagagcacagtttctaggactagggttggtagtgccacttgcctcctctgtcttaggctgtcatcaggaacattactccattcaggcactggcaattcttcccatagagtcaggcaggaacagggctcctgccagggaacccatgatggtggggaagctagttttccacctcagttgtgctttttccagtgcagaaaccatgagttgggagaaatttttctatgtacttcatgctgggcttgttgagaaaagggttgttgtggataggaaagtcttgttttctgacaagctatttgaagattgtttacttctctgtagctctgggaaatggtgca

SEQ ID NO: 617892 - DNA, 528 bp, Homo sapiens
tttctatgtacttcatgctgggcttgttgagaaaagggttgttgtggataggaaagtcttgttttctgacaagctatttgaagattgtttayttctctgtagctctgggaaatggtgcactctcctatttgaattctgagatattgctggtgataattccatcactgtacatttggttttggatttctgtgtgagagggtagagccagcttgcttctaagctctgattgtggaacaagactccccaccttttttagctactttgaataaagctgctatgaacatgaaggtacaaatacttatttgagttcctgctttcagttccttaaagcatatacccagaagttgaattcctagattatatggtaattgtatttttgattttacaaggaattgccacattgttttccacagtgactgcaatattttacattcccaccagcaatgtatatggttccaatttctccatatccttgccaaaaactgtaacctgttttgttttgtttaatactagccattctaataggta

SEQ ID NO: 617893 - DNA, 594 bp, Homo sapiens
tgggcaacatagtgagaccttgtctctactaaaaattttaaaaaattagctaaatgtggtgactggtgcctgtagtctcagctactggggaggcttgggcaggaggattacttgatccaaggagattgaggctgcagtgattgctccactgaattccagcctgggcaacagagtgagaccaggtcaatcaatcagtcaatcaatgcttttagggcctcttttattaaraggagatggtatgtattttctttttttaaatttaaattttattttactttaagttctgggatacatgtgcagaacgtgcaggtttgttacataggtatacatgtgtcatggtggtttgctgcacctatcaacctgtcatctaggttttaagccccgcatgcattagatatttgtcctaatgctctccctccccttgacccccaccccctgtgaggccccagtgtgtgatgttcccctccctgtgtccatgtgttctcattgttcaactcccacttatgagtgagaacatacggtgtttggttttctattcctgtgttagtttgctgaggatgatggcttccagcttcatccatgtccctgcaaagg

SEQ ID NO: 617894 - DNA, 594 bp, Homo sapiens
tgggcaacatagtgagaccttgtctctactaaaaattttaaaaaattagctaaatgtggtgactggtgcctgtagtctcagctactggggaggcttgggcaggaggattacttgatccaaggagattgaggctgcagtgattgctccactgaattccagcctgggcaacagagtgagaccaggtcaatcaatcagtcaatcaatgcttttagggcctcttttattaaaaggagatggtatgtattttctttttttaaatttaaattttattttactttaagttctgggatacatgtgcagaacgtgcaggtttgttacataggtatacatgtgtcatggtggtttgctgcacctatcaacctgtcatctaggttttaagccccgcatgcattagrtatttgtcctaatgctctccctccccttgacccccaccccctgtgaggccccagtgtgtgatgttcccctccctgtgtccatgtgttctcattgttcaactcccacttatgagtgagaacatacggtgtttggttttctattcctgtgttagtttgctgaggatgatggcttccagcttcatccatgtccctgcaaagg

SEQ ID NO: 617895 - DNA, 653 bp, Homo sapiens
taggttgcaagaaggttaaaaagattatacttatctggagaaaagtgatatgttaaaatggactccctgtactaaaaccagaaagggagtagcaaaattgaaatgtgaatataccaaagcttatgggaggacattctgctggattgatgttgtctcttaacctgaaaattaagagtacttctgtgtaggttgaatctccgtttcccccagataggtaacaagtaagcttgcagttgtgcagtgtgatatgcaacatacccagagaatattctatgagggattcagaatcttgagtctactctgttggcttagtagattgtcarccaaaattcacccaatcttgaatctactgtttcacttagttcaggttagcagcggatctccatatgacaattttgttaattataactgaactcatacattgaaatgaattttgggggatcaggggcataatattttggactgtcatctcagtagatctggaaagcagagcattgcgtcaaagaagattattcctgaggtttaagatctcatagagttggccttgctaggttttgaacttgcttgaggcctgtcactcttccttttctcttttgtctcccttttggaatgaaactacctttgcaaagataatgacagtgagagaaatctaa

SEQ ID NO: 617896 - DNA, 653 bp, Homo sapiens
taggttgcaagaaggttaaaaagattatacttatctggagaaaagtgatatgttaaaatggactccctgtactaaaaccagaaagggagtagcaaaattgaaatgtgaatataccaaagcttatgggaggacattctgctggattgatgttgtctcttaacctgaaaattaagagtacttctgtgtaggttgaatctccgtttcccccagataggtaacaagtaagcttgcagttgtgcagtgtgatatgcaacatacccagagaatattctatgagggattcagaatcttgagtctactctgttggcttagtagattgtcagccaaaattcacccaatcttgaatctactgtttcacttagttcaggttagcagcsgatctccatatgacaattttgttaattataactgaactcatacattgaaatgaattttgggggatcaggggcataatattttggactgtcatctcagtagatctggaaagcagagcattgcgtcaaagaagattattcctgaggtttaagatctcatagagttggccttgctaggttttgaacttgcttgaggcctgtcactcttccttttctcttttgtctcccttttggaatgaaactacctttgcaaagataatgacagtgagagaaatctaa

SEQ ID NO: 617897 - DNA, 653 bp, Homo sapiens
taggttgcaagaaggttaaaaagattatacttatctggagaaaagtgatatgttaaaatggactccctgtactaaaaccagaaagggagtagcaaaattgaaatgtgaatataccaaagcttatgggaggacattctgctggattgatgttgtctcttaacctgaaaattaagagtacttctgtgtaggttgaatctccgtttcccccagataggtaacaagtaagcttgcagttgtgcagtgtgatatgcaacatacccagagaatattctatgagggattcagaatcttgagtctactctgttggcttagtagattgtcagccaaaattcacccaatcttgaatctactgtttcacttagttcaggttagcagcggatctccatatgacarttttgttaattataactgaactcatacattgaaatgaattttgggggatcaggggcataatattttggactgtcatctcagtagatctggaaagcagagcattgcgtcaaagaagattattcctgaggtttaagatctcatagagttggccttgctaggttttgaacttgcttgaggcctgtcactcttccttttctcttttgtctcccttttggaatgaaactacctttgcaaagataatgacagtgagagaaatctaa

SEQ ID NO: 617898 - DNA, 644 bp, Homo sapiens
taaatagaaacaatagaaagttaaaaacagaatgatgaattaaaatgtagaatttttattactttcctatttgcttgtttgtatatgcaatcaatgttaagttgtcatcagtttataataatgggttataagatattatttgtaagcctcatggtaacttcaaataaaaaaatataaaagatacacacacaaaaataaaaagcaagaaattaaatcatatccagagaatatcatattcactaaaaagaagataggaaggaagaaaagaargaagagaagaccacaaaacaaccaaaaaacaaattttaaaatggcaggagtaagtccttatttatcaataataaccttgaatgtaaatgaactaaactctgaaatcagaagacacagagtggctgaatggattaaaaaagaaaagcaagacccagtgatctactgcctacaagaaacacacttgacctcttaagacacaaatagactgaaaataaagagatggaaaaagataaccaatgcaaatggaaaccaaaacaagagcaggagtagctatacttatatatgacaaaatagatttcaagacaaaaactatagaaagagacataaaagattattataatatacaatgatgaagaggtcaattcagaaagggg

SEQ ID NO: 617899 - DNA, 523 bp, Homo sapiens
aaaaactttagccagaccaactaaaaaaagagaaacccaaataaataaaatcagagataaaaagaagacattacaaccaataccacagaaattcaaagcataattagagactattacaagcaattatatgccagtaaattggaaaacctagaagaaatggataaattcctagatatatacaacctatcaagattgaaccataaagaaattcaaaacttaaacaaaccaataacaagtaataagatcaaagctgcaataaaaaagactyccagcaaaggaaagtctgggacccaatggcttcactgctgaactttaccatacatttaaggagaactactacaaatcatactcaaactcctctgaaagctagagggagagagaatactttcaaatgcattactcaaggccagtatgaccctcataccaaaaccagacaaggatacattcaaaaaacaaaaaaacataggccaatatcactgatgaacattgatgcaaaaatcgtcaatgaaatactaccaaactg

SEQ ID NO: 617900 - DNA, 599 bp, Homo sapiens
ttactaaaacctgggttttagctttccttcagacaaagcaccccttacaactaactgctattacctattcatatccccaacacacacacacacacacaaatcatggcctcctctgagttatcttttctcaccttgccaggctcaacttttcattgctacatttgggacattcatagattgaagtgatatgcacatgctgaaatggaaaaggaaattatactgattaaaaaagcaaggctatttcaagttcactcccctttgctatgaattcaaacctttgaagtagagtattgggttcaacaagcagccttatttttgagaaggctatacccttgggatgctccacttcccgtattaccttcaaggtctttattatattctagggctggagatggccgagtgacaggagagctgacagttctattagccatagagggaggacaggtcaatcaagacttctcacatctctaggtaataaactgggtttccaaaagtaacccagattccagcaggacgggcckcaaagtctcgttacaagatgaagtgggctcttcaagggcagcttttacctctaatatcctccagcacccacttgaaat

SEQ ID NO: 617901 - DNA, 526 bp, Homo sapiens
ttctagaattaggattcatttatgctaatttctgtatagatatctggttgtgctatttttatatacaatatcatatctgtatattttcccayaaaaatactaaaatgaacaatcacacaagcaaagattagtgttaatctgttcagatgtcaaattcctatagaggttaaagactaatacttgatggtgtttatactgttacagtgagataccattaaaatagatggatttagaatactgctgtcaaaatatgctccctaaattgtaattcaatacagtaaaatttctgattcaataaggcccagtgtgactgtcaggtaacattaccttgtaatggattccactacatacacgtttatccacacaagcacattaataaatgtataggcaaaatgccatgttttgaaaaattgtgaacagtaaatagcattcgtttctgatctttctattattaatttttgtttcttctgtagctgtcatgtataactaggctgtttgcattatatgagcattccccagaatacaa

SEQ ID NO: 617902 - DNA, 633 bp, Homo sapiens
cagaatacaatatttaagaaagaattctacaaatccaagatagcagtgtccacaggtcccagacatatggtatatacttgtcctttgagttactgcttgcttaaaaaaaccagagtggtttccagcacagacacaagatgggacaactcctaatgcacttcccttcttgggtactttctaggtaactgacattgtccagcaggtgtatatttcttctcatttgagagtcaaacgcagaagctagcattgattatgaatatgtgacagaaagaacatagtaacatgtacaatgagttcaaccaaaaaaaamcctatatattctttctgggttatgtggtactttcacatgcttaacaatactgtagataccattctatagtttgcatgggtttaaggtgataccagacccatcatcttccacttccccttccattcctttcccttccctagaaacttagttctaaagccattaggtaggacagaataacataggtgtccagaccaggacggggacaggaggcacagtggtccacagcaggtatcagagcccaaggagggtgaggaaggtatacgtgtcagaaaggaccctgtgtggggtgtcagagccagagctgggtgatgagggaacatgcc

SEQ ID NO: 617903 - DNA, 633 bp, Homo sapiens
cagaatacaatatttaagaaagaattctacaaatccaagatagcagtgtccacaggtcccagacatatggtatatacttgtcctttgagttactgcttgcttaaaaaaaccagagtggtttccagcacagacacaagatgggacaactcctaatgcacttcccttcttgggtactttctaggtaactgacattgtccagcaggtgtatatttcttctcatttgagagtcaaacgcagaagctagcattgattatgaatatgtgacagaaagaacatagtaacatgtacaatgagttcaaccaaaaaaaaccctatatattctttctgggttatgtggtactttcacatgcttaacaatactgtagataccattctatagtttgcatgggtttaaggtgatwccagacccatcatcttccacttccccttccattcctttcccttccctagaaacttagttctaaagccattaggtaggacagaataacataggtgtccagaccaggacggggacaggaggcacagtggtccacagcaggtatcagagcccaaggagggtgaggaaggtatacgtgtcagaaaggaccctgtgtggggtgtcagagccagagctgggtgatgagggaacatgcc

SEQ ID NO: 617904 - DNA, 612 bp, Homo sapiens
agctagcattgattatgaatatgtgacagaaagaacatagtaacatgtacaatgagttcaaccaaaaaaaaccctatatattctttctgggttatgtggtactttcacatgcttaacaatactgtagataccattctatagtttgcatgggtttaaggtgataccagacccatcatcttccacttccccttccattcctttcccttccctagaaacttagttctaaagccattaggtaggacagaataacataggtgtccagaccaggacggggacaggaggcacagtggtccacagcaggtatcagagcccaaggagggtgaggaaggtatacgtgtcagaaaggaccctgtgtggggtgtcagagccagagctgggtgatgagggaacatgcccaatgaagggtgtgatagctgtgataagaaattggtgacttttgggagaactgatcaaataaaaaatacattaagcatastgggtaccaggtgtctccctgtcagaaaagggaactaccaatatgaaaagagaggaaactagcatgaggcctgtggtgttggattggaaggtatcagggtgaactcatagttttgtgtgtgtgtgtgtgtgtgtgtg

SEQ ID NO: 617905 - DNA, 523 bp, Homo sapiens
cttatggaatggggagttacgctctaccaccttgagggtgaagtatctatatacattatttgagattcttttgcatgggagatttgcttcctccatttattatttatttatttatttattcagacatttatttatatcagtatggactcatggatatagattttataccttgggttgtaatctaatactattttccttgttttcttgctcaaattgtcccaacttttgccattgagagctctttcaattggctcctgtatgctygccctttgaaataccactataactgtgggtttgttttgggggatttttttttttttgcagtaattttttactttctggtactgcacttactcatcttcaatgggtcatattcatgaccccaggcctagaattggccatatctttactgagcttttgtcttttaatgaaataatggcattagaaagcaagatctgggcattaggggtgtttattaatatgggggtgccatttgttctaggtcctttaagcataagagagc

SEQ ID NO: 617906 - DNA, 567 bp, Homo sapiens
catcaattgatgaatggataaatgctatgtgattatattcatatcatggaatagcatttggtgacaaaaaggaatgaagtattgatatatgccatgatatggatgaaccttaaaaactttatgctaactgaaaaaaaacagacacaaaggttacatattatatgatttcatttatatgaaatatccagattaggcaacttcatagaaatagaaagtagattagggattgtgtggctgggggaaagggaaaatgaggagtgactgcttatgtgtctgagctttctttttaggrtaatgaaaatattctgtaagtagataatggtgaaggttgcacaagtctgtgaatactaacaaccattgcatgatatgcttcaaaagttttagccttatggaatgtgaatatctcaacaaagctgtgattaaaataaaaataaaatttaacctggcatcagggtataaacaaatgggggtggatgaagaaagcagaatagccaagttaatagattattaattgacaagtgcttaagctcagtgttagtgatggcaatggggaaaaatgcaagaacc

SEQ ID NO: 617907 - DNA, 567 bp, Homo sapiens
catcaattgatgaatggataaatgctatgtgattatattcatatcatggaatagcatttggtgacaaaaaggaatgaagtattgatatatgccatgatatggatgaaccttaaaaactttatgctaactgaaaaaaaacagacacaaaggttacatattatatgatttcatttatatgaaatatccagattaggcaacttcatagaaatagaaagtagattagggattgtgtggctgggggaaagggaaaatgaggagtgactgcttatgtgtctgagctttctttttagggtaatgaaaatattctgtaagtagataatggtgaaggttgcacaagtctgtgaatactaacaaccrttgcatgatatgcttcaaaagttttagccttatggaatgtgaatatctcaacaaagctgtgattaaaataaaaataaaatttaacctggcatcagggtataaacaaatgggggtggatgaagaaagcagaatagccaagttaatagattattaattgacaagtgcttaagctcagtgttagtgatggcaatggggaaaaatgcaagaacc

SEQ ID NO: 617908 - DNA, 567 bp, Homo sapiens
catcaattgatgaatggataaatgctatgtgattatattcatatcatggaatagcatttggtgacaaaaaggaatgaagtattgatatatgccatgatatggatgaaccttaaaaactttatgctaactgaaaaaaaacagacacaaaggttacatattatatgatttcatttatatgaaatatccagattaggcaacttcatagaaatagaaagtagattagggattgtgtggctgggggaaagggaaaatgaggagtgactgcttatgtgtctgagctttctttttagggtaatgaaaatattctgtaagtagataatggtgaaggttgcacaagtctgtgaatactaacaaccattgcatgatatgcttcaaaagttttagccttatggaatgtgaatatctcaacaaagctgtgattaaaataaaaataaaatttaacctggcatcagggtataaacaaatgsgggtggatgaagaaagcagaatagccaagttaatagattattaattgacaagtgcttaagctcagtgttagtgatggcaatggggaaaaatgcaagaacc

SEQ ID NO: 617909 - DNA, 620 bp, Homo sapiens
aaatttaagaaaataatgttaattctaaccacccctcccaacttacatattagttgtcaagtattttaattcttccctttgttttaagccctcacaaattatatatcactctataaaaatgatgtttgttttgacttgttttatgactttattgatttctttgttcaccattctttctttcatttcagctctttcttctagaataatctttcttytttcttaaatatatgctttagacattcctaagtatgacacatggacagttctctcagtttttgattctctgaaaatgactttattttgtttcacgttattcttaaaagatagttttggttggtacagaagagttgtttttcagatattattccactctcttctgcttctgttgttgctgttgaagttacagttgtagtgttaattgtcagcagtccaagtgtcttttctctctaggtcatttttgtgatttccttttgaattttggtgttctacagtttcactacaatctagatagatagatagatagatagatagatagatagatagatagatagatagatagatagatagatattctgcttggtataaatcgattgatgtcttccctcaattctggaaaatgt

SEQ ID NO: 617910 - DNA, 568 bp, Homo sapiens
cttttttcttaaatatatgctttagacattcctaagtatgacacatggacagttctctcagtttttgattctctgaaaatgactttattttgtttcacgttattcttaaaagatagttttggttggtacagaagagttgtttttcagatattattccactctcttctgcttctgttgttgctgttgaagttacagttgtagtgttaattgtcagcagtccaagtgtcttttctctctaggtcatttttgtgatttccttttgaattttggtgttctacagtttcactacaatctagatagatagatagatagatagatagatagatagatagatagatagatagatagatagatagatatyctgcttggtataaatcgattgatgtcttccctcaattctggaaaatgtgtaattgttatctcttgaaatactgcttcttcttcattctctttattttcagtctgggattctaactatacatttattcacctacttcttctcaaaccttgggtgtatatggtcacctgaggggcttcctagtcaataaagattctgattcaagaggtc

SEQ ID NO: 617911 - DNA, 558 bp, Homo sapiens
acatactatatggtaccaactatatgacattctttttcactttttatctggattccactccattttaccttcaagtttagaagtcacagtcaggtgaattgaaaggggcttgagtaaagcaagctggggtttccttctttaggaaatatttttgaaagatgatcattagatcattgtttttatatcctctattgagtaagggaggtggggatattttttaatargattttagactatagagctagaaatgtggggatttgaatactggttctatcatgtacttaaccacctgtgtgaccttgggaaggtttttttctacctaaatgagcatttagtctttacttagtaggaacaaagtatagaaccaaggaatggaatattatttatttaatattttggtaattttgtggggtatttattgttaatcctcatattttagaggctgactctgtcatcattccccctattggtcaggggttcttaaaagcaacaaaatcctctctggctagtttgagcagaagcaggattttagtgaaggatattgggcagttaagcatg

SEQ ID NO: 617912 - DNA, 621 bp, Homo sapiens
cagtactcaattattagccatattcaccatattgtagtattgatctaaaaaaaatcaaactgatgatagtcaaaggggacaaagcctcagttagatgggaggaataagtttaatttcttttgaaattaattccacagatattataacctacaggcacacataatgcactagctacaacacagaggagaaatgaaagtaatttataataaatactctccactttaatatggaaatgctcagtttaggaccacactggaagacctggggagcagtctatgcctacaccacacatgtgcagctgcacgtgcagactcacacaagtgggtggtctcagtgactcactctggcggcatcccagggaaagtgccaatccaaacaaagtgaaatctcccctcaatacatggtagctgtaaatctggaaaattccatgtgtattaaaatcatgcaaaaacatactttgtttttctgcataaaacgaaattagattctgggctcagataattataaaaacctgtctcacctataggaatgtctgacaaaacatccratatttgtgagggatgtggaacaattctttgatgggcagtgctgtgctgtgcattgtggaaaatttagaatccc

SEQ ID NO: 617913 - DNA, 562 bp, Homo sapiens
aaagccaaagcacagaattttatattggaagaaaacattttctttagacttttaatgtaaaacatttttagcatcaggcaacaacagcagttggaacctgaggaaaaaagttacaacagctgatgaagaagttgaagaaagaggtattacttcaggccttctcaaaggggacataaagctgaaaacagtgaggcacaataaaagttgaacttttgggttaaaaacaaaattaaggccaggcacagttgctcacgcctgtaatcccagcactttcggaggctaagttgggtggatcacttgagtccaggagttcaagaccatcctgggcaacatggcaaatgccctctctactaaaaatacaaaaaattagctgagtgtggtggcacatgcctgtagtcccagcgactcaggtggctgaggtgagagaatcacataagcccrgaggtcaaggctgttgtgagctgagattgtgccactgaactccagcctgggtgactgagtgaaaccctgcctcaaaaaagaaaaacaagtacaaaattaaaatctcttctaattttattaa

SEQ ID NO: 617914 - DNA, 606 bp, Homo sapiens
tatatgtgtatacatcttggatattagctttttaaattttttwatttttattttatatatatttttattatactttaagttctagggtacatgtgcacaacgtgcaggtttgttacatatgcatacatgtgccatgttggtgtgctgcacccattaactcgtaagcttttaaccattaagctttttttctttttctttttttaaaatttcaatagttttggggatacaggtggttttttgttacatggataagttctttagtggtgatttctgagattttggtgcacgcatcacctgagcagtgtacactgtacttaatgtatagtcttttatttctcacccccctcccaccctttcacctgagtctccaaagtccgttgtgtcattcttatgcctttatatcctcatagcttagcttccacttataagtgagaacatatgatgcttgattttcctttcctgaatgacttaatttagaataatggcctccaattccatccaggttgctgtgaatgccattatttcattcttttttatggctgagtagtattccatggtgtgtgtgtgtgtgtgtgtgtgtgtgtgtgtgtgtatatatatatatat

SEQ ID NO: 617915 - DNA, 464 bp, Homo sapiens
gggaagggacagggaccctctgaggcatggaaggagaaaaaagcaaagcagctggcctggctgagattggcttgaagccaggagggactccccattgtggggaaaggtaagctagagattcccaacagtccacatccccactgtaggtagactcctgaaatcctagccatgggagatacccttggcccttacaggccctgaaactagtatggggaactgcctggagtccatgtgatggcattgttccagagagggagtttgccctgggtcccacacatcccctgagacacaagcagctacagcacagagccattttargagcccagccctcaccagactgcattctcccgagtcccaatagttctgatattgccacatccctggaaccatgctgaccacccccaacccatgtccacccagagggctgaagtgtcatgacattggctggactcagtgatgcggct

SEQ ID NO: 617916 - DNA, 585 bp, Homo sapiens
gcataagaaatactaattttctttagcaacctctaggttcttcttggatttctatctgcagaagtgcaaaatgtagtaaacaataatatgacacagcaaagggcatggatatctgatttttcattcaaatatattttcacaggttttcttctccttctcctcctcctcctccttcttttttctgctatcataaaacaaatattaagcacagcccctaaataatctttggcagtgtatgtcttggcaattttgatgtaattatgtttcatcattttctaytttcctgataagtagtaatacatgaatagcagaaatgaggttcctacttttcagggataggcaaatgacaactgagtagaagtaatcgtgtattatctttagagatgtgacatatttgtgttacttttttgtttaaatggataaaactgtcacttgccttctttcttctcaggaaagcttcaaatacaagcatatcacagttggcatgacctttaactattaactccatatctatatctacatctatgtttgttgtttatttttttcagcatatgcacataaatatcatattgaagtatggagtta

SEQ ID NO: 617917 - DNA, 398 bp, Homo sapiens
aacgtcttacatactggtgggcaagagatcttgtgcaggggaactcccatttataaaaccatcagatcttgtgatacttattcactaccaggagaacagtatgggggaaactggccccatgattcaattatctccacctggccccacccttgacatatgttgattattacaattcaagatgagatttggatgggggacacagccgaaccataccaccctctgatttaaaatgtaaaatattaatgtatatttaaattgtgttgcatcaaatatgtgtatattacatatatcatataaacatgcatttacaaataatttattawgtttaatataaagattgtttgcttactatctacttattcacaagaatgcaagctttatgttaactgaaattttct

SEQ ID NO: 617918 - DNA, 542 bp, Homo sapiens
agaattcatgtgattgacttttattgcattattgctttattgcacttatccagaactgaacccacaatacttcagaagtatgcctgtgyatataatcatgcaaaatcttctattatttgttccattttacaattttgttttgcctctttttaaaaaaactgctagcacaactgtggtttatgaccacgtgtttaattctaaatttattttatttacataaatttacagtacagtattaagcaaattatgcctcacattttccctatatagtattaatattcttataattgatgccatctttatttgtatgttgcataataaattctcccacacaagtaaggcaatttatactgttttatctatgcttaattaatgttattaaatttggtttttaaattttgtatcatttatatttagtcaaaattatgacaacataactgtgcaattttttagtctttatttgtatatattgcattcattttttcactgcttttcccccaaccccttcagtgaggttgattcatgcagttttaatatagcta

SEQ ID NO: 617919 - DNA, 353 bp, Homo sapiens
aatacgcacaccccaggcccagcacggtgacagccacctgcagacccagctactcgggaggctgaggccagagagccctgagtttgagcccagcctgggcaaagtagcgagatcccccatctcaaaaataaaataaaatgcatggttcctcatgaaatgtaaggctttgctataaaaactttgagaggccaggcgtggtggctcacacctgtaatcccagcactttgggaggccaaggtgggtggatcatgaggtcaggagttcaagagcatcctggctaacaacggtgaaaccccrtctctactaaaaatacaaaacaattagctgggcatggtggcgggtgcctgtgatcc

SEQ ID NO: 617920 - DNA, 468 bp, Homo sapiens
caatctcctcatctggaaaatggggagaacaatttccaccctgctcttctcacagggctatcacaggactcaaatgagataacaatggatgaaaccattatcaactggtaaattccacacagatgtgaacatatgtccttattattccaaagccttcaaagcctaggtcctttatttgttcactcattcactcagcaaatatttaatacatgccaggcctttcctgagaccccagccttctcagttctgtcaccatctgctttcctagaacacccraatctgaactccataattcagcacttggtcacatggtcttatttaagtctttaattgcttctcctatgtcttggaagcctcaggtaccctgcttctccacctgaaatctccccttcttctcagcacaagggtacccagatggctggatgagtggtcagaggagggtgggaggacagcattcaagtgtgatgg

SEQ ID NO: 617921 - DNA, 578 bp, Homo sapiens
tggatttggcctgcagaccctagtttgccaacccctgctctagaaggataaacagatgtttgccagggagaaaagagaaagcaagacattcgaaaacatgcatgctctgaaactatggagctgttaaaagagagggtagatgggctgccttggttgatggtatattccttgctcatcaggtaatctatactaccttttgtttctgataaacaggattcatgtgtgaaatggaagtctggatgaggcaaactcaaaaggctttttccaaccttcattaagttggttattgattgaattgggtctaaccatggattctggattaccattctaaattgaagtagactgtaaccgtcagaaagaacattggttttggagtcggacttctgagttagctagtaagtggcagaacctaggtttttgttttgggtttttatttttttttatttatttatttttgagacaaggtctggctgtctcccaggctggagtgmagtgctgtgagtagctgggactacaggcatgcaccccacgaccggctaagttttgtatttttttgtagagacaggttttcaccatgt

SEQ ID NO: 617922 - DNA, 518 bp, Homo sapiens
cccattttgcagatgaggaacggaggctttgagagttaagaaacttgcccaaggctactcagctagtgagtggcagaacaaattaaaactcagatctaggcctggcgcagtggctcccgcctataatcccaatactttgggaggccaaggagggaggattacctgaggtcaggagtttgagatcagcctggccaacatggtgaaactccatctctactaaaaatacaaaaaaatacaaaaaaaaaaaaaaaattagctgggcatagtggcacatgcctgtagtcccagctacttgggaggctgaggcaggagaatcatttgaacccgggaggcagaagttgcagtaagccgagattgcaccactccactccagcctggcagagtgagactccgtctcaaaaacaaaagcaaacaaacaaacagaaaaaacagcaaagaaaaaactcagatctaaacccacgtacccaacactctactcttctgttactctcagtwcttacaactttaaatatacagta

SEQ ID NO: 617923 - DNA, 560 bp, Homo sapiens
tgttgtcatctcatttgatgctcccagtctacagatagggaagctgaggttaccacttcccgcccttgagtccagggaaccgaactcagttgcagcactcttcaccttgtaatggcaatgtttgtttgcaagtcggcgtcccttgcccatctttataaccccsctcccactgcctgctgaccgacaggctcagtgttgcacagctagtgaatggcggtttcaacttccgttcccacattcttgcagtttaccatagttgtcccctcgggagtggtaacaatagttaccagtaactgtgtatcttctgtgaaccattccctgtggttgataatgttttaaccctcaaaacaaccctgtgaagtacgtggtgttatacctttccaaatgcaggaggaatacaagttcagagaagaaaaatacctttcccaactggtagaaccttggtctttctgattccaaagcctgtgcttgtcttagagaaaccctacataataaaaagtcaggactcaaggttgcaattatttttatctctgtgtaaacatgatgtatgtgaaagtgcc

SEQ ID NO: 617924 - DNA, 637 bp, Homo sapiens
gcagtttcccttttttggttatgtctttgtctagttttagtaccagggtaattagtagccttgtagaattagtttgaaagttttccctgctcctggattttttgaatagtttgaataagattgatcagttagttgttttttaaatgtttgctataattcagcagtgaagaaatcagaccctgggcttttctttgatggaagaatttttattactgcttttatctcattacttgttattggtatactcaggttttggatttcctcatggcttaatcttgrtaggttgtatgtatttaagagctcatctatttacttagggttttctaatttattggcttacaattgctcataatagtctctaacaatcctttgcattctatggcagcagctagatatatcctttttcgactctgattttgtttgggtctttcccttttcttcttagtctggctaaatgtaaatttcatttatcttttcagaaaaactttggtttggtttatctatttttcatctcaatagtgtatatttctgctctgatagtcattcttttcttctactaatttgctcttttctagttttttatgatacatcattaagttatttgaagcttttttcttttttgatgtaggaatttgtt

SEQ ID NO: 617925 - DNA, 550 bp, Homo sapiens
taccaaatttttacagcagttttacccagaaaaaatagaaacaagttaatatctatcagtaaataagtgaataaagaaaatatgacatataaatattgatacacccaacaacatggatgaacctcaaaatattcaagctgaatgaaagacgccagaaataaaagagtagatactgtataatatagcttatataaaaagaaaatgaatatgtgcacactaatctagagtgacagaaagygggagatctcgagataagaactggttggagagaggaagggttgcaaaaggaacacttgacaatctttgtgggagaaaatgatttgaatattgaatttcacagccctcaaaaatgggtatagaagatggatggcaatcttgaggaacatcttagattatgcctattgtgtgtgtgtatgtgtgttaatacataattttgtacacacattcatgaatgttttgggagtgtggaagttagagttgaaagtagtatcatgtgagtaatattggctgtataatgctgaaaaaaaggcaactccaaaatcgcagtgaa

SEQ ID NO: 617926 - DNA, 571 bp, Homo sapiens
taaaattgaaaaaatgttaaaaaaataaccayttcatggaaactaaaatcatatagataatatttcagataaatgtaatactcatacagttttcagctcttagagattgtaaagataaagatcccataatctcttcttttaataaagataaaatagggccagaaatatgtcatgacaacaatggcaaggaaatagaatagctaacaaaatatctgcatttagtaaactgagcatatgttttctggagaaaataaagacaaggacttcagctcactataggcattctgctttattcttcatttgagccagtatgttaattaaatctgatttggaccacctctggagcatatttccacctcttagcacacttactgcctcctttcttctttttatataagcatctttacaaaaaatgtatagaattgtcctcctgttgttcttttgacactcatgattttgttagatactcaaacaaaaatgcaccaaggaagctacatagactattattaactgattcttttttgacgagaaaattccaagttataatcatgagctcctaggtcaaatagta

SEQ ID NO: 617927 - DNA, 571 bp, Homo sapiens
taaaattgaaaaaatgttaaaaaaataaccacttcatggaaactaaaatcatatagataatatttcagataaatgtaatactcatacagttttcagctcttagagattgtaaagataaagatcccataatctcttcttttaataaagataaaatagggccagaaatatgtcatgacaacaatggcaaggaaatagaatagctaacaaaatatctgcatttagtaaactgagcatatgttttctggagaaaataaagacaaggacttcagctcactataggcattctgctttattcttcatttgagccagtatgttaattaaatctgatttggaccacctctggagcatatttccacctcttagcacacttactgyctcctttcttctttttatataagcatctttacaaaaaatgtatagaattgtcctcctgttgttcttttgacactcatgattttgttagatactcaaacaaaaatgcaccaaggaagctacatagactattattaactgattcttttttgacgagaaaattccaagttataatcatgagctcctaggtcaaatagta

SEQ ID NO: 617928 - DNA, 428 bp, Homo sapiens
gctaccttaaaatactaattamatttaattccatttaaaatctagggtgctttctactctgcatgtggaccctggctgacaaacttgaaacaaacttaaagtaagtaactcctcatgtcttcacaacacataaatagctcttggatcttaatctggaaatcctcttagtttcttaatccatatttaaataacatttatggtttgaggcactatataattgacagatttattcattgtattttcaaaatacaatgaatagatatgttctttagatgacattgtcttggacaattacatttgcattttcaacaagttatattacacatatgtttgattttaactgagataatacaaaacaggtttcatgtatcatgtgaacaatataatacaaatcttcacaatatatttcattcagtctaaaagtcaat

SEQ ID NO: 617929 - DNA, 569 bp, Homo sapiens
atggtctccattcttccccagatttgtgactctccaaatgttttctcagacactaatttgctgacagtaattcaatgttccatttacatcattctatgaaagacaactgcatatgtttatatactacatttattttcacaactcaatttctttgcccatctttttctttagttctttagtccattacatttcagtaatatgctaaataaaaatcctacaacttgaaatgtctagttcacttttctcattgcatgatttgtgtagtaggggtggtgttaacttccagaggcacagttcttaaacatcagagtagctgatgattcattatcttggcagatgactttgtctgctggcctaacaagaacatcctagagctcttattttaatatgatttcatatacatttgttaacaatacgactttcatacatcatatactgtttaataaaatctttaataactgatatatgcaaacagaaaaaggaaacatctaggaatacttatatgatcctaaaatttctaagcaaaatttcraaaagaacaaagctaaaggcatcacactacctgactt

SEQ ID NO: 617930 - DNA, 620 bp, Homo sapiens
ttggaatgacacattggaatgactgaggtagtattctctgggttaaatctgccttgatattctacaaacttcttgtacttgaatactgatagctttctctaggtttaggaaattctgttacccctttgaataaattttctacccaaatatctttctttgtctcctttttaaggacaatagctcttagatttgcattttgaggctattttctagaacttgtagctgtgcttcattcttttttatgtttgtctcttctgattatattttcaaactgactgtcttcatgcacactaattcttctgctttattaattctgctgttcagtgattctgatgattcgtcagtgtgttaatggcattgtcagcttcagaatttyggcttgattcttttgaattatttcaatctatttgtggaatttatctaatatgactctaaagtccttttccatattatgttaaattttgttgagcttcttcaatgcagctattttgagttgtctgtctgaaaagctcacgtatctctgtctctctgggattggtacctggtgcctaattttttttggtggggttgtgtttttctggatagccttgatgcttgcagaagtttgtcagtgtctgggc

SEQ ID NO: 617931 - DNA, 620 bp, Homo sapiens
ttggaatgacacattggaatgactgaggtagtattctctgggttaaatctgccttgatattctacaaacttcttgtacttgaatactgatagctttctctaggtttaggaaattctgttacccctttgaataaattttctacccaaatatctttctttgtctcctttttaaggacaatagctcttagatttgcattttgaggctattttctagaacttgtagctgtgcttcattcttttttatgtttgtctcttctgattatattttcaaactgactgtcttcatgcacactaattcttctgctttattaattctgctgttcagtgattctgatgattcgtcagtgtgttaatggcattgtcagcttcagaattttggcttgattcttttgaattatttcaatctatttgtgraatttatctaatatgactctaaagtccttttccatattatgttaaattttgttgagcttcttcaatgcagctattttgagttgtctgtctgaaaagctcacgtatctctgtctctctgggattggtacctggtgcctaattttttttggtggggttgtgtttttctggatagccttgatgcttgcagaagtttgtcagtgtctgggc

SEQ ID NO: 617932 - DNA, 583 bp, Homo sapiens
cagtcagaactggagttttggcaagcctcaccaccatgggctaaacaaacttgtatayatttcacgatcctaaataaacttgaaaagctgtctaggcgacaactgcaatttctaggcaattcctagtgctgtactgggcttaaagccagtagattgaggggcacatgacctagtgagacaccagctggggcaactaaggaagtgcttgtgccacccctctcccaaccacagggagcacagcttgcaacaacaaaaatgattccttccttctgcttgaggagagaggggaggtgagaaaaccaagagaaattcaagataatgcagagaaggaattcagaattttatcaaataaatttaacaaacagattgaaataattaaaagaatcaagcagaaattctgaagctgaaaaatgatgcatactgaagaatgcatcagagtctgttaatagcagaattgatcaagcagaagaaagaattagtgagctttcaaacaagctatttgaaaatacacagtcacagcagacaaaagaaaaaataataaaaaagaatgaatcatgatctagaaaatagccttaaaagggca

SEQ ID NO: 617933 - DNA, 564 bp, Homo sapiens
caagccaggtgtggtggctcatgcctgtaatcccagcactttgggaggccaaggcaggcagatcatttgaggtcagcagcctggcaaacgtggtgaaaccccgtctctactaaaaatacaaaaattagccaggcatggtggtgggcacctgtaatcccatctactcagaatgctgaggcaggagaattgcttgaacctgggaggcaaagggtgcagtgagctgagattgtgccactgcactccaggctgggtaaaacagtaagacttcatctcaaaaaaaaaaaaaaaagtgacagatacacaaaaaataaaaagcaaaaattaaatcatacaaccwgagaaaatcaccttcaactaaaggaagacagaaaggaagagaaaaaggaagagaagaccagaaaacaacaaaatggcaggaataagtccttatttaccaataataatattgctgtaaatggacttttatccttacagagtagctgaatggataacaacaaaagaaggcccaaagatctcctgcctacaagaaacacacttcacctataaagacacacacagactgaa

SEQ ID NO: 617934 - DNA, 564 bp, Homo sapiens
caagccaggtgtggtggctcatgcctgtaatcccagcactttgggaggccaaggcaggcagatcatttgaggtcagcagcctggcaaacgtggtgaaaccccgtctctactaaaaatacaaaaattagccaggcatggtggtgggcacctgtaatcccatctactcagaatgctgaggcaggagaattgcttgaacctgggaggcaaagggtgcagtgagctgagattgtgccactgcactccaggctgggtaaaacagtaagacttcatctcaaaaaaaaaaaaaaaagtgacagatacacaaaaaataaaaagcaaaaattaaatcatacaacctgagaaaatcaccttcaactaaaggaagacagaaaggaagagaaaaaggaagagaagaccagaaaacaacaaaatggcaggaataagtccttatttaccaataataatattgctgtaaatggacttttatccttacagagtagctgaatggataacaacaaaagaaggcccaawgatctcctgcctacaagaaacacacttcacctataaagacacacacagactgaa

SEQ ID NO: 617935 - DNA, 555 bp, Homo sapiens
gaatttcatcatgtattattgagaagtgctggattttataattcctttcagcccaaattgcaaatatcaactatacccattacatgcatgcagatggttctaacatcagcttsccagcgaggatttcttagtgttttcagttcctatccttgcctctttatctccttctacaatctgctggtcaatctgttcctcagtgacttcttgttactctccaaatttactgcatcctctttctaaaatctactatccaaaagaatgtgtagcttttctttttgtaaaatttgaccatgtctgcatgttatctccttaagaattttagacacaatacatcttctgtggagtccagagaaaacttgaaaacagagacatttggtaatataatttgatggtggtgatattaatttttaaagctcttgataatttcaaagatccatatatttgtattgcattttgatcactgttacctaggtcatcaatgagcccccttgaaatacaatacagccatatttatctctctaggacttcttcatgatacaatgggtaacagatagc

SEQ ID NO: 617936 - DNA, 563 bp, Homo sapiens
ctgcctgctttggcacctattggggtcccagtccaaccacaagctacagagatattaactgaccatgccattgttcattgatagaggttgaacacatttgctcccctggctcagcccatttgctttgataggcttcctctacctctgccccaccttccaatgaatcaagtaatactagcctaaaaggtcatccctacaggctaatccttacttagccagacccagaagtgacttcatagttctctagctggactcccttaaccctttgttcagaacttgctkccagcaatgatctctgcagcacattcgtttgcttctctgtctcacccactagatggtgagcattttttaaattcccctcccaaccccagtgctgagctcagccctggaaacagaggagtactcagtaaatgtttacaaaatgaataaataatgaaaaaaatagagcatgagtgcagttattttgagagctaataagcaaaagtagctgaaactcttacagcaaatgaaaagggtagggtcaaaaattttttcacagagggaaaagtggaatgttcattcaa

SEQ ID NO: 617937 - DNA, 485 bp, Homo sapiens
ggtgcttttccttctgacctgttgactgcaggctcccaggcctctatcttgagccaggctcttctttcttttgcactgctctgaaaacaccaacgcttacaaagattccttctgtttcatgcaggtgctgcacttgccttcttcaaggtcccgaaggtaaaaatgtgtytgggactcatgggattgcccaatgtgtgccccaactgagctcatccttcgtaagccatcacattttctcaacatcttaacgtctattttcttttcctcacagctacttctttaaccagccataaatgaaaccagactttttaaagccaatattttgcattctttgtttttaatttttaaaacaaataaaagtcaactgtcttcctccttctggggtctccctcaacttttttttttcttttcatatattaattaatgaattttgagacaaggtctcctgttgcccaggctggagtgcagtggtgtgatcacagctc

SEQ ID NO: 617938 - DNA, 666 bp, Homo sapiens
  misc_feature 313, 326, 327, 328, 329, 330, 331, 332, 333, 334, 335, 336,337, 338, 339, 340, 341, 342, 343, 344, 345, 346, 347, 348,349, 350, 351, 352, 353, 354, 355, 356, 357, 358, 359, 360,361, 362, 363, 364, 365, 366, 367, 368, 369, 370, 371: n = A,T,C or G
  misc_feature 372, 373, 374, 375, 376, 377, 378, 379, 380, 381, 382, 383,384, 385, 386, 387, 388, 389, 390, 391, 392, 393, 394, 395,396, 397, 398, 399, 400, 401, 402, 403, 404, 405, 406, 407,408, 409, 410, 411, 412, 413, 414, 415, 416, 417, 418: n = A,T,C or G
  misc_feature 419, 420, 421, 422, 423, 424, 425: n = A,T,C or G
aagtaattttcattggttagctgctggtgaaagtacttttccttcttcggtggctagccatgctgaggggaggaaactatgtcctcatgaggttccccattctatttcttctgctgagtactggggcttggtttcccggaggggattaccccatactaggggtccttctataagcatttctaatggagcgtcctgtcttgcggctcttttggctttaatatctgcttggcggttcccttctatttccctttcctttcctttctgatgaccccagcagtgttaagactgccacctttttaggtttctgtaccgncataatatatctnnnnnnnnnnnnnnnnnnnnnnnnnnnnnnnnnnnnnnnnnnnnnnnnnnnnnnnnnnnnnnnnnnnnnnnnnnnnnnnnnnnnnnnnnnnnnnnnnnnntgtatataccctttttccttctcctaattctagtgcccgagtgagggctattagttctgycagctgagcgctagttcctggagtgaggggattacttgcaagtattccattatcactgaccactgcataccctgcttttcgaagtcctttttctacaaagggacttccatcagtatacaagttgagtcgggatcagtcaagggaacatctaggtccccttgagtggcgcaggtttgagcaa

SEQ ID NO: 617939 - DNA, 520 bp, Homo sapiens
atacaacaaatagcaataacacatcattcaacaaattttgttgagcatttatcatatgccaggcactgtgttaggccctaagtttaaaaccgtgaacaaattaaacacagttcctggcatcatggaatttactgtctaatgagagatacccactagtgaatatgcaacaatgcaatataggtataggttgaagtgaaagcacaaatgagggacaactaacccagacttgaaagggagaaggttgaatactacttcacaatgatgttcaagatgactcctaaaaggtgagaaggacttaggtgaaggtgaaaggggctcaacaaaagggctctaaactaaaagaacatcttcaaaggccctaagattaaagagaaggtcgggtggggagtctgtaatcccaacactttggaaggctgaggcgggaggattatttgaggtcaggagttccagaacagcctgaccaacatggtgaaaccccggctctactraaaatacaaaaactcaccagatgtggagatgg

SEQ ID NO: 617940 - DNA, 422 bp, Homo sapiens
catgcctccctaagaaagagctgataaatcttgaccactgaggccaagaaaatagttctagactcatctgttccctctcttgcataatctagtgttttcctgtctacacagtctaatctgtgataggtcatcctcttttaattcagggaccttattactaatcacagatagttcttggcttttgtttataaactttgtcaaagtctggatttaaagaagcaggttttctcaatgtatttctrcaagaggcaaaaaaaatcacatcaacaagttttacaaagggctgcttgcccttacttgcctttactgtgttgcttcagttctccgatcttccccactgtgaggacatagcaagaaggcaccttccacaagccaggaggaaacaggatgtactggcaccctgatcttgaactaccaccctc

SEQ ID NO: 617941 - DNA, 396 bp, Homo sapiens
aaacattcaagctgcaggcaggaagcactstagcaggactctggccttgaagagtccctgttcccccgttttttttccttttcacccaataaaaccctgtcttactcaccattcaaattgtctgtgggcctgaattttcatggccatgggacaaagaaccccatccttagctaaaccaagaaaaagtcctgcaacaatgggggtggattcctcatgaatgacttgggccatctccttagtgaaatctggtcatttaaaagtgtgtggcacatccccacccccgctcactgtggttctcaccatgtgatgcgcctgctcctctttggccttccaccatgattggaagctccctgagacctccccagaagcagatgctgctatgcttcctacacagcc

SEQ ID NO: 617942 - DNA, 396 bp, Homo sapiens
aaacattcaagctgcaggcaggaagcactctagcaggactctggccttgaagagtccctgttcccccgttttttttccttttcacccaataaaaccctgtcttactcaccattcaaattgtctgtgggcctgaattttcatggccatgggacaaagaaccccatccttagctaaaccaagaaaaagtcctgcaacaatgggggtggattcctcatgaatgacttgggccatctccttagtgaaatctggtcatttaaaagtgtgtggcacatccccacccccgctcactgtggttctcaccatgtgatgcrcctgctcctctttggccttccaccatgattggaagctccctgagacctccccagaagcagatgctgctatgcttcctacacagcc

SEQ ID NO: 617943 - DNA, 483 bp, Homo sapiens
tcatacctgacaaagttcttacagttaagaactggagtgtgacatgctcatgttttagaaagacggtggtctgaggtcatgctgaagatacayagaatggggaaggacgaggctaggagaccgagtaaaacaccactacaatcattcagttaggagcctgatgtgctaagcagccacaacagaagaactaagtctgattcagacctaggaccttaggatgtggagagcaaacagacctgaaagacgatctcaattttgctctacagatgaggaatctaaggcacaggaatacaaaaagtaatttggctacctgcaactctgcacaaaaaactttaatcttggtcctgagattaaaaaaaaaaaaatcacaataacccactgaactgctgcgtggcaagaaagtctgtgcattcagcttcatacgacaaaaactgcaaaagcagctatacatggcagacaaaaatgaatgaatgtggctatgtt

SEQ ID NO: 617944 - DNA, 517 bp, Homo sapiens
ttggtttggtgaggcaaggacttattactatttcctgtggccagaygtggattgtgcaggagaaaagcaggcggggtcattatgagggaccatgcccagtgagaacattcagagtcaacacagtagttgctcaggagaccaaaggcaactggaaaagacaggaggcattaagtgttctgcaggtgagaagttcccccaaatccacatgaaagtatcccagggctaccggccagctttggacatctgccatgccccaagagagtgaatgccaggttgcctctgccccagaaaacctggttcttcctgccatgctcttctcatctttaccccatactgcaaattctgagagacccaatatagcagctctcaagtagaaaagggtattgttgaggctcagaaaatgataccccaaagagaaggcctcagaagtaacctcagaactaagatctctgaccttctgccttcctgtctctcacccctcattctctcctgagatgagtcacagacatcagaattc

SEQ ID NO: 617945 - DNA, 517 bp, Homo sapiens
ttggtttggtgaggcaaggacttattactatttcctgtggccagatgtggattgtgcaggagaaaagcaggcggggtcattatgagggaccatgcccagtgagaacattcagagtcaacacagtagttgctcaggagaccaaaggcaactggaaaagacaggaggcattaagtgttctgcaggtgagaagttcccccaaatccacatgaaagtatcccagggctaccggccagctttggacatctgccatgccccaagagagtgaatgccaggttgcctctgccccagaaaacctggttcttcctgccatgctcttctcatctttaccccatactgcaaattctgagagacccaatatagcagctctsaagtagaaaagggtattgttgaggctcagaaaatgataccccaaagagaaggcctcagaagtaacctcagaactaagatctctgaccttctgccttcctgtctctcacccctcattctctcctgagatgagtcacagacatcagaattc

SEQ ID NO: 617946 - DNA, 601 bp, Homo sapiens
tcaattcaacaattaaaaaataccaataaaagcacaatatagtataacaacagtttacatagcatttacattgtattactataagtaatctagagatgatttaaagtatacggaaagggctgggtgttgtggctcatgcctgtaatcccagcacttttggaggctgaggcaggaggactgtttgagcccaggagatcagtgctgtgatgaaccatgatcatgccactgcactgaagctgggatgacagagcaagacccatttcttaaaaaaaagaaaagtgtacgggatgatatgcataggttacatgcaaataccatgttactttatatcggggacctgagcatctgtagagtttagtattcacaggggtcctgggaccaatcccctggggagatggaaggaggactcaggggatgtgtgtgcacatgcacrtatgtgcattgctacttcttaagtttttaagtgcctttactgctttttgggcaaagttgtatttttctcctgtccttcagcagctctgtttcacttggtctgtgtaatcattattctgaatgttttttctttcttgtgctagtaatccccctgctgtggttttttggg

SEQ ID NO: 617947 - DNA, 590 bp, Homo sapiens
cacccagcctttcatgggttgagctgcagtattacatgggaaaggtcatggatacagggagaggtgaagaatttgggcaaaaaaaaattaatctgtcacattcttaaaatcatgttttattgcaacttttcacctgattcaaacctatgaggcttactacccaaaggcaggagagggtgtaaatttcatcactttagcaagaaaatgggctggaaagctatgatttgtggagagaggtaatttgtttcattccattgatttccctttgaaaaacaaagtctaggcctgataatgctagattgtagcattttcccagagtatagggaagatggcctctctgcctrtagtagcttggctgtgaaacctggggtttcataaaaactagatataatgtcagtgaagtaaaagaaaaacccactgttttccatctcaaggcatagtgaaatgagacagaagtaggagtgcaaagctaggacaggtgtgttgattcttctctctggagaggtgtcagataggtggtgggaggtgggtgggacagagagacttctccctgattttcacctggattctgaaaatgatcttggagtggc

SEQ ID NO: 617948 - DNA, 581 bp, Homo sapiens
agaaaccctgtccctactaaaacttcaaaattagccagatgtggtagcgcatgcctgtaatcccagctactcrggaggctgaggcaggagaattgattgaacctgggaggtggaggttgtggtgagccgagatcacgccattgcactccagcctgggcaacaagagcgaaactcagtctcaaaaaaaaaaaaagaagaagaagaagaagaaattctactcccaagaacttatcctatgggaacgattcaaataaatgaagaaaaaaatcatgtgtataaaaatattcatagcaccattaactgtagcaataaatgttagaattaaaagagatgatatatgtaaagtgcttaacaggatgcctagtaatcaatcagcatagactgctgtaatcccctacttactcttgaatgctaatgagccttcacattttgtgccatctgcatggaaagctcttcctccctgatacctgcatcactccctctctcctttccttcaagtcttcttaaatgggaccccatcagagaggccttcccaaaccaccctttctaaacaacacatctttgctgacgtttttctacct

SEQ ID NO: 617949 - DNA, 571 bp, Homo sapiens
acacagtggaaactgctaaagctttagaagtgtaycaaagtagctatactttgcattgtgaagggcccgatggacaacctgggactgttcaaccaattgcaacttctgtacctataaattaacgggggagagatttattatgacaatggggagcacaagttctaattccataacaattacacagccctcaaaatcaacatatgatgcacgaaatggggcatgtccctggtataggagtagaaaaaaaattgcaaggtttgaaagaactgcttcaaacggaaagacaaagttcctgccaaagattaggataccatttttgatggtggccatagttaagcctccagaacctatacctttaaaatggttaacagataagccaatttggatagaatcatggctgctaagcaaagagaaactggatgctttagagaaattagttactgaacaattagaaaatgggcacatagctccaacattttccccttggaattctccagttttcataattaagaaaaaatcaggtaaatggagaatgttaactgacttaagagccatcaattcagttatacaa

SEQ ID NO: 617950 - DNA, 571 bp, Homo sapiens
acacagtggaaactgctaaagctttagaagtgtatcaaagtagctatactttgcattgtgaagggcccgatggacaacctgggactgttcaaccaattgcaacttctgtacctataaattaacgggggagagatttattatgacaatggggagcacaagttctaattccataacaattacacagccctcaaartcaacatatgatgcacgaaatggggcatgtccctggtataggagtagaaaaaaaattgcaaggtttgaaagaactgcttcaaacggaaagacaaagttcctgccaaagattaggataccatttttgatggtggccatagttaagcctccagaacctatacctttaaaatggttaacagataagccaatttggatagaatcatggctgctaagcaaagagaaactggatgctttagagaaattagttactgaacaattagaaaatgggcacatagctccaacattttccccttggaattctccagttttcataattaagaaaaaatcaggtaaatggagaatgttaactgacttaagagccatcaattcagttatacaa

SEQ ID NO: 617951 - DNA, 571 bp, Homo sapiens
acacagtggaaactgctaaagctttagaagtgtatcaaagtagctatactttgcattgtgaagggcccgatggacaacctgggactgttcaaccaattgcaacttctgtacctataaattaacgggggagagatttattatgacaatggggagcacaagttctaattccataacaattacacagccctcaaaatcaacatatgatgcacgaaatggggcatgtccctggtataggagtagaaaaaaaattgcaaggtttgaaagaactgcttcaaacggaaagacaaagttcctgccaaagattaggataccatttttgatggtggccatagttaagcctccagaacctatacctttaaaatggttaacagataagccaatttggatagaatmatggctgctaagcaaagagaaactggatgctttagagaaattagttactgaacaattagaaaatgggcacatagctccaacattttccccttggaattctccagttttcataattaagaaaaaatcaggtaaatggagaatgttaactgacttaagagccatcaattcagttatacaa

SEQ ID NO: 617952 - DNA, 606 bp, Homo sapiens
ggctcactgcaacctctgcctcccaggtttgagtgattatcctgcctcagcctcctgaatagytgggactacaggtgcacaccaccacacccagttaatttttgtattttcagtagagatagggttttgtcacgttgaccaggctggtctcaaactcctggcctcaagtgacccacctgcctcagcctcccatagtgttgggattacacgcacactttaaacctgatggccaaattacatgaaagaaaattcagaactcaaatagttactatttttaaaaaccctaaaatgaaaaattctcagttcttttgcctatctattttttttccctgcctactttgaatctgctgatttgtctactggtgttgagataagacttactgtctgtggtgttaccaattcaaggttatttggctgaagaaaaacaaaagaatgaaacaattctttatttttttttctctttttgagataaggtctcactctaaggtctcactctgttccccagactggagtgcagtagtgggatcatagctcactgttatctcaacctcccaggctcaagcaatcctcctgcctcatcctctctagtagttggtacaataggca

SEQ ID NO: 617953 - DNA, 606 bp, Homo sapiens
ggctcactgcaacctctgcctcccaggtttgagtgattatcctgcctcagcctcctgaatagttgggactacaggtgcacaccaccacacccagttaatttttgtattttcagtagagatagggttttgtcacgttgrccaggctggtctcaaactcctggcctcaagtgacccacctgcctcagcctcccatagtgttgggattacacgcacactttaaacctgatggccaaattacatgaaagaaaattcagaactcaaatagttactatttttaaaaaccctaaaatgaaaaattctcagttcttttgcctatctattttttttccctgcctactttgaatctgctgatttgtctactggtgttgagataagacttactgtctgtggtgttaccaattcaaggttatttggctgaagaaaaacaaaagaatgaaacaattctttatttttttttctctttttgagataaggtctcactctaaggtctcactctgttccccagactggagtgcagtagtgggatcatagctcactgttatctcaacctcccaggctcaagcaatcctcctgcctcatcctctctagtagttggtacaataggca

SEQ ID NO: 617954 - DNA, 632 bp, Homo sapiens
cagcctgggcaaaatggcaaaaccccatctctactaaaaatacaaaagctagctaggtgtggtagcaagtgctcatagtcctggctacttgggagactaaggtggaggatcacctgagcctgggaggttgaggctgcattgagccatgatttcaccactgcactccagcctgggcaatagggtgagaccctgtctcaaatatataataaaataaaaaacaataaactgtcattctgttttrgtcaaatgttttcaatttttttacatctttgctaaaatttagttgataactttgtatgggaagcattgccaaaagataagtctaaatcttcttttttttttctctaagacagaatcttgctttgtcacccaggctggagtgcagtggcgtgatctaggttcactgcaacctctgccccaaggttcaagcgattctcctgcctcaacctcccaagtagctgggactacagacacatgccaccatgcccggctaattttgtatttttagtagagacaagatttctccatgttggcgaggctggtgtcgaagtcctgacctctgatgatctgtccaacttggcctcccaaagtgttggaattacaggcatgagccactgtgcctggtctaaatc

SEQ ID NO: 617955 - DNA, 632 bp, Homo sapiens
cagcctgggcaaaatggcaaaaccccatctctactaaaaatacaaaagctagctaggtgtggtagcaagtgctcatagtcctggctacttgggagactaaggtggaggatcacctgagcctgggaggttgaggctgcattgagccatgatttcaccactgcactccagcctgggcaatagggtgagaccctgtctcaaatatataataaaataaaaaacaataaactgtcattctgttttggtcaaatgttttcaatttttttacatctttgctaaaatttagttgataactttgtatgggaagcattgccaaaagataagtctaaatcttcttttttttttctctragacagaatcttgctttgtcacccaggctggagtgcagtggcgtgatctaggttcactgcaacctctgccccaaggttcaagcgattctcctgcctcaacctcccaagtagctgggactacagacacatgccaccatgcccggctaattttgtatttttagtagagacaagatttctccatgttggcgaggctggtgtcgaagtcctgacctctgatgatctgtccaacttggcctcccaaagtgttggaattacaggcatgagccactgtgcctggtctaaatc

SEQ ID NO: 617956 - DNA, 632 bp, Homo sapiens
cagcctgggcaaaatggcaaaaccccatctctactaaaaatacaaaagctagctaggtgtggtagcaagtgctcatagtcctggctacttgggagactaaggtggaggatcacctgagcctgggaggttgaggctgcattgagccatgatttcaccactgcactccagcctgggcaatagggtgagaccctgtctcaaatatataataaaataaaaaacaataaactgtcattctgttttggtcaaatgttttcaatttttttacatctttgctaaaatttagttgataactttgtatgggaagcattgccaaaagataagtctaaatcttcttttttttttctctaagacagaatcttgctttgtcacccaggctggagtgcagtggygtgatctaggttcactgcaacctctgccccaaggttcaagcgattctcctgcctcaacctcccaagtagctgggactacagacacatgccaccatgcccggctaattttgtatttttagtagagacaagatttctccatgttggcgaggctggtgtcgaagtcctgacctctgatgatctgtccaacttggcctcccaaagtgttggaattacaggcatgagccactgtgcctggtctaaatc

SEQ ID NO: 617957 - DNA, 632 bp, Homo sapiens
cagcctgggcaaaatggcaaaaccccatctctactaaaaatacaaaagctagctaggtgtggtagcaagtgctcatagtcctggctacttgggagactaaggtggaggatcacctgagcctgggaggttgaggctgcattgagccatgatttcaccactgcactccagcctgggcaatagggtgagaccctgtctcaaatatataataaaataaaaaacaataaactgtcattctgttttggtcaaatgttttcaatttttttacatctttgctaaaatttagttgataactttgtatgggaagcattgccaaaagataagtctaaatcttcttttttttttctctaagacagaatcttgctttgtcacccaggctggagtgcagtggcgtgatctaggttcactgcaacctctgccccaaggttcaagcgattctcctgcctcaacctcccaagtagctgggactacagacacatgccaccatgcccggctaattttgtatttttagtagagacaagatttctccatgttggcgaggctgrtgtcgaagtcctgacctctgatgatctgtccaacttggcctcccaaagtgttggaattacaggcatgagccactgtgcctggtctaaatc

SEQ ID NO: 617958 - DNA, 597 bp, Homo sapiens
tgagccatttatctgtctctctaactgatttctccagaattcagaagccattcgtgagcattcctaaattatggcaatataattatttgcataatttcaataagaatctgtttttggtaacaggattcaattggagacactgtttgttttatcaaggctttaactcgaacggcagatacaaccagaccactttaaggaattgaggttgactctatagcaccaatacaaagccccttagaatgactggcttggtgtcctgtctacaagggtcatttagaaagttgctgtccttgtggwaagaagtaaagaatgtcaatttctgacgggcccaggaaccttaagttatttggggagcttgagaagagaggactacaccaattcataaaagtattacaggagggctggcaagatgtctgaaaaggaacagttccggcctgcagcacccaatgagatcaacacagaaggcaggtggttcatgcatttccaacagcctccactggtgatacccatgcaaacagggtctggagtggacctccagcatctcaagcaaacctgcagcagagggacctgactgttagaaggaaaactaacaaacag

SEQ ID NO: 617959 - DNA, 553 bp, Homo sapiens
ttgcacgctcatatgagcttatggatcaaaccatgtgtatgatttctaagatccctcgtgcagtatatatttgcactgtttataaatgacatccccttgaattgaattcagtgcaattcaaaacagtaatttgtgggaaaaattagatatgcagatagcctggactctagagaagcacacatcatttggagaataatagtgaaccggctggtctatgagggaagaaaacagagtgaatatagactattagtgaacaaggatattttcccatgtatattcaaattaargtgaacttctttagagaattgtgccttagaaagaaaaagtatttccctatatttgagtcctcacaagttttcctacgatgagtgcttttgtgattattttgaataacaaagtaatatttaaagaaactctcttgccctgaatgtactttaatttatgtcaattgaagttgcatatagagatcatcaaagtcaagctacaagaaaaagaggaacataacttagcaaagacttagaggattagtcctaatagtgtgaaatcaaaattt

SEQ ID NO: 617960 - DNA, 621 bp, Homo sapiens
actaattttccctcccttgggtatatacccagcattgctgggttgctgcattgcaggattgctgtatcatatgatagttctatttttaattttttgagggacctccatattgttctccatagtgaatgtactaatttacattcccaccaacagagtaagagggttcwcttttccccacattcttgcaagcatttgttattgcctctcttttgcataaaagccattttaatgggggtaagatgatatcttattgtagttttgatttgaaatgctctgatgatcaattatattgagcaccgtttcatatacctatttgacatttatatatcttcttttttgtttttgctcattttttgagacagggtctcactctgtcacccaggctggagtgcagtggtatgatgatggcttactgtagttttgactaccagggttcaagcaatcctcccacctcagcctcctgagtagctgggaccacaggcatgcatcaccatgcccagatagtttttaaaattatttgctatgtttttcaggttggtcttgaactcctgggctcaagtggtccacctgtcttggctccccaaaatgctggaattacaggtgagagccaccgcgcctgac

SEQ ID NO: 617961 - DNA, 621 bp, Homo sapiens
actaattttccctcccttgggtatatacccagcattgctgggttgctgcattgcaggattgctgtatcatatgatagttctatttttaattttttgagggacctccatattgttctccatagtgaatgtactaatttacattcccaccaacagagtaagagggttcacttttccccacattcttgcaagcatttgttattgcctctcttttgcataaaagccattttaatgggggtaagatgatatcttattgtagttttgatttgaaatgctctgatgatcaatkatattgagcaccgtttcatatacctatttgacatttatatatcttcttttttgtttttgctcattttttgagacagggtctcactctgtcacccaggctggagtgcagtggtatgatgatggcttactgtagttttgactaccagggttcaagcaatcctcccacctcagcctcctgagtagctgggaccacaggcatgcatcaccatgcccagatagtttttaaaattatttgctatgtttttcaggttggtcttgaactcctgggctcaagtggtccacctgtcttggctccccaaaatgctggaattacaggtgagagccaccgcgcctgac

SEQ ID NO: 617962 - DNA, 590 bp, Homo sapiens
ggtatatacccagcattgctgggttgctgcattgcaggattgctgtatcatatgatagttctatttttaattttttgagggacctccatattgttctccatagtgaatgtactaatttacattcccaccaacagagtaagagggttcacttttccccacattcttgcaagcatttgttattgcctctcttttgcataaaagccattttaatgggggtaagatgatatcttattgtagttttgatttgaaatgctctgatgatcaattatattgagcaccgtttcatatacctatttgacatttatatatcttcttttttgtttttkctcattttttgagacagggtctcactctgtcacccaggctggagtgcagtggtatgatgatggcttactgtagttttgactaccagggttcaagcaatcctcccacctcagcctcctgagtagctgggaccacaggcatgcatcaccatgcccagatagtttttaaaattatttgctatgtttttcaggttggtcttgaactcctgggctcaagtggtccacctgtcttggctccccaaaatgctggaattacaggtgagagcc

SEQ ID NO: 617963 - DNA, 498 bp, Homo sapiens
atatgatagttctatttttaattttttgagggacctccatattgttctccatagtgaatgtactaatttacattcccaccaacagagtaagagggttcacttttccccacattcttgcaagcatttgttattgcctctcttttgcataaaagccattttaatgggggtaagatgatatcttattgtagttttgatttgaaatgctctgatgatcaattatattgagcaccgtttcatatacctatttgacatttatatatcttcttttttgtttttgctcattttttgagacagggtctcactctgtcacccaggctggagtgcagtggtatgatgatggcttactgtagttttgactaccagggttcaagcaatcctcccacctcagcctcctgagtagctrggaccacaggcatgcatcaccatgcccagatagtttttaaaattatttgctatgtttttcaggttggtcttgaactcctgggctcaagtggtcca

SEQ ID NO: 617964 - DNA, 498 bp, Homo sapiens
atatgatagttctatttttaattttttgagggacctccatattgttctccatagtgaatgtactaatttacattcccaccaacagagtaagagggttcacttttccccacattcttgcaagcatttgttattgcctctcttttgcataaaagccattttaatgggggtaagatgatatcttattgtagttttgatttgaaatgctctgatgatcaattatattgagcaccgtttcatatacctatttgacatttatatatcttcttttttgtttttgctcattttttgagacagggtctcactctgtcacccaggctggagtgcagtggtatgatgatggcttactgtagttttgactaccagggttcaagcaatcctcccacctcagcctcctgagtagctgggaccacaggcatgcatcaccatgcccagatwgtttttaaaattatttgctatgtttttcaggttggtcttgaactcctgggctcaagtggtcca

SEQ ID NO: 617965 - DNA, 553 bp, Homo sapiens
ttgcacgctcatatgagcttatggatcaaaccatgtgtatgatttctaagatccctcgtgcagtatatatttgcactgtttataaatgacatccccttgaattgaattcagtgcaattcaaaacagtaatttgtgggaaaaattagatatgcagatagcctggactctagagaagcacacatcatttggagaataatagtgaaccggctggtctatgagggaagaaaacagagtgaatatagactattagtgaacaaggatattttcccatgtatattcaaattaaagtgaacttctttagagaattgtgccttagaaagaaaaagtatttccctatatttgagtcctcacaagttttcctacgatgagtgcttttgtgattattttgaataacaaagtaatatttaaagaaactctcttgccctgaatgtactttaatttatgtcaattgawgttgcatatagagatcatcaaagtcaagctacaagaaaaagaggaacataacttagcaaagacttagaggattagtcctaatagtgtgaaatcaaaattt

SEQ ID NO: 617966 - DNA, 484 bp, Homo sapiens
attgagagacactcctttaaacaagcaataagaaacttcctgtgacaacataataaattcaaaaagttctgtaactcagacaatttagatagaagtsataactttggcctataaagccctgttcaccctaaagatggattaaacaatgaaaaagatattgatatcaaaaattcaatcaggaatttgattaaagcatttcattaaatgtgataatttcttagtatattatcttacatatgcaatattcatgtgtaacaaattatatacaagtaaacatttgaccatattatctgcagcataatttacatatcaatttacatattcagttttgcttacatgaaaacttggatcttctcaataagaaaatttgtgaaatctttaattcctcatccccaggaatgtaaataaataaatataaatactgtaagtcagtgattttttcctaggaagacagtaaaaatactttacgtgccttctcattgta

SEQ ID NO: 617967 - DNA, 484 bp, Homo sapiens
attgagagacactcctttaaacaagcaataagaaacttcctgtgacaacataataaattcaaaaagttctgtaactcagacaatttagatagaagtcataactttggcctataaagccctgttcaccctaaagatggattaaacaatgaaaaagatattgatatcaaaarttcaatcaggaatttgattaaagcatttcattaaatgtgataatttcttagtatattatcttacatatgcaatattcatgtgtaacaaattatatacaagtaaacatttgaccatattatctgcagcataatttacatatcaatttacatattcagttttgcttacatgaaaacttggatcttctcaataagaaaatttgtgaaatctttaattcctcatccccaggaatgtaaataaataaatataaatactgtaagtcagtgattttttcctaggaagacagtaaaaatactttacgtgccttctcattgta

SEQ ID NO: 617968 - DNA, 484 bp, Homo sapiens
attgagagacactcctttaaacaagcaataagaaacttcctgtgacaacataataaattcaaaaagttctgtaactcagacaatttagatagaagtcataactttggcctataaagccctgttcaccctaaagatggattaaacaatgaaaaagatattgatatcaaaaattcaatcagkaatttgattaaagcatttcattaaatgtgataatttcttagtatattatcttacatatgcaatattcatgtgtaacaaattatatacaagtaaacatttgaccatattatctgcagcataatttacatatcaatttacatattcagttttgcttacatgaaaacttggatcttctcaataagaaaatttgtgaaatctttaattcctcatccccaggaatgtaaataaataaatataaatactgtaagtcagtgattttttcctaggaagacagtaaaaatactttacgtgccttctcattgta

SEQ ID NO: 617969 - DNA, 484 bp, Homo sapiens
attgagagacactcctttaaacaagcaataagaaacttcctgtgacaacataataaattcaaaaagttctgtaactcagacaatttagatagaagtcataactttggcctataaagccctgttcaccctaaagatggattaaacaatgaaaaagatattgatatcaaaaattcaatcaggaatttgattaaagcatttcattaaatgtgataatttcttagtatattatcttacatatgcaatattcatgtgtaacaaattatatacaagtaaacatttgaccatattatctgcagcataatttacatatcaatttacatattcagttttgctyacatgaaaacttggatcttctcaataagaaaatttgtgaaatctttaattcctcatccccaggaatgtaaataaataaatataaatactgtaagtcagtgattttttcctaggaagacagtaaaaatactttacgtgccttctcattgta

SEQ ID NO: 617970 - DNA, 634 bp, Homo sapiens
taacaaattatatacaagtaaacatttgaccatattatctgcagcataatttacatatcaatttacatattcagttttgcttacatgaaaacttggatcttctcaataagaaaatttgtgaaatctttaattcctcatccccaggaatgtaaataaataaatataaatactgtaagtcagtgattttttcctaggaagacagtaaaaatactttacgtgccttctcattgtaaacctaaataacaaacagagaaaggctctctaaaggaaaaagacacatcttagggaggarggcactgtaatgggaatatgcatgacaaagcaaactatatagattcaaatggtaaaggaagacaaggtctttaaaagaaaaatgatcaacctggaagtacgggggagtagaaaaaaataaataagggaaaaatgaaggggcttctataatagttttgatatagttacctttgactataaagatcaacaacaaggtcaatatcagttgaagtttgggcaggcggttgctggatagatgtcctcacagaagtgtattttgtgtaaggttgctatggcctttgtgcagggttgtggttttgtggtattttgtgatagtttttatcaggcctagaagcatgagaac

SEQ ID NO: 617971 - DNA, 504 bp, Homo sapiens
acaactgaatgaaatccctttataaaatgtttaaatggcccatcaggtaaycaaatgtacctgaagttttgattgttttcctaggaatataggtttgacaaaccaaacattggttataaactattttagcagtttagaaatcaccacaccaatatatttaatttggatcattttctctttccatgatgagttatggaatgcagaacttttaataacaaaagttttaaggacttaagaaggataaggtggccatcctggttcttcataagtctgtgcttaattaacattagacttacatcctcttgaataccagctgtttctccaaattaggtgcatggcactggtaactgatgagtagttataggtaatttgacttagaccatggagtttatttaaattatatatctaaacaatttcaatattggtgatttagcatgcaaatgtggcaaaatatttccttggtatacaatttttgttttacttgggttagaagttttataaacc

SEQ ID NO: 617972 - DNA, 524 bp, Homo sapiens
aaaaatgaaggggcttctataatagttttgatatagttacctttgactataaagatcaacaacaaggtcaatatcagttgaagtttgggcaggcggttgctggatagatgtcctcacagaagtgtattttgtgtaaggttgctatggcctttgtgcarggttgtggttttgtggtattttgtgatagtttttatcaggcctagaagcatgagaaccctctcttcaaggccttctctgaatctatttgttcaggtttcttcttctctttttaaacattattgacagttttgattctgataactttcatatcatgatccctaatttcaaaaaaaaattaaacgtgtaacttatttatgatgtatttgataggcttggatttgtgaatcacctctactgtctatagtggtagatatatctgagcctgcttacacaggacttccatcagattctctcttcagtggaatggaagagggggttttggagaaggggatgaaggaattgtgctgcatcagaggtccccacct

SEQ ID NO: 617973 - DNA, 495 bp, Homo sapiens
tgaaatccctttataaaatgtttaaatggcccatcaggtaaccaaatgtacctgaagttttgattgttttcctaggaatataggtttgacaaaccaaacattggttataaactattttagcagtttagaaatcaccacaccaatatatttaatttggatcattttctctttccatgatgagttatggaatgcagaacttttaataacaaaagttttaaggacttaagaaggataaggtggccatcctggttcttcataagtstgtgcttaattaacattagacttacatcctcttgaataccagctgtttctccaaattaggtgcatggcactggtaactgatgagtagttataggtaatttgacttagaccatggagtttatttaaattatatatctaaacaatttcaatattggtgatttagcatgcaaatgtggcaaaatatttccttggtatacaatttttgttttacttgggttagaagttttataaacc

SEQ ID NO: 617974 - DNA, 524 bp, Homo sapiens
aaaaatgaaggggcttctataatagttttgatatagttacctttgactataaagatcaacaacaaggtcaatatcagttgaagtttgggcaggcggttgctggatagatgtcctcacagaagtgtattttgtgtaaggttgctatggcctttgtgcagggttgtggttttgtggtattttgtratagtttttatcaggcctagaagcatgagaaccctctcttcaaggccttctctgaatctatttgttcaggtttcttcttctctttttaaacattattgacagttttgattctgataactttcatatcatgatccctaatttcaaaaaaaaattaaacgtgtaacttatttatgatgtatttgataggcttggatttgtgaatcacctctactgtctatagtggtagatatatctgagcctgcttacacaggacttccatcagattctctcttcagtggaatggaagagggggttttggagaaggggatgaaggaattgtgctgcatcagaggtccccacct

SEQ ID NO: 617975 - DNA, 495 bp, Homo sapiens
tgaaatccctttataaaatgtttaaatggcccatcaggtaaccaaatgtacctgaagttttgattgttttcctaggaatataggtttgacaaaccaaacattggttataaactattttagcagtttagaaatcaccacaccaatatatttaatttggatcattttctctttccatgatgagttatggaatgcagaacttttaataacaaaagttttaaggacttaagaaggataaggtggccatcctggttcttcataagtctgtgcttaattaacattagacttacatcctcttgaataccagctgtttctccaaattaggtgcatggcactggtaactsatgagtagttataggtaatttgacttagaccatggagtttatttaaattatatatctaaacaatttcaatattggtgatttagcatgcaaatgtggcaaaatatttccttggtatacaatttttgttttacttgggttagaagttttataaacc

SEQ ID NO: 617976 - DNA, 186 bp, Homo sapiens
ttcttggggtatcttggaacttatggggaatttttacccatgatattaaagttattagaaatctgtgttcacaagtgttttttagggtccttttcattctttcatgratcttctaagagacaccatattctagaattttgcatgcttgtgaagtttttagaaactgcatcaccattaagcaattaa

SEQ ID NO: 617977 - DNA, 186 bp, Homo sapiens
ttcttggggtatcttggaacttatggggaatttttacccatgatattaaagttattagaaatctgtgttcacaagtgttttttagggtccttttcattctttcatgaatcttctaagagacaccatattctaraattttgcatgcttgtgaagtttttagaaactgcatcaccattaagcaattaa

SEQ ID NO: 617978 - DNA, 524 bp, Homo sapiens
aaaaatgaaggggcttctataatagttttgatatagttacctttgactataaagatcaacaacaaggtcaatatcagttgaagtttgggcaggcggttgctggatagatgtcctcacagaagtgtattttgtgtaaggttgctatggcctttgtgcagggttgtggttttgtggtattttgtgatagtttttatcaggcctagaagcatgagaaccctctcttcaaggccttctctgaatctatttgttcaggtttcttcttctctttttaaacattaktgacagttttgattctgataactttcatatcatgatccctaatttcaaaaaaaaattaaacgtgtaacttatttatgatgtatttgataggcttggatttgtgaatcacctctactgtctatagtggtagatatatctgagcctgcttacacaggacttccatcagattctctcttcagtggaatggaagagggggttttggagaaggggatgaaggaattgtgctgcatcagaggtccccacct

SEQ ID NO: 617979 - DNA, 257 bp, Homo sapiens
cagcttaaaacaactcattattacttgttgtttggcttagagagtcttggtggccagctcatctcacacacatttgcagccaagctggattgtgtgaaagcacagtggggtggtgtgcagggtggcycactagtggttgggagtggatgttgctggaggctcactagttgttgggagtcggtgttgctggaggctcagtgggggatgtcaatgcgtgtagctagtcatggactggccatgtggtttctatcatgagg

SEQ ID NO: 617980 - DNA, 581 bp, Homo sapiens
ttacttggttttcagacatttgaggcttttctggatatcaatttgttgttggtttctaatttaatttcaagtgttcagacaacatactttgtatactatttcaggcttgaaccttttctcaatcgatcgacatagagtctatcttggtactgccaagtaccatttgggtcaggattttgtcatttagatccgtatttttcctatatttttatctggttgttccatcagttactgagagagcagtattaattcaccagctataattttgrattgtcaatttcctgcttttgttctgttgtttttgattcacatacgttgaggctctgtgtgtgtgtgtgtgtactttgtgtgcactttgaggcacaatttataattgtaacatcatcgtctctgattcttttatttttattaaattaccctgtttatttctggtgatatattttgttctgaagcctctttcatctagtgttaacatctctgttggagctttttatgattagtgtctgaatagcatatttttacgattagtgtctgcatagcatattttttctcatactttgtatctttgtgtttaaattgtg

SEQ ID NO: 617981 - DNA, 581 bp, Homo sapiens
ttacttggttttcagacatttgaggcttttctggatatcaatttgttgttggtttctaatttaatttcaagtgttcagacaacatactttgtatactatttcaggcttgaaccttttctcaatcgatcgacatagagtctatcttggtactgccaagtaccatttgggtcaggattttgtcatttagatccgtatttttcctatatttttatctggttgttccatcagttactgagagagcagtattaattcaccagctataattttggattgtcaatttcctgcttttgttctgttgtttttgattcacatacgttgaggctctgtgtgtgtgtgtgtgtactttgtgtgcactttgaggcacaatttataattgtaacatcatcgtctctgattcttttatttttattaaattaccctgtttatttctggtgatatattttgttctgaagcctctttcatctagtgttaacatctctgttgragctttttatgattagtgtctgaatagcatatttttacgattagtgtctgcatagcatattttttctcatactttgtatctttgtgtttaaattgtg

SEQ ID NO: 617982 - DNA, 581 bp, Homo sapiens
ttacttggttttcagacatttgaggcttttctggatatcaatttgttgttggtttctaatttaatttcaagtgttcagacaacatactttgtatactatttcaggcttgaaccttttctcaatcgatcgacatagagtctatcttggtactgccaagtaccatttgggtcaggattttgtcatttagatccgtatttttcctatatttttatctggttgttccatcagttactgagagagcagtattaattcaccagctataattttggattgtcaatttcctgcttttgttctgttgtttttgattcacatacgttgaggctctgtgtgtgtgtgtgtgtactttgtgtgcactttgaggcacaatttataattgtaacatcatcgtctctgattcttttatttttattaaattaccctgtttatttctggtgatatattttgttctgaagcctctttcatctagtgttaacatctctgttggagctttttmtgattagtgtctgaatagcatatttttacgattagtgtctgcatagcatattttttctcatactttgtatctttgtgtttaaattgtg

SEQ ID NO: 617983 - DNA, 396 bp, Homo sapiens
ttaccagcaacaagaaccccttttatgagatgaagaggccaggtcagtctcataacatgtgtccccctccgtgtgttgaatttatgtcagagccaggttctttcctatttgacgtctctcaccaaattccagtgtttatgtcytaggaggtgcccaataaattctagagttgatacaagctgcaattttagagaaattaaattagcaagtaaaattagattatatacaacctaatcaactttttttttctgaggatgaccaagatttgggcttcagtgacaatagttgtcccctaaatatttatactcaaaatctaggatcaccagtacaatgttgaatagaggtgatgaacacacacatccctttcttgtcctaatctatgtggtttaaacattt

SEQ ID NO: 617984 - DNA, 396 bp, Homo sapiens
ttaccagcaacaagaaccccttttatgagatgaagaggccaggtcagtctcataacatgtgtccccctccgtgtgttgaatttatgtcagagccaggttctttcctatttgacgtctctcaccaaattccagtgtttatgtcctaggaggtgcccaataaattctagagttgatacaagctgcaattttagagaaattaaattagcaagtaaaattagattatatacaacytaatcaactttttttttctgaggatgaccaagatttgggcttcagtgacaatagttgtcccctaaatatttatactcaaaatctaggatcaccagtacaatgttgaatagaggtgatgaacacacacatccctttcttgtcctaatctatgtggtttaaacattt

SEQ ID NO: 617985 - DNA, 591 bp, Homo sapiens
cataaaacaagtttggaatttcccccttctttatttctgaaataatttaaaaattttattttttttaaacgtttgaaagaattcaccagtgaaattctttagatctggggtttgcttatttttttatttatttaattttatgtttttatgtgcaggtattttacaattaatttaattactttaataaatgtcaattacttcatatgttccattaaatcttgtgaatttttttataagtttttttcaaggaagtcaccctttcatccaagtaatgaaaatttgtatataatgtttcacaatattccattatcttgttaatgtctcttgtgtytacaactgtacaatctcattaatccctgatatgtataatttgcgttttctttctttctcacagaactaacttttggccatgttgattttctcctgtttctgttttctgtctcattgatttctaatttctgttttatttcctttcctctacttgttttggacttaatttgctctcttgttttagattttctttttaaggtagaaaattagttcacttgttttgaacttctcttttctagaataagcatttatacaaaaaat

SEQ ID NO: 617986 - DNA, 450 bp, Homo sapiens
gcgcccgccgccatgcctggctaatttttgtatttttagtagagacggmgtttcaccgtgttagccaggatggtctcaatctcctgacctcgtgatccacccgcctcggcctcccaaagtgctgggattacaggctgagccactgcgaccagcctattttgctcttatgttctatttgctccatcattttttgctcctctttctttcatgcctttttatattaactgaacaatattcagcattccattttaattcctttattggcattttagaagaatatcttcatataatgtggtggttctctagggattataataaacatcctgggcttatcgcagtccacttagtgttaatagtcagcgttttcatgtaacataaagaaaagttgcgacaaaattgttgcgtttagtctcctgtcagagctattaatttagaatattttacacacat

SEQ ID NO: 617987 - DNA, 450 bp, Homo sapiens
gcgcccgccgccatgcctggctaatttttgtatttttagtagagacggagtttcaccgtgttagccaggatggtctcratctcctgacctcgtgatccacccgcctcggcctcccaaagtgctgggattacaggctgagccactgcgaccagcctattttgctcttatgttctatttgctccatcattttttgctcctctttctttcatgcctttttatattaactgaacaatattcagcattccattttaattcctttattggcattttagaagaatatcttcatataatgtggtggttctctagggattataataaacatcctgggcttatcgcagtccacttagtgttaatagtcagcgttttcatgtaacataaagaaaagttgcgacaaaattgttgcgtttagtctcctgtcagagctattaatttagaatattttacacacat

SEQ ID NO: 617988 - DNA, 450 bp, Homo sapiens
gcgcccgccgccatgcctggctaatttttgtatttttagtagagacggagtttcaccgtgttagccaggatggtctcaatctcctgacctcgtgatccacccgcctcggcctcccaaagtgctgggattacaggctgagccactgcgmccagcctattttgctcttatgttctatttgctccatcattttttgctcctctttctttcatgcctttttatattaactgaacaatattcagcattccattttaattcctttattggcattttagaagaatatcttcatataatgtggtggttctctagggattataataaacatcctgggcttatcgcagtccacttagtgttaatagtcagcgttttcatgtaacataaagaaaagttgcgacaaaattgttgcgtttagtctcctgtcagagctattaatttagaatattttacacacat

SEQ ID NO: 617989 - DNA, 517 bp, Homo sapiens
ttgctcttatgttctatttgctccatcattttttgctcctctttctttcatgcctttttatattaactgaacaatattcagcrttccattttaattcctttattggcattttagaagaatatcttcatataatgtggtggttctctagggattataataaacatcctgggcttatcgcagtccacttagtgttaatagtcagcgttttcatgtaacataaagaaaagttgcgacaaaattgttgcgtttagtctcctgtcagagctattaatttagaatattttacacacattatcaatagtacacttaattttttattcaaagcatcagttgtttgttataaaactaaaaaaaaaaagccttagtttttcacgtttatgcacatgccattcctagagcttctccttgcttcctgtaggtcagaatttccatctgttgttatctttctttagcctaaaaaatttccgtttgcatttcttgtatctaggtctgctaatgacaattgtttgaagctttc

SEQ ID NO: 617990 - DNA, 517 bp, Homo sapiens
ttgctcttatgttctatttgctccatcattttttgctcctctttctttcatgcctttttatattaactgaacaatattcagcattccattttaattcctttattggcattttagaagaatatcttcatataatgtggtggttctctagggattataataaacatcctgggcttatcgcagtccacttagtgttaatagtcagcgttttcatgtaacataaagaaaagttgcgrcaaaattgttgcgtttagtctcctgtcagagctattaatttagaatattttacacacattatcaatagtacacttaattttttattcaaagcatcagttgtttgttataaaactaaaaaaaaaaagccttagtttttcacgtttatgcacatgccattcctagagcttctccttgcttcctgtaggtcagaatttccatctgttgttatctttctttagcctaaaaaatttccgtttgcatttcttgtatctaggtctgctaatgacaattgtttgaagctttc

SEQ ID NO: 617991 - DNA, 517 bp, Homo sapiens
ttgctcttatgttctatttgctccatcattttttgctcctctttctttcatgcctttttatattaactgaacaatattcagcattccattttaattcctttattggcattttagaagaatatcttcatataatgtggtggttctctagggattataataaacatcctgggcttatcgcagtccacttagtgttaatagtcagcgttttcatgtaacataaagaaaagttgcgacaaaattgttgcrtttagtctcctgtcagagctattaatttagaatattttacacacattatcaatagtacacttaattttttattcaaagcatcagttgtttgttataaaactaaaaaaaaaaagccttagtttttcacgtttatgcacatgccattcctagagcttctccttgcttcctgtaggtcagaatttccatctgttgttatctttctttagcctaaaaaatttccgtttgcatttcttgtatctaggtctgctaatgacaattgtttgaagctttc

SEQ ID NO: 617992 - DNA, 517 bp, Homo sapiens
ttgctcttatgttctatttgctccatcattttttgctcctctttctttcatgcctttttatattaactgaacaatattcagcattccattttaattcctttattggcattttagaagaatatcttcatataatgtggtggttctctagggattataataaacatcctgggcttatcgcagtccacttagtgttaatagtcagcgttttcatgtaacataaagaaaagttgcgacaaaattgttgcgtttagtctcctgtcagagctattaatttagaatattttacacacattatcaatagtacacttaattttttattcaaagcatcagttgtttgttataaaactaaaaaaaaaaagycttagtttttcacgtttatgcacatgccattcctagagcttctccttgcttcctgtaggtcagaatttccatctgttgttatctttctttagcctaaaaaatttccgtttgcatttcttgtatctaggtctgctaatgacaattgtttgaagctttc

SEQ ID NO: 617993 - DNA, 407 bp, Homo sapiens
tttcattgctttttaaagtgtcatttctgatgacaggtcatctgtctatttgtttccacggatgtaaattattttctccctccctttagctactttcaagatttactctattttttgcccagtggtttgactatggtatgtctacatttggttctctttatttttattctgttctttgagtttcttaaacctgtaagttgatatatgctgacaattaggaaaacttttggtctttactttttcaaatagctttttttgtctcatttacttctctactctttctaggastccaattatattagtgctagactggccctatttttattatttttcttcgtttgtattaactgtattgggaaactgttcttgatctgtttttaagtgcactgataattttttgtgccatc

SEQ ID NO: 617994 - DNA, 592 bp, Homo sapiens
aatgaaacactgcatgttctcactcataggtgggaattgaacaatgagaacacatgcacacaggaaggggaacatcacacaccagggcckgttttggggtggggggtgggggtagggatagcattaggagatatacctaatgctaaatgacgagttaacgggtgcagcacaccaacatggcacatgtatacataagtaactaaactgcacgttgtgcacatgtgccctaaaacttaaagtataaaaaaaaatcatcaaacaggtggtaatttcaaaacatggcttttccaggcagccaattttctgaatgtatcgcaaaagaagataaattgcatgtctatgtagatcatgtcaatgaaataaacaataaagttacttattggaatattgaaagtggttgataataaataaattatttatatttatggtaaaagcaataaacttgatttttagggggttcaatgacttcctgaaaatatcctctcacagattttctcagagtgtccagttggcaaaagcgcagctccaaatagctatttctgtcaacgtctacagaacatttacagtttgatttccaaaagtttccatttct

SEQ ID NO: 617995 - DNA, 592 bp, Homo sapiens
aatgaaacactgcatgttctcactcataggtgggaattgaacaatgagaacacatgcacacaggaaggggaacatcacacaccagggccggttttggggtggggggtgggggtagggatagcattaggagatatacctaatgctaaatgacgagttaaygggtgcagcacaccaacatggcacatgtatacataagtaactaaactgcacgttgtgcacatgtgccctaaaacttaaagtataaaaaaaaatcatcaaacaggtggtaatttcaaaacatggcttttccaggcagccaattttctgaatgtatcgcaaaagaagataaattgcatgtctatgtagatcatgtcaatgaaataaacaataaagttacttattggaatattgaaagtggttgataataaataaattatttatatttatggtaaaagcaataaacttgatttttagggggttcaatgacttcctgaaaatatcctctcacagattttctcagagtgtccagttggcaaaagcgcagctccaaatagctatttctgtcaacgtctacagaacatttacagtttgatttccaaaagtttccatttct

SEQ ID NO: 617996 - DNA, 592 bp, Homo sapiens
aatgaaacactgcatgttctcactcataggtgggaattgaacaatgagaacacatgcacacaggaaggggaacatcacacaccagggccggttttggggtggggggtgggggtagggatagcattaggagatatacctaatgctaaatgacgagttaacgggtgcagcacaccaacatggcacatgtatacatawgtaactaaactgcacgttgtgcacatgtgccctaaaacttaaagtataaaaaaaaatcatcaaacaggtggtaatttcaaaacatggcttttccaggcagccaattttctgaatgtatcgcaaaagaagataaattgcatgtctatgtagatcatgtcaatgaaataaacaataaagttacttattggaatattgaaagtggttgataataaataaattatttatatttatggtaaaagcaataaacttgatttttagggggttcaatgacttcctgaaaatatcctctcacagattttctcagagtgtccagttggcaaaagcgcagctccaaatagctatttctgtcaacgtctacagaacatttacagtttgatttccaaaagtttccatttct

SEQ ID NO: 617997 - DNA, 413 bp, Homo sapiens
tccttctaggtaaagcaacactctggagaacttcttttgaggcatttcaccacsagagtaagtgtgatgtatgagtaattagtccacccacagggatctggtgaaattaaatgggaagttatttcctaactggcatatcttggtgtaaaattaatctaataacagctttcataagagaacataagcttaaaagacaacatttttcattcaactttaccaaacaaagtgcaaatttaggtgtccagttgtgaagtttggttgtgtgtggattgtacggtgaaggtaccagtggacaacagttgctcatcaagcaagtttatacaaaagcttttggacaagtccaactctagataaaattcgaaagtatttcatgcttgtgttcagagtttctttttctctctccaaggtaactc

SEQ ID NO: 617998 - DNA, 423 bp, Homo sapiens
taagtgtgatgtatgagtaattagtccacccacagggatctggtgaaattaaatgggaagttatttcctaactggcatatcttggwgtaaaattaatctaataacagctttcataagagaacataagcttaaaagacaacatttttcattcaactttaccaaacaaagtgcaaatttaggtgtccagttgtgaagtttggttgtgtgtggattgtacggtgaaggtaccagtggacaacagttgctcatcaagcaagtttatacaaaagcttttggacaagtccaactctagataaaattcgaaagtatttcatgcttgtgttcagagtttctttttctctctccaaggtaactcacatatcaaaagacatacgggttgtgggtagaacttcctaaaattgctggtgagaagtgtaccatgca

SEQ ID NO: 617999 - DNA, 423 bp, Homo sapiens
taagtgtgatgtatgagtaattagtccacccacagggatctggtgaaattaaatgggaagttatttcctaactggcatatcttggtgtaaaattaatctaataacagctttcataagagaacataagcttaaaagacaacatttttcattcaactttaccaaacaaagtgcaaatttaggtgtccagttgtgaagtttggttgtgtgtggattgtacggtgaaggtaccagtggacaacagttgctcatcaagcaagtttatacaaaagcttttggacaagtccaactctagataaaattcgaaagtatttcatgcttgtgttcagagtttctttttctctctccaaggtaactcacatatcaaaagacataygggttgtgggtagaacttcctaaaattgctggtgagaagtgtaccatgca

SEQ ID NO: 618000 - DNA, 600 bp, Homo sapiens
tttcccttccccttctcaatttaacatagcttccaaatacacttgccagtaaaacaaagttgtttatatggttttgtatttcttcctgctgaattatgaacattttttcatattgacattgatttccatctggccatgaaatactcaaggtgaagaaaatgaaacaaaattgttaatatttatcaagagccaggtactgttttcrgtgtcctagaagcataaactagtgtaacgctcaccagatcatatgagaggcaaaaatggatgaaactataaaatcaagacacagagagttaagggaaatttcccaagatcacacagccactgaggatatgaactagattttgacttcaggctatttaccccagaacctgtgctttcaaccattatttgtactgcttccctaaattactcttgagtacactgtgacatcatacttcacccatgacactgattatctggggaactttgcaacttattctgaatgtgattcagttttcttttctgtacagagataaagtcagtatatactccatagattcgttataaggattatatgaaatgacacatgagaaggctttaaaaggacatggaaagaaa

SEQ ID NO: 618001 - DNA, 600 bp, Homo sapiens
tttcccttccccttctcaatttaacatagcttccaaatacacttgccagtaaaacaaagttgtttatatggttttgtatttcttcctgctgaattatgaacattttttcatattgacattgatttccatctggccatgaaatactcaaggtgaagaaaatgaaacaaaattgttaatatttatcaagagccaggtactgttttcagtgtcctagaagcataaactagtgtaacgctcaccagatcatatgagaggcaaaaatggatgaaactataaaatcaagacacagagagttaarggaaatttcccaagatcacacagccactgaggatatgaactagattttgacttcaggctatttaccccagaacctgtgctttcaaccattatttgtactgcttccctaaattactcttgagtacactgtgacatcatacttcacccatgacactgattatctggggaactttgcaacttattctgaatgtgattcagttttcttttctgtacagagataaagtcagtatatactccatagattcgttataaggattatatgaaatgacacatgagaaggctttaaaaggacatggaaagaaa

SEQ ID NO: 618002 - DNA, 600 bp, Homo sapiens
tttcccttccccttctcaatttaacatagcttccaaatacacttgccagtaaaacaaagttgtttatatggttttgtatttcttcctgctgaattatgaacattttttcatattgacattgatttccatctggccatgaaatactcaaggtgaagaaaatgaaacaaaattgttaatatttatcaagagccaggtactgttttcagtgtcctagaagcataaactagtgtaacgctcaccagatcatatgagaggcaaaaatggatgaaactataaaatcaagacacagagagttaagggaaatttcccaagatcacacagccactgaggatatgaactagattttgacttcaggctatttaccccagaacctgtgctttcaaccattatttgtactgcttccctaaattactcttgagtacactgtgacatcatacttcaccyatgacactgattatctggggaactttgcaacttattctgaatgtgattcagttttcttttctgtacagagataaagtcagtatatactccatagattcgttataaggattatatgaaatgacacatgagaaggctttaaaaggacatggaaagaaa

SEQ ID NO: 618003 - DNA, 482 bp, Homo sapiens
acatggaaagaaataagcttttttgttttcaatcatttttcaataggttatcagtgttgtgaatggttcatgaaaaatgactttgggctcagtgagtaactgaaatgttgttgcttaatagtgtgtttaatattaatataatagtaacaaatgttgttattgttgagtaatacttatttggyttttcactgcttttcttttctagtgttttagtcagagacttcttaagtctcctcaagtgtgtacacatttcttaaatttgttggaaagtaccaaatttaagatatcttgcatttttttcttccttagtaaacactaaattccatcacgcagcagaaaaagggctctgttattgttggtacaatggcttaatattcacttttattccctgtatcgtagttctgatataattgctatttagaataaagcttgttccttattatatgcattcgtaattataaaatttgtgttttaaagccttc

SEQ ID NO: 618004 - DNA, 620 bp, Homo sapiens
cgttggctccacctgccgaattaagtgaatggccacctcctctctctcctctaaatgggtgagaaaataaattggctgaaaaacttactgctcctgtagttacaacattaaaatctggagcaattggtggtgstagacaaaattctattcaaaaagctaaagccaagggagaccttgaagcatggcaatttcccgttactataatccagcaagtaggacagaatatagctaattaggctgctttctcttttaagttactaaagaatttaagcaagccattagtcaatatggactgaactctctttttgtgcaaactttatttaaaaatatggctcttgataatagattactaccatataattaggatactttgacaaaacctgttctcactccatctcagtacttgcagtttaaaacttggtaggctgatgaagctcaaactcaggcaaaagaaaacacacaagtgcagccacctgtgcctgttttctttgatcagttaatatgagttggccctaactggggttgattagagaatcaagcactaatggaagatgttgccattgttcagctgtgcttcatgtgcttacatgcatagaaaaggataaatgttacaggggaaa

SEQ ID NO: 618005 - DNA, 595 bp, Homo sapiens
gaaattttcatatcttcgcccataccttgaaacaytgtaaataaaaagctacaaatatagtttcattgaataaccaaatgccaaaactgccatttctgtttttgacatgattgatctgcattggtaaatgtaatagatactttctgtttggcccttgtcccctgttatactcccctatttactggcttttgtccaagtggaatggtccatattgaatatctcaatctgttcccttgctcattgccttctatgcatgttcatgagattaaagggaaggaggaaatgggattggggtttattgcctaaactccctctctgctaggtctccttgaccaatctttttcataagaaaattagtgtttccttgcgtgatcagggaagtttactccccagaattctgcctgctgctactaacccagagttattgtggggtgtgatttctgtgattccttcacccttctcccctgacattttcgtaagtagtctctttggaaataaacctatgttaaattatcttagtttgagtgtgttctgtttttcctattgagactctgaaatgagtatctaaatgaaaaaatctaccatcttttctcat

SEQ ID NO: 618006 - DNA, 595 bp, Homo sapiens
gaaattttcatatcttcgcccataccttgaaacactgtaaataaaaarctacaaatatagtttcattgaataaccaaatgccaaaactgccatttctgtttttgacatgattgatctgcattggtaaatgtaatagatactttctgtttggcccttgtcccctgttatactcccctatttactggcttttgtccaagtggaatggtccatattgaatatctcaatctgttcccttgctcattgccttctatgcatgttcatgagattaaagggaaggaggaaatgggattggggtttattgcctaaactccctctctgctaggtctccttgaccaatctttttcataagaaaattagtgtttccttgcgtgatcagggaagtttactccccagaattctgcctgctgctactaacccagagttattgtggggtgtgatttctgtgattccttcacccttctcccctgacattttcgtaagtagtctctttggaaataaacctatgttaaattatcttagtttgagtgtgttctgtttttcctattgagactctgaaatgagtatctaaatgaaaaaatctaccatcttttctcat

SEQ ID NO: 618007 - DNA, 508 bp, Homo sapiens
gccatttctgtttttgacatgattgatctgcattggtaaatgtaatagatactttctgtttggcccttgtcccctgttatactcccctatttactggcttttgtccaagtggaatggtccatattgaatatctcaatctgttcccttgctcattgccttctatgcatgttcatgagattaaagggaaggaggaaatgggattggggkttattgcctaaactccctctctgctaggtctccttgaccaatctttttcataagaaaattagtgtttccttgcgtgatcagggaagtttactccccagaattctgcctgctgctactaacccagagttattgtggggtgtgatttctgtgattccttcacccttctcccctgacattttcgtaagtagtctctttggaaataaacctatgttaaattatcttagtttgagtgtgttctgtttttcctattgagactctgaaatgagtatctaaatgaaaaaatctaccatcttttctcata

SEQ ID NO: 618008 - DNA, 530 bp, Homo sapiens
acttttttttcttttctttccttcttttttttttttgacagaatcttactcwgttgcccaggctggagtgcagtggcatgatcttggctcactgcaacctctgcttgcctagttcaagcaattctcacacctcagcctccctagtagctgggattacaggcacatgccaccacactcagatgatttttgtatttttagtagagatggggtttcaccctgtttgccaggctggtctcaaactcctgacctcaagcgatctgcccacctcagcctaccaaagtgctgggattacaggtgtaagccactgaccctgcccaaaaacattttaaccaatagcaaagcacattatttcattacattttttcaaaagttgccagtaatttcaattaaaaatatatataacatgtttaatgcaatacaaatgcttttcaatgtacaatggggttaagtcttgataagctgattataaattgaaaatacagtaagttaaaaatgtatttaatacctaacttactgaatatcacagctta

SEQ ID NO: 618009 - DNA, 530 bp, Homo sapiens
acttttttttcttttctttccttcttttttttttttgacagaatcttactctgttgcccaggctggagtgcagtggcwtgatcttggctcactgcaacctctgcttgcctagttcaagcaattctcacacctcagcctccctagtagctgggattacaggcacatgccaccacactcagatgatttttgtatttttagtagagatggggtttcaccctgtttgccaggctggtctcaaactcctgacctcaagcgatctgcccacctcagcctaccaaagtgctgggattacaggtgtaagccactgaccctgcccaaaaacattttaaccaatagcaaagcacattatttcattacattttttcaaaagttgccagtaatttcaattaaaaatatatataacatgtttaatgcaatacaaatgcttttcaatgtacaatggggttaagtcttgataagctgattataaattgaaaatacagtaagttaaaaatgtatttaatacctaacttactgaatatcacagctta

SEQ ID NO: 618010 - DNA, 530 bp, Homo sapiens
acttttttttcttttctttccttcttttttttttttgacagaatcttactctgttgcccaggctggagtgcagtggcatgatcttggctcactgcaacctctgcttgcctwgttcaagcaattctcacacctcagcctccctagtagctgggattacaggcacatgccaccacactcagatgatttttgtatttttagtagagatggggtttcaccctgtttgccaggctggtctcaaactcctgacctcaagcgatctgcccacctcagcctaccaaagtgctgggattacaggtgtaagccactgaccctgcccaaaaacattttaaccaatagcaaagcacattatttcattacattttttcaaaagttgccagtaatttcaattaaaaatatatataacatgtttaatgcaatacaaatgcttttcaatgtacaatggggttaagtcttgataagctgattataaattgaaaatacagtaagttaaaaatgtatttaatacctaacttactgaatatcacagctta

SEQ ID NO: 618011 - DNA, 631 bp, Homo sapiens
caagcaattctcacacctcagcctccctagtagctgggattacaggcacatgccaccacactcagatgatttttgtatttttagtagagatggggtttcaccctgtttgccaggytggtctcaaactcctgacctcaagcgatctgcccacctcagcctaccaaagtgctgggattacaggtgtaagccactgaccctgcccaaaaacattttaaccaatagcaaagcacattatttcattacattttttcaaaagttgccagtaatttcaattaaaaatatatataacatgtttaatgcaatacaaatgcttttcaatgtacaatggggttaagtcttgataagctgattataaattgaaaatacagtaagttaaaaatgtatttaatacctaacttactgaatatcacagcttagcctggcatactttaatgtgctcagaacacttacatcagctgacaattgggcaaaatcattgaatacaaaacccactttataataaagtattggatattttatgtaatttgttgaatattgtactgaaagtgaaaagcagaatggttatattctattcaaagctatcacttttgcttcatcataaagtaaaaataatcataaattgaaccattat

SEQ ID NO: 618012 - DNA, 530 bp, Homo sapiens
acttttttttcttttctttccttcttttttttttttgacagaatcttactctgttgcccaggctggagtgcagtggcatgatcttggctcactgcaacctctgcttgcctagttcaagcaattctcacacctcagcctccctagtagctgggattacaggcacatgccaccacactcagatgatttttgtatttttagtagagatggggtttcaccctgtttgccaggctggtctcaaactcctgacctcaagcgatctgcccacctcagcctaccaaagtgctgggattacaggtgtaagccactgaccctgcccaaaaacattttaaccaatagcaaagcacattatttcattacattttttcaaaagttgccagtaatttcaattaaaaatatatataacatgtttaatgcaatacaaatgcttttcaatgtacaatggggttaagtcttgataagctgattataaattgaaaatacagtaagttaaaaatgtatttaatayctaacttactgaatatcacagctta

SEQ ID NO: 618013 - DNA, 617 bp, Homo sapiens
ctctgttgcccaggctggagtgcagtggcatgatcttggctcactgcaacctctgcttgcctagttcaagcaattctcacacctcagcctccctagtagctgggattacaggcacatgccaccacactcagatgatttttgtatttttagtagagatggggtttcaccctgtttgccaggctggtctcaaactcctgacctcaagcgatctgcccacctcagcctaccaaagtgctgggattacaggtgtaagccactgaccctgcccaaaaacattttaaccaatagcaaagcacattatttcattacattttttcaaaagttgccagtaatttcaattaaaaatatatataacatgtttaatgcaatacaaatgcttttcaatgtacaatggggttaagtcttgataagctgattataaattgaaaatacagtaagttaaaaatgtatttaatacctaacttactgaatatcacagcttagcctggcatactttaatgtgctcagracacttacatcagctgacaattgggcaaaatcattgaatacaaaacccactttataataaagtattggatattttatgtaatttgttgaatattgtactgaaagtgaaa

SEQ ID NO: 618014 - DNA, 631 bp, Homo sapiens
caagcaattctcacacctcagcctccctagtagctgggattacaggcacatgccaccacactcagatgatttttgtatttttagtagagatggggtttcaccctgtttgccaggctggtctcaaactcctgacctcaagcgatctgcccacctcagcctaccaaagtgctgggattacaggtgtaagccactgaccctgcccaaaaacattttaaccaatagcaaagcacattatttcattacattttttcaaaagttgccagtaatttcaattaaaaatatatataacatgtttaatgcaatacaaatgcttttcaatgtacaatggggttaagtcttgataagctgattataaattgaaaatacagtaagttaaaaatgtatttaatacctaacttactgaatatcacagcttagcctggcatactttaatgtgctcagaacacttacatcasctgacaattgggcaaaatcattgaatacaaaacccactttataataaagtattggatattttatgtaatttgttgaatattgtactgaaagtgaaaagcagaatggttatattctattcaaagctatcacttttgcttcatcataaagtaaaaataatcataaattgaaccattat

SEQ ID NO: 618015 - DNA, 631 bp, Homo sapiens
caagcaattctcacacctcagcctccctagtagctgggattacaggcacatgccaccacactcagatgatttttgtatttttagtagagatggggtttcaccctgtttgccaggctggtctcaaactcctgacctcaagcgatctgcccacctcagcctaccaaagtgctgggattacaggtgtaagccactgaccctgcccaaaaacattttaaccaatagcaaagcacattatttcattacattttttcaaaagttgccagtaatttcaattaaaaatatatataacatgtttaatgcaatacaaatgcttttcaatgtacaatggggttaagtcttgataagctgattataaattgaaaatacagtaagttaaaaatgtatttaatacctaacttactgaatatcacagcttagcctggcatactttaatgtgctcagaacacttacatcagctgacaattgggcaaaatcattgaatacaaaacccactttataataaagtwttggatattttatgtaatttgttgaatattgtactgaaagtgaaaagcagaatggttatattctattcaaagctatcacttttgcttcatcataaagtaaaaataatcataaattgaaccattat

SEQ ID NO: 618016 - DNA, 477 bp, Homo sapiens
tttcaggactctagactgttaacacacagaaccaacaattattcagaatggttgggttagttcacattcccacagatgagacatcaaatgtccaggctgcacagcctcattaacactagattttctggacattttatgtagtatttcatctgatataaaaagtagaattctaatttaattatggttgttaatttatttttatctttttagtcattatgaaaatgtttaactatatgaaaagctaggaaagagttttattttttaaggtagtacttcagaaatatttgtgatacttaatttttaaaaattaactctaaaaaatcttgaaatgtctgtttaatgaaataggacataaatrctggtcacattagtgaaaaatatttgtttaaaattaaaatatctgcagcaatcctgtagatattaataatttttaaagcatgacatctttaaaatataaatgttctaaacttataatca

SEQ ID NO: 618017 - DNA, 477 bp, Homo sapiens
tttcaggactctagactgttaacacacagaaccaacaattattcagaatggttgggttagttcacattcccacagatgagacatcaaatgtccaggctgcacagcctcattaacactagattttctggacattttatgtagtatttcatctgatataaaaagtagaattctaatttaattatggttgttaatttatttttatctttttagtcattatgaaaatgtttaactatatgaaaagctaggaaagagttttattttttaaggtagtacttcagaaatatttgtgatacttaatttttaaaaattaactctaaaaaatcttgaaatgtctgtttaatgaaataggacataaatactggtcacattagtgaaaaatatttgtttaaaattaaaatatctgcakcaatcctgtagatattaataatttttaaagcatgacatctttaaaatataaatgttctaaacttataatca

SEQ ID NO: 618018 - DNA, 477 bp, Homo sapiens
tttcaggactctagactgttaacacacagaaccaacaattattcagaatggttgggttagttcacattcccacagatgagacatcaaatgtccaggctgcacagcctcattaacactagattttctggacattttatgtagtatttcatctgatataaaaagtagaattctaatttaattatggttgttaatttatttttatctttttagtcattatgaaaatgtttaactatatgaaaagctaggaaagagttttattttttaaggtagtacttcagaaatatttgtgatacttaatttttaaaaattaactctaaaaaatcttgaaatgtctgtttaatgaaataggacataaatactggtcacattagtgaaaaatatttgtttaaaattaaaatatctgcagcaatcctgtagatattaataatttttaaagmatgacatctttaaaatataaatgttctaaacttataatca

SEQ ID NO: 618019 - DNA, 420 bp, Homo sapiens
ggctgctgaataaattttccagtgttaagagtatgcttcaatgctggtgacyggtactactttctggtaaactatagatgacatgtgtgctttcattgcctgaactcactttgtagaacaccattaaatgaaaatcatcaccagcaatttgggaggctaaggcgggcagatcatttgaggtcaggagtttgagaccagcctggccaacatgatgaaaccccatctctactgaaaatacaaaaacttatccaggcatggcgggatgcacctggaatcccagctacttgggaggctgaggcaggaaaatcgcctgaacccaggatgtgaaggttgcagtgaacagagatgttgccattgcactccagcctgggcaacagagtgagacttcatctccaaaaaaaggaaaaaaaagagagagag

SEQ ID NO: 618020 - DNA, 420 bp, Homo sapiens
ggctgctgaataaattttccagtgttaagagtatgcttcaatgctggtgactggtactactttctggtaaactatagatgacatgtgtgctttcattgcctgaactcactttgtagaacaccattaaatgaaaatcatcaccagcaatttgggaggctaaggcgggcagatcatttgaggtcaggagtttgagaccagcctggccaacatgatgaaaccccrtctctactgaaaatacaaaaacttatccaggcatggcgggatgcacctggaatcccagctacttgggaggctgaggcaggaaaatcgcctgaacccaggatgtgaaggttgcagtgaacagagatgttgccattgcactccagcctgggcaacagagtgagacttcatctccaaaaaaaggaaaaaaaagagagagag

SEQ ID NO: 618021 - DNA, 603 bp, Homo sapiens
  misc_feature 560: n = A,T,C or G
aaggcacatattcacagcagaaaagaaaaaaagggttaaaaagaaaatacctcggtgtagtgagactgtaatttcatgagggcattactgaagactcactttttccagcatcactcagcatggtattatgcatgtgtgtaatgtaaaggaaagtgaatatgcattcttggatgggtgatcaaatcgtaattccagaatgtaatcagaagctgattcattatcctcttgagatttcasaatcttttcatcaggaattaaaattcagaagagggtaaatgtatctaatcatttgaaagttaaaaattagtggatggaggcaacatggccgaataggaacagctccagtctacacctcccagcgtcagtgatgcagaagacaggtgatatctgcatttccaactgaggtacaaggttcatctcaatggggagtgctggacagtgggtgcagcacaccatgcatgagccaaagcagggcaaggcatcacctcacctgggaagcacaatgggtcagggaattccctttcctagtcaaagaaagaggtgacagatggcatctgganaatcaggtcactcccaccctaatactgcgcttttccaacaggc

SEQ ID NO: 618022 - DNA, 603 bp, Homo sapiens
  misc_feature 560: n = A,T,C or G
aaggcacatattcacagcagaaaagaaaaaaagggttaaaaagaaaatacctcggtgtagtgagactgtaatttcatgagggcattactgaagactcactttttccagcatcactcagcatggtattatgcatgtgtgtaatgtaaaggaaagtgaatatgcattcttggatgggtgatcaaatcgtaattccagaatgtaatcagaagctgattcattatcctcttgagatttcacaatcttttcatcaggaattaaaattcagaagagggtaaatgtatctaatcatttgaaagttaaaaattagtggatggaggcaacatggccgaataggaacagctccagtctacacctcccagcgtcagtgatgcagaagacaggtgatatctgcatttccaactgaggtacmaggttcatctcaatggggagtgctggacagtgggtgcagcacaccatgcatgagccaaagcagggcaaggcatcacctcacctgggaagcacaatgggtcagggaattccctttcctagtcaaagaaagaggtgacagatggcatctgganaatcaggtcactcccaccctaatactgcgcttttccaacaggc

SEQ ID NO: 618023 - DNA, 603 bp, Homo sapiens
  misc_feature 560: n = A,T,C or G
aaggcacatattcacagcagaaaagaaaaaaagggttaaaaagaaaatacctcggtgtagtgagactgtaatttcatgagggcattactgaagactcactttttccagcatcactcagcatggtattatgcatgtgtgtaatgtaaaggaaagtgaatatgcattcttggatgggtgatcaaatcgtaattccagaatgtaatcagaagctgattcattatcctcttgagatttcacaatcttttcatcaggaattaaaattcagaagagggtaaatgtatctaatcatttgaaagttaaaaattagtggatggaggcaacatggccgaataggaacagctccagtctacacctcccagcgtcagtgatgcagaagacaggtgatatctgcatttccaactgaggtacaaggttcatctcaatggggagtgctggacagtgggtgcagcacaccatgcatgagccaaagcagggcaaggcatcacctcacctgggaagcacaatgggtcagggaattccctttcctagtcaaagaaagrggtgacagatggcatctgganaatcaggtcactcccaccctaatactgcgcttttccaacaggc

SEQ ID NO: 618024 - DNA, 493 bp, Homo sapiens
atgttttctaagtatgtaaatcatatctcatcagaatacatcattctttacaatgataaagaagcaaaagaaaaacaaaaggacaaagaacatcttaaatgactacattcaactgccatggagctttaattttttaactactcaaaaagatatccactcttcttattccaactrtatgactcttctgaaaaaagtaaaactatgaagacagagtaaacatcaatggttgtcacgagttgctagggagaaagggagagatgaacaggcatagcacagagaatttttagggcggtgaaactgttctgtcgataatattacagtaatagatacatgtcatgtcattatacatttgtccaaattcacagaatgtacagcatctagagtgaggcctgatgtaaactatgaacttcaagtgattataatgtgtcaatgtaagttcatcagttgtaacaaatggaccactctctggtggaaaatactaataatgggggag

SEQ ID NO: 618025 - DNA, 493 bp, Homo sapiens
atgttttctaagtatgtaaatcatatctcatcagaatacatcattctttacaatgataaagaagcaaaagaaaaacaaaaggacaaagaacatcttaaatgactacattcaactgccatggagctttaattttttaactactcaaaaagatatccactcttcttattccaactgtatgactcttctgaaaaaagtaaaactatgaagacagagtaaacatcaatggttgtcacgagttgctagggagaaagggagagatgaacaggcatagcacagagaatttttagggcggtgaaactgttctgtcgataatattacagtaatagatacatgtcatgtcattatacatttgtccaaattcacagaatgtacagcatcwagagtgaggcctgatgtaaactatgaacttcaagtgattataatgtgtcaatgtaagttcatcagttgtaacaaatggaccactctctggtggaaaatactaataatgggggag

SEQ ID NO: 618026 - DNA, 454 bp, Homo sapiens
agcatctagagtgaggcctgatgtaaactatgaacttcaagtgattataatgtgtcaatgtaagttcatcagttgtaacaaatggaccactctctggtggaaaataytaataatgggggaggctatgcgtgtgtgggaggcatgggatatatgagaaatctctgtaccttcctctcaattttgctgtgaacctaaaactactctaagaaataaggttattgatttaaaaaaaaatattcagctgggctcagtggctcatgcctgtaatctcagcactttgggaggcaaaggtgggtggatcacctgaggtcaggagttcaagaccagcctggccaacatggcaaaacctcatctctaataaaaatacaaaaattagctgggcatggtagctggcacctgtaatttcagctacctgggaggctgaggcaggagaatcgcttgagcctagaaagca

SEQ ID NO: 618027 - DNA, 454 bp, Homo sapiens
agcatctagagtgaggcctgatgtaaactatgaacttcaagtgattataatgtgtcaatgtaagttcatcagttgtaacaaatggaccactctctggtggaaaatactaataatgggggaggctatgcgtgtgtgggaggcatgggatatatgagaaatctctgtaccttcctctcaattttgctgtgaacctaaaactactctaagaaataaggttattgatttaaaaaaaaatattcagctgggctcagtggctcatgcctgtaatctcagcactttgggaggcaaargtgggtggatcacctgaggtcaggagttcaagaccagcctggccaacatggcaaaacctcatctctaataaaaatacaaaaattagctgggcatggtagctggcacctgtaatttcagctacctgggaggctgaggcaggagaatcgcttgagcctagaaagca

SEQ ID NO: 618028 - DNA, 637 bp, Homo sapiens
tcttatgctgtcccttccatgcacttgacaaaacagcctataacaaattgtttactttgagatttaacaggaaaattccatgaggtttaaatgagatgactactaataagccatctacctttgactctattccaattaaaaatgggttaggaaggtgctttgaaaatcaagtgtgttcatcagggaatcatttacctaagtcttcttaacactgcttagtgaatwttaagcctgatatagtaaatacacgctaaccactaaattgaaggggaaagagggagaacaaagagacacgtaaagtacacttactttttctagtaggaaaaagccaattaaaactatcacctattagttttattggaatcagtcttacaggaggtcaaacttcctactgttgctacctattctcaatatttttcttatttcttcctaaacttctagagccgtgctgtccaataaatatgtgagccacatatgtaattttaaatgtactagtaagccccattaaaaggtgaaattaattttaaatatacttaactcagtatgtcccaaatagtaatcatagtaataattttaacatgtaatcaatataaaaaattatcaagcagatattctacgctgttcttcccactccaat

SEQ ID NO: 618029 - DNA, 508 bp, Homo sapiens
ctctgggggttccttgaactgtgggagggaaggaacaataatgaggacatgygggacttttgcatttgtggcagcattggctgccttttgtttttgtaaattctaatgaaagagcccatccatcaggtagactctgatagagatgctcagtatgcgaaacacccagtgggtcctcagacacaggggtctggggctcagagaccgagcctgagagtgatcagggccctggaagagcccatggggtaaaaatgggaaaggacctgggagaacagcagcagtaagaggtgaccagagaagcaggtgagagagtggaacagagtgggcaggccagcaagaagaagagcaggagagaagggatcatggagcaggctcagaggcctcaacctgcttgaggaaagcctttggttaggatgggggtaggggtagggtggatcatttgtgacatttgctaagtcagtgaagcctaatttcagtgagatgaagtggaaggggtattggaaaaagcaca

SEQ ID NO: 618030 - DNA, 427 bp, Homo sapiens
gggagcatctttgaacaagaaatatcttgaaaaactagttaagtggtatcatrtatttgtgggatgggtgatttcaaaacccaatctaaaaggacaggaccttgctcattgacaatttattgtctgatgcaatgtttcttaatctttttgggtcttgaattcctttgagaatcttttgaagtttatggactcttttcccagaagaacacactcatgtgtatgtaacacaattttgcattcaatcttagggactgcaggtgtctacattagttatatattgatgtaaaaaaaaaagccccaaacttaaggcttaaaggaacaatagatgtttattatctcacagtttctgtggttcagaaagtcagtaacatcttaactggatacttctgactcggagtctcccaggaggttgcagtcaagatgttgt

SEQ ID NO: 618031 - DNA, 427 bp, Homo sapiens
gggagcatctttgaacaagaaatatcttgaaaaactagttaagtggtatcatgtatttgtgggatgggtgatttcaaaacccaatctaaaaggacaggaccttgctcattgacaatttattgtctgatgcaatgtttcttaatctttttgggtcttgrattcctttgagaatcttttgaagtttatggactcttttcccagaagaacacactcatgtgtatgtaacacaattttgcattcaatcttagggactgcaggtgtctacattagttatatattgatgtaaaaaaaaaagccccaaacttaaggcttaaaggaacaatagatgtttattatctcacagtttctgtggttcagaaagtcagtaacatcttaactggatacttctgactcggagtctcccaggaggttgcagtcaagatgttgt

SEQ ID NO: 618032 - DNA, 493 bp, Homo sapiens
atctttgaacaagaaatatcttgaaaaactagttaagtggtatcatgtatttgtgggatgggtgatttcaaaacccaatctaaaaggacaggaccttgctcattgacaatttattgtctgatgcaatgtttcttaatctttttgggtcttgaattcctttgagaatcttttgaagtttatggactcttttcccagaagaacacactcatgtgtatgtaacacaattttgcattcaatcttagggactgcaggtgtctacattagttatatattgrtgtaaaaaaaaaagccccaaacttaaggcttaaaggaacaatagatgtttattatctcacagtttctgtggttcagaaagtcagtaacatcttaactggatacttctgactcggagtctcccaggaggttgcagtcaagatgttgttggggggaaaggggcaggttcagtggctcatgcctgtgatccctacactctgggaagcaaagccaggaggat

SEQ ID NO: 618033 - DNA, 521 bp, Homo sapiens
tttagtcataggattccagtttaacatatgcagttactatagcaattgaggtttccttagtaacagttgcaaaaataatccggccccaattaataatacattttaaagctctttctactccatgctgaacaacccagtttttttggccaagaaccagataattcaggtggtgtcatttgcactgatatagatatcatttgcatgcggtgaattgggttggaaaggaatgaaaagggagccggttgtttcaagtattataggaatccaatctgaaaagtcgastggcaagcgaatgcaaatctagtttccagagcttgggagcttaatggtaaaccctgtcctggattcctagtgtgccctagaggactttctgcatttgaagaagggagaaggcagaagattggacttgctaacaaaaaagatgaacccgggagggtggggccgtggcacacaggatttctctctaagtggtgcctggtgtgttcttgatggcgtgagaaggtctgtgggtttgtgaattc

SEQ ID NO: 618034 - DNA, 534 bp, Homo sapiens
gcccagctaattttttgtacttttcgtaaagatggggtttcgccattttacccaggttggtcttgaactcctgaactcaagcaatccaaccaccttggcctcccaaaatgctggacttacaggcatgaaccacaggacccagctgctgttctctcttaacaagagacaagtcytagagcaagatgcatttaaacccactttggggtatcaaaaatatcccaatcttgtggttctaataaatgtttaacaactaggttggtatggaggttctgatgtgaagcattagtcagtttctgtgctgttactagatgttccctaatagggctgggcagagatgctaacaattggctcatgagggcaggtggacctggctccaacccaccactgcacccaatccctgagttcttaatcttcatcacaccctcgacttgcttcccagccattgtttctgatctcagttaatgatgcctctcagtcagccaaggagacctgacagtcccatccacttcccccaccctcatcactgaatcctgt

SEQ ID NO: 618035 - DNA, 511 bp, Homo sapiens
ttaaccattatcaaggctgttctgtttttctgcctatcttaatgtccagtttttattatcacaactaagcagtgggtgttgctagttcttttattaatacacatactatcatttgtttatttttmctttctctaactagtctgtgtcccagcaggagaccttttttttttcgtgtgtgtgtgtgtgtgtgtatgtgtgtatgtgtgatggagcttcgctcttgttgcccaggctggagtgcaatggtgcgatcttggctcactgcaacctccacctcccgggttcaagcaattcttctgcctcagcctcccgagtagctgggattacaggcatgcactaccatgcctggctaattttgtatttttagtagagacggggtttctccatgttggtcaggctggtctcgaactcccgacctcaggtgatccgcctccctcaccctcccaaagtgttgggattataggtgtgagccaccgcacttggccgttcccagcaggagacccgtaagacc

SEQ ID NO: 618036 - DNA, 511 bp, Homo sapiens
ttaaccattatcaaggctgttctgtttttctgcctatcttaatgtccagtttttattatcacaactaagcagtgggtgttgctagttcttttattaatacacatactatcatttgtttatttttactttctctaactagtctgtgtcccagcaggagaccttttttttttcgtgtgtgtgtgtgtgtgtgtatgtgtgtatgtgtgatggagcttcgctcttgttgcccaggctggagtgcaatggtgcgatcttggctcactgcaacctccacctccygggttcaagcaattcttctgcctcagcctcccgagtagctgggattacaggcatgcactaccatgcctggctaattttgtatttttagtagagacggggtttctccatgttggtcaggctggtctcgaactcccgacctcaggtgatccgcctccctcaccctcccaaagtgttgggattataggtgtgagccaccgcacttggccgttcccagcaggagacccgtaagacc

SEQ ID NO: 618037 - DNA, 511 bp, Homo sapiens
ttaaccattatcaaggctgttctgtttttctgcctatcttaatgtccagtttttattatcacaactaagcagtgggtgttgctagttcttttattaatacacatactatcatttgtttatttttactttctctaactagtctgtgtcccagcaggagaccttttttttttcgtgtgtgtgtgtgtgtgtgtatgtgtgtatgtgtgatggagcttcgctcttgttgcccaggctggagtgcaatggtgcgatcttggctcactgcaacctccacctcccgggttcaagcaattcttctgcctcagcctcccgagtagctgggattacaggcatgcactaccatgcctggctaattttgtatttttagtagagacggggtttctccatgttggtcaggctggtctcgawctcccgacctcaggtgatccgcctccctcaccctcccaaagtgttgggattataggtgtgagccaccgcacttggccgttcccagcaggagacccgtaagacc

SEQ ID NO: 618038 - DNA, 549 bp, Homo sapiens
agagaagtcaagagggactcacttgtgggasaagcatttccatttcagagaattggagagctcaaaggggccttttacttcatctgcatcaaaagtccatccttttctaattgaggacactgaggcctagacagcaaactcttcctgagctcctgccatgtgcaggctctaggaaaaaggagtggatgaggccaaacaaagcccctgccctcaaggagcttgtgtccggagaagcagagagaaatgaatgtaattgaaaataatcaatgaattccaaatgctcaaatcaacgtgtaaaagaagtataggtttttaatgagaggttccctgagtaagtcatgcttaaaataaatcataaaaaatgaaaaaagattgcaccaggtgaagagtgaagaaagaacactgcaggtggagggaacaggcatgcaactggggtgacggagagatgtctggaacagtgggagtgggcagagtaagagagaacacagtcaaagaagcagccgaagtggtgggcaggggccagtctgtgaagctttggaacacctgtta

SEQ ID NO: 618039 - DNA, 615 bp, Homo sapiens
aggccacgtgcagtggcatgcacctgtaatcccagcacttcaggaggccaagatgggcagattatttgagctcaggagttctaaaccagcctggggaacatggcgaaactatctctacaaaagatacaaaaattagccagatgtggtagtgtgcacctrtagtcccagctactcaggaggctttgggagaactgcttaagcctggaaagtcgagctgtagtgagccatgactgcaccactgcactccagcctaggcaatagaatggagaccctgtttcaaaaaaaaaaagtagtaaatagagaactacatttattgctaggcatttaatacagactgtctcactttatcccccagaacaacacaatagggtaagcattattagccccattttacatatgagaaactaagacttacagagtttagaagtggaaaaattaatatttaaactcaggacagcctagtctccagcaggaatccctttgatagcttcctttaaaagggaacatttagtttatgtttaactacatcctgggactgaaagctccacatttgacccaacccatcatggaacttctctgattctttgaaagcgttggcgtctaacaatgaaggca

SEQ ID NO: 618040 - DNA, 615 bp, Homo sapiens
aggccacgtgcagtggcatgcacctgtaatcccagcacttcaggaggccaagatgggcagattatttgagctcaggagttctaaaccagcctggggaacatggcgaaactatctctacaaaagatacaaaaattagccagatgtggtagtgtgcacctatagtcccagctactcaggaggctttgggagaactgcttaagcctggaaagtcgagctgtagtgagccatgactgcaccactgcactccagcctaggcaatagaatggagaccctgtttcaaaaaaaaaaagtagtaaatagagaactacatttattgctaggcatttaatacagactgtctcactttatcccccagaacaacacaatagggtaagcattattagccccattttacatatgagaaactaagacttacagagtttagaagtggmaaaattaatatttaaactcaggacagcctagtctccagcaggaatccctttgatagcttcctttaaaagggaacatttagtttatgtttaactacatcctgggactgaaagctccacatttgacccaacccatcatggaacttctctgattctttgaaagcgttggcgtctaacaatgaaggca

SEQ ID NO: 618041 - DNA, 555 bp, Homo sapiens
accatcttgggcaagatgctgtctttataaaaacttttttttttttttgagagagtctccctctgtggcccaggctagggtgcaatgccacaatcacagctcagggcaacctccgcctcccgggttcaakctattctcctgcctcagcctcccgagcagctgggattacagatgcccgccaccacgcctggctaatttttatatttttggtagagacagcatttcaccatgttggccaggctggtctcaaactaaaaatttttttaactagctgggcatggtggtgtgcacctgtagtcccagctacttgggaggctgaagcaggaggattgcttcagctcaggagttcaaggctgcagtgagctctgattgcaccactgcactccagtctgtgtgacagagcaagaccctgtctcaaaaaaaaaaaaaaaaaaaaaaaaaaagaaaagaaaagaaaggaaaagagacagttttaaaaagttttaaaacttaaaaaaagtaagaatcgtgtaatggacatgcatgtacccttcaccaagattcactcattattta

SEQ ID NO: 618042 - DNA, 617 bp, Homo sapiens
acgtgaaatgtgtttcctagacactcagggcatagcggttcaaaagaacttttaatgtgatccttgacgagacggagtactagaggaaagtaacaaaagaaaagggcccgtgagtttattatgcccccagatgtttttttctggtggcataacgtggtttaaacaaaggtgccggtactagctactattcattttaaaatctgggtctccagagagaaatttcagaaaggaaaactttgtcctttttcataaacctagagcagcgattttccctctggcctcactggaataatgggtggcacatgggccaggacgatgatgctggctggcgaaattagcaaggatctgctgagaaatactttataaagtcttctagtggtatttcctgtctgctcaacgtgtgttgtgaaaggtctaagaaatttaacttcatccttaaactattaataatgtgtgtccttaaactattaatccttaaactattaataattactaatatttgggttttttctcagcacttgggagacctgggttctggctcttatrtctcccccatctagataaggatgatattgattaacttgcataacttctccctggacttcagataacgtcag

SEQ ID NO: 618043 - DNA, 199 bp, Homo sapiens
aaactggggatcaaagaacactggcatggcagactggagtcaggttctccaccgactctgggtggtcacaagyagcttgtgctgttcagtaaagacagcttactttaattgaatagcataaaaacaacatgtattagaaatagttaatagtaagtaccacggaaattgtgctatcttagacattgataaagtgaccaag

SEQ ID NO: 618044 - DNA, 552 bp, Homo sapiens
atccacaaagataaggataaaccagagcaaaaagtttaaaaattccaaaaaccagaatacctcttctcctccaaaaggtcacaactcgtcaccagtaaaggagcaaaactagacagagaatgagtttgacgatttgacagaagtaggcttcagaaggtgggtaataacaaacacttccgagctagaggagcatgttttaacccaatgcaaggaagctaagaaccttgaaaaaaaaggttagaggaattgctaactagaataaccagtttagagaagaacataaatgacctgatggagctgaaaaatagagcatgagaactttgtgaagcatacacaagtatcaataaccaaatctatcaagtggaagaaaggatatcagagactgaagwtcaacttaatgaaaggaagaatgaagacaagattagagaaaaaagaagaatgaaaaggagcaagcaaaacctccaagaaatatggggctatgtgaaaagaccaaacatatgtttgatttgtgtacctgaaagtgatggggagaatggaaccaagttggaaaac

SEQ ID NO: 618045 - DNA, 587 bp, Homo sapiens
tctggggacctggactagataggtactcccttataataagtggatcctgtcatatgggtgcccttttactctattaaaaatatttttgaattctagattgaaataataaattaaagcatttcaattttattcaacattcgctatcatgaagaaagaattaaaatgcaacagrttgctaagcttattggaataggcataatagctttacccactaaagagtcaatggggctaagatttctgcataatgaatatctttaacaattaagctggtgaaaaagaaatgaattaagtgttatcatttaataatacataaatgtcacaatgaggtttctagttcctatttctaaccattgaaatctggggagtgggggaggagaggcccttgaagtgaatgaatttaaagtgggtactgttctgatgactagggcagtcaatattcaagtttgtctttttgtgttaccaattatctttataatttgtctcattgtttttattttaacacatgatcacaaattactacttatttttcctgagtatatatttatggagactgacatcctagattatttagaggattcagccataaa

SEQ ID NO: 618046 - DNA, 525 bp, Homo sapiens
taatggtatcttaattcacaaatgaagtatcatctgttcatcctcagtttcctctttsctttggatttgatgctattcaccattttaattttttaaagactactattgaaagtctgctacctgaacatcagtctttgttttatctgattagccttttcaaaggaggcaatcagatattcatctatctcagtaagcaaagggatgactttgaatagagtgggaggcaggtttgccctaagcagttcccagcatggcttttcccttcagcttagtgattttgggaccctaagatttattttcctttcacaattgtgttagggaggcagaggctggcggatcacctgaggtcagctgttcgagaacagcctggccaacatggtgaaaccccatctctactcatactaataaaaataattttaaaaaaatattagctgggcatggtggcacgtgcctgtagtcccacttactcaggaagctgaggcaggagaatcactggaacctgggaggcagaggttgcagtgagcc

SEQ ID NO: 618047 - DNA, 404 bp, Homo sapiens
tttcctccaatgcataaaaggaacttccatagggcaggcaggagtcaggctgttcaagacaactggaaggagttgaataacatctatccagtgagtcctgcaagacttcaggctctactrcctccagcagctccctgctgagcctggaaaaggaggaaaaagtaaagaataagccaggggaaatcagacacaacagagccccaactaggtttcatgggtagcataaggaagtggttaaaaaagtaaaaggatagatccattaatgaggtaacaaattattgccttcatgttgggacagaacagggccaaatggaaaagaatgaaagagaaagacagatagacacacacacacacacacacacacacacacacacacacagagagagagaatgagctcagtgaat

SEQ ID NO: 618048 - DNA, 404 bp, Homo sapiens
tttcctccaatgcataaaaggaacttccatagggcaggcaggagtcaggctgttcaagacaactggaaggagttgaataacatctatccagtgagtcctgcaagacttcaggctctactgcctccagcagctccctgctgagcctggaaaaggaggaaaaagtaaagaataagccaggggaaatcagacacaacagagccccaactaggtttcatgggtagcatarggaagtggttaaaaaagtaaaaggatagatccattaatgaggtaacaaattattgccttcatgttgggacagaacagggccaaatggaaaagaatgaaagagaaagacagatagacacacacacacacacacacacacacacacacacacacagagagagagaatgagctcagtgaat

SEQ ID NO: 618049 - DNA, 404 bp, Homo sapiens
tttcctccaatgcataaaaggaacttccatagggcaggcaggagtcaggctgttcaagacaactggaaggagttgaataacatctatccagtgagtcctgcaagacttcaggctctactgcctccagcagctccctgctgagcctggaaaaggaggaaaaagtaaagaataagccaggggaaatcagacacaacagagccccaactaggtttcatgggtagcataaggaagtggttaaaaaastaaaaggatagatccattaatgaggtaacaaattattgccttcatgttgggacagaacagggccaaatggaaaagaatgaaagagaaagacagatagacacacacacacacacacacacacacacacacacacacagagagagagaatgagctcagtgaat

SEQ ID NO: 618050 - DNA, 574 bp, Homo sapiens
catgttgggacagaacagggccaaatggaaaagaatgaaagagaaagacagatagacacacacacacacacacacacacacacacacacacacagagagagagaatgagctcagtgaattgtccaggtgacacactgatgagggagtaacaggacactctgagttagtgccctcaggacacacagcatacagtgatcaggaaaggactgtgctcaataattttccataaaatgtgctcaagtttccatgcagtcgccatgagaatacagtttttgaagtctggtccacctacagtaggttagtaaatgataaggggaggaagaaatggaaacctaaatatctactgcaatgaaaaccaacagcaatgttagtaggaataattcaggctcggttgaaaagatgtaatcgataatgtcagcccgccctgttttccctgaaccaggagtctccagatgtcaacacagaagwagctgttcacaattgctcagttacctggggcatggtgggccttggtcttcttcctcttcttggtcctttttaattcctgcaatacattcagacagggacagacaaa

SEQ ID NO: 618051 - DNA, 566 bp, Homo sapiens
atttctaggaggaaaactgcagtattcagccctgtctcatcaaatgcccagctcgttcatggatgcaagaattttagacactgaaattagaatgagggaggaaatctacaaacccttgagtccaaatcatagttctgtgaattttttacatctgcctgggtccaatgtgctgagagcgggctcaggttgmtacaggcatggctggagactaggaatagagccttgctcactgacccatttcatgtctaggcttccagcggagactacagtttcattacaacctatatgcgcccataggtcctgcctgcggcaatgacatctctcgggtcagtaagggccactgggaacaggaatatcacccctatctggaagaccaggtggaggcttatcaccttcatagtaaggtactcactgtccacgtcaagagccaagccaaggtactgttcctccaatgagtaaacagcacttctgtagggctggcctaagtcaggcagttcaagataacctgaaggagtcgaataacatctatccagtgagtcctgcaagacttcaggctctttctcatc

SEQ ID NO: 618052 - DNA, 566 bp, Homo sapiens
atttctaggaggaaaactgcagtattcagccctgtctcatcaaatgcccagctcgttcatggatgcaagaattttagacactgaaattagaatgagggaggaaatctacaaacccttgagtccaaatcatagttctgtgaattttttacatctgcctgggtccaatgtgctgagagcgggctcaggttgayacaggcatggctggagactaggaatagagccttgctcactgacccatttcatgtctaggcttccagcggagactacagtttcattacaacctatatgcgcccataggtcctgcctgcggcaatgacatctctcgggtcagtaagggccactgggaacaggaatatcacccctatctggaagaccaggtggaggcttatcaccttcatagtaaggtactcactgtccacgtcaagagccaagccaaggtactgttcctccaatgagtaaacagcacttctgtagggctggcctaagtcaggcagttcaagataacctgaaggagtcgaataacatctatccagtgagtcctgcaagacttcaggctctttctcatc

SEQ ID NO: 618053 - DNA, 475 bp, Homo sapiens
tcacccctatctggaagaccaggtggaggcttatcaccttcatagtaaggtactcactgtccacgtcaagagccaagccaaggtactgttcctccaatgagtraacagcacttctgtagggctggcctaagtcaggcagttcaagataacctgaaggagtcgaataacatctatccagtgagtcctgcaagacttcaggctctttctcatccagcagctccctgctgagcctggaaaagtaggaaaaagtaaagaataagccagggggaatcagaaaccacacagccccagctacatttcatggctaacataaggaactgtttaaacagaaaaaggacagatccattaatgaggtaatgaattattgcctttatgttgggatagaccagggccaggtagaaaagaatgaaagagaaagacagggagagggagagggagagagagacagaggagaaagtgagctcagcgaattggc

SEQ ID NO: 618054 - DNA, 530 bp, Homo sapiens
cttctcctccttgaactgtcgctcattcctcagcatagattttatgaggtctttgcactcttcatattctgagaaaagacagacacgcctgcctcagtggaaggctggacatgctgctgtggtcattgcctacagggcaggagccaggtccatcccaaggacaaaactctccccagtaccagggtctagacagggatttccacatctttactcttcagtctcctgamtttctggcatctgatcctccaaaatttagagatgaagagaacctcaagggcacatcaaggaagttgacaagatgattcaaccacaacgaagtggagtcagaattcacagcccctgaggtctgactctgaatgcagggccactttcccaagacttgcagcctctcctctaaaacactgcactggggcatgaagtagtgatttcttgtacagtcgggaaggcccctaggactatgggactgatggcttcccttttactgggaatttcaaggacaagtatgcgaaagatttttaaaatctttgatt

SEQ ID NO: 618055 - DNA, 530 bp, Homo sapiens
cttctcctccttgaactgtcgctcattcctcagcatagattttatgaggtctttgcactcttcatattctgagaaaagacagacacgcctgcctcagtggaaggctggacatgctgctgtggtcattgcctacagggcaggagccaggtccatcccaaggacaaaactctccccagtaccagggtctagacagggatttccacatctttactcttcagtctcctgactttctggcatctgatcctccaaaatttagagatgaagagaacctcaagggcacatcaaggaagttgacaagatgattcaaccacaasgaagtggagtcagaattcacagcccctgaggtctgactctgaatgcagggccactttcccaagacttgcagcctctcctctaaaacactgcactggggcatgaagtagtgatttcttgtacagtcgggaaggcccctaggactatgggactgatggcttcccttttactgggaatttcaaggacaagtatgcgaaagatttttaaaatctttgatt

SEQ ID NO: 618056 - DNA, 583 bp, Homo sapiens
gtgaattgaaaagacgaaagaagaaaagaatgacagggtcaagaaggcaacattgattgagtgaaagaatgagaagacgcagtcagtcagaaggtggttctcactaagggtaagtggggtggtgatggcacaccattttgagtatactgartgctgctgtgtggttcacagtcctttggttaattttgtgttatgtaaatttcacatcaacaattacttgtttgaaaaagagaaaacaaggctctaagaaacaactgcaacccataaatttttattatccttcttctctgcttgataaatacttgtgtgttgcgagcctgccatggcaattcctgcccttcccctggcccagcttagctcttacgtctccccaccgagctgctgtacttcagagatttacacagctgctcccctgcctgcccccatggggtcccctcacctgagctcctcagcttgcttgagctgctctgcaagcttctcctccttgaactgtcgctcattcctcagcatagattttatgaggtctttgcactcttcatattctgagaaaagacagacacgcctgcctcagtggaaggctgga

SEQ ID NO: 618057 - DNA, 583 bp, Homo sapiens
gtgaattgaaaagacgaaagaagaaaagaatgacagggtcaagaaggcaacattgattgagtgaaagaatgagaagacgcagtcagtcagaaggtggttctcactaagggtaagtggggtggtgatggcacaccattttgagtatactgagtgctgctgtgtggttcacastcctttggttaattttgtgttatgtaaatttcacatcaacaattacttgtttgaaaaagagaaaacaaggctctaagaaacaactgcaacccataaatttttattatccttcttctctgcttgataaatacttgtgtgttgcgagcctgccatggcaattcctgcccttcccctggcccagcttagctcttacgtctccccaccgagctgctgtacttcagagatttacacagctgctcccctgcctgcccccatggggtcccctcacctgagctcctcagcttgcttgagctgctctgcaagcttctcctccttgaactgtcgctcattcctcagcatagattttatgaggtctttgcactcttcatattctgagaaaagacagacacgcctgcctcagtggaaggctgga

SEQ ID NO: 618058 - DNA, 583 bp, Homo sapiens
gtgaattgaaaagacgaaagaagaaaagaatgacagggtcaagaaggcaacattgattgagtgaaagaatgagaagacgcagtcagtcagaaggtggttctcactaagggtaagtggggtggtgatggcacaccattttgagtatactgagtgctgctgtgtggttcacagtcctttggttaattttgtgttatgtaaatttcacatcaacaattacttgtttgaaaaagagaaaacaaggctctaagaaacaactgcaacccataaatttttattatccttcttctctgcttgataaatacttgtgtgttgcragcctgccatggcaattcctgcccttcccctggcccagcttagctcttacgtctccccaccgagctgctgtacttcagagatttacacagctgctcccctgcctgcccccatggggtcccctcacctgagctcctcagcttgcttgagctgctctgcaagcttctcctccttgaactgtcgctcattcctcagcatagattttatgaggtctttgcactcttcatattctgagaaaagacagacacgcctgcctcagtggaaggctgga

SEQ ID NO: 618059 - DNA, 583 bp, Homo sapiens
gtgaattgaaaagacgaaagaagaaaagaatgacagggtcaagaaggcaacattgattgagtgaaagaatgagaagacgcagtcagtcagaaggtggttctcactaagggtaagtggggtggtgatggcacaccattttgagtatactgagtgctgctgtgtggttcacagtcctttggttaattttgtgttatgtaaatttcacatcaacaattacttgtttgaaaaagagaaaacaaggctctaagaaacaactgcaacccataaatttttattatccttcttctctgcttgataaatacttgtgtgttgcgagcctgccatggcaattcctgcccttcccctggcccagcttagctcttacgtctccccaccgagctgctgtacttcagagatttacacagctgctccccygcctgcccccatggggtcccctcacctgagctcctcagcttgcttgagctgctctgcaagcttctcctccttgaactgtcgctcattcctcagcatagattttatgaggtctttgcactcttcatattctgagaaaagacagacacgcctgcctcagtggaaggctgga

SEQ ID NO: 618060 - DNA, 605 bp, Homo sapiens
ttactgccttgacaggaagattgtaaaaattttaaaaagacaaataaataaaagagtcaaaactgtagctctgtgaggctcaaataacatctaaytcaagtcacaatgaacatctagcaatcattctgaacaccatataattcacttaatacgttttgcctgaacacccgacacatctgaattaccaacacccatatgtagccaagaaactggcaatcatttataaattatcacctatgactccatctgctctacgcacttattttttaaattttattcatttatttattatttttatttgttgtagagatgggatctcactatgttacccaagttggtccagaaacagaaacagacccacactaatttcataaatcagatgaccatacagtcattcgatttatgaaaaaaagtgccacatggtgcggaaggaaaaggatggtcttttcaataaatggtgctggatcaagcagacacatccatgtagtaaaaagtgaatcatagccaggtggggtggctcacacctgtaattccagcactctgggaggctgaagcgggcagattacttgagcccaggagttcgagaccaacctgggaaatatgtt

SEQ ID NO: 618061 - DNA, 605 bp, Homo sapiens
ttactgccttgacaggaagattgtaaaaattttaaaaagacaaataaataaaagagtcaaaactgtagctctgtgaggctcaaataacatctaactcaagtcacaatgaacatctagcaatcattctgaacaccatataattcacttaatacgttttgcctgaacacccracacatctgaattaccaacacccatatgtagccaagaaactggcaatcatttataaattatcacctatgactccatctgctctacgcacttattttttaaattttattcatttatttattatttttatttgttgtagagatgggatctcactatgttacccaagttggtccagaaacagaaacagacccacactaatttcataaatcagatgaccatacagtcattcgatttatgaaaaaaagtgccacatggtgcggaaggaaaaggatggtcttttcaataaatggtgctggatcaagcagacacatccatgtagtaaaaagtgaatcatagccaggtggggtggctcacacctgtaattccagcactctgggaggctgaagcgggcagattacttgagcccaggagttcgagaccaacctgggaaatatgtt

SEQ ID NO: 618062 - DNA, 456 bp, Homo sapiens
acgtgtgtacaaaaaccagggcccggccggacacggtggctcacgcctataatcccagcactttggcaggtggatcacttgaggtcaagagttcaagaccagcctggccaacgtggtgaaaccctgtctctactaaaaatacaaaaattagcygggcatggtggtgcacgcctgtagtccctgctacttgggacgctgaggcaggcgaacagcttaaaccccggaggcagaggttgcagtaagcccagatcgtgccactgcactccagcctgggcaacagagcaagactgtctaaaaaaaagaaaaaaaaaaaaaaaagaaaagaaaagaaaaatgagggtcctcactcagctttggaagtaacagaacccttgtattactctaagcagagaagctgaatatataaaccagacccaaatgcagctgctcagcaggcctcaaggtggagacttgcac

SEQ ID NO: 618063 - DNA, 404 bp, Homo sapiens
aacatgtttttcctccaatgcataaaaggaacttccatagggcwggcaggagtcaggctgttcaagacaactggaaggagttgaataacatctatccagtgagtcctgcaagacttcaggctctactgcctccagcagctccctgctgagcctggaaaaggaggaaaaagtaaagaataagccaggggaaatcagacacaacagagccccaactaggtttcatgggtagcataaggaagtggttgaaaaagtaaaaggagagatccattaatgaggtaacaaattattgccttcatgttgggacggaacagggccaaatggaaaagaatgaaagagaaagacacacacacacacacacacacacacacacacacacacacacacacacagagagagagaatgag

SEQ ID NO: 618064 - DNA, 404 bp, Homo sapiens
aacatgtttttcctccaatgcataaaaggaacttccatagggcaggcaggagtcaggctgttcaagacaactggaaggagttgaataacatctatccagtgagtcctgcaagacttcaggctctactrcctccagcagctccctgctgagcctggaaaaggaggaaaaagtaaagaataagccaggggaaatcagacacaacagagccccaactaggtttcatgggtagcataaggaagtggttgaaaaagtaaaaggagagatccattaatgaggtaacaaattattgccttcatgttgggacggaacagggccaaatggaaaagaatgaaagagaaagacacacacacacacacacacacacacacacacacacacacacacacacagagagagagaatgag

SEQ ID NO: 618065 - DNA, 404 bp, Homo sapiens
aacatgtttttcctccaatgcataaaaggaacttccatagggcaggcaggagtcaggctgttcaagacaactggaaggagttgaataacatctatccagtgagtcctgcaagacttcaggctctactgcctccagcagctccctgctgagcctggaaaaggaggaaaaagtaaagaataagccaggggaaatcagacacaacagagccccaactaggtttcatgggtagcataaggaagtggttraaaaagtaaaaggagagatccattaatgaggtaacaaattattgccttcatgttgggacggaacagggccaaatggaaaagaatgaaagagaaagacacacacacacacacacacacacacacacacacacacacacacacacagagagagagaatgag

SEQ ID NO: 618066 - DNA, 404 bp, Homo sapiens
aacatgtttttcctccaatgcataaaaggaacttccatagggcaggcaggagtcaggctgttcaagacaactggaaggagttgaataacatctatccagtgagtcctgcaagacttcaggctctactgcctccagcagctccctgctgagcctggaaaaggaggaaaaagtaaagaataagccaggggaaatcagacacaacagagccccaactaggtttcatgggtagcataaggaagtggttgaaaaagtaaaaggakagatccattaatgaggtaacaaattattgccttcatgttgggacggaacagggccaaatggaaaagaatgaaagagaaagacacacacacacacacacacacacacacacacacacacacacacacacagagagagagaatgag

SEQ ID NO: 618067 - DNA, 574 bp, Homo sapiens
tgttgggacggaacagggccaaatggaaaagaatgaaagagaaagacacacacacacacacacacacacacacacacacacacacacacacacagagagagagaatgagctcagtgaattgtscaggtgacacactgatgagggagtaacaggacactctgagttagtgccctcaggacacacagcatacagtgatcaggaaaggactgtgctcaataattttccataaaatgtgctcaagtttccatgcagtcgccatgagaatacagtttttgaagtctggtccacctacagtaggttagtaaatgataaggggaggaagaaatggaaacctaaatatctactgcaatgaaaaccaacagcaatgttagtaggaataattcaggctcggttgaaaagatgtaatcgataatgtcagcccgccctgttttccctgaaccaggagtctccagatgtcaacacagaagtagctgttcacaattgctcagttacctggggcatggtgggccttggtcttcttcctcttcctggtcctttttaattcctgcaatacattcagacagggacagacaaa

SEQ ID NO: 618068 - DNA, 564 bp, Homo sapiens
atttctaggaggaaaactgcagtattcagccctgtctcatcaaatgcccagctcgttcatggatgcaagaattttagacactgaaattagaatgagggaggaaatctacaaacccttgagtccaaatcatagttctgtgaattttttacatctgcctgggtccaatgtgctgagagcgggctcaggttgccacaggcatggctggagactaggaatagagccttgctcactgacccatttcatgtctaggcttccagcggagactacagtttcattacaacctatatgcgcccataggtcctgcctgcggcaatgacatctctcgggtcagtaagggccactgggaacaggaatatcacccctatctggaagaccaggtggaggcttatcaccttcatagtaaggtactcactgtccacgtcaagagccaagccaaggtactgttcctccaatgagtraacagcacttctgtagggctggcctaagtcaggcagttcaagataacctgaaggagtcgaataacatctatccagtgagtcctgcaagacttcaggctctttctca

SEQ ID NO: 618069 - DNA, 410 bp, Homo sapiens
aattctgtgttaacacctggaggcaacagattcagggaaaccagagtgtgtttgatttcatgttttcaacgaaggctgaattactcctactgtcattgctgttggttttcattgcagtagatgtttrggtttccatttcttcctccccttatcatttactaacgtaccataggatgaccatacttcaaaagctgtactctcatggccactgcatcgaattttgagcatattttatggaaaactattgagctcactcttttcatgatcgcagtgtgctgtgtgtcatgagggcactaactcagagtgtccttttactcccttaccagtatgtcacctggccaattcactagctcactttctctctgtctctgtctctgtctctgtctctctgtctttctctttcattgttt

SEQ ID NO: 618070 - DNA, 577 bp, Homo sapiens
ttcatgttttcaacgaaggctgaattactcctactgtcattgctgttggttttcattgcagtagatgtttaggtttccatttcttcctccccttatcatttactaacgtaccataggatgaccatacttcaaaagctgtactctcatggccactgcatcgaattttgagcatattttatggaaaactattgagctcactcttttcatgatcgcagtktgctgtgtgtcatgagggcactaactcagagtgtccttttactcccttaccagtatgtcacctggccaattcactagctcactttctctctgtctctgtctctgtctctgtctctctgtctttctctttcattgttttctacctggcccttttctatcccaacataaaggcaataattttttttttttacctcattaatggatctaatggatctatccttttcttttcttaccacttccttacgttacttctgaaatctagtggggctctgtggtgtctgattttccctggctgcttctttagttttgtctgcttttccaggctcagcggcatgctgatggaagtggaagagcctgaagt

SEQ ID NO: 618071 - DNA, 588 bp, Homo sapiens
gtgtttgatttcatgttttcaacgaaggctgaattactcctactgtcattgctgttggttttcattgcagtagatgtttaggtttccatttcttcctccccttatcatttactaacgtaccataggatgaccatacttcaaaagctgtactctcatggccactgcatcgaattttgagcatattttatggaaaactattgagctcactcttttcatgatcgcagtgtgctgtgtgtcatgagggcactaactcagagtgtccttttactcccttaccagtatgtcacctggccaattcactagctcactttctctctgtctctgtctctgtctctgtctctctgtctttctctttcattgttttctacctggccctkttctatcccaacataaaggcaataattttttttttttacctcattaatggatctaatggatctatccttttcttttcttaccacttccttacgttacttctgaaatctagtggggctctgtggtgtctgattttccctggctgcttctttagttttgtctgcttttccaggctcagcggcatgctgatggaagtggaagagcctgaagtct

SEQ ID NO: 618072 - DNA, 588 bp, Homo sapiens
gtgtttgatttcatgttttcaacgaaggctgaattactcctactgtcattgctgttggttttcattgcagtagatgtttaggtttccatttcttcctccccttatcatttactaacgtaccataggatgaccatacttcaaaagctgtactctcatggccactgcatcgaattttgagcatattttatggaaaactattgagctcactcttttcatgatcgcagtgtgctgtgtgtcatgagggcactaactcagagtgtccttttactcccttaccagtatgtcacctggccaattcactagctcactttctctctgtctctgtctctgtctctgtctctctgtctttctctttcattgttttctacctggcccttttctatcccaacataaagrcaataattttttttttttacctcattaatggatctaatggatctatccttttcttttcttaccacttccttacgttacttctgaaatctagtggggctctgtggtgtctgattttccctggctgcttctttagttttgtctgcttttccaggctcagcggcatgctgatggaagtggaagagcctgaagtct

SEQ ID NO: 618073 - DNA, 644 bp, Homo sapiens
ccaaggttaacactagttactctagccacccaaatccaatgccacttatccttttatactaacattattaacatttgttaatgttacttttatattaacactattaacatttcagcagcatctggtggaggcaaatgagtattacaacccattggaatrgcagatagcaatcaaactccaaatggtgctgcagacagaaccatgcatcgacatgcctttcttctgaggaccctaagagaagccccagctggtgttctccacagggcaccccttttctgcagaaagtagtgagaaagagtcatcacctaaaaccccttgataacaggtgttgggaacaagccccctgaaatctggccccaaaactgaccataaacaaaatctctgctgcactgtgacatgttcatcatggccataacgcccacgctggaaggtggtgggcttaccggaatgagggcaaggaacatgccctcatgttttggcccacccagggcggaaaaccgcttaaaggcattcttaagccacaaacaatagcatgagcgatctgtgccttaaggacatgctcctgctgcagttaactagcccaacctattcctttaatttagcccatcccttcgtttcccataagggatacttttagttaattt

SEQ ID NO: 618074 - DNA, 644 bp, Homo sapiens
ccaaggttaacactagttactctagccacccaaatccaatgccacttatccttttatactaacattattaacatttgttaatgttacttttatattaacactattaacatttcagcagcatctggtggaggcaaatgagtattacaacccattggaatggcrgatagcaatcaaactccaaatggtgctgcagacagaaccatgcatcgacatgcctttcttctgaggaccctaagagaagccccagctggtgttctccacagggcaccccttttctgcagaaagtagtgagaaagagtcatcacctaaaaccccttgataacaggtgttgggaacaagccccctgaaatctggccccaaaactgaccataaacaaaatctctgctgcactgtgacatgttcatcatggccataacgcccacgctggaaggtggtgggcttaccggaatgagggcaaggaacatgccctcatgttttggcccacccagggcggaaaaccgcttaaaggcattcttaagccacaaacaatagcatgagcgatctgtgccttaaggacatgctcctgctgcagttaactagcccaacctattcctttaatttagcccatcccttcgtttcccataagggatacttttagttaattt

SEQ ID NO: 618075 - DNA, 614 bp, Homo sapiens
atgaggcttctatccaggcctaaaactagaatctcagttatccaagtgtcttttgcatttaattttacaccagatattatctattctatctcctatctgtgtacgtcttcccattcataatgccttttaattgtcatttcttcagtgaattacaaagatatcttctgaaatattatcccttcttctggtatggcttcctgcaatattcaattccaatgtcatgctcttgattaaaatctttcagtggtcgctcactgtttctagaccttagctggaactcttggaccaaaaaatgtgagctacctctgtatccacctactttttttaaaaaggcaacttccgcacttataagggacagtaatccttgtgccagttgaaatattttcacagccatgattttatcacagaytgtaggaaacagattctcttgcttctagaaagcatgttttgttagggaactgtgttgaattcttcacctcaattaacctttattttaaaccttctgagcatcagaagtatttactatcttatattataaatgcaaatactttttcctggatcaaataattgaagaataactaggattatgaatgggaaagaaaggtttcctatgc

SEQ ID NO: 618076 - DNA, 614 bp, Homo sapiens
atgaggcttctatccaggcctaaaactagaatctcagttatccaagtgtcttttgcatttaattttacaccagatattatctattctatctcctatctgtgtacgtcttcccattcataatgccttttaattgtcatttcttcagtgaattacaaagatatcttctgaaatattatcccttcttctggtatggcttcctgcaatattcaattccaatgtcatgctcttgattaaaatctttcagtggtcgctcactgtttctagaccttagctggaactcttggaccaaaaaatgtgagctacctctgtatccacctactttttttaaaaaggcaacttccgcacttataagggacagtaatccttgtgccagttgaaatattttcacagccatgattttatcacagactgtaggaaacagattctcttgcttctagaaagcrtgttttgttagggaactgtgttgaattcttcacctcaattaacctttattttaaaccttctgagcatcagaagtatttactatcttatattataaatgcaaatactttttcctggatcaaataattgaagaataactaggattatgaatgggaaagaaaggtttcctatgc

SEQ ID NO: 618077 - DNA, 594 bp, Homo sapiens
ttctccttttttttttgtctcataggtgtaataacatttcattttaaaaataaatatgaaaaatggaaaagcataaataaaaaataaacayatttgtgagttttttatgcagatataaatactgttaatattttaatttttatcctctggccttgtacttctaggaagtaatgaatggtctggttctttgggtccttggagccagtgtggtaggagtggggttggcagggacagtagagaaggatgcaaggaaaatatttgctctggatagataattttgtctttttcatccaatcttatggggaagaaaatgttcaaaattcaataaatattcattgaacacctactatgtgctaaggactatttagatagtagaaacactgcaataaataatgcaaaatgcctttgtgaaagttataatctatggaaaatggaagagagagagtagaaatacccagtatgaaacttgacaattcaatacaaagtagccaaattatttaaataaacactttaagcacctggtatatggcacagttttgagtgatgatgtgttaaattcaaaatcaggaatttttatctaaactgtgtatctac

SEQ ID NO: 618078 - DNA, 611 bp, Homo sapiens
tattctatgcccctaacaaaactcaagcaatattaaaaacaatttgcatctagcttctgggatttttgagagaattctttaaaaatgaaggactttaatcatctggtccctctagattttatagtagttgaagaaatatataaaaaaattttgtgatatatattttggttatctcctaacatttatatttccctttagaaaagaaaaaaatcccacatgaaaagggaaattgaagagaaatattacctaccacataaaaagtcatacttttgtaagattatatttccatttctacataatattctctcattatgaaatcatcagtgcattttttagtcataaacaagacaccccccacacaaaatgagtaacaatataaataacattctggaaaatgaggtctattcaaatttcaggaaaaaagttaactctgaartattaattgatcataatgaggaggccaaacttcagatacacagaggagccatggaacatttcccataggcctgcagcttgtgaagacgtctaggaacactgacatgaagttaaatttaaaagtaaataaaaatagataagactatcagactgtcaacttgaagaacttcaacaag

SEQ ID NO: 618079 - DNA, 512 bp, Homo sapiens
tacagaaggtctgtctattatrttaaaggttcagatttatctgcttggtgatgaaaagtaaggaaacaatggggtccctccgggggagtatggaacgtggatccaagggtcagagagaacagtgaagagggtattgctgaagtctaggggaaagagccttcagttattcatgtttccatgctgtttcttagaggctcagcccaagtatctgatctttcccgcatctatgcataagttttctcaagcagtgctggtgatctccacaccgcatcttcctcctaaaatatttactgattatctgcattcaagtatgttataaactattttaatttgagatataaatattagtcatgcagctaactgcacccacctttccaggagcatctgctttttgtgacagacactgtggctttcaagggccttgccttattacttattacttattgcaccccactattcaacctgtcttcctactgcactaatatgcaccctgtgctgcagtcatgcagaag

SEQ ID NO: 618080 - DNA, 611 bp, Homo sapiens
gatctgagaggaggcaaataacatttactgattacctaccatgcatctaaattctgcagtggtgaatttatatgtcttattgtttaatccccatggtagccttatggarcaaatactccaattttcaggtaataaatatgagtctaagaaaggttgtcttgccatagtttataaatagtgatgtcaagatttatcttaggtttccacattagttattctacctctctccccaaagaaaagtagagtagataggctggaaactaacccttccactcctatgaatagcctttgcatcccattagggatgcaatgtaacatttatgttgtattagactttatacatatatttcttccatttgtagaatgggaatgtgtggagtcattccagccaaaagcagaagaacaaaagaaaatgaatcatacattttcaatatggctacatcataaagttatataagaggaagaatacaaaagatgaaacatgttagtaagagggagctatggtggttcccaaatgacaaactatgataaatatttccccaaaaacaaaactacaatgagacaccccctcacaaaagtcagaatggctattactacaaaaacaaaaagta

SEQ ID NO: 618081 - DNA, 465 bp, Homo sapiens
tacatacatacatgtatgtgtgtatacatatattatacatttccttcttttttctattgtttgcttttgatgagcatatgsttttcctgtttgcttttgtttggtttggcttaaactttttaaaataggtttttataattggcaattaaaaatatacttttttgctattaatgagtatatatgtctttcgtataaatgcaagcttttttacacaaaagatttctagaagtgagcttgctatgtcagaggatatttgcattttatattttgatagctacactctgacagatagcttcaaaaagaactgtgcttagataacatctgagcttgctcttttcaccacattttcaaaaatagtatcaacctttttcttatattctcaatctaatgagcaaaaagttactgtcttcttattttaatttttattccctctgctagtgagttaacaaacaaacacagcatatg

SEQ ID NO: 618082 - DNA, 565 bp, Homo sapiens
tcttatattctcaatctaatgagcaaaaagttactgtcttcttattttaatttttattccctctgctagtgagttaacaaacaaacacagcatatgtctcttagttcgcrtatattttctcttgtaaatggtcctttgttcagatttctattagcttgtctttatatttttttgaaagagctctgtataaaatgaatattaaacctttgtatattatagatgttatgactgtttcctcctagttatcttttaactttgttcactgtagctttttccacatggaaattaaaatatatgtatagtaaaatctttcagtcttataaaaattttttctaagtccttttatcattttctttttaaatttgatatctggtgagacagattccaattaattatggcataatttaaaaatttctttgggattcttgcctattttattgttccatataaaccaacaaattatctgtttaaattgattaataatcattaggattttgattgaaattttatctatagatttatatagaatcaatacattaaaatatggactctccccacccaagaa

SEQ ID NO: 618083 - DNA, 565 bp, Homo sapiens
tcttatattctcaatctaatgagcaaaaagttactgtcttcttattttaatttttattccctctgctagtgagttaacaaacaaacacagcatatgtctcttagttcgcatatattttctcttgtaaatggtcctttgttcagatttctattagcttgtctttatatttttttgaaagagctctgtataaaatgaatattaaacctttgtatattatagatgttatgactgtttcctcctagttatcttttaactttgttcactgtagctttttccacatggaaattaaaatatatgtatagtaaaatctttcagtcttataaaaattttttctaagtccttttatcattttctttttaaatttgatatctggtgagacagattccaattaattatggcataatttaaaaatttctttgggattcttgcctattttattgttccatataaaccaacaaattatctgtttaaattgrttaataatcattaggattttgattgaaattttatctatagatttatatagaatcaatacattaaaatatggactctccccacccaagaa

SEQ ID NO: 618084 - DNA, 501 bp, Homo sapiens
ccagaaagtgtggaccataatttctactgttacaaatgtgtaaaattattttgtggccttatgtagtcaatcttttaaaatattctgtaactattaaaaataagtcatttttgtttgttggatataacttttaatattgaataatctatattgctgtttatttctgactacttcatatcattgatttataatttgtgtccaaatacaacagtgaayttgtttatttctccttataaaattttaataagttgaccttatatttttgatgcatgttgctaagtacctatgatgtattatcttaatattttttaattattttcatcttatactcaagtatatttatgattgataggaccagtcttgatttattagtgaatcttcatgttcgaccattctatgtcattttcatgtaattatgattctagtaaagagaatgtagctaaaattattatgtatatctgacatggcttctatttttaatgaggagttttacttaattca

SEQ ID NO: 618085 - DNA, 554 bp, Homo sapiens
tagtatacacacacataccatacacacacatacacacatacacacacacacacaataataaacatactggtccaaccacccatagttttctacttctagccttcactactrcttctgatcttgtgcttatttgtggttcatctggaaaaaattacttactttggaggctcttttatctgcatggcttatagatttcagagacctggctaagtttttttttaattggttgcattgagatttagaattggtatatatcgtcctggtgaacggacaccttatcactgtgatatgaccttgtttattccaagtaatgctttctgtttgactaatatcaatatagccataccagttttatttggtttgtaactacatggtacacagtaccactctactgttgtacacacatataaattttaaaaattagcttgaaaatattaatcttctacttgaattattttgtttgttaatgtacttattgatgtatttggatttatatccaccttattattatttagcctacctgatcttttttaaatgcctttggtttttctttc

SEQ ID NO: 618086 - DNA, 530 bp, Homo sapiens
tttcatccctcacccacttctcacagtcccacctattggagtctcctgtgtctattattccactctgtatgtccatgtgtactcattgtttagctcccacttgtaagtgagaacctgtggtttttgattttgtgagatgtttcagttaagataatggcctccagctccatctgcattgctgcaaaagacatgatttcattctttaaatgtgtgatttaatctagtcattaagttttaatttcaatgactttatttatttctagaaattcttggttttcctcccaatctgtttattattttctcttrgcatcctcttcttttatgatgatttctagtacttctgctaactctgtatcatcttccatagacttatttaatactgtcatattttagccttaaccttttagtttaagattattcaatcatagtacattcctttatgttcaggtctttccttctgtttattttgttcttaattttttattcttgaatacacaggaaaaacacacttgaagcatatcttttattct

SEQ ID NO: 618087 - DNA, 545 bp, Homo sapiens
ttcttgtttgggattcattccttttcattcaagcattgttcacaaaactggattagttgttaattacaaatggcctaaactattttaagaaagaattttattatggaaaaataagagtactataaaaaaagtyagttggggtcaccttgtctattgcaactaaaatagaattgactcagagctacattttcatcacctccttttcttggcccccttattctggccttagattactctgcagaaacacaggcaccttgtttttttttttatgtggaaaaaattaggtttctttttcttattcttccactattccagatgaattccgtgtctattttctaataaatgctaactattttgaagagaaatgcattactcccatagaaagaacaaatacttgcaatcagtgatgttttacacttactatttctattttaatttgtatttattataaaaataggggatatgtgcacacttgaaaacattctcgttgtgtaacattagagtattacagttaaaactgaagccctctttaagcagtaatacct

SEQ ID NO: 618088 - DNA, 545 bp, Homo sapiens
ttcttgtttgggattcattccttttcattcaagcattgttcacaaaactggattagttgttaattacaaatggcctaaactattttaagaaagaattttattatggaaaaataagagtactataaaaaaagttagttggggtcaccttgtctattgcaactaaaatagaattgactcagagctacattttcatcacctccttttcttggcccccttattctggccttagattactctgcagaaacacaggcaccttgtttttttttttatgtggaaaaaattaggtttctttttcttattcttccactattccagatgaattccgtgtctattttctaataaatgytaactattttgaagagaaatgcattactcccatagaaagaacaaatacttgcaatcagtgatgttttacacttactatttctattttaatttgtatttattataaaaataggggatatgtgcacacttgaaaacattctcgttgtgtaacattagagtattacagttaaaactgaagccctctttaagcagtaatacct

SEQ ID NO: 618089 - DNA, 545 bp, Homo sapiens
ttcttgtttgggattcattccttttcattcaagcattgttcacaaaactggattagttgttaattacaaatggcctaaactattttaagaaagaattttattatggaaaaataagagtactataaaaaaagttagttggggtcaccttgtctattgcaactaaaatagaattgactcagagctacattttcatcacctccttttcttggcccccttattctggccttagattactctgcagaaacacaggcaccttgtttttttttttatgtggaaaaaattaggtttctttttcttattcttccactattccagatgaattccgtgtctattttctaataaatgctaactattttgaagagaaatgcattactcccatagaaagaacaaatacttgcaatcagtgatgttttacacttactrtttctattttaatttgtatttattataaaaataggggatatgtgcacacttgaaaacattctcgttgtgtaacattagagtattacagttaaaactgaagccctctttaagcagtaatacct

SEQ ID NO: 618090 - DNA, 391 bp, Homo sapiens
gaattctcctggatcttatccaggaccaccaaggagatacctttacaagtctgtaagaatcacggcattactgggcttggggtgccccctaatgcagacacagctgcaatgaccaaagatttagataacaacactcaattccctttgaatgcttggaaatcccttctaagaaggacagatacaaataagcctggacagtgaagacaacaataaatacctaactctttaatgcttagacatcagtgaatatccacaagcatcaaggccatccaggaaaacatgacctcaccaaacaaactraataaggcaccagggaccaatcctggagtgacagagttatgtgacctgtcaaagataatttaaaatacctgttttggggaagatcagtgaa

SEQ ID NO: 618091 - DNA, 467 bp, Homo sapiens
gaattcaagcaattttcctgccttagtctcacaagtagctgggattacaggagtgcatcaccatgcctggctaatttttgtatttttagtagaaacatcgtttcaccattttagccaggatggtctcaatctcctgacctcatgatccgcccacctcggcctcccaaagtgctgggattacaggcatgagccaccgtgcccggcccctcatgaggcattttatttaagagtgtctgttagcatcggacacaccaaatgacagaagcctctcaagcctgagaacttaacrtctaccaatatttattggtcagtggaagtgaacttgataatcaaacaggaatccaagactcttgaaatgttgtatccagaataggagacccgagataggtgaaacctcccctgttttactgaaaaaaaatatgcatcttcacaaatcactcttatttcctccctcactgtagaggaag

SEQ ID NO: 618092 - DNA, 492 bp, Homo sapiens
tgaaacattctccatgacaaaccataggttagatcacaaatcctcagtagattttagaagataggtatcacgcaaagtatattctttgaccacaccaagatgatggtaaaaatcartcgcagaaggaaaactggaaaattaacaaatctgtggaaattaaagcacatattcttaaataactaatgaatcaaagaggaaatcacaaggaaatttagaaaacacttagagataaatgaaaatgaaaacacaacataacaaagcttatgggactcagcaaaagcagtgccagggaagaaatttattgtgataaatgcttacattaaaaaagaaagatctcaaacaacctaactttacaatccaaggaactagaaaaaagaaaacgaactgaacccaaagctagcagatgaaagaaaataataaatatgagagcagggataaataaaatagaaagtaaacaaaacaacaaagagaaaatcaacaaagccaaaagtt

SEQ ID NO: 618093 - DNA, 661 bp, Homo sapiens
atctgaatctatgaggaacgcaaacaaatcagcaagaaaaaaaaaacaaataatcccatcaaaaagtgggcaaaggacatgaatggacatttatcaaaagaagacaatcaaccaacaaacatttgaaaaaaatgttcaacgtcactaatcatcagggaaatgcaaattaaaaccacaatgagataccaccttactcctgcaagaatgggcataattaaaacgtcaaaaaacaatagatgttggcatggatgtggtgaaaagggaagactttttcactgctggtaggaatgtaaattagtacaamctctatggaaaacagtatggagattccttaaagaactaaaagtagatctaccattccatgcagcaatcccactactgggtatctgcttaaagaaaacaaagtcattatatgaaaaagacacatggatacatatgtttattgcagcccaattcacaattgcaaaggtacagaaccaacttaagtgcccatcaaacaccatggactactactcggctataaaaaaggaatgaagttatgtcttttgcagcaacttggatagagctagaagccattattctaagtgaagtaactgaggaatggaaaacgaaataccatttttctcacttataagtgagagctaagctatgaggacacaaa

SEQ ID NO: 618094 - DNA, 345 bp, Homo sapiens
gaagtggcagctgaatcatgagaacacatggacacatagcgaggaacaatacacactggggcctgccagcyggtgaggacggagggcattaggaagaatagctaatggatgctgagcttaatacctaagtgatgggatgatctgtgtagcaaaccaccatgggacacatttacctatgtaagaaacctgcacatcctgcacgtgtatccctgaacttaaaataaaatttggaaaaaaaaaaagattgctaaaggaagttcttcaggctgttgaaaatgataccaggtggaaactcacaactactggaggaaagaggagcacccaaaatggtaaacatgtaagtaa

SEQ ID NO: 618095 - DNA, 485 bp, Homo sapiens
gatctgcccacctcggcctccaaaaggactaggattacaggtgtgagccaccgcgcccagccagttttattgttttgatgtgtctgtctttttttggtatcaggataatattggccttgtagaatgagtatggcagtactccctactctatattttggaatagtttgaataggattggcattatttctttaaatgtatggatgaattcatctgtgaagccatcaagtcctggggttttctttactgggagacttttttttatcatggctttgatcttgctatttttatgggtttgttcaggttttggatttcttcctggttcaatcttggtaggttgyatatgtctaagaatttgtccatttcttccagattttccaatttattggcaaatagttgctcatagtagccactaatgattctttgaaatgctgcattatcagttgtaatgtcttctttttcatgtttgattttatttatttggatca

SEQ ID NO: 618096 - DNA, 524 bp, Homo sapiens
ttgattatattctgtattatyataaaaaacaattataccagttataagaaatgtattgatacctttttagataagcacgataaatatcacccactttaaaatactgttatagagatgaaataagaaaaaaaaataagtctaggactacgcagtcataaattttgaacacaaatgattacattttactcattctttatgtcactaataaattaatttcttattatgcaaagttgacaattcaaaatagaattattaaaacatatttgatgtgattaacagcatatgtttggtacttcctttatccactgaactattggaattcctggaagagtttgtctgaattatcttcaaactactttaagactttcactgacaacgaaaaattgatgataataacctctgtagctgtccaaacatcttccacatgaggctttaggaaagttgatagaaacaagtaacaattcatacttaatattgcaagcatattgttatataatcagatccatcatacagcaggcctgaaa

SEQ ID NO: 618097 - DNA, 524 bp, Homo sapiens
ttgattatattctgtattatcataaaaaacaattataccagttataagaaatgtattgatacctttttagataagcacgataaatatcacccactttaaaatactgttatagagatgaaataagaaaaaaaaataagtctaggactacgcagtcataaattttgaacacaaatgattacattttactcattctttatgtcactaataaattaatttcttattatgcaaagttgacaattcaaaatagaattattaaaacatatttgatgtrattaacagcatatgtttggtacttcctttatccactgaactattggaattcctggaagagtttgtctgaattatcttcaaactactttaagactttcactgacaacgaaaaattgatgataataacctctgtagctgtccaaacatcttccacatgaggctttaggaaagttgatagaaacaagtaacaattcatacttaatattgcaagcatattgttatataatcagatccatcatacagcaggcctgaaa

SEQ ID NO: 618098 - DNA, 504 bp, Homo sapiens
gtagaatcaacactgctaaaaaccacatcaataaaacaaaaratgaatttaaaaagcacactcaggatgcaaaagcaacctctcaggagataaaaattagcataagagttatgaatgaaacaaaactcaggaccatagaaatattgagaaacctggcttatcacactcaaataaaattactcagtagaaactaacatgtagacattttctgataagttttgaaactgcaaagcaaaagttagatgttttattctacatagtacaaaaaatatgtttatttcaaagaagataaccagacaaaatttgaatttctcctctgcaatagtcaaaaccagaaagcaaaaagaaacatctataaaagtgttagaaaaatcaaatgtgaaccaagattttacatcttgacatgttgtccttaaatgtaatagcaacagaaagacattttcagtcatgcaataactcaagaaatttatcagcaggtatcaatctttgaaacctgtgctcata

SEQ ID NO: 618099 - DNA, 497 bp, Homo sapiens
ctgcccacttcaccacatttcttttctgatccccagcagcagcgtctcctgagaacttgttatggaatacaaattatctgcacccagctcagatttactcctttggaagygttggccatggagaatcataaccttttgctaaccaagccctccacgtgtttctgatgcacccgaaggtttgagattcacagccctatgtaactattacataatgtgaaaatatttcaagctttccctttcacgtcggaaacaaatcaaggatactgctcccaatacttcaattagacagttaattggtgatttttagccagcagaataatgaaagatatggtttgttattttttaaccttagtataatcttttaaaaaactctttaatagtgaactttattaatcttgctttatagaatataatatataaaatccctatttttcctctattccaataacatatatttagaagaaaatattttttaaaaatcccattcaaaatggcaa

SEQ ID NO: 618100 - DNA, 497 bp, Homo sapiens
ctgcccacttcaccacatttcttttctgatccccagcagcagcgtctcctgagaacttgttatggaatacaaattatctgcacccagctcagatttactcctttggaagcgttggccatggagaatcataaccttttgctaaccaagccctccacgtgtttctgatgcacccgaaggtttgagattcacagccctatgtaactattacataatgtgaaaatatttcaagctttccctttcaygtcggaaacaaatcaaggatactgctcccaatacttcaattagacagttaattggtgatttttagccagcagaataatgaaagatatggtttgttattttttaaccttagtataatcttttaaaaaactctttaatagtgaactttattaatcttgctttatagaatataatatataaaatccctatttttcctctattccaataacatatatttagaagaaaatattttttaaaaatcccattcaaaatggcaa

SEQ ID NO: 618101 - DNA, 525 bp, Homo sapiens
tcttcaggcaattttctccccagaccatctatttccctcattarctcttcaaaatccctgggaggtaagagtgtgcatataatttcttcttattctaaaatactgtttagagtttcgctttgaaatggcttttagagctaaatgtttagctgtcttaagtgaacctgcaataaacactattgaattctctccaaattatctcaaagaattacctgcttatctggaaaaaccatcagtgtaattttaagggattttgtttttattctgcagccccgtctttgaacttccctgctttaatttttcagtctttccacaggaaagactgctgcgaatgagccctgtgcaggactttccctcataaatgctgaagagagtgtttttgtttctacttcggtacatgtgattccagctccaaaggaagcaagatttccaagattaggacagtttagtctggaaaggagactcgttaaaagtagtgtgattaaaagctacttagggttttgagaatgcttgtgaaaactaaat

SEQ ID NO: 618102 - DNA, 525 bp, Homo sapiens
tcttcaggcaattttctccccagaccatctatttccctcattaactcttcaaaatccctgggaggtaagagtgtgcatataatttcttcttattctaaaatactgtttagagtttcgctttgaaatggcttttagagctaaatgtttagctgtcttaagtgaacctgcaataaacactrttgaattctctccaaattatctcaaagaattacctgcttatctggaaaaaccatcagtgtaattttaagggattttgtttttattctgcagccccgtctttgaacttccctgctttaatttttcagtctttccacaggaaagactgctgcgaatgagccctgtgcaggactttccctcataaatgctgaagagagtgtttttgtttctacttcggtacatgtgattccagctccaaaggaagcaagatttccaagattaggacagtttagtctggaaaggagactcgttaaaagtagtgtgattaaaagctacttagggttttgagaatgcttgtgaaaactaaat

SEQ ID NO: 618103 - DNA, 525 bp, Homo sapiens
tcttcaggcaattttctccccagaccatctatttccctcattaactcttcaaaatccctgggaggtaagagtgtgcatataatttcttcttattctaaaatactgtttagagtttcgctttgaaatggcttttagagctaaatgtttagctgtcttaagtgaacctgcaataaacactattgaattctctccaaattatctcraagaattacctgcttatctggaaaaaccatcagtgtaattttaagggattttgtttttattctgcagccccgtctttgaacttccctgctttaatttttcagtctttccacaggaaagactgctgcgaatgagccctgtgcaggactttccctcataaatgctgaagagagtgtttttgtttctacttcggtacatgtgattccagctccaaaggaagcaagatttccaagattaggacagtttagtctggaaaggagactcgttaaaagtagtgtgattaaaagctacttagggttttgagaatgcttgtgaaaactaaat

SEQ ID NO: 618104 - DNA, 525 bp, Homo sapiens
tcttcaggcaattttctccccagaccatctatttccctcattaactcttcaaaatccctgggaggtaagagtgtgcatataatttcttcttattctaaaatactgtttagagtttcgctttgaaatggcttttagagctaaatgtttagctgtcttaagtgaacctgcaataaacactattgaattctctccaaattatctcaaagaattacctgcttatctggaaaaaccatcagtgtaattttaagggattttgtttttattctgcagccccgtctttgaacttccctgcyttaatttttcagtctttccacaggaaagactgctgcgaatgagccctgtgcaggactttccctcataaatgctgaagagagtgtttttgtttctacttcggtacatgtgattccagctccaaaggaagcaagatttccaagattaggacagtttagtctggaaaggagactcgttaaaagtagtgtgattaaaagctacttagggttttgagaatgcttgtgaaaactaaat

SEQ ID NO: 618105 - DNA, 417 bp, Homo sapiens
gattcatgctgactggatagctgaggctactccctcttcaactctgcctttttctgtgtggcagttggaaaatgaaagtacctgattggtcccctcccacaaccaatcaggctggtcgcagacctactatttacctcccacaaccaatcagactggttgtgggctactacttcatttgcatagagtgaagcaatggagacctctagagggtatttaaaccccagcaaaagctgtaactgaggctcttgagccccttgcttgatccygctctcaccctgtggactgtgctttcatttaaaataaatccctgctttagctgccttgctttgtgtgtgtgttttgtccaattctttgttcaaaatgccaagaacccggacaactaccctcaactgataacatttccagtgaggataggct

SEQ ID NO: 618106 - DNA, 417 bp, Homo sapiens
gattcatgctgactggatagctgaggctactccctcttcaactctgcctttttctgtgtggcagttggaaaatgaaagtacctgattggtcccctcccacaaccaatcaggctggtcgcagacctactatttacctcccacaaccaatcagactggttgtgggctactacttcatttgcatagagtgaagcaatggagacctctagagggtatttaaaccccagcaaaagctgtaactgaggctcttgagccccttgcttgatcctgctctcaccctgyggactgtgctttcatttaaaataaatccctgctttagctgccttgctttgtgtgtgtgttttgtccaattctttgttcaaaatgccaagaacccggacaactaccctcaactgataacatttccagtgaggataggct

SEQ ID NO: 618107 - DNA, 575 bp, Homo sapiens
ccctcaactgataacatttccagtgaggataggctttccagggagaaaaatttttcatagcaaagagttttgcactgtcttttaaaatcaagtggaagttaaaaatataagttatgttttccatgcttatgtatgttttaggaaataaatcaggagattttttttaactttttatttggagataattgtagattcacacacagttgtaaaaaataatataaagagatccagagtatcccttcctcagtttcccttaccatcaatcagttcttcatttttataattttgtcatttcaagaatgttatatamatgaaatcatactgaatagaatctttgggggactgcctttttcactcaaaataattctctgtaaattcaaccaggttactatacatatcaacagttcactcctttttattactgcatagtaagccgtggtatggatttgccacagtttgtttaaccacttatcattgaaagttatcttagttgttttcagtttagggccattataaataaagctgctataaacattcatgcacagggtttttgtgcatacacaagtcttcattta

SEQ ID NO: 618108 - DNA, 616 bp, Homo sapiens
attagacagggtctccctatgttacccaggctgttctcaaactcttgggctcaagcgaccctcccaccccggccacccaaagtgttgggattayaggcgtgagtcactgtgcctggctgaaagtatgtttatatctatatatgttagtacttgtgctgattattttaagtgtaaatgtcttttttttttttttttgagattgagtctcgctgtcgcccaggctggagtgcagtggcgtgatctcggctcactgcaggctccgcccccggggttcacgccattctcctgcctcagcctcccgagtagctgggactacaggcgcccgccaccttgcccggctaattttttgtatttttagtagagacagggtttcactgtgttagccaggatggtctcgatctcctgacctcatgatccgcccgccttggcctcccaaagtgctgggattacaggcgtgagccaccgcgcctggcctaactggaaatttctaaagcacagggcttctgtccctttggctggttttgaataaccctgagaactccactatacatgaacaccttctttattatgaaacaaacatcagctacactgggtctcaaggtaacataaggatttc

SEQ ID NO: 618109 - DNA, 616 bp, Homo sapiens
attagacagggtctccctatgttacccaggctgttctcaaactcttgggctcaagcgaccctcccaccccggccacccaaagtgttgggattataggcgtgagtcactgtgcctggctgaaagtatgtttatatctatatatgttagtacttgtgctgattattttaagtgtaaatgtcttttttttttttttttgagattgagtctcgctgtcgcccaggctggagtgcagtggcgtgatctcggctcactgcaggctccgcccccggggttcacgccattctcctgcctcagcctcccgagtagctgggactacaggcgcccgccaccttgcccggctaattttttgtatttttagtagagacagggtttcacygtgttagccaggatggtctcgatctcctgacctcatgatccgcccgccttggcctcccaaagtgctgggattacaggcgtgagccaccgcgcctggcctaactggaaatttctaaagcacagggcttctgtccctttggctggttttgaataaccctgagaactccactatacatgaacaccttctttattatgaaacaaacatcagctacactgggtctcaaggtaacataaggatttc

SEQ ID NO: 618110 - DNA, 508 bp, Homo sapiens
ccaacagtgtataagcattcccttttgtttgcagcctctacagcatctgttgttttttttcactttttagtagtagctattctgactggtgtgagatggtatctcattgtggttttgatttktatttctttgatggccagtgatgtggagcattttgtcatatgtttgctagttgcttgtatatcttcttttgaaaagtgcaggacatctcaatatttactttaactcaactctgtgtgtgtgtgtgtgtgtgtgtgtgtgcaggtagggaggaaaacaaggacagaaaccaggaggcccagcccaggattaaaaacacaccacagcctttccaaaaagtcagagtcatacatggatcacttggaaataactgaacttgcaaatccagtttcccatggacctgctgagtttatgaggtaagagaagggaagcgttcacataatgagagatgattcttttcattaccgtggttgcaaacttggatgatggcaggagcatttgtgcttgg

SEQ ID NO: 618111 - DNA, 508 bp, Homo sapiens
ccaacagtgtataagcattcccttttgtttgcagcctctacagcatctgttgttttttttcactttttagtagtagctattctgactggtgtgagatggtatctcattgtggttttgatttttatttctytgatggccagtgatgtggagcattttgtcatatgtttgctagttgcttgtatatcttcttttgaaaagtgcaggacatctcaatatttactttaactcaactctgtgtgtgtgtgtgtgtgtgtgtgtgtgcaggtagggaggaaaacaaggacagaaaccaggaggcccagcccaggattaaaaacacaccacagcctttccaaaaagtcagagtcatacatggatcacttggaaataactgaacttgcaaatccagtttcccatggacctgctgagtttatgaggtaagagaagggaagcgttcacataatgagagatgattcttttcattaccgtggttgcaaacttggatgatggcaggagcatttgtgcttgg

SEQ ID NO: 618112 - DNA, 610 bp, Homo sapiens
ggttgacctacatacaacacaggtgaaggataggcttccgctctgtcatgggttgggttgcctgggcaacagttctgagatggagatttgtatgcaaatggtttatttgagagagtgctctagggaamaataccaaggcctataagagattgagaggggcaggactgggtggggagaaagtgggctgtgatgtggtggtgacagaggcctcggctgtgtcaacaggaagtgctggaccttggggggccctttagtgttgtcacaaattggggtgtcagggccaggcttataaacccctccccatcttcctcactccctttgccactgggctgctctcatcacagggaagaaagggagaaatcctggacacacaactccttttaggctgagggcgattccatgaggggaactcagctgtgagccaaaggcagccacactcacagcagcagagaggatttgttcagacctggagggggcatcgggacagcacccacagcatccactgcacccttgaattcgcagtgagaaagacacaaacagacaaacatctaggatttgaagtagatacagggtaaatgtttacatatctgaagatttaattattgtctat

SEQ ID NO: 618113 - DNA, 610 bp, Homo sapiens
ggttgacctacatacaacacaggtgaaggataggcttccgctctgtcatgggttgggttgcctgggcaacagttctgagatggagatttgtatgcaaatggtttatttgagagagtgctctagggaacaataccaaggcctataagagattgagaggggcaggactgggtggggagaaagtgggctgtgatgtggtggtgacagaggcctcggctgtgtcaacaggaagtgctggaccttggggggccctttagtgttgtcacaaattggggtgtcagggccaggcttataaacccctccccatcttcctcactccctttgccaytgggctgctctcatcacagggaagaaagggagaaatcctggacacacaactccttttaggctgagggcgattccatgaggggaactcagctgtgagccaaaggcagccacactcacagcagcagagaggatttgttcagacctggagggggcatcgggacagcacccacagcatccactgcacccttgaattcgcagtgagaaagacacaaacagacaaacatctaggatttgaagtagatacagggtaaatgtttacatatctgaagatttaattattgtctat

SEQ ID NO: 618114 - DNA, 559 bp, Homo sapiens
ttcagtgtcctcagactcttttatagagaggctttacaggcatctgactgatggcatgagtaggtacatttatacgctcagaagtttcagaatttgcagtggtttgtaccacacaattagaaacagaaaaacctcagcaataacagagttgatgaagtctgtgtcatagaaacttctcagagctcatatcagttgcataaaaattataattgcttccaatatacagttgatgaggcaataaaagagctgatgaagtctatgtcattggacagaatgcttctggatattayacagatgtaactttcagcacctgcagacagttcaacttagaactctgaaatcaggaaatcaacaagacacgcaccagagtaagaagcagaaggtgattagtgccacagatcaaggatgatgaaggaagagtgtctggacccacccaagacaggcaccttcagaagcaataccagacaaagtagaaattggtagtttctaccagaactgatttagctattgtcatttttaccatatatatttagcatactatataattcatttcatagag

SEQ ID NO: 618115 - DNA, 483 bp, Homo sapiens
accacagagggctctgccatgaagcaggtcagcttcaccacttctgtggaaggaatgaggcacrtttttgttccttgcatttctcctccaatctctttggctcccatcccaacaaaggttttgaaagatagaaattcctatgtgtgaagtcagggaaacaaaacatgcataaaatgcttcagagatgccacattcatcactgttattagagagcatctgtaagctggaagccttgaaaagagtacttgaaggccaatccattactattcaaagaaaagtatctttaatgcagagatctttgtgcagaataccaggcaccagctgggctccatctccaccagagaacacacgacaagaggcagtggggtcaaaaggcaacatgaagaatttgtgttaagcataatatgaatagacagtaaaagtaaagtccatttatgggtgaaagaatgtgacaagtcacccagagcccagggcctggagccc

SEQ ID NO: 618116 - DNA, 532 bp, Homo sapiens
aaccccatctctactaaaagtacaaaaattagctgggcatgtggtggcacctgtaatcccagctactcaggaggctgtggcaggagaattgctagaacccaggaggcagaggttgcagtgagtcgagattgcgccattgcactccagcctgggcaacagagtgagactctgcttccaaaaaacaaaaacaaaaacaaaaacaaaaaacccccgaaatactasaatgttaaggggacctagaaaactttgattattgacatcactcaacttcatccttgaagaatgagaaagagctcagcctccctgaaaggaagtgactgtttagataaggatgagcaaaacagaggtactgttagcaagaaagaaatggggcaatgcatattggagagggaccctagagcataggtctcaatggcaaagtcagtaataattaaaatgaatcatcaaaaaaaaggtgcaagtgccctgccttggattttccgtaactcaacacctctggattcagatctgatttcaactggaatccatgtca

SEQ ID NO: 618117 - DNA, 506 bp, Homo sapiens
gtcccccaggtctcaagtgatttgatgtcccttcaactttcactccatgcagagaataaacctgcagtgttccgcaggataggaaaaagacggttacttagctgtatgtgatgaaagagggaatctgcttttgtgtcttaaccacttttaaccaattcttatttcagtctctccttcacccccactcccagaggtacgtggtgctatcattatcagagccattgtgggggcgtcttccgtgcaaatgtggttatcttcatctttctcagcaggagctgagggttcagcattcttggtcttcggaatcaatctccagtcattctttaacttttycacatgcaaagttcagttgctatcatctcctttcccaaccttgggaccctttaaaaaattccctttgtcagctagggtgttttaggaaggaacagagttaaatgtatatttttaattcactatctttaacctgaagtttagatcttaaagatttttgaaaagttggttggcag

SEQ ID NO: 618118 - DNA, 501 bp, Homo sapiens
tacaatgtttaccttttccactacatcctttaagcatatttattgatattttaaaattcctgtctacactatctctaggtgtgttttattgactctttcttctcttgactatggttaatgtttattttcatctcaaagttcccccaaattttattgcctaacagatattttatataaaaggacaccagaaagggraataaataatactcctaagaaatgtcatgccctttcttttgccaggcttcaagactggagggctaactctatctgataggtgtcagtttgggtctgagctttgtttcagctttagtttgattcagtttcccactggcttcaaatgttttgagacagaggtaagtttttccccttcagcaggttctagaatgtgaaaacttgaaagtccacagatttctttgtgttatacacaaagctgtcagtttttccaacaaaccataggagatctccctctgccttacagcctggctgcaaagatcactaatg

SEQ ID NO: 618119 - DNA, 452 bp, Homo sapiens
tgaaggagggagagaataaagggaatcaccagtgtggtatggctgagaagggagctwttgggagactataggttctgtatctaactggagtatttaagttgttttatggaggctgtgatttataattccaccacttcatattcttaaaaagcttcagtaaatctgcattgttcattaatgccctgcataggtgcattatttcagatgaatttaaagaaggctaaattctgtggccaggtgggtgtggagtaaaaataaagatggctcccagggatgtaggagcaagtgggtgggaactgctaaagcttgtttttacgtaagataagcatttaacttcctccactcctctactgtgaagtcttgaagggtttatgtcactaattgttcaacctaaataaacatttattaggcctgttctctacagctgcaattagaacttttgagaaccagct

SEQ ID NO: 618120 - DNA, 452 bp, Homo sapiens
tgaaggagggagagaataaagggaatcaccagtgtggtatggctgagaagggagcttttgggagactataggttctgtatctaactggagtatttaagttgttttatggaggctgtgatttataattccaccacttcatattcttaaaaagcttcagtaaatctgcattgttcattaatgccctgcataggtgcattatttcagatgaatttaaagaaggctaaattctgtggccaggtgggtgtggagtaaaaataaagatggctcccagggatgtaggagcaagtgggtgggaactgctaaagcttgtttttacrtaagataagcatttaacttcctccactcctctactgtgaagtcttgaagggtttatgtcactaattgttcaacctaaataaacatttattaggcctgttctctacagctgcaattagaacttttgagaaccagct

SEQ ID NO: 618121 - DNA, 435 bp, Homo sapiens
ctggagcctcagtacacttacctaatctaaatgggtccaggtgctgggatgattcccttatcttctcccctgccaaatcatggaggtgtggggagttccttcagacccaataaacttgtttgcagaggcctggggaatttcttcagacccccagtaaaagttgtttaatcttaaacgggtcatgttaagaattccctcattatctcgtcatgcttyaaggcccaggagaggcctaggcaaaattcttgatgggcttttgttacattccagcctttgtataagggcactggctgtctcagcttttaatatttaacttcatcactcagtcagtgctgaaacagttgttgtggagccctgcctgttcagcctttatgaagacctggcctgcagaagttgattgaagcccatccatacattttgaggccccgttccatt

SEQ ID NO: 618122 - DNA, 404 bp, Homo sapiens
ctagccagaagactggtccagtctttttcattttagccattttaaaaggcttagtagtatcacactgtggttttaatttgcaattctataatgtctaataatattaaatacttctcatatgcttattgacttattgagcgtcttttcatatgctttattgagttctgtagatcttctttggtgaggcatttattcacattttttgcccattaaaaaawattttttttaacctttaaaattttttcaactgttttatttctttttaaaaattttctatagttaggatgtaaaacctaatgttttcatatacatttacatagtgaaatgattactacagtcatgcaaattaacatatttgtaacctcccatagtaagcttttcttattatcacattttgagaattc

SEQ ID NO: 618123 - DNA, 587 bp, Homo sapiens
tctatctctgtcattacaataattttagtctggttaagaactattgcctggggactagtgcatttgtttggaggtaaggggacactctggctttttcagttgccggaaaaagccagagtgtcttgcatttrttctttctcatctgagagagctggtgttcctttaactgtgatgtaagataaatatagtcagttggcttcatttctaggtactttcagagtgcaaggctctatataggatctttatttgtggctggatttttgcctagggtttcagagacactgtgtactggcaaaatatttttggcattgtaatttggactgtgatccagtagatggcacttaatagtgaaggctggcagataggttctttctcagtcatgtggctcttttgtattttagcacgttctcggtagtgctgtatgatggcgggggagagagatgacatctttacaggtttgctccagagccttggaggagcctcctctgataactggtgccacactcacgtttctttccctcagggagaggccatggttggcagacaggccataccttttcctggatggccctgcagaaggaggcata

SEQ ID NO: 618124 - DNA, 652 bp, Homo sapiens
ttgattcatctatgttggtgtaaatatatgtaactaatttattttcactgctgcgtactatttcattgtgtgaatataataaattatttttccattgtactgttgattggtattatagccatttcaggttttacagttatgagcaaggctgctatgactatgtttgtatgaatactctagtatgcatgtgcaagagtttctaagtatactcttaggggttgactcactgaatcgtaaggtaggcacattcaaatttattaggtaatgtcaaactgttttccaaagatgttgtaccaatttatacgacctccagcagcatatattatatatctacactttgttaacactgtgttgtctgattttagttttttcaattcattggtataaaayaatgttgcactgtgattaatttttatttctctgattactattgatatagtgaggttgagcactttttggtgtatatacatatgtatgtgtaaaatcacacacacacgttttttgtcttctatgaagagctaagtcattttaatttggggttgtctttttttcttgattcttagtttttgttgttgttgttgttgttcatttgtttgtttttttgagacagggtcttgctccgttgtccagattggagtgcaatggcatgatc

SEQ ID NO: 618125 - DNA, 652 bp, Homo sapiens
ttgattcatctatgttggtgtaaatatatgtaactaatttattttcactgctgcgtactatttcattgtgtgaatataataaattatttttccattgtactgttgattggtattatagccatttcaggttttacagttatgagcaaggctgctatgactatgtttgtatgaatactctagtatgcatgtgcaagagtttctaagtatactcttaggggttgactcactgaatcgtaaggtaggcacattcaaatttattaggtaatgtcaaactgttttccaaagatgttgtaccaatttatacgacctccagcagcatatattatatatctacactttgttaacactgtgttgtctgattttagttttttcaattcattggtataaaataatgttgcactgtgattaatttttatttctctgattactattgatatagtgaggttgagcactttttggtgtatatacatatgtaygtgtaaaatcacacacacacgttttttgtcttctatgaagagctaagtcattttaatttggggttgtctttttttcttgattcttagtttttgttgttgttgttgttgttcatttgtttgtttttttgagacagggtcttgctccgttgtccagattggagtgcaatggcatgatc

SEQ ID NO: 618126 - DNA, 652 bp, Homo sapiens
ttgattcatctatgttggtgtaaatatatgtaactaatttattttcactgctgcgtactatttcattgtgtgaatataataaattatttttccattgtactgttgattggtattatagccatttcaggttttacagttatgagcaaggctgctatgactatgtttgtatgaatactctagtatgcatgtgcaagagtttctaagtatactcttaggggttgactcactgaatcgtaaggtaggcacattcaaatttattaggtaatgtcaaactgttttccaaagatgttgtaccaatttatacgacctccagcagcatatattatatatctacactttgttaacactgtgttgtctgattttagttttttcaattcattggtataaaataatgttgcactgtgattaatttttatttctctgattactattgatatagtgaggttgagcactttttggtgtatatacatatgtatrtgtaaaatcacacacacacgttttttgtcttctatgaagagctaagtcattttaatttggggttgtctttttttcttgattcttagtttttgttgttgttgttgttgttcatttgtttgtttttttgagacagggtcttgctccgttgtccagattggagtgcaatggcatgatc

SEQ ID NO: 618127 - DNA, 652 bp, Homo sapiens
ttgattcatctatgttggtgtaaatatatgtaactaatttattttcactgctgcgtactatttcattgtgtgaatataataaattatttttccattgtactgttgattggtattatagccatttcaggttttacagttatgagcaaggctgctatgactatgtttgtatgaatactctagtatgcatgtgcaagagtttctaagtatactcttaggggttgactcactgaatcgtaaggtaggcacattcaaatttattaggtaatgtcaaactgttttccaaagatgttgtaccaatttatacgacctccagcagcatatattatatatctacactttgttaacactgtgttgtctgattttagttttttcaattcattggtataaaataatgttgcactgtgattaatttttatttctctgattactattgatatagtgaggttgagcactttttggtgtatatacatatgtatgtgtaaaatcacacacacacgttttttgtcttctatgaagagctaagtcattttaatttggggttgtctttttttcttgattcttagtttttgttgttgttgttgttgttcrtttgtttgtttttttgagacagggtcttgctccgttgtccagattggagtgcaatggcatgatc

SEQ ID NO: 618128 - DNA, 653 bp, Homo sapiens
catggaaaacaaagacaattttatcacttggtaaattctaagggtttagaggttactcctaggagctgtggacaaagctagacctctcttagggcaagacaaaattctttaccacatagtcatcttatagttttgatattaattatggtctcataaaatgattttgagggtgtagtatttgtgctattactttcttatatttgtgrgattcactactaagccagctgatcctggaatttttttgaggtaaagatttttttctacaaagtaaatttctttcatagatatagggagattcgttcttgaggaagctttgatagtttgtgtttttgaggaaatttttattgtatctaagttgtggaattttcagaacacacatttataatatttattacttgtttgaatgtctgtaggatctgtggtgatgctctcttttgccttcagcttttggttttactgtttctttgtttctgtttgcttttggtttaatttgttctttttaatcttttctagtttcctaaggtggaagcttagatcattgatttgagacttttctccttttataagtaattaatactttgaacatctctgcaatcactattttgtttcagacaaattatgatgttctgcgttgtctttttaattcagtttaa

SEQ ID NO: 618129 - DNA, 653 bp, Homo sapiens
catggaaaacaaagacaattttatcacttggtaaattctaagggtttagaggttactcctaggagctgtggacaaagctagacctctcttagggcaagacaaaattctttaccacatagtcatcttatagttttgatattaattatggtctcataaaatgattttgagggtgtagtatttgtgctattactttcttatatttgtgggattcactactaagccagctgatcctggaatttttttgaggtaaagatttttttctacaaagtaaatttctttcatagatatagggagattcgttcttgaggaagctttgatagtttgtgtttttgaggaaatttttattgtatctaagttgtggaattttcagaacacacatttataatatttattacttgtttgaatgtctgtaggatctgtggtgatgctctcttttgccttcagcttttggttttactgtttctttgtttctgtttgcttttggtttaatttgttctttttaatcttttctagtttcctaaggtggaagcttagatyattgatttgagacttttctccttttataagtaattaatactttgaacatctctgcaatcactattttgtttcagacaaattatgatgttctgcgttgtctttttaattcagtttaa

SEQ ID NO: 618130 - DNA, 653 bp, Homo sapiens
catggaaaacaaagacaattttatcacttggtaaattctaagggtttagaggttactcctaggagctgtggacaaagctagacctctcttagggcaagacaaaattctttaccacatagtcatcttatagttttgatattaattatggtctcataaaatgattttgagggtgtagtatttgtgctattactttcttatatttgtgggattcactactaagccagctgatcctggaatttttttgaggtaaagatttttttctacaaagtaaatttctttcatagatatagggagattcgttcttgaggaagctttgatagtttgtgtttttgaggaaatttttattgtatctaagttgtggaattttcagaacacacatttataatatttattacttgtttgaatgtctgtaggatctgtggtgatgctctcttttgccttcagcttttggttttactgtttctttgtttctgtttgcttttggtttaatttgttctttttaatcttttctagtttcctaaggtggaagcttagatcattgatttgagacttttctccttttataagtawttaatactttgaacatctctgcaatcactattttgtttcagacaaattatgatgttctgcgttgtctttttaattcagtttaa

SEQ ID NO: 618131 - DNA, 653 bp, Homo sapiens
catggaaaacaaagacaattttatcacttggtaaattctaagggtttagaggttactcctaggagctgtggacaaagctagacctctcttagggcaagacaaaattctttaccacatagtcatcttatagttttgatattaattatggtctcataaaatgattttgagggtgtagtatttgtgctattactttcttatatttgtgggattcactactaagccagctgatcctggaatttttttgaggtaaagatttttttctacaaagtaaatttctttcatagatatagggagattcgttcttgaggaagctttgatagtttgtgtttttgaggaaatttttattgtatctaagttgtggaattttcagaacacacatttataatatttattacttgtttgaatgtctgtaggatctgtggtgatgctctcttttgccttcagcttttggttttactgtttctttgtttctgtttgcttttggtttaatttgttctttttaatcttttctagtttcctaaggtggaagcttagatcattgatttgagacttttctccttttataagtaattaatactttgaacatctctgcaakcactattttgtttcagacaaattatgatgttctgcgttgtctttttaattcagtttaa

SEQ ID NO: 618132 - DNA, 483 bp, Homo sapiens
gtgaggagagcccagtaatagcagagcccaaacrctgtggtaacaaaatgttccattctagaatacacttccattgtcttctggggatggagtaaggaggagaatgtatgggcaatctaatctagactactttactaggacaaaagaaattaattcagaattccctatttgtatgatttccacctgcgtttaagcaaaatttttagtttagtatggtcaaattggccactgattttttctttttcctcttttggtcactggggaaattcgctggttatttcatgagaagttaccatattctaaaacatgcaacagagaatatactttaaatgtgctttttgaagaggtttatcctgtgctgaatggtgctggaggaatatttctttcacacatgaacacttagcacaatcagataatttcttttaaactaaaaacattccattaggttcctttctcatctgtggtgtgccactcaaaaagcac

SEQ ID NO: 618133 - DNA, 554 bp, Homo sapiens
agtctataatatcactggcaatatcataaggagtgtataccccccgttatattgttccttatgtccagcaagggagaaaatattaatcccaatatggaacagggtgtacacacccatgaggtattgttcctaatatccagggagggaaaggatgatattactcccaatgttgcagtggtgtataacccccccgtgatattgttcctaatatctaggtggggaaagtacagtattactcccaatatagcaggggttgtacaccgcctttgtgatattgttctaaatatmcatggggaaagaaaatgatagtactccccaatatcgcaggtggtgtacaaccccttgtgatactgtttctaatatccatgttgggggaggatattactcccaatattgcacgtgttgcacagaccccctttgatattgtttgtactatgcagggtgtggggggagaggatgatattgggagtaatatcaccctctctccccagatattaaaagcaatattcagggtggtcgacacctcctgcaatattgagtataatatcctctcc

SEQ ID NO: 618134 - DNA, 554 bp, Homo sapiens
agtctataatatcactggcaatatcataaggagtgtataccccccgttatattgttccttatgtccagcaagggagaaaatattaatcccaatatggaacagggtgtacacacccatgaggtattgttcctaatatccagggagggaaaggatgatattactcccaatgttgcagtggtgtataacccccccgtgatattgttcctaatatctaggtggggaaagtacagtattactcccaatatagcaggggttgtacaccgcctttgtgatattgttctaaatatacatggggaaagaaaatgatagtactccccaatatcgcaggtggtgtacaaccccttgtgatactgtttctaatatccatrttgggggaggatattactcccaatattgcacgtgttgcacagaccccctttgatattgtttgtactatgcagggtgtggggggagaggatgatattgggagtaatatcaccctctctccccagatattaaaagcaatattcagggtggtcgacacctcctgcaatattgagtataatatcctctcc

SEQ ID NO: 618135 - DNA, 554 bp, Homo sapiens
agtctataatatcactggcaatatcataaggagtgtataccccccgttatattgttccttatgtccagcaagggagaaaatattaatcccaatatggaacagggtgtacacacccatgaggtattgttcctaatatccagggagggaaaggatgatattactcccaatgttgcagtggtgtataacccccccgtgatattgttcctaatatctaggtggggaaagtacagtattactcccaatatagcaggggttgtacaccgcctttgtgatattgttctaaatatacatggggaaagaaaatgatagtactccccaatatcgcaggtggtgtacaaccccttgtgatactgtttctaatatccatgttgggggaggatattactcccaatattgcacgtgttgcacagaccccctttgatattgtttgtactatgcagggtgtggggggagaggatgatattgggagtaatatcaccctctctycccagatattaaaagcaatattcagggtggtcgacacctcctgcaatattgagtataatatcctctcc

SEQ ID NO: 618136 - DNA, 554 bp, Homo sapiens
agtctataatatcactggcaatatcataaggagtgtataccccccgttatattgttccttatgtccagcaagggagaaaatattaatcccaatatggaacagggtgtacacacccatgaggtattgttcctaatatccagggagggaaaggatgatattactcccaatgttgcagtggtgtataacccccccgtgatattgttcctaatatctaggtggggaaagtacagtattactcccaatatagcaggggttgtacaccgcctttgtgatattgttctaaatatacatggggaaagaaaatgatagtactccccaatatcgcaggtggtgtacaaccccttgtgatactgtttctaatatccatgttgggggaggatattactcccaatattgcacgtgttgcacagaccccctttgatattgtttgtactatgcagggtgtggggggagaggatgatattgggagtaatatcaccctctctccccagatattaaaagcaatattcagggtggtcracacctcctgcaatattgagtataatatcctctcc

SEQ ID NO: 618137 - DNA, 383 bp, Homo sapiens
gcctgttaacagaagactggattaaaaaatgcagcgtacatacaccatggaatactacacacctataaaataggatgaaataatgtcttttgcagcaacatgaatggagctggataccattattctaagtgaattaatgcaggaacagaaaaccaaacaaacactgcatgttctcacttataagtgggggytaaacattgagtccacatggacacaaagaagggaacaatagacacaaggtctactgtgggtggagggtcggggggagagtgaggatcaaaaaactccctattagatactacgctcactacctggatgactacgtaatctgtataccgaatcccattgacacacattttacccatataataaacctgcacatg

SEQ ID NO: 618138 - DNA, 383 bp, Homo sapiens
gcctgttaacagaagactggattaaaaaatgcagcgtacatacaccatggaatactacacacctataaaataggatgaaataatgtcttttgcagcaacatgaatggagctggataccattattctaagtgaattaatgcaggaacagaaaaccaaacaaacactgcatgttctcacttataagtgggggttaaacattgagtccacatggacacaragaagggaacaatagacacaaggtctactgtgggtggagggtcggggggagagtgaggatcaaaaaactccctattagatactacgctcactacctggatgactacgtaatctgtataccgaatcccattgacacacattttacccatataataaacctgcacatg

SEQ ID NO: 618139 - DNA, 383 bp, Homo sapiens
gcctgttaacagaagactggattaaaaaatgcagcgtacatacaccatggaatactacacacctataaaataggatgaaataatgtcttttgcagcaacatgaatggagctggataccattattctaagtgaattaatgcaggaacagaaaaccaaacaaacactgcatgttctcacttataagtgggggttaaacattgagtccacatggacacaaagaagggaacaatagacacaaggtctactgtgggtggagggtcggggggagagtgaggatcaaaaaactccctattagatactacgctcactacctggatgactacgtaatctgtataccraatcccattgacacacattttacccatataataaacctgcacatg

SEQ ID NO: 618140 - DNA, 661 bp, Homo sapiens
aaaaactagtcttttagcaacactattttgtatggttaaatatgtcagtaaatttctttaccattccaacaggtttaatacaaacttaaatatatatataaccattctagtattgcttagagttccttaactttctcctgcttcctaatatgaaaataatgctggcacctaaagaaagttgaaaggataaattttcctttatcaatgttttcccttgaacttattaaaaaagaaatagtatccataaatataaattttctatatagtcagttaccaattgagagaaaaagaaagtcagaatgttaaaaatgcattgttctgatatgaaaagcacaagaagatcaacatggcataacaaattacaaccataataactgtagcatacatttcaacactgatggggacaggacgggagggggaaaggactkaaaaccttgcagatgctttgccttgaaaacagtgagggataaattagtaacagcaagtttaggaaagagaaagaacttgtaggaactattggagggaatgagtctctttgggggggtcctagtagggagaatgtcaaattaaatccttcccagctggttgctcaggaaaagattctcctgtttagcagttaagcacacacaaaaaagtcatgcaacggccttccctatagtgg

SEQ ID NO: 618141 - DNA, 661 bp, Homo sapiens
aaaaactagtcttttagcaacactattttgtatggttaaatatgtcagtaaatttctttaccattccaacaggtttaatacaaacttaaatatatatataaccattctagtattgcttagagttccttaactttctcctgcttcctaatatgaaaataatgctggcacctaaagaaagttgaaaggataaattttcctttatcaatgttttcccttgaacttattaaaaaagaaatagtatccataaatataaattttctatatagtcagttaccaattgagagaaaaagaaagtcagaatgttaaaaatgcattgttctgatatgaaaagcacaagaagatcaacatggcataacaaattacaaccataataactgtagcatacatttcaacactgatggggacaggacgggagggggaaaggacttaaaaccttgcagatgctttgccttgaaaacagtgagggrtaaattagtaacagcaagtttaggaaagagaaagaacttgtaggaactattggagggaatgagtctctttgggggggtcctagtagggagaatgtcaaattaaatccttcccagctggttgctcaggaaaagattctcctgtttagcagttaagcacacacaaaaaagtcatgcaacggccttccctatagtgg

SEQ ID NO: 618142 - DNA, 573 bp, Homo sapiens
gatctgcccgcctccgcctcccaaagtgctgggattacaggtgtgagccaccgcgcccrgcctatgttgtttattatatatcataagttttatatatatatatatatatatatatatatatatatatatatatatatctgatacatatacatatataccagatataatatgtcatatatatcagttatatatacacattagatgaaaagtacattttcatttgacagggaattctttcaaatcaaatcatcaaacactctaaaattgggcaaagtacacttttccagatctgcaagttacttgtgtacataggaaaaagtccttcgcatttctggtataagaatttaaattaaaagaggaatgaaacagttttctatccacaatatttgtgaggatgttttatactcctgcttaaagtttaagttgctgattatttttcaaatagataatttggtggtaagtactacaattaaaaaatatgtatgccctttacccatcaattccattatactaaaacaccctcaggaaataaagatacatgcactttatttttcacctcacttattttaaaaa

SEQ ID NO: 618143 - DNA, 573 bp, Homo sapiens
gatctgcccgcctccgcctcccaaagtgctgggattacaggtgtgagccaccgcgcccggcctatgttgtttattatatatcataagttwtatatatatatatatatatatatatatatatatatatatatatatatctgatacatatacatatataccagatataatatgtcatatatatcagttatatatacacattagatgaaaagtacattttcatttgacagggaattctttcaaatcaaatcatcaaacactctaaaattgggcaaagtacacttttccagatctgcaagttacttgtgtacataggaaaaagtccttcgcatttctggtataagaatttaaattaaaagaggaatgaaacagttttctatccacaatatttgtgaggatgttttatactcctgcttaaagtttaagttgctgattatttttcaaatagataatttggtggtaagtactacaattaaaaaatatgtatgccctttacccatcaattccattatactaaaacaccctcaggaaataaagatacatgcactttatttttcacctcacttattttaaaaa

SEQ ID NO: 618144 - DNA, 573 bp, Homo sapiens
gatctgcccgcctccgcctcccaaagtgctgggattacaggtgtgagccaccgcgcccggcctatgttgtttattatatatcataagttttatatatatatatatatatatatatatatatatatatatatatatatctgatacatatacatatataccagatataatatgtcatatatatcagttatatatacacattagatgaaaagyacattttcatttgacagggaattctttcaaatcaaatcatcaaacactctaaaattgggcaaagtacacttttccagatctgcaagttacttgtgtacataggaaaaagtccttcgcatttctggtataagaatttaaattaaaagaggaatgaaacagttttctatccacaatatttgtgaggatgttttatactcctgcttaaagtttaagttgctgattatttttcaaatagataatttggtggtaagtactacaattaaaaaatatgtatgccctttacccatcaattccattatactaaaacaccctcaggaaataaagatacatgcactttatttttcacctcacttattttaaaaa

SEQ ID NO: 618145 - DNA, 573 bp, Homo sapiens
gatctgcccgcctccgcctcccaaagtgctgggattacaggtgtgagccaccgcgcccggcctatgttgtttattatatatcataagttttatatatatatatatatatatatatatatatatatatatatatatatctgatacatatacatatataccagatataatatgtcatatatatcagttatatatacacattagatgaaaagtacattttcatttgacagggaattctttcaaatcaaatcatcaaacactctaaaattgggcaaagtacacttttccagatctgcaagttacttgtgtacataggaaaaagtccttcgcatttctggtataagaatttaaattaaaagaggaatgaaacagttttctatccacaatatttgtgaggatgttttatactcctgcttaaagtttaagttgctgattayttttcaaatagataatttggtggtaagtactacaattaaaaaatatgtatgccctttacccatcaattccattatactaaaacaccctcaggaaataaagatacatgcactttatttttcacctcacttattttaaaaa

SEQ ID NO: 618146 - DNA, 490 bp, Homo sapiens
gtttcctgatacctattgatttttttcccaaaarcttaatagttttccaatttgactcaaatagcatttgtgagtaacaggggctgaatcaatgtccgttcttttcaaggaaattactttaccatgacaattatttaacttagaactggagagtgtcagtctccaaaacgggaaacaactgaattgccaataagaattttgttcactttcttggctaaaacatgattttaattaatgagggggaaaattaaatctactgtatcactactccaaacaataagtcatttaaaaaagcatgaattttttcactcagtaaaatatctaacatacataaatcattttgtaatttttaaaaattcattgatttttagtctaataaatagtttacaaatcctactgttaatatttgcctcttaagttgaaatgtaagagtatattaatgctttattctaaaactggtatttatctttgatataatacttgccagact

SEQ ID NO: 618147 - DNA, 490 bp, Homo sapiens
gtttcctgatacctattgatttttttcccaaaaacktaatagttttccaatttgactcaaatagcatttgtgagtaacaggggctgaatcaatgtccgttcttttcaaggaaattactttaccatgacaattatttaacttagaactggagagtgtcagtctccaaaacgggaaacaactgaattgccaataagaattttgttcactttcttggctaaaacatgattttaattaatgagggggaaaattaaatctactgtatcactactccaaacaataagtcatttaaaaaagcatgaattttttcactcagtaaaatatctaacatacataaatcattttgtaatttttaaaaattcattgatttttagtctaataaatagtttacaaatcctactgttaatatttgcctcttaagttgaaatgtaagagtatattaatgctttattctaaaactggtatttatctttgatataatacttgccagact

SEQ ID NO: 618148 - DNA, 490 bp, Homo sapiens
gtttcctgatacctattgatttttttcccaaaaacttaatagttttccaatttgactcaaatagsatttgtgagtaacaggggctgaatcaatgtccgttcttttcaaggaaattactttaccatgacaattatttaacttagaactggagagtgtcagtctccaaaacgggaaacaactgaattgccaataagaattttgttcactttcttggctaaaacatgattttaattaatgagggggaaaattaaatctactgtatcactactccaaacaataagtcatttaaaaaagcatgaattttttcactcagtaaaatatctaacatacataaatcattttgtaatttttaaaaattcattgatttttagtctaataaatagtttacaaatcctactgttaatatttgcctcttaagttgaaatgtaagagtatattaatgctttattctaaaactggtatttatctttgatataatacttgccagact

SEQ ID NO: 618149 - DNA, 490 bp, Homo sapiens
gtttcctgatacctattgatttttttcccaaaaacttaatagttttccaatttgactcaaatagcatttgtgagtaacaggggctgaatcaatgtccgttcttttcarggaaattactttaccatgacaattatttaacttagaactggagagtgtcagtctccaaaacgggaaacaactgaattgccaataagaattttgttcactttcttggctaaaacatgattttaattaatgagggggaaaattaaatctactgtatcactactccaaacaataagtcatttaaaaaagcatgaattttttcactcagtaaaatatctaacatacataaatcattttgtaatttttaaaaattcattgatttttagtctaataaatagtttacaaatcctactgttaatatttgcctcttaagttgaaatgtaagagtatattaatgctttattctaaaactggtatttatctttgatataatacttgccagact

SEQ ID NO: 618150 - DNA, 490 bp, Homo sapiens
gtttcctgatacctattgatttttttcccaaaaacttaatagttttccaatttgactcaaatagcatttgtgagtaacaggggctgaatcaatgtccgttcttttcaaggaaattactttaccatgacaattatttaacttagaactggagagtgtcagtctccaaaacgggaaacaactgaattgccaataagaattttgttcactttcttggctaaaacatgattttaattaatgagggggaaaattaaatctactgtatcactactccaaacaataagtcatttaaaaaagcatgaattttttcactcagtaaaatatctaacatacataaatcattttgtaatttttaaaaattcattgatttttaktctaataaatagtttacaaatcctactgttaatatttgcctcttaagttgaaatgtaagagtatattaatgctttattctaaaactggtatttatctttgatataatacttgccagact

SEQ ID NO: 618151 - DNA, 627 bp, Homo sapiens
tactgcttagaaaaaaaaagattccttcaaaatattattgctcattgacaacgcacctgatcacccaagagctgtgatggagatgtacaaggagattaatgttgttttcatgcctgctaacacaacatccattctgcagcccactgatcaaggagtaactttgacttttaagtcttatttaagaaatatatttcataaggctatagctaccatagatagtgattcctctgatggatctaggcaaagtaaattcatcattctagatgycattaagaacattcgtgattcatgggagatcaaagtatcaacatgaataggagtttgaaagatgattccagccctcacagatgactttgagggatttcagacttcaatggaggaaataactgcagatatggtggaaacagtaagagaactagaattagaaggggagtctgaagatgtgactcaattcctgcaatctcataagaaaactttaactaatgagaagttgtttcttatggacgggaaaagaacgtggtttcttgagatggaatctactcctggtgaagatgctatgaacactgtcaaaatgacaacaaaggatttaaaatatgacagaagcttaattgataaagcagggtttga

SEQ ID NO: 618152 - DNA, 627 bp, Homo sapiens
tactgcttagaaaaaaaaagattccttcaaaatattattgctcattgacaacgcacctgatcacccaagagctgtgatggagatgtacaaggagattaatgttgttttcatgcctgctaacacaacatccattctgcagcccactgatcaaggagtaactttgacttttaagtcttatttaagaaatatatttcataaggctatagctaccatagatagtgattcctctgatggatctaggcaaagtaaattcatcattctagatgtcattaagaacattygtgattcatgggagatcaaagtatcaacatgaataggagtttgaaagatgattccagccctcacagatgactttgagggatttcagacttcaatggaggaaataactgcagatatggtggaaacagtaagagaactagaattagaaggggagtctgaagatgtgactcaattcctgcaatctcataagaaaactttaactaatgagaagttgtttcttatggacgggaaaagaacgtggtttcttgagatggaatctactcctggtgaagatgctatgaacactgtcaaaatgacaacaaaggatttaaaatatgacagaagcttaattgataaagcagggtttga

SEQ ID NO: 618153 - DNA, 627 bp, Homo sapiens
tactgcttagaaaaaaaaagattccttcaaaatattattgctcattgacaacgcacctgatcacccaagagctgtgatggagatgtacaaggagattaatgttgttttcatgcctgctaacacaacatccattctgcagcccactgatcaaggagtaactttgacttttaagtcttatttaagaaatatatttcataaggctatagctaccatagatagtgattcctctgatggatctaggcaaagtaaattcatcattctagatgtcattaagaacattcgtgattcatgggagatcaaagtatcaacatgaataggagtttgaaagatgattccagccctcacagatgactttgagggattycagacttcaatggaggaaataactgcagatatggtggaaacagtaagagaactagaattagaaggggagtctgaagatgtgactcaattcctgcaatctcataagaaaactttaactaatgagaagttgtttcttatggacgggaaaagaacgtggtttcttgagatggaatctactcctggtgaagatgctatgaacactgtcaaaatgacaacaaaggatttaaaatatgacagaagcttaattgataaagcagggtttga

SEQ ID NO: 618154 - DNA, 627 bp, Homo sapiens
tactgcttagaaaaaaaaagattccttcaaaatattattgctcattgacaacgcacctgatcacccaagagctgtgatggagatgtacaaggagattaatgttgttttcatgcctgctaacacaacatccattctgcagcccactgatcaaggagtaactttgacttttaagtcttatttaagaaatatatttcataaggctatagctaccatagatagtgattcctctgatggatctaggcaaagtaaattcatcattctagatgtcattaagaacattcgtgattcatgggagatcaaagtatcaacatgaataggagtttgaaagatgattccagccctcacagatgactttgagggatttcagacttcaatggaggaaataactgcagatrtggtggaaacagtaagagaactagaattagaaggggagtctgaagatgtgactcaattcctgcaatctcataagaaaactttaactaatgagaagttgtttcttatggacgggaaaagaacgtggtttcttgagatggaatctactcctggtgaagatgctatgaacactgtcaaaatgacaacaaaggatttaaaatatgacagaagcttaattgataaagcagggtttga

SEQ ID NO: 618155 - DNA, 322 bp, Homo sapiens
acaaatcgccccaatgccagagacccagatcaaaaagaaaataatggtatgggtcagattcacagaataagcactaacttttatgcaaactgaaaataaagattttatctaaaagtyatttggggaaaataagcagactttatcaagaattagagcttggtaagaaggtaacagaaacccattgttagaaacaggttgactctgtgtagctttccatagtagagtttagagtttcttgtcatgattaccttatcaatgcagtataataactacttacacagcacttacattgtattaggtattataagtaatctacagatga

SEQ ID NO: 618156 - DNA, 322 bp, Homo sapiens
acaaatcgccccaatgccagagacccagatcaaaaagaaaataatggtatgggtcagattcacagaataagcactaacttttatgcaaactgaaaataaagattttatctaaaagtcatttggggaaaataagcagactttatcaagaattagagcttggtaagaaggtaacagaaacccattgtkagaaacaggttgactctgtgtagctttccatagtagagtttagagtttcttgtcatgattaccttatcaatgcagtataataactacttacacagcacttacattgtattaggtattataagtaatctacagatga

SEQ ID NO: 618157 - DNA, 450 bp, Homo sapiens
aaatgtaattcatctctaaataaatacagaaaaaagaatctagaatctaaagcttatttctttagcaatttctttatgttgatctggttcagaaggtcacatggtatatggctgaattagtttcccagctcatatgccacttggaagactgagagtgagacttaggttgattaatgaagaaacattatgagaacattctccagraccgttgtttagatagcaggactaatctactttgacacataattacacatttagaaaaccccgctgtaactgtacacatgagattttcttgaatagaaaatttgactaaatcaaataattgataaagagaaaaaagaagcagcaagtgaacctctgtctttttgaagttggattttctctttctccaaagccaggaactctacttgtaacatgcctacctcattctttttactattattatacttt

SEQ ID NO: 618158 - DNA, 357 bp, Homo sapiens
cacttggaagactgagagtgagacttaggttgattaatgaagaaacattatgagaacattctccagaaccgttgtttagatagcaggactaatctactttgacacataattacacatttagaaaaccccgctgtaactgtacacatgagattttcttgaatagaaaatttgactaaatcaaataattgataaagagaaaaaagaagcagcaagtgaacctctgtctttttgaagttggaytttctctttctccaaagccaggaactctacttgtaacatgcctacctcattctttttactattattatactttaagttctggtacatgtgcacaatgtgcaggtttgttacatatgt

SEQ ID NO: 618159 - DNA, 321 bp, Homo sapiens
tgttgcaaagatgatgcaggcctgaagagatgttttcagaaatatttaggatataggtatcagtggccattataagaatgaatttctattgaatgaataaatgtatatatctgggtccctggagaaatacactctgctcattactttacaaattttatcaaatgagaagtaaaataatatacataaactctttcagttacttgtatttactttacmctttttctgtttcagttttactgtgccaaggaaatgcatttgggttttgtggtggttgtggtggttgtggtggttgttgttgtttgagatggagtctcactcttc

SEQ ID NO: 618160 - DNA, 321 bp, Homo sapiens
tgttgcaaagatgatgcaggcctgaagagatgttttcagaaatatttaggatataggtatcagtggccattataagaatgaatttctattgaatgaataaatgtatatatctgggtccctggagaaatacactctgctcattactttacaaattttatcaaatgagaagtaaaataatatacataaactctttcagttacttgtatttactttacactttttctgtttmagttttactgtgccaaggaaatgcatttgggttttgtggtggttgtggtggttgtggtggttgttgttgtttgagatggagtctcactcttc

SEQ ID NO: 618161 - DNA, 165 bp, Homo sapiens
gaaaaagaaattaaaactataggggtgggtgaaaaaatattgcataatttattactgttgacctcatcatatgactgattaagggcactgaatttaacttggatgtgaagtagaccccatattagctgcagttratcagtagaccaggcttcctagcagaattaa

SEQ ID NO: 618162 - DNA, 275 bp, Homo sapiens
accacacccagccctaatcaatttctttaaatcaaactcratgttgcccaggcatggtggctcacacctgtaatctcagccctttgcaaggccaaggtggctggattgcttaagttcaggagtttgagaccagcctgggcaacataatgagaacacatctctacacaaaaaataccaaaaggaatcaggcatgatggtgtgtgcctgcagtcccagctgcttgggaagctgatgtgggaggatcacttgagcctgagaggtggatactgcagtga

SEQ ID NO: 618163 - DNA, 275 bp, Homo sapiens
accacacccagccctaatcaatttctttaaatcaaactcgatgttgcccaggcatggtggctcacacctgtaatctcagccctttgcaaggccaaggtggctggattgcttaagttcaggagtttgagaccagcctgggcaacataatgagaacacatctctacacaaaaaataccaaaaggartcaggcatgatggtgtgtgcctgcagtcccagctgcttgggaagctgatgtgggaggatcacttgagcctgagaggtggatactgcagtga

SEQ ID NO: 618164 - DNA, 237 bp, Homo sapiens
actatatgcacagaaagacatacttgacaagtttttctctgctgtcacaccacagcaacaatcatcaacaaagaaggcttctgtgaccaaatgtgtggagagtttttccccaccaacaaacaagcaatcattyctgctgatgacacaattcaattctcacaccctatctacagataacatcagatttaatttaatttataaattaaactttgtcatagatatgtatgtatagggaaa

SEQ ID NO: 618165 - DNA, 591 bp, Homo sapiens
  misc_feature 542: n = A,T,C or G
ttagaaggttacaccacacagcaagaagaatctaatgattttgaattaccgaaattgtctttgctgtttcataacagcrtataaaattaattgtccaaaaccccacttttttttaaagatgctactttgctttcaaatttccctacatcagtaaatggaagctttattccttcatctgcaagcttcagcaccactgccacctaagctatcatttctcatctgaattgtttcggcaacttttaaatgttctcttttctttattcctttctcacctattgtcaactctccatattgcaagcaaagtgattaaaatgtaaagtaaaaatggtacttctaaagtaccataaagtaaagtaaactgtggtatttctctgtatcaaattcattagcagaacttcccaattcattaaggattttattcatcatttttatgacctttgaggccctaaatgtaatgttcaccatcaccatcatccacaaacacacacagctacagaaaaagagtaaggctgctgttacctggatctcatcatggttttttncccacttacacttggacacacgcacccatttacttttttatttcatctt

SEQ ID NO: 618166 - DNA, 591 bp, Homo sapiens
  misc_feature 542: n = A,T,C or G
ttagaaggttacaccacacagcaagaagaatctaatgattttgaattaccgaaattgtctttgctgtttcataacagcgtataaaattaattgtccaaaaccccacttttttttaaagatgctactttgctttcaaatttccctacatcagtaaatggaagctttattccttcatctgcaagcttcagcaccactgccacctaagctatcatttctcatctgaattgtttcrgcaacttttaaatgttctcttttctttattcctttctcacctattgtcaactctccatattgcaagcaaagtgattaaaatgtaaagtaaaaatggtacttctaaagtaccataaagtaaagtaaactgtggtatttctctgtatcaaattcattagcagaacttcccaattcattaaggattttattcatcatttttatgacctttgaggccctaaatgtaatgttcaccatcaccatcatccacaaacacacacagctacagaaaaagagtaaggctgctgttacctggatctcatcatggttttttncccacttacacttggacacacgcacccatttacttttttatttcatctt

SEQ ID NO: 618167 - DNA, 582 bp, Homo sapiens
ttcagaggcaataaatatgaagtcagaatatcgatctctctaagtacaataagagataaacctgtcaacttggtattttgtcatatcaataacaggaaatgtataatgcaaattcagctataattagaacaatggcttattaattttaaaaataacactgcccaaaagcctacacttgtataccatctggttgatacaatctctctctgtgtgcatgctgcatgggaagtcgaatgttcattggagctatttcaatatgctctgagaactagcagtgtaagtcatggtgcgctgttttatgaaatctggcccaggcagcctcacacatctatctccacattatccacacatctgcctttgcagcataaaagtctttgttcttaggcaaggcacattctctcctttgaatgtctgcatagacacacttgatatttccctgtgttgttccaatttccctttccatgggaagagaaacctcttctctaaatgagatggttttatttattttttaaatratacataatgtttgtatatatttatgcggtgcatatgatatttcattacatgcataaaatgtgtaat

SEQ ID NO: 618168 - DNA, 464 bp, Homo sapiens
attttaatgttaaactctactttggaaatcatatttctgttattattgagttcttaagagcataggtggggcaatgtaaaatttcctccatttgtttgttgaaactttatcttggggtcaggcacatactttactaaaaatgaatgtttcaggaagacatctgataaagcactgtaactgtttttatcytattcaactccaacatgagttccatgaaaaacttacttttatttaggtgtcaaggaagaaaaagaggaacaacaataataatatatatacttcatccaaaggaattataatacaaaacagtatttttatctgttatgtggtgctcaaagataatttattttctggaaatataaaaaaggaatagattctcatagtcaaccattttgtaagtcccatttctaaactaattaattccttatgtgctatggaattgagacaatagtctacagataatc

SEQ ID NO: 618169 - DNA, 602 bp, Homo sapiens
ggaagcactgtattgtacctcttgaggaaatgagctgcaaagtcacaatacaaaggaagatgtgcacaaagatggaatgaayttgtagccattatacaatctaccacaggtcgtatattttatttgtcataaaaagttatcaagagtacttttatctaagacagtgattcccaaggcctagacacaatataagcaactaatatcttgcctgatggtcagtcttcatcaaataactgtataattctttcatagggttttagtgcgttaacttgaaaaatatttctatattctgaaaaaaataatgctcctagaaggtgcagcatgggataaaggctgtataattgttgccatggctgtatttttgttctttatatatttttctcaatgacatgttcatgatggcagaatgatacaattttgatctataattgctccttatgatccaattgctctttagacacttttgaagttagcctggagtagttgcaatggaggttcattcttgcaaaaaacccctatttgtctgataacaatttccgtctgtggtttctattgcttcacgttcaatcatcagaattggtaaataaattgtcattattgac

SEQ ID NO: 618170 - DNA, 602 bp, Homo sapiens
ggaagcactgtattgtacctcttgaggaaatgagctgcaaagtcacaatacaaaggaagatgtgcacaaagatggaatgaacttgtagccattatacaatctaccacaggtcgtatattttatttgtcataaaaagttatcaagagtacttttatctaagacagtgattcccaaggcctagacacaatataagcaactaatatcttgcctgatggtcagtcttcatcaaataactgtataattmtttcatagggttttagtgcgttaacttgaaaaatatttctatattctgaaaaaaataatgctcctagaaggtgcagcatgggataaaggctgtataattgttgccatggctgtatttttgttctttatatatttttctcaatgacatgttcatgatggcagaatgatacaattttgatctataattgctccttatgatccaattgctctttagacacttttgaagttagcctggagtagttgcaatggaggttcattcttgcaaaaaacccctatttgtctgataacaatttccgtctgtggtttctattgcttcacgttcaatcatcagaattggtaaataaattgtcattattgac

SEQ ID NO: 618171 - DNA, 602 bp, Homo sapiens
ggaagcactgtattgtacctcttgaggaaatgagctgcaaagtcacaatacaaaggaagatgtgcacaaagatggaatgaacttgtagccattatacaatctaccacaggtcgtatattttatttgtcataaaaagttatcaagagtacttttatctaagacagtgattcccaaggcctagacacaatataagcaactaatatcttgcctgatggtcagtcttcatcaaataactgtataattctttcatagggttttagtgygttaacttgaaaaatatttctatattctgaaaaaaataatgctcctagaaggtgcagcatgggataaaggctgtataattgttgccatggctgtatttttgttctttatatatttttctcaatgacatgttcatgatggcagaatgatacaattttgatctataattgctccttatgatccaattgctctttagacacttttgaagttagcctggagtagttgcaatggaggttcattcttgcaaaaaacccctatttgtctgataacaatttccgtctgtggtttctattgcttcacgttcaatcatcagaattggtaaataaattgtcattattgac

SEQ ID NO: 618172 - DNA, 602 bp, Homo sapiens
ggaagcactgtattgtacctcttgaggaaatgagctgcaaagtcacaatacaaaggaagatgtgcacaaagatggaatgaacttgtagccattatacaatctaccacaggtcgtatattttatttgtcataaaaagttatcaagagtacttttatctaagacagtgattcccaaggcctagacacaatataagcaactaatatcttgcctgatggtcagtcttcatcaaataactgtataattctttcatagggttttagtgcgttaacttgaaaaatatttctatattctgaaaaaaataatgctcctagaaggtgcagcatgggataaaggctgtataattgttgccatggctgtatttttgttctttatatatttttctyaatgacatgttcatgatggcagaatgatacaattttgatctataattgctccttatgatccaattgctctttagacacttttgaagttagcctggagtagttgcaatggaggttcattcttgcaaaaaacccctatttgtctgataacaatttccgtctgtggtttctattgcttcacgttcaatcatcagaattggtaaataaattgtcattattgac

SEQ ID NO: 618173 - DNA, 492 bp, Homo sapiens
ttcaatttatcaacctcgtaaacagctcttacatttatcttcatattggctaccactgcctgagcacaatcttctatttctcacctggaaaactataatatctttctaacagggacacatattccaccattacttccttatcatcctttatagtactgctgcaaatattctatttgttttaaaacttgcatctgtttataaaagtatagttgtttttagtaaaatatgtggttttcaaattcagacttgatactatctgcaaataatgaaagatatttaaacttttcaagacactacattctcattaataagtggagattaataataactacttcttaaaatttttgtgaatattatatatggcatgcatgtaaagtgctctcatattgcagagaacctagaaaactctcaatgratttagttactgcccttggtaaataatttagaaacctaagaaaaataataattaaaggagtaaaaattatataccaa

SEQ ID NO: 618174 - DNA, 516 bp, Homo sapiens
ggaacattgctgttgctttacatccttgccagcatttgatgttctcagtgttatcggattttagtcaatctaatagatgcacgttggcttctcattgtttaatttgtaattcctcaatgatatatactagtgagcatctcttcacatgtttttttgcaactggtatgtcttctttaatcaggtatatagcaacatcttttgtccactctttagttggattgttttttttcttattgttaagttttacgaatttttgtatattttgaatacaagtcctttatcagatatgtggtttgaaartatatttttcaagtttgtggcttatcttttaactcgtttagcaatgttttccccagagcagatgtttttaattttaatgaaatctagcttatcaattttgtcttttttggattgtgcttttgctgttgtatataaaaagttatcgccaaacccaaggtcacctagtttttctcttgtattagcttgctgaagttttatagttttgtgtttttcatt

SEQ ID NO: 618175 - DNA, 578 bp, Homo sapiens
tgctgttgtatataaaaagttatcgccaaacccaaggtcacctagtttttctcttgtattagcttgctgaagttttatagttttgtgtttttcatttaggtctatgatccattttgagtttgttctgtgaaagagaataccatttttctataatttacttatgtttttactgctatcctataatctatagargaggaactagtcccaatttttaatgaaatccctaatagtaagatctgggattaatttttattaataaatgagtgggagcaataatagcatgtatatgagtcaattccatatgtatactatttattcctattcagttgtgtcatgcagttttcatactttgaagtgacaacaaatatctcagtatttcatatttaattatgttatgagaaagatatcataaagaaaaatatttaaaatgctataaataatttagccccaaatatgtcagcatattgtatctaatttatgcttctttgaaaacaaaaggtaaaataaattattcaaccaaaaccaaacaataacaatttaaatagaccagatatttacaataatgtctataatgtgaa

SEQ ID NO: 618176 - DNA, 578 bp, Homo sapiens
tgctgttgtatataaaaagttatcgccaaacccaaggtcacctagtttttctcttgtattagcttgctgaagttttatagttttgtgtttttcatttaggtctatgatccattttgagtttgttctgtgaaagagaataccatttttctataatttacttatgtttttactgctatcctataatctatagaggaggaactagtcccaatttttaatkaaatccctaatagtaagatctgggattaatttttattaataaatgagtgggagcaataatagcatgtatatgagtcaattccatatgtatactatttattcctattcagttgtgtcatgcagttttcatactttgaagtgacaacaaatatctcagtatttcatatttaattatgttatgagaaagatatcataaagaaaaatatttaaaatgctataaataatttagccccaaatatgtcagcatattgtatctaatttatgcttctttgaaaacaaaaggtaaaataaattattcaaccaaaaccaaacaataacaatttaaatagaccagatatttacaataatgtctataatgtgaa

SEQ ID NO: 618177 - DNA, 609 bp, Homo sapiens
ggtggagcccttatgacctaataacctcttaaaggcctcatctctcaacagtgccatgttgtgctttcaatttcaacatgagttatagaaaggacaaatattcaaactacagcacaccctgagaaaatgaaacatcttttcacttcttgttttagaaaccagacttaaagttaacttctagagtgaaaacacacatacacacacatagatacccagacaaactcatataacatatatctcatcacattgaaatttaaaagctagaataaaatgtccagaaaaaaggataaaacacataatatgaagacctgcrttcaagtagattaagagacaaagttttttattatttgtgttttgcaaaggaaagaataaaatgaaatatatttcataatactacaaaaaacaaagtttttaaatctataacgaaacaaagactgaactgctctgaagcaattcgaaaatggacatactttttaaatatcacatgaaaatgttagaaatgttgaaaatagcagaaatttatagggtctagtctcctgtgaaattgagcaatgcatattccccagcttacagagaagaataaaatagatcaatgccagtcagaaccta

SEQ ID NO: 618178 - DNA, 619 bp, Homo sapiens
tttacattaatgcattgaaatgcatgcttatatttgcacttttgtgtacataggttttaatattttaaaatataacacatggacacaggaaggagaacatcacacacaccggggactgttgtggggtggggggaggggggagggattagcattaggagatatacctawtgctaaatgacgagttaatgggtgcagcacaccaacatggcacatgtatacatatgtaacaaacctgcacgttgtgcacatgtaccctaaaacttaaagtataataataatacaattaaaaaaaaaaaagaagaaatatgatcaaagtagggccgggtgcagtggttcacgcctataatcccagtactttgggaggccaaggtgggcagatcacgaggtcaggagattgagaccatcctggctaacacggtgaaaccccgtctctactggggacggagccactgcactccagcctggggcaacagagccagactccaactcaaaaataaaagaaagaaagaaagaaagaaagaaagaaatatgttcaaagtatcctaatagaattcgtagttactttttaaatttttctccttgaaaaaaaatacaaccaattatcctcaagaatataata

SEQ ID NO: 618179 - DNA, 492 bp, Homo sapiens
cctggctaacacggtgaaaccccgtctctactggggacggagccactgcactccagcctggggcaacagagccagactccaactcaaaaataaaagaaagaaagaaagaaagaaagaaagaaatatgttcaaagtatcctaatagaattcgtagttactttttaaatttttctccttgaaaaaaaatrcaaccaattatcctcaagaatataatatgccatagatattgcacatcctacaagcaaagaaaagggcattagaaatgtcctttaaatatcatctagaatattcactgagatttacctgtgaagtaataactaggctgtaagtcaaaacactaatgcagccttctgaactttatttttcttcttaggttaaccaatacatggcacaagaagagacaaaaatttagtagtttttaaatattagcttgacaggtgttggctattccagtaaaaattagtcattactataattgcatttgttagttta

SEQ ID NO: 618180 - DNA, 572 bp, Homo sapiens
ttccagtaaaaattagtcattactataattgcatttgttagtttatattttgtgagactgtgtaacataatatttgaaaacatgaggttttcagactgggatggagactgtactyaagccttggcactggctcttaacagttatttggcttcaccaccctgttcctcatgtctttactggcaaataactcattgtcatactactaatcttatatggttctcatgcaactaatataattatgaaaataaagcacatctcatctcaagatgcatggcacattgaaaatgatcaataaatataattgcattaatttaaaaataataatgtatcattcataataaaataggaaataaaaccactaaatagaattatcaatggaaatctacttacttcaaaattgtaccatgctgtgtacaactagtttctaattctctctgagtctctcaaatagttcatagttcaggtctacttttatatttcattgtattaaattcccttttgcttaaagaaacatgaagtgcagatgaaacctaagttataaagtaatcaataacagacatgattgcaaatag

SEQ ID NO: 618181 - DNA, 584 bp, Homo sapiens
ctaaattctggactctctcccctattggaatagttttgtataatgtctctttttttttgcctatttaacatagtcctctatgatttttgctttgacaaaaaattttrcaatgcttccactgttccagaagcctacattgactttcagccattatatattcatcatattatgggaccagtagggaaaaacagagaaatgcagtggagactgtgatgtcatttttcttactcaaatttgttaccttgtgaatgtaagcacaattatgccaggaacttgtgaagtattccattgtacctcatagtgctgctactctagccataaagttaatgcaagactatagcaaccatatgtaagcaggatgactgaagaccgattatccctaaataagtatttgagtcatgctacaacatatcaaacactgactacctaagatgcattttggtatttaactcagaacatctgaggacaaaggaacatgcaaataagaaaaaggaatatggaaaaaagtaatgaaagaaagttgttgataattttatgtacagtccagtgacaagatatggaaagaagagcaatattacctaccc

SEQ ID NO: 618182 - DNA, 584 bp, Homo sapiens
ctaaattctggactctctcccctattggaatagttttgtataatgtctctttttttttgcctatttaacatagtcctctatgatttttgctttgacaaaaaattttgcaatgcttccactgttccagaagcctacattgactttcagccattatatattcatcatattatgggaccagtagggaaaaacagagaaatgcartggagactgtgatgtcatttttcttactcaaatttgttaccttgtgaatgtaagcacaattatgccaggaacttgtgaagtattccattgtacctcatagtgctgctactctagccataaagttaatgcaagactatagcaaccatatgtaagcaggatgactgaagaccgattatccctaaataagtatttgagtcatgctacaacatatcaaacactgactacctaagatgcattttggtatttaactcagaacatctgaggacaaaggaacatgcaaataagaaaaaggaatatggaaaaaagtaatgaaagaaagttgttgataattttatgtacagtccagtgacaagatatggaaagaagagcaatattacctaccc

SEQ ID NO: 618183 - DNA, 584 bp, Homo sapiens
ctaaattctggactctctcccctattggaatagttttgtataatgtctctttttttttgcctatttaacatagtcctctatgatttttgctttgacaaaaaattttgcaatgcttccactgttccagaagcctacattgactttcagccattatatattcatcatattatgggaccagtagggaaaaacagagaaatgcagtggagactgtgatgtcatttttcttactcaaatttgttaccttgtgaatgtaagcacaattatgccaggaacttgtgaagtattccattgtacctcatagtgctgctactctagccataaagttaatgcaagactatagcaaccatatgtaagcaggatractgaagaccgattatccctaaataagtatttgagtcatgctacaacatatcaaacactgactacctaagatgcattttggtatttaactcagaacatctgaggacaaaggaacatgcaaataagaaaaaggaatatggaaaaaagtaatgaaagaaagttgttgataattttatgtacagtccagtgacaagatatggaaagaagagcaatattacctaccc

SEQ ID NO: 618184 - DNA, 594 bp, Homo sapiens
ccagtgaagtttatgtacacacaggcacacacacacacacacacacacacacacaatctagagaaatttatatgcatatatttatatataaagtccctttcatattgtactatcattgtctatcacctctaaatttattttctgtcactataacaatttaaatctccctgtaaaatataaatctcacagtaagcaatggacgcaggtagactggtatggagtgcagaaaatgaatacatcttcaacaaatgaaataaatgccacctactccacaaatttcacctagatgtggcactctaacattgtttggacctctcttagaacatatgcttgtgtgtttgtctaaaaatcccrcatatttgacaggaacaaatcacttttatctgtacccatagcaactctatagacatttaatatgcagtgtgaagaagtataacaaaggggctagaagtgttgactttctgacccacgtgcctggttttacatactaactctaacatataccagcttcgttgctttgaacaagttgctatggtttagtttctttatatgtaaactaaatctaactagtcagattgttttgttgactcaata

SEQ ID NO: 618185 - DNA, 389 bp, Homo sapiens
atcccccttaagatgaaaaagtggtcaacatttccttgcttctaaaagccattacaaattgttccatcttggccttggaacttttactcatggcagaacgtaaagcaggagcagacacagcatatggtgagatagggagaaagaagagaaagtggggaggtgccatactcttttaagcaactagrtcttgctgaactaccagagcaaaaacttactcatcaccaagagaatagcactaagccattcatgacggatctgcctccatgatctaatacctcccactaggccccactttcaacattagggattacatttcaacataagattcagaggagacacacatttaaaccatgtcaaaacattctttggagatcatgctccctcactaa

SEQ ID NO: 618186 - DNA, 549 bp, Homo sapiens
caaaaacaattcataaacatactccatttcctaaaatktttccatttttctctcttgtcaactttgggctttatttccgtttttttttttttttttttttttcatcctgtagtctgctcctgaacagctataataattcagtggttttgaacatcagtacttttccttggtaatggctttaaatacagcttttatttaatgaatttaattagcttgtagcctctttgggcaacaactttacctaaatttacccagagattccagcaccagaaccaaacttcagccagaatgtctaattctgctcacctcttttccctatgactttatccctatccccataaaactctacaaacagagtgtcgggcaccagacaggagataaagagagtagccagggctaaaatatgaatatattgaaatttcttccacagaaggaataattgacattttgagtcataggccaccatttctggttgaatttcgtctcttgaaaaaaaaatatgtcaaacttctaattctatcacctgtaaatgtgatcttatttggaaat

SEQ ID NO: 618187 - DNA, 549 bp, Homo sapiens
caaaaacaattcataaacatactccatttcctaaaatttttccatttttctctcttgtcaactttgggctttatttccgtttttttttttttttttttttttcatcctgtagtctgctcctgaacagctataataattcagtggttttgaacatcagtacttttccttggtaatggctttaaatacagcttttatttaatgaatttaattagcttgtagcctctttgggcaacaactttacctaaatttacccagagattccagcaccagaaccaaacttcagccagaatgtctaattctgctcacctcttttccctatgactttatccctatccccataaaactctacaaacagagtgtcgggcaccagacaggagataaagagagtagccagggctaaaatatgaatatattgaaatttcttccacagaaggaataattgacattttgagtcataggccaccatttctggttgaatttygtctcttgaaaaaaaaatatgtcaaacttctaattctatcacctgtaaatgtgatcttatttggaaat

SEQ ID NO: 618188 - DNA, 666 bp, Homo sapiens
aagtcagagttactggtgcagtgagatttgcctcctctttctcccaatatgctgtggggttgctggggacagtggtgtccatgttattactcagtttgttttgatggtaagaatattttgcatttttcaaaatgtgttatattaagactaagactgtttgattccttcctgagtattgatgtgaatcttaatatatggtgggtgtggcatcttctgtatttatcgatgcactaccgtgaagagaaaggaacaccaacagtggcatgtttccccaatgacctgtgagctgaagaaagctctgtttatttgcttatatcagctcctacattcttttttgtcaatcttgcacctaacaatttatgtgtctttctctaggcaatttattaagaaattttaaaattgtgtgtgtgtgtgtgttctctttacactaaccaaggaatagaaccagtttttatttcccctttaaaatctttccaagaaattayaatactgaatccagtaggattcatatccaaaatatcatctcattagtaattgagacgtgcaggaatttaaaacaagaaatataattatttatgatatagatgagagagagagatgtgagcaggcatgttaaagaatgactagaattgttatcaaacgatagtgataatttttgaaaaacaa

SEQ ID NO: 618189 - DNA, 565 bp, Homo sapiens
ggaaagggtgcaagaaccatgagatctcctggaaatgcttctctgggaaggcaatttcatgaatgaggttttccaagcaaatgacaccaaacttccccaagtgctcctcaatcactgtgttgtctgttagaggaatggtcttattcttgaccttggcttgtccctgtttcaaaatgagttcccggacagatttcagatttggaaatcctcaggtcacataagtttccactaaaagcagcatttttaggttccggtgggtgacatttacaaagacaccactaaaacttttccttaggtgaagtcttgcaatggttttccgcaccagtaaactcacgccatcaattcttttgatgcctacaacaaaagccaaagaatgtttatctggcaattccaaggtatgaactttcacttctagtcatctgagacrcaccttgtcacgtttctgctgtcagaaatcatgtaggaatgattccaattgcttaaacctgaagccttttcctttcctctgctcctttgccaaaagtgcctgctttgcctgggtggctttgagggcttgataagcctc

SEQ ID NO: 618190 - DNA, 568 bp, Homo sapiens
gttttagtgttttgctataattcatttgttttttaagcaataaaaattatattgtctgaatatttcacattttattcatccatcttcctcttgatagacatgtaacatgtttcttctcagattctgctcccgtcaataatatcactctgaatactcatgtacaggtctcctgttctatacacacatggtttctctaacatatatccctaggagagaaaatacctgtacaaggtcatgccacattgtttttaaatttttaaagaatacatactcttcaaccctatcttctataatgcrtatttttctcagatttttttttacgtgtgtattgcagcttattaaaagaaactgtaggcaggaagaaattggaagagtctcctggtctgtgtaggtcccccaaacagaaaactggagactgttacatcaatgcatggattatatttaattcaatgagtttctactactgtctgtgtctatgcaatatcacccaaaacaagatgtagatagaacatttccatcacctcagaaagtctgcttgtgccccattgaagttgacccttctttctac

SEQ ID NO: 618191 - DNA, 568 bp, Homo sapiens
gttttagtgttttgctataattcatttgttttttaagcaataaaaattatattgtctgaatatttcacattttattcatccatcttcctcttgatagacatgtaacatgtttcttctcagattctgctcccgtcaataatatcactctgaatactcatgtacaggtctcctgttctatacacacatggtttctctaacatatatccctaggagagaaaatacctgtacaaggtcatgccacattgtttttaaatttttaaagaatacatactcttcaaccctatcttctataatgcatatttttctcagatttttttttacgtgtgtattgcagcttattaaaagaaactgtaggcaggaagaaattggaagagtctcctggtctgtgtaggtcccccaaacagaaaactggagactgttacatcaatgcatggattatatttaattcaatgagtttctactactgtctgtrtctatgcaatatcacccaaaacaagatgtagatagaacatttccatcacctcagaaagtctgcttgtgccccattgaagttgacccttctttctac

SEQ ID NO: 618192 - DNA, 464 bp, Homo sapiens
ttaattaatgtaatgtcccagctacttgtgatgctgaggtgggaggatcatttgcrcccaagaggtcaagcctgcggggggcagttgtaccactgcacttcagtctgggttacagagcaagacactgtctcataaataataaaaagacattataagagctcatattatatagatgttcaacaaatttgtgttgttacttcgaacattttaatcaaaataagtggtccacatttagtagtaccaaggtaatatgtggagactgatagttttagttaattttaagatgagaaattatcttcattcattgattttttaaaagtatctgttatggtttaggtgatgagaaaatgtacataaacaataaataagaatcttattaattttacagtacttgaatttgaagtatggttttgctaaaaataaaaataaactcttgatgctctgttgatgagaattgtttaatt

SEQ ID NO: 618193 - DNA, 581 bp, Homo sapiens
aaatcacaaaatacatacagattaaacaaagtacttctaaacaacacataagtcaaggctgaaatctcaagagaatttgaaaatattaataatttgacctaaatagcaataaaaacacaacttatcaaaaatttgtaggatgaagtgaaagcagtgcttagagggtaattttatactgaaagcgtatgttagaagagagtaaagatctgacatgaatgatctctccttccttcttcagaaatgagaaaaagaagaccaaattaaatttaatgtgagtagaaraaaaaattacaaaaattagagcaggaattaataaaattaaaaacagaaaatcaataggaagatcaacaaaaacaaaagttggatctttgaaaaagtcagtaaaattgatgcatctctagaaggaaaaaaaagagaggacacaaattactcaatcggaaataaaaagaggacgttactaaagatcccatggacattaaagtaataataatagaatacagtgaactctattactgcaaatctggtaaccttgatgaaatgaagactgtcaaaactcatttaagaataaatagacaatatga

SEQ ID NO: 618194 - DNA, 581 bp, Homo sapiens
aaatcacaaaatacatacagattaaacaaagtacttctaaacaacacataagtcaaggctgaaatctcaagagaatttgaaaatattaataatttgacctaaatagcaataaaaacacaacttatcaaaaatttgtaggatgaagtgaaagcagtgcttagagggtaattttatactgaaagcgtatgttagaagagagtaaagatctgacatgaatgatctctccttccttcttcagaaatgagaaaaagaagaccaaattaaatttaatgtgagtagaagaaaaaattacaaaaattagagcaggaattaataaaattaaaaacagaaaatcaataggaagatcaacaaaaacaaaagttggatctttgaaaaagtcagtaaaattgatgcatctctagaaggaaaaaaaagagaggacacaaattactcaatcggaaataaaaagaggacgttactaaagatcccatggacattaaagtaataataatagaatasagtgaactctattactgcaaatctggtaaccttgatgaaatgaagactgtcaaaactcatttaagaataaatagacaatatga

SEQ ID NO: 618195 - DNA, 609 bp, Homo sapiens
taaaattaagtacttaaattggtctaattcaaatttccaaggggcatgaaaatagtgatatttaatagtcagatgtggtaagctaaataatgaccttccaaaaatgtctctggcctaattccagaaacaagtgaaaattagcttatgcaaaaaagggaacttggagatggggttatttaaagatcttgatgaagagatttttctggattgtttcaacggttctgatgtaatcacaggcgtctttataggaggaggtcagagttagctgtcaaagatgtgacaacaaagacgggaggttgatgtgacactagaagaagtgataagtcagagaatgyagacaacttctagagcctgaaaaagcaagagaaccaattatcccttaagagcccccagaaggaactagctctgctcacacctttactttagctcagtgagactgatttttgacttctgacctctagaaatgtaaggtaatacattttaaaccgccaagtttgtgggaatttgctatagcagcaataagacactggtagagatgtctgtgtacctgtgaacttgagactagatctgctcccctctgtggctaactcctgtctcagtatgccagca

SEQ ID NO: 618196 - DNA, 562 bp, Homo sapiens
tggtattttatcatatgtacacaatgtgaaaaaatcaccacaatcaagttgataaacacttgtatataattatggcttacaatgttatattttgatatatgtatatgatgtgaaataaattgcatttagttccatcataaagttaaaagacaaaggtattaaaaacaactataactaaattatgttaatgcatacacattgtaaacaaatgttaaatctaacaccgatagcatraaatgtagagggagaagcaaagtgtggtttttgtatgcaggtgaagctgagttattatcacattaaaatggactgttataactttaagatgcttcatataagcaccatggaaatacaattatgctttgccattaaaaatttaaacaataaatttaaaatgagtgatttacccactactgtttcagtattacacaatttcgtttctgtctatatatttacttttataaacaagttctctattttcacgtagctttaccattctttcatttaaacttttaactttttttcatttttttgtaagacagattttatggtaatgaattgcctc

SEQ ID NO: 618197 - DNA, 592 bp, Homo sapiens
agacaatctagagcaaaattgttttcactcctcaagattcacattgcatctgcttccaacaggtgtggtgcttttctcttcctcctcctggaggtaagaaataggcctttaaaaaaaatttcccggtggcctttgttattcaaaaatagtggggcagatggtatcagaatgaatgtgtggattagactgcaaaagatgagcttcctyctccaggagtgaacactcctaactggctccagtaacacagcttgcactgtgttttgtttttgtttgtttgtttgtttagtttatgcaacagacctacaagaggagtttgtttcataaggtcagagtttgagtgttaattattcaatagtatttgcagtgaaacttcacatttctcctccactgtacataataactaatttgcaataaaataacctactttatgtagtctctttgacttaggttataatgcttaaatgaatttggtctaggaagaatgagcaatggattgaagtcccaaggcatcccatgtcctatttaatttttggtatattagactgattttgggccaatttcaatacaagtgtgggacatatatttgttagga

SEQ ID NO: 618198 - DNA, 592 bp, Homo sapiens
agacaatctagagcaaaattgttttcactcctcaagattcacattgcatctgcttccaacaggtgtggtgcttttctcttcctcctcctggaggtaagaaataggcctttaaaaaaaatttcccggtggcctttgttattcaaaaatagtggggcagatggtatcagaatgaatgtgtggattagactgcaaaagatgagcttcctcctccaggagtgaacactcctaactggctccagtaacacagcttgcactgtgttttgtttttgtttgtttgtttgtttagtttatgcaacagacctacaagaggagtttgtttcataaggtcagagtttgagtgttaattattcaatagtatttgcagtgaaacttcacatttctcctccactgtacataataactaatttgcaataaaataacctactttatgtagtctctttgacttaggttataatgcttaaatgaatttggtctaggaagaatgagcaatggattgaagtcccaaggcatcccatgtcctatttaatttttgrtatattagactgattttgggccaatttcaatacaagtgtgggacatatatttgttagga

SEQ ID NO: 618199 - DNA, 606 bp, Homo sapiens
aaatcaaataatcgttaacaatctctttacctgtcaacagaaggagaaaatgaggttgaaagtaaagtaacattttcattcctattcttgtatgctcttctcttggttgacagataattagggacattcacagttatttgttttgttttgtttcccttcactgagcaaaggaggccattatgtgccccctgttataactcagagaaaccagacttaaactgatattatttctatgggttcttgcatttaacagtttaaactaattttttaatgatctgcctaaaatgctagcatttgtttatgtaatttttgcttatagtactacttatataccccgtagcctctttygctgaaagtacattacaagcatatttggtttatgtaatatgttcaattaattgcatcatgtttgtgaatttgccctatatttttgaagaatggatctgtcattgtccagcactgtaacttgtgtttattgtttttccttcagttttaatgaataaggtttttgtcaatgcgatcccctctgccaatgaccctgaaaacattttatccattattttctggaatctcattctgttatctgatgtgttttgtacatttttc

SEQ ID NO: 618200 - DNA, 613 bp, Homo sapiens
attgctataacatgttgtgctactcaygggaatctggatgtaggtgggggaatcttacccttaacacttaatgacttaggctaggtggtgcttttatatttttctgcttttcacatatcttctgttggaatccctatgttaataatccatgtttatttattcatagtgcactgagcagctttctactctcccacatagcttctgaacattattaattaatttgttacaggctggaaagaattaaggctttctgggacaagtaatcacatgaataaagttcaaaccttttacaaaccacagttctgattttttagactatgagggtttgagagtgatttacttctgaaaaaatgtaaatggcttaaaaatattgttcaccactggaaagatatttttttcagtttgttattcttgctttctactttatgaaatataagtggttgagatatttagaaatgtggctgctggataattaagctgtgactataatgtaggctagagtaagttgattattttgtagctctctaattggtcttcacatttccttaacacatgtccagacacaaactgcctggccaaacagcaccgtggttttctgtcaactgagaggtag

SEQ ID NO: 618201 - DNA, 591 bp, Homo sapiens
ccagctactcaggaggctgagatgggaggatcctgagcccaggagtttgagaccagcggagttacacagcaagacctcatctcaaaaaagaaaaaacaaattagtacattgttggtgggaatgtaaattagtacagccctatggaaaacaatatggtggttcctcaaaaaaccacaaatacaactaccatatcatctagtaatctcacttctggtatacatccaaaggaactgaaatcagtatgtaaaagagatatctgcactcccatattcattgaagcattattcacaatagtcaagacataraaacaacctaagtgtccattaatgaatgaataaagaaaatgtggtatagatacacaatggaatactggaggacattacactaagtgaaataagccagggacagaaagacaaatactgcattatctcatatgtggaattcctagaattccatacagttccattcctaaaagtggagagtagaacgatggttaccagaagctgggggtgggggacttggggagagagggaatagggagctgttgatcacagagtacaaagtttctgatagacagaaggaataggtttt

SEQ ID NO: 618202 - DNA, 611 bp, Homo sapiens
aaatctacatacaaaaattagtagcaattccaaacaaataacctagctgaaaaaaaatcaaggaaacaatcccacttataatagcattttttaaaagtacttaggaataaatttaaccaaggaggtgaaatatttatacattgaagatagtaaaatattaatgaaagaatttgaagcagatacaaataaatgaaaaggtatcctatgttcatggatggaaaaaaatatgcttaaaatgtccatactatccaaaacaatatatagatttaatgcaatctctataagaactccaatggtattcttcacagaaatagaaaaaacaatcctaaaatttgtatggaaccacaaaaataccctgaatagctagagcaatcttgagaaagtaaaacaaagttggaggcgttacattttataatttaaaattatattgcaaagctatggtaatcaatacaatgtggtgctggcatgaaaacagacacataggctaatgaaacggaagacagttcccagaaataaatccaaacacgtatggccaaataatttttgacaagggcaccaggagraaacaatggggaatggataacctattcaataaatttttctgggaaaac

SEQ ID NO: 618203 - DNA, 581 bp, Homo sapiens
aagcttctttcatgctgaatgagaaaccaaagtctctcctttgtttatctttaaattccgatttctacaagattttctgtttcacctagggtcagtttaggtaatttgtttgtttctaggagtaacaatacctttttaaaaggatttgtgtttcttgtgtaaggcagagagctgaagtttacatcactttatttcagccataaactttcaccctgtacctgaaaatcatcctatagctcttcttaaaactgaaatgtttaactttctcattagttatctgaaattattcatctcaatmtttaaaataaattcaataagcctcttacacaatcatctatatactatgactaattttgcctcatcagtagtgttacagagggctgtgatgtgtggttaggtgtttaagaaccaaatttctaccatcctaccccatctgtctcctttttcctcactgttcaatggaagcatatcaaggtttctcttgcaataagtctattctaactgtgtaggtgcttataactgactcaccactcaactacctgagaatggtcacactaatacattttttaacagtattccac

SEQ ID NO: 618204 - DNA, 570 bp, Homo sapiens
gtggataaattcatcatatttaagataatacttaattatcaaaacaattcagtaacatgttttaggggaattttacattaacttttgtagtgatatataaaaagtaragtaggagtttgagaagtggaattattatttttattattacttttgagtcagaatttcactcttgtggcccaggctggagtgcaataacacaatctcagctcaccacacctctgcctcctctcctgggttcaagctattctcttgcctcagcctccctagtagctgggaccacagacacatgccaccatacccagctaatttttgtatttttagaagagacggggtttcaccatgttggccagcctggtctcaaactcctaagctcaggtgattcacctgcctcgcctcccaaagtgctgagattacaggcgtgagccaccactactggccaataaatacctgctccttactcttattagttgtaatatttggcctgagaagtggaattattaaagtgccacaaagtcttaggcaaagagataaaaaacctcaggaaagtgaatccctgccagtaacaagtca

SEQ ID NO: 618205 - DNA, 526 bp, Homo sapiens
ggtgacgttaaagaacttgttctcacattcatctgtgtagccagaaatattagcacagtgcatgtcgggttctccaaacacattggtgaatgaacttgtgaatgcagtctactgccatggcattcctggacctcagtaggggttcgtggaactgcattagttttccagggctgccataacacagtaccactgcctgggtggcttaaacaacagaaattcattttctcaccattttggagtccagaagctcaagatcaagctgttgctagattgtttttttctgagacttttccttttggcttatasatggccatcttcttcctgtgtcttcccatgttcttttctctgagtgtatctgtgtcctcatttcctctacttaaaagaataacagtcatattgaatgggcccaccccactcacctccttttagtttaattacctctttaaatactctttaaagatcccagatacagtcacctgcagagatgctgggggttagggcttccacattctacttaggaattttc

SEQ ID NO: 618206 - DNA, 580 bp, Homo sapiens
gagttagaaatgtaaggcctaaaagagccctggtcaatttaaaaatatacaacaggtcaagaccattctttccaagtttaagggaaaaagcctcactaatttaatgaagcaaaacttgatgaccgtttggacatttcaatggcactaattcccacttaggtttttgtactcttttaagatccttccctaaattatgtgtttttcaaaacacatctactttgctatcytcttgggcttacatcagtcacagaagactccagcttcaatctgttctgtagggaagttaatttggaagccacaattataaattctccagtccaccctatccccaccacttactgttacttgacattgggtcattttcattctcttactcagtctcttgaagcatctgaatttgtggctcctcttacttgtaccctgctgtatgtaaagtgctttcacatgtgatgtttaagacaacaatcctaaaaggcaggaaactgaagtttaaaattatacattatacagtcaaatgaagatttgaacatcaatctctccttattctagcatctaatcccttttcacaccatcatttgat

SEQ ID NO: 618207 - DNA, 580 bp, Homo sapiens
gagttagaaatgtaaggcctaaaagagccctggtcaatttaaaaatatacaacaggtcaagaccattctttccaagtttaagggaaaaagcctcactaatttaatgaagcaaaacttgatgaccgtttggacatttcaatggcactaattcccacttaggtttttgtactcttttaagatccttccctaaattatgtgtttttcaaaacacatctactttgctatcctcttgggcttayatcagtcacagaagactccagcttcaatctgttctgtagggaagttaatttggaagccacaattataaattctccagtccaccctatccccaccacttactgttacttgacattgggtcattttcattctcttactcagtctcttgaagcatctgaatttgtggctcctcttacttgtaccctgctgtatgtaaagtgctttcacatgtgatgtttaagacaacaatcctaaaaggcaggaaactgaagtttaaaattatacattatacagtcaaatgaagatttgaacatcaatctctccttattctagcatctaatcccttttcacaccatcatttgat

SEQ ID NO: 618208 - DNA, 580 bp, Homo sapiens
gagttagaaatgtaaggcctaaaagagccctggtcaatttaaaaatatacaacaggtcaagaccattctttccaagtttaagggaaaaagcctcactaatttaatgaagcaaaacttgatgaccgtttggacatttcaatggcactaattcccacttaggtttttgtactcttttaagatccttccctaaattatgtgtttttcaaaacacatctactttgctatcctcttgggcttacatcagtcacagaagaytccagcttcaatctgttctgtagggaagttaatttggaagccacaattataaattctccagtccaccctatccccaccacttactgttacttgacattgggtcattttcattctcttactcagtctcttgaagcatctgaatttgtggctcctcttacttgtaccctgctgtatgtaaagtgctttcacatgtgatgtttaagacaacaatcctaaaaggcaggaaactgaagtttaaaattatacattatacagtcaaatgaagatttgaacatcaatctctccttattctagcatctaatcccttttcacaccatcatttgat

SEQ ID NO: 618209 - DNA, 580 bp, Homo sapiens
gagttagaaatgtaaggcctaaaagagccctggtcaatttaaaaatatacaacaggtcaagaccattctttccaagtttaagggaaaaagcctcactaatttaatgaagcaaaacttgatgaccgtttggacatttcaatggcactaattcccacttaggtttttgtactcttttaagatccttccctaaattatgtgtttttcaaaacacatctactttgctatcctcttgggcttacatcagtcacagaagactccagcttcaatctgttctgtagggaagttaatttggaagccacaattataaattctccagtccaccctatccccaccacttactgttacttgacattgggtcattttcattctcttamtcagtctcttgaagcatctgaatttgtggctcctcttacttgtaccctgctgtatgtaaagtgctttcacatgtgatgtttaagacaacaatcctaaaaggcaggaaactgaagtttaaaattatacattatacagtcaaatgaagatttgaacatcaatctctccttattctagcatctaatcccttttcacaccatcatttgat

SEQ ID NO: 618210 - DNA, 518 bp, Homo sapiens
tagctactgacacatagaagcaagaaatggtcagctgtttcctgttttaatgaaaagtaggctaaggtatatcaagctctttttagtgtggttgatttctatgatataaagactcttgccatggccaatttgaagctccctatgtgatgtcactaaacatggagttgggaagagaagtgcagwagcacaccattgtatgtttccactacatgtgtacaaaaagtacaaggagactcagcataatttatataaaatgtcctaaaataattaggaagtattttttaaaaatttaatacctgtgttcttaatgcaatttatttttaatgtgagtttatataatttaatttttaataaggataatgtttactaactatctcaaaaagttctgaaaatataacaatcaactctcactagctggtgtgagctggctccatcacactctttcttcactacaggacaattgagatgctcagaaattgcatagctaacgttcctgatatatagaacctgctaaatat

SEQ ID NO: 618211 - DNA, 619 bp, Homo sapiens
ctatcctatctatcctaatccttgcctcctgggtcctaatgtttgtcaggcaaactttctctcacctctcttctctgaggatagtcctgcttctagaaaccacaccctgtctctggtgcttttctagtttatcttataagaatgatttctagtataaacttcaggactctgttaccttctttaggcacctgggctcaccaatcagaaagacataatttttgcccaaagctccattgtagggggactatctggaattttaggatccctcctcagacaagcagatctaataaaagctattcctgaagctaggatatggggagcttcagaaattctatctttcctattcayataagtgaggacaaaaggcatcacccttccaacactggaaatcccttccctccctcagggtatagccctccacttcatttttggggcataacatctttatagggcatgagtaaaatcccaatactaaaaggagaatgcttaggactctaactctaacaggttttcgagaatgcatcagtaaaggccactaaatccaaccttccccagtcctccttgtggtctaggaggaaaactagtgtttctgctgctgcgtcagtgaatgcaactattc

SEQ ID NO: 618212 - DNA, 571 bp, Homo sapiens
tacttgcctttgggcactatatttttaacctccttgtcaaatttgtttcctgtagaatygaggccatcaagctacagatggtcttacaaatggtaccctaaatgagctcaactaacaacttctaccgaggacccctggaccaacccactgtccctttcactggcctaaagaattcccctctggaggacactacaactgcagggccccttcttcgcccctatctagcaggaagtagctagagtggtcatcggccaattcccaacagcatttggggtgtcctgtttagaggggttattgagaggtgaagctggctgggcttctgggtcgggtggggacttagagaacttttctgtctagctaaaggattgtaaacacaccaatcagtgctctgtgtctagctaaaggtttgtaaacgcaccaataagcactctgtaaaaatagaccaataagcactctgtaaaatggaccaatcagcaggatgtgggtggggccaaataagggaataaaagctggccacctgagccagcagcagcaacccgctggggtcctcttccacgctgtgaaagctttg

SEQ ID NO: 618213 - DNA, 529 bp, Homo sapiens
aaatcctgaacaaaatttcataaatgataagatgttcttggtgagtttcagaatcctaattttgaactttttcccccttaaactatattctccaatatagtgatttctatgttttcatgttgacctgtgtcagcattaaaaaaattccaagactgttgcttgggagataggcatgctaaccttgtttcttccactaagtagcagtttcctcatctgcaaaatgtggaactttacaggcataatctctaaagttatttaaagttaccaaattctgaaatatttaaggtttccatcaagagggaaaggacttaatatttccacgtaaaatgctggtaacatttgtcacaaataaaatgcatctaaaagagatacacttaaaatggatgtgccaagtgttgacaatttgggaattagagcttcattatttctgctaacaccatcattctgagccactcaaacacactttctctttccatttggatatgctttttattcacgtatgtacttcrtgaatactaacctaataaat

SEQ ID NO: 618214 - DNA, 520 bp, Homo sapiens
tctaatcattacagaaaattaaattttgttttcatttatcagattatatttttgcaaaagcatcatataattaaatgttggtggtgtcttttttcataaagatttcaatttttatacacttttgtcatgaatgcttgaagamcagcccttcagtagctactagatttcatcagaagagtttctaaatgtgtttgatgacaagcattaacactatggaaaaaaatataccctctttgacattataaaagcatcagaactactgtatgatttatttgcttatatgctaagttaccataatgtttttggtgaataaatagcatatcaacatatggcctatggcctggtttatgaattttttttttttgagacagagtctcactctgtcccccaggctggagtgcagtggcacaatcttggctcactgcaacctccacctcctgggttcaagggattctcctccctcagcctcctgagtatctgggactacatgcacatgccatcacacctggctaattttttt

SEQ ID NO: 618215 - DNA, 394 bp, Homo sapiens
aaagggattagtaaccagggaaaaggagtctctaaatgagttgtaatggagatcatgaacagtaaattaaaataaaggaaagcaaacaaacgaaacccttccacaacaacctccaaaggtgggaaagtgcaatgaacagattttaattgattttcctctttaaatgttcaaatttgaaagggagtaatccaacatgaaaaaaaaaatacataaagaaaggaaacagaaagcaagtsagatatataatatgcctacagatttcagatctgagatggcaggttaagatgtggagttgcccatgtgtatttttagcagggttaaaagactggagacctgacaaaggtcatgaggttgcactagcactgcctcttctaagccagccttcagctacttt

SEQ ID NO: 618216 - DNA, 394 bp, Homo sapiens
aaagggattagtaaccagggaaaaggagtctctaaatgagttgtaatggagatcatgaacagtaaattaaaataaaggaaagcaaacaaacgaaacccttccacaacaacctccaaaggtgggaaagtgcaatgaacagattttaattgattttcctctttaaatgttcaaatttgaaagggagtaatccaacatgaaaaaaaaaatacataaagaaaggaaacagaaagcaagtcagatatatamtatgcctacagatttcagatctgagatggcaggttaagatgtggagttgcccatgtgtatttttagcagggttaaaagactggagacctgacaaaggtcatgaggttgcactagcactgcctcttctaagccagccttcagctacttt

SEQ ID NO: 618217 - DNA, 394 bp, Homo sapiens
aaagggattagtaaccagggaaaaggagtctctaaatgagttgtaatggagatcatgaacagtaaattaaaataaaggaaagcaaacaaacgaaacccttccacaacaacctccaaaggtgggaaagtgcaatgaacagattttaattgattttcctctttaaatgttcaaatttgaaagggagtaatccaacatgaaaaaaaaaatacataaagaaaggaaacagaaagcaagtcagatatataatatgcctacagatttcagatctgagatggcaggttaagatgtggagttgcccatgtgtatttttagcagggttaaaagactggrgacctgacaaaggtcatgaggttgcactagcactgcctcttctaagccagccttcagctacttt

SEQ ID NO: 618218 - DNA, 623 bp, Homo sapiens
tgttcctctttgttatttttcactgctgttgmtttaaagtttgtctgatgtaagagtagctacctccacatgcttttgtgtccatttgcatgaaattccttttcccacccctttactttaagattatgtgagtctgtatgtgttaggtgagtctcttgaaggcagcagattgttggttggagaattcttatttattcagtagttatcttttaagtggcattttaagtagttatcttttactgtatcttttttggagcatttaggccatttacattcaatgttagtattgagatgtgaggtaccactacacttgttgtgctatttgttgcctgtgtaccttggttttttggtttttgtttttgctttttaaattggatttttgttttataggtcctgtgaaatttatgctttaaagaggttctgttttgatgtgtttccaggatttgtttaagattcagagctccttttagaagttctcatagtggtggcctggtagtggcaaattctctcagcatttgtttgtctgaagaagactgactctttcccttatatatgatgcttagtttcactgcacacaaaattcttggctgataattgttttgtttaggagcctaaagataggg

SEQ ID NO: 618219 - DNA, 565 bp, Homo sapiens
ctcatcatcacgggctatcagaaaaatgcaaatcaaaaccacaatgagataccatctcacaccagtttaaatgaatacatgtattttaaaataacccaggagaataaaaaagaaaaagattgaaaaagagcaaagtmagtctattggacttatgggacaaaattaagtgaataaattttggcctcatgggagtcacagaggaaaaagaaatgaagaatgtcacaaaagtcttatttaaggaaagaattgctgaaaacttccccaagtcttgggagagatatagacatccagatccgctgaagctcaaaagtactcaaatagatacaccccaaaagggttctctcctaggaacattatttcaaaatgtcaaaactcaaagacaaggaaagaattctaaaagcagcaatagaaaagcatcaaatctcatacaggggaactgcattagactctcagtgagtttctcagcagaaaattagcaggctagcagagaatgagatgatgtatttatactgctgaaagaaaaagacatcttctagacaagaatactatacccagaaatgctacc

SEQ ID NO: 618220 - DNA, 563 bp, Homo sapiens
gaaaccccatctctactaaaaatacaaaaattagccaggcgtggttgtgggtgcctgtaatcccagctacttgggaggctgaggtaggagaatcgcttgaacccaggaggtggaggttgcagtgagctgatatggccccattgcactccagcctgggcgacagagcaagactttgtctcaaaaacaaacgaacaaaaacaaaaaacaaacaaacaaaaaacccagtggtytccagaatatattgttaaatggacccaatgaaggagtgtttgtgtatttagtttgttactttttgatgagaataaaaaaccctaaaggactagaaggaagacagagcaagaaacaggatgaaagcaacacttttctgaatttatctcgttttacagtttttactttggcatcatgtaaattataaaattaagtttataaataaaaaagtaaaatttaaaaatcccaagataaatgataattgaaaacaaagtgaggtcattacatagcaaatagaattatttcactgactatcctttatcaacacattcaaagcacaagtagtgatgcaaagc

SEQ ID NO: 618221 - DNA, 567 bp, Homo sapiens
tttaaatgtaaatggtctaaatataccaaatcagcacagattgtcagattggataaaaatatatgtatatactatgtatgaaaaatctgcttaaatatgtgtgtgtgtgtgtgtgtgtgtgtaaaaagtaaaggatagaaaamcatatttcatgcaaaaaccaagaaaaagaaagctgaagtggctatactaatctgacaaagtaaacttcaaagcaagtaacacttccagaaaaaaaagagagacagtgagtaattttaagtggtcacttagccaagaagacctaacaatcccatgtcactgttcacatgacagtagagcctcaaaatatgtgaagcaaaaacgggaattgaaggagaaacagacaaactcacaattctacttggagacttcaacactcctctgtcagtaatcaatagaacaaatagaaaatcagtaagaatacagaatacctgagcaacactttaaatgaatatgacctaattgacatttatagaacattctactaaaaaccagaattcacatggaacattcagaaggaggattcatgaaaataatccaaattct

SEQ ID NO: 618222 - DNA, 383 bp, Homo sapiens
aatcatgcgggagggtttttcccctgctattctcataatagtaaataagcctcatgagatctgatggttttataaaagacagttcccctgcacgcatttttttgtctgccatcatgtaagatgtgcctttgctcccactttgttttccaccatgattgtgaggcctccacagccatatggaactgtgagtcctttaaacttgtttttttttaaataaattaccragtcttttgtgtttcttcatagcagtatgaaaatggactaatacactagtgaaataaataagaataaaaaaataataataacaccagctcttaaagtattatctgtttaactaaaagtaaaaaagtgatatgactagggcaaattgaggtttcattgta

SEQ ID NO: 618223 - DNA, 636 bp, Homo sapiens
tcataccctttttttgtccaatattatattgcatttctacacagctgtccctgccttatcgaacctaagcataaaatcagatagcttcctctgtatctttcgagcttgaatctgaaggcgcctatgttatgttgaactataatcaaatacatttttaatatttttctcttgttaacctttttttttataggggtgtcagctttgacctttatactgagaaggaaaggaatcraattatttctacctttatacttccaactgtttttcatgctgccacttcatttgaaatatttgaattatataagtccactggttatgaacttttaatattttaaaagctcaaattgcttatcttggtgctggaactctaaacaatgcaatatcaacctgctttatcttctgctactacttgtatataaacaggaaaagtattctaatagtcgcataactttaatatctttaacaaaaacatctatattttttcagattataccattaatataatcatgtctgaaacaaattagaattcccaggaaaaaaatacaaggaaataaaaaaaatcatctaagattttaccaagtagagataaccactgtaaacctttgatatatcttacatggtttttaggagtatata

SEQ ID NO: 618224 - DNA, 636 bp, Homo sapiens
tcataccctttttttgtccaatattatattgcatttctacacagctgtccctgccttatcgaacctaagcataaaatcagatagcttcctctgtatctttcgagcttgaatctgaaggcgcctatgttatgttgaactataatcaaatacatttttaatatttttctcttgttaacctttttttttataggggtgtcagctttgacctttatactgagaaggaaaggaatcgaattmtttctacctttatacttccaactgtttttcatgctgccacttcatttgaaatatttgaattatataagtccactggttatgaacttttaatattttaaaagctcaaattgcttatcttggtgctggaactctaaacaatgcaatatcaacctgctttatcttctgctactacttgtatataaacaggaaaagtattctaatagtcgcataactttaatatctttaacaaaaacatctatattttttcagattataccattaatataatcatgtctgaaacaaattagaattcccaggaaaaaaatacaaggaaataaaaaaaatcatctaagattttaccaagtagagataaccactgtaaacctttgatatatcttacatggtttttaggagtatata

SEQ ID NO: 618225 - DNA, 636 bp, Homo sapiens
tcataccctttttttgtccaatattatattgcatttctacacagctgtccctgccttatcgaacctaagcataaaatcagatagcttcctctgtatctttcgagcttgaatctgaaggcgcctatgttatgttgaactataatcaaatacatttttaatatttttctcttgttaacctttttttttataggggtgtcagctttgacctttatactgagaaggaaaggaatcgaattatttctacctttatacttccaamtgtttttcatgctgccacttcatttgaaatatttgaattatataagtccactggttatgaacttttaatattttaaaagctcaaattgcttatcttggtgctggaactctaaacaatgcaatatcaacctgctttatcttctgctactacttgtatataaacaggaaaagtattctaatagtcgcataactttaatatctttaacaaaaacatctatattttttcagattataccattaatataatcatgtctgaaacaaattagaattcccaggaaaaaaatacaaggaaataaaaaaaatcatctaagattttaccaagtagagataaccactgtaaacctttgatatatcttacatggtttttaggagtatata

SEQ ID NO: 618226 - DNA, 593 bp, Homo sapiens
aatatttgaattatataagtccactggttatgaacttttaatattttaaaagctcaaattgcttatcttggtgctggaactctaaacaatgcaatatcaacctgctttatcttctgctactacttgtatataaacaggaaaagtattctaatagtcgcataactttaatatctttaacaaaaacatctatattttttcagattataccattaatataatcatgtctgaaacaaattagaattcccaggaaaaaaatacaaggaaataaaaaaaatcatctaagattttaccaagtagagataaccactgtaaacctttgatatatcttacatggtttttaggagtatataacattgaattatctaaatcatctacatcttttgcttaaataayaccagttaaaagtaaatctccttataaatcactaaactaaatgtatatttttcagataaacatattataaacatgaagatgttagataccagtttgtataggaacgctaataattacctgtgttttacctttaacaggctatgcttgattaagataagaagatttttgtgacatccttttttttatgctggctgtttctg

SEQ ID NO: 618227 - DNA, 565 bp, Homo sapiens
ggttatgaacttttaatattttaaaagctcaaattgcttatcttggtgctggaactctaaacaatgcaatatcaacctgctttatcttctgctactacttgtatataaacaggaaaagtattctaatagtcgcataactttaatatctttaacaaaaacatctatattttttcagattataccattaatataatcatgtctgaaacaaattagaattcccaggaaaaaaatacaaggaaataaaaaaaatcatctaagattttaccaagtagagataaccactgtaaacctttgatatatcttacatggtttttaggagtatataacattgaattatctaaatcatctacatcttttgcttaaataacaccagttaaaagtaaatctccttataaatcactaractaaatgtatatttttcagataaacatattataaacatgaagatgttagataccagtttgtataggaacgctaataattacctgtgttttacctttaacaggctatgcttgattaagataagaagatttttgtgacatccttttttttatgctggctgttt

SEQ ID NO: 618228 - DNA, 565 bp, Homo sapiens
tgttaatggataagcactgatgagtttcctagatgctatctataccatggtaccttctgtttaagtattttttatacatcttcctgttgcttatatccagatttaaggatatatcttaccaaattgatgacattgagtagcactcataccctcataaagaaattcatttatatgcaatgttctagtgtcagttaattcttcagatggctgatgcattccttatgatgaccttcgmaatcacaactgattggattagaagtgggcatttgactcaagccatttaatacataagaggcagtctatgcaccctaaagccgaggattctgaacaatattagtctgtttttacaaggcccaaatgatctttactcacataattttgaaattggaatataaaagaatgagattgaaataagaagcagaagcaaagagataatgagattagttgctgagatttaccaatatgaaaaagtgttggaataaaaatgttgattgagagacatgccaagtggtaactaaaagatctgtcaagttccaggcaaaatcatacttacatcaattcatta

SEQ ID NO: 618229 - DNA, 572 bp, Homo sapiens
aaatatattaattatctcagagatagaaacatacgcacaaagccatcacaactgggattcacagttcattcaggaaaaattttggttattccttttaacaaagatgccacagcatctttggtatgcaaagcatacctaccaaatatttcataagttttaaagagattatttaaactttcactgaagaatttaamgatcacttatttagtaactagataaaagttatcaaattttggtagatttcaagcaggagatgatcagttctgcccattatctcatcagcttaggaaaagggccccggttgaagcaggatcagctccacatctgtaccattacttatgaatattctccttagatatgataaactcataactgcccagagtcagagcctggaaggaaaaaataccttgccttaatgtcactctaaaatttgccagagattttttcttgttatttcagattttccggtaaatattttgacctttctgcagatgaaataaaaagcaccatgctggagatttccttcagctaatattaaaaataaaaccttctgacataccacctgatttggc

SEQ ID NO: 618230 - DNA, 572 bp, Homo sapiens
aaatatattaattatctcagagatagaaacatacgcacaaagccatcacaactgggattcacagttcattcaggaaaaattttggttattccttttaacaaagatgccacagcatctttggtatgcaaagcatacctaccaaatatttcataagttttaaagagattatttaaactttcactgaagaatttaaagatcacttatttagtaactagataaaagttatcaaattttggtagatttcaagcaggagatgatcagttctgcccattatctcatcagcttaggaaaagggccccggttgaagcaggatcagctccacatctgtaccattacttatgaatattctccttagatatgataaactcataactgcccagagtcagagcctggaaggaaaaaataccttgccttaatgtcactctaaaatttgccagagattttttcttgttatttcagattttccrgtaaatattttgacctttctgcagatgaaataaaaagcaccatgctggagatttccttcagctaatattaaaaataaaaccttctgacataccacctgatttggc

SEQ ID NO: 618231 - DNA, 616 bp, Homo sapiens
tcataccaatttctatttccagctgatgaaaataaaaactgattttgtttggcaaaytcatctttagatgtagtttataatgttaagagagattattagcttagataaattaatattcattatctttaacttcatgaataatatttatggaaaggatttttaatgcatttaaaacacaaataatgtctaatatatttttcactaagcttgagcaattagaatcactagtagttcttttcttgccattttagctttttctattagaatgggatgagaaagttgacaggtatttatctgtagcatatctaaaactaatgataataattcaaatttatattatgcttcactgtttatacaatttttactatggagagcaaagccccagtaatggggagataactatatacttgaaagtgaatttgacaatttcattgtggtctttttgtctgagatttaacagggcaggatgattgtttattcttatacaaaagagaatgtaactaaattcatataaatttgactctgaggattagtaattttctccttattagaagattattattaagcatatctacacttaaaactgcatgtgcttgtatgaaaataacttttgtct

SEQ ID NO: 618232 - DNA, 616 bp, Homo sapiens
tcataccaatttctatttccagctgatgaaaataaaaactgattttgtttggcaaactcatctttagatgtagtttataatgttaagagagattattagcttagataaattaatattcattatctttaacttcatgaataatatttatggaaaggatttttaatgcatttaaaacacaaataatgtctaatatatttttcactaagcttgagcaattagaatcactagtagttcttttcttgccattttagctttttctattagaatgggatgagaaagttgacaggtatttatctgtagcatatctaaaactaatgataataattcaaatttatattatgcttcactgtttatacaatttttactatggagagcaaagccccagtaatggggagataactatatacttgaaagtgaatttgacaatttcattgtggtctttttgtctgagatttaacagggcaggatgattgtttattcttatacaaaagagaatgtaactaaattcayataaatttgactctgaggattagtaattttctccttattagaagattattattaagcatatctacacttaaaactgcatgtgcttgtatgaaaataacttttgtct

SEQ ID NO: 618233 - DNA, 643 bp, Homo sapiens
atatctaggttatcgtggccctaatttcataagtcacatataaatcatttttttagcatcagtttcacttccaacagcatctgttgcctgcgtagtttcacttgtataatttcacaaggactgtattttgtgttgtcttcaaaattgtagtacaacaatttggcttgttagtgtggtgtgtttttgtgttttgttttgtttactttctctagcgacagggtgttcctctgtcacccatgcaggagtgcagtggtgtgatcttagctcaccgaagcytcaaactcatgggttcaagtgaccctcctcccttagcctctcaagtagctgggacagcaggtgcacaccaccaattattctagtttttgcttttttttttttttttgtagacaaaatgtctcactgtgttacccaggctggttgcaaattcctaggttcaagcggtcctcccacctcaggctctcaaattgctaggattacaggtgtgagccattgtgcctggcctagagtacaacaatttatagataaaacagtttgttcgaaagtcatcagtatgaaaatttccttgggcgggggggcaggacagagttggttgctaaagtcatgccataattttcatagaatgtaagttaaaaggataaatgtc

SEQ ID NO: 618234 - DNA, 567 bp, Homo sapiens
ataaacttttaaattcatgtaacataaaaatgtttgagtaactggatatataatttggaaatcccttccaaaactagtgtacttaaaaattgacactttattcttaactgaaaagccatataaccatgttctatttctaactttacattcatttaatcaaaattatcaatattatggttacaaattaaaccatagtgttttaaatatataaatttacttagaagccttaaaaataaagcaacattaatcattactatttkcaactccgtattttcaaaactaaactaggtctgtgactagttataggattctctaattcatacctactctgtttttgttttggggttttttttttgttattatttagggacctcctggcttacctggtctcaaaggtgaccctggctccaagggtgaaaaggtgagaataaaagaatgtgttattaataaaagaatatgcttttatatactaatagccctgcttttgcagattaaaatcattcaaaagaaaatttcaaacaatatcttcattctaaccctgaaaaaagcttcaatccttagcttccc

SEQ ID NO: 618235 - DNA, 638 bp, Homo sapiens
accatgttctatttctaactttacattcatttaatcaaaattatcaatattatggttacaaattaaaccatagtgttttaaatatataaatttacttagaagccttaaaaataaagcaacattaatcattactattttcaactccgtattttcaaaactaaactaggtctgtgactagttataggattctctaattcatacctactctgtttttgttttggggttttttttttgttattatttagggacctcctggcttacctggtctcaaaggtgaccctggctccaagggtgaaaaggtgagaataaaagaatgtgttattaataaaagaatatgcttttatatactaatagccctgcttttgcagattaaaatcattcaaaagaaaatttcaaacaatatcttcattctaaccctgaaaaaagcttcaatccttagcttcccagatgtatgtagaggggagaaaatatgcaaatagtgaaaaatgtgctggaattcagtgctatatcttctcaaggttccattatagcaaccatatgkagaaagcatatggttatactaaaataactattcagaaaataaacagactgaataacaaaatatctatttttatgtttttaaatgtgaaaataaaaat

SEQ ID NO: 618236 - DNA, 585 bp, Homo sapiens
gcctttacacatagctatgaggaaattaggatttcaagagaaacaatttgattagaaaatgggccaagaaagcctattgctactgtctggtataatgtgttcacaatataactagatatatttcatgctagaatatgttacaacataaagagaatgtaaagttggaaaaataaatggtgcttgaatagaattagaattcattaactcaatagaagtattttttgttgataggtatttttagctttttctatgtcaactcttaggttctatatgctagaattagaaataagaataattatttaatttcatygtaaaacaaagattttctctcctgacagtgcagtaaaattaacttggaaaactttttataaaatactgatgccagaaactcctatctcaaagttgtgattaaaatagtctacagcgaatttgtttttcactgtacattagtacatttcactggacattagtatttttaaaagatctcagtttattctaatgccatggttgaaaagcttttctgttattatctactaccgtgtaatcaggaagaatatatcaatgattcatggaacgatggtaacc

SEQ ID NO: 618237 - DNA, 429 bp, Homo sapiens
cactaagaggcaaaaggttgaagtttaactggtctatgatcttcctctaggaatggtaactgataagggaagaacrcttcaagtgagtgtgcacagaactccagtaaacaaattgtgcatgtggcccctcccaagtgctaacaggccactgtgtatgtggatagcccacctcaagggaagaatcaggcgagaagggacacaagacctcagaagcataccaacatataaaaccctaagtcaagggtcaaactgtgtacaagtcacccacttgtccttcttccaagtgtactttacttcctttcagtcctactctaaagtttgttagtaaactttcactcatgctctaaaagttgccttggtctctccttctgctttctgcccctcagtcaaattattttttcctgaggagaaaagaattgaagttgctgc

SEQ ID NO: 618238 - DNA, 582 bp, Homo sapiens
attaaactgttgtgtgaagctattttgacataataatgttgacgctattgatattataaactttcaaaatattttcagtcatatttactaattttaaaatcatgataatataatgcagcaaatttttattctttattataacatatttttaaaatatatttgtgtttattactttggaatggataatgatcgacaattataattttagtgaataactcagactcctaggaagacctcccctcaattctggaattgagaaaatatcrtagaaaattcaatacatattcagatttagattatatatttgctctacaacaccgaagtagttttgagtaagagaaagtccatgtatttacattcttattcatttacatctgagttggacctctgcaatttctagttaaatgagatataattttaaaacatgagttaattgctgattcttaattcttgtctcttataatgaaggatgcattttcatatattagaaataatcagttataataaaatatagtagtatattaatgaaaatataatgtacaaaaaaatttagttatttgttgctttaagaacatgaagcat

SEQ ID NO: 618239 - DNA, 553 bp, Homo sapiens
ttgttcaatgaaataaagtattgagggaaataaaatcccagtgcctaatataacaatagtattaatggctgcagattctgtgtgacagatgcattcagctgccactgcagaggcagctgcacagcaatataccaacttgaggcataataaactattcagtatagacagactcattcccaagacagagtgatttgggcagatatcccatgtcctactctttgagggagtcctgccctactgccagcagtcagytggacaatgattatttgagccagggggagctgtttgccagatggagctgaaaaactacatgagacatgattccaccataagttggcctaaattgttctgatttccaaagccgctaagggatattactatgagccacgggagaattatttgcatgaaaacccctagaaccctttgtagaaatcattaaagagattgtagtgtaatagaagtctttaattggtgaccaaagagccaaatctggcactcagacctatgttgtgtggtcacatacaccttttatttttttaactttttatttaga

SEQ ID NO: 618240 - DNA, 619 bp, Homo sapiens
ataaatccagtagaaattgggcagatcagccagttattgtggaaacggagtcagatctcatgagaagtaaytgaaataacaaaaaaggtaaaacaggctatattatgggatggcttacactctttcaaccagaatagcgaaggcagtcacgaaccaagtgaagatgctgtcaaagtaaaatctttatcaaagctcgcctgtatttaggatctcctctctggtttgatcttatacaatggcatcataaagaaaatatattttgcaaatgaagtcattaataatttgaggatggctcatccctggttgagatagctccacattgaatatctgaagaggaatgtggaaagaatttgtgtcagaggcaaagaacatcatgaaggacatctgacttacatgccaaagaggtaacctgagcctcgatgcttcagatggcttcatggcactgctgtgatcttgtcaaactcaaaaaattactgatgtttataaagaaacctctgaaatctggagctcagccctgaaataaagcagagagatgctcactctcctgggttcctgtgtaagggtttgaagaatgtagagacaacttctcagactactctctctgtccttaccatcttcc

SEQ ID NO: 618241 - DNA, 619 bp, Homo sapiens
ataaatccagtagaaattgggcagatcagccagttattgtggaaacggagtcagatctcatgagaagtaattgaaataacaaaaaaggtaaaacaggctatattatgggatggcttacactctttcaaccagaatagcgaaggcagtcacgaaccaagtgaagatgctgtcaaagtaaaatctttatcaaagctcgcctgtatttaggatctcctctctggtttgatcttatacaatgrcatcataaagaaaatatattttgcaaatgaagtcattaataatttgaggatggctcatccctggttgagatagctccacattgaatatctgaagaggaatgtggaaagaatttgtgtcagaggcaaagaacatcatgaaggacatctgacttacatgccaaagaggtaacctgagcctcgatgcttcagatggcttcatggcactgctgtgatcttgtcaaactcaaaaaattactgatgtttataaagaaacctctgaaatctggagctcagccctgaaataaagcagagagatgctcactctcctgggttcctgtgtaagggtttgaagaatgtagagacaacttctcagactactctctctgtccttaccatcttcc

SEQ ID NO: 618242 - DNA, 578 bp, Homo sapiens
  misc_feature 334: n = A,T,C or G
cccacacaaccgcctgtgctgatctagaaaggatgttacattcaattcactacattttattttttactaaatcccctttaaagatttattgaacgtgttggagaggaagttagataaacaagaaagtcttttaaaactcttctgaaaagtcaaaagaaaaaggcagatcagtcaagtrcggggccttacaacagggatggggtttggcttcccccaccaagtctccattaataccacagtgggagtgacctgattactcctgggcaagggtaaaagtcctgacttcctaatgggcctctgccaccactccagttgagacaaggggatgccttgntactttcctgccaattaggggcagaagtttaggcttcccattgatttctattgataacacagggaagagctcactgccaacagtggaaatgaaagtaccagcatcttcagtggctatgtctgctatcatccttgcagggatgtagggagctttgttacagcctcacaaggatggaagtgtgtgatcctcactgagtctttcttgatgtcaataaggtgacaccacctgttttcagttggagtag

SEQ ID NO: 618243 - DNA, 578 bp, Homo sapiens
  misc_feature 334: n = A,T,C or G
cccacacaaccgcctgtgctgatctagaaaggatgttacattcaattcactacattttattttttactaaatcccctttaaagatttattgaacgtgttggagaggaagttagataaacaagaaagtcttttaaaactcttctgaaaagtcaaaagaaaaaggcagatcagtcaagtacggggccttacwacagggatggggtttggcttcccccaccaagtctccattaataccacagtgggagtgacctgattactcctgggcaagggtaaaagtcctgacttcctaatgggcctctgccaccactccagttgagacaaggggatgccttgntactttcctgccaattaggggcagaagtttaggcttcccattgatttctattgataacacagggaagagctcactgccaacagtggaaatgaaagtaccagcatcttcagtggctatgtctgctatcatccttgcagggatgtagggagctttgttacagcctcacaaggatggaagtgtgtgatcctcactgagtctttcttgatgtcaataaggtgacaccacctgttttcagttggagtag

SEQ ID NO: 618244 - DNA, 543 bp, Homo sapiens
gcaaatattttatctccttccgtgggttgtctcatcactttgttgactgtttctccttgctgtacagagtcttctttaacttgatgtgatcccatttgtccatttttgctttggttacctgtgcttgtgaggtactgggcaagaaatgtttgcccaggacaatgtcctggagagtttcccccatgtattctgatagtagttatacagtttgggttcttagatwtaagccttttatccattttaatttgatttttgcatacagaaagaggtagagttctagtttcattcttctacatagaaatattcagttttcccagtaccatttattaaagagactgtattttttccattgtatgtacattgttggaaactttgttgaagatgagttaactgtaggcgtgtggatttgtttctggattctctattcttttggtttatgtgtctgtttttatgctagtaccatactgttttggttactatagctctgtagtataatttgaagtcaggtaacgtgattcctatagttttctttttctgtgtgct

SEQ ID NO: 618245 - DNA, 563 bp, Homo sapiens
gataggcactgcactgaatctgtagaatgctttggatagcatgaacattttaataatattgattcttgaaatctataaacatggaatatctttttattttttggtgtccttttcaatttctttcatcaatgttttatagtttttattatagggatcttttacttttttggttaattactaagtatttaattttatatgtggctattgtgaatgggattgctttttttatttcttttcaagattgttcactattggcttatagaaatgcaactgatttttggaatgttgattttgtatcccacaactactcaacttgtttattagttctaacagttcttttatggagtcaaggtttttccaaatatatccctgmaagcaaggataatttgacttcttcctttccaatttgaatgctttctattcatttctctcatctgatttctctagctagtatttccagtgtatgtcgagtaacagtggtgaaagttggaatccttgtcatgttccagattttagagaaaggggttccagtttttccccattcagtttaatactagttgtgg

SEQ ID NO: 618246 - DNA, 474 bp, Homo sapiens
  misc_feature 231, 232: n = A,T,C or G
attcatttctctcatctgatttctctagctagtatttccagtgtatgtcgagtaacagtggtgaaagttggaatccttgtcatgttccagattttagagaaaggggttccagtttttccccattcagtttaatactagttgtgggtctgtcatatgtggcttttattatgctgagatatattttttctatatccagttttttgagagtttttaatcataaaaatatgtganntttattaaatgctctttcaacatcaattgaagtgatcatattgtttttgtccttcattckgttgatatgatgtatcacattgatgatttgcatatggtgaagaatccttgcatcccagaaataaattctacttggtcataatgaatagtatttttaatatattgtttaatttgatttggtttgctagtattttgttgaagatttttgcatcaatattcatcatggatattggcctgtagttt

SEQ ID NO: 618247 - DNA, 447 bp, Homo sapiens
cctctttccctcatatgtaaaattcaaataaataactggttggcaggatttttacaagtactaagtgagagtatatatggtaatagaggtttttaatatgtagctattatgattaatattagagtgcaaattcctttatatcagtatccagttattatgtttatttgtagtgtccccattttacatacaagaattttgcctatgggaagtaytgatgaaataatttatgaaatcaaaatagactttcaaggggccataggggccatagaacttagaatgtttattttataaattgaacttgtaatttacttacctagtatcacataactggtcggtagtacatccaggagtatgcatctgggtcaagacctataagatccagcttttaattgattttacacagaaaaaaaaaaaactggcaagctacagctgcctgaatagtttatt

SEQ ID NO: 618248 - DNA, 447 bp, Homo sapiens
cctctttccctcatatgtaaaattcaaataaataactggttggcaggatttttacaagtactaagtgagagtatatatggtaatagaggtttttaatatgtagctattatgattaatattagagtgcaaattcctttatatcagtatccagttattatgtttatttgtagtgtccccattttacatacaagaattttgcctatgggaagtattgatgaaataatttatgaaatcaaaatagactttcaaggggccataggggccatagaacttagaatgtttattttataaattgaacwtgtaatttacttacctagtatcacataactggtcggtagtacatccaggagtatgcatctgggtcaagacctataagatccagcttttaattgattttacacagaaaaaaaaaaaactggcaagctacagctgcctgaatagtttatt

SEQ ID NO: 618249 - DNA, 536 bp, Homo sapiens
aattatacaagcagtcatgatgtagaaaggtacagtaaccaaagcaaatgggtaaacaaacttcagagaagcatggtgggaccaagcaattctccagtgaagaacactcaggccaggtcaacaaatgaatatgtatgacatactagtggcaagatggtgttgattcagaggcaactgtttgtctattttaaaacttgtatttgatattgctttaaattatacgtttcttcaggaatagaacctaatcttcaagttgcagctattatagaataattattggatatgatcttgtaaatttgagctatatttgggcttatggaacagaatatgaaatagaaatagagaagtaaattaacaaraatattttgtcagccagtcaatacttctttgtgaagagcctattacgtacagggtcataacctcattgactgtggcagaagtctattgtagacaatctataacaggacatgaataagttagacatagtaataaacttttaaacttttttttagctttcacagcttatgtagttattt

SEQ ID NO: 618250 - DNA, 601 bp, Homo sapiens
aattagtatttctttgttcataaattgcatatgaacaactattaaccttgtaacattttttcaccatttgtggaaaccaagaacctaaatgctaatagattcattctactctcacaagctgagaaaggattctgaatgtaaagttgagtatttaaattatttttgaagtacatacgtcagaagtggtwcataatccataatggactaagcatgtaaaataactactatacaacattattttacacctcccctctcaatctctctctctgtttctatatataagcaataagcgttcttggataaactttaaaaaaatatatttagtctttgaccctcgttcttgacacagagcttctaagaacttgtaatttcctaaatgataggaacatctgacacagcgctgctaaatctactggaatttattgggcaatagaagcatcctttgttctaatgaaacaactcatagtgggctcctggatggggactggtcatcagaaagaccaacccaggattagaagcttggaaattttagccccattccccattctctgaagaggggagaggggctagaaatcgagtcaattaattatgtttatgcaat

SEQ ID NO: 618251 - DNA, 601 bp, Homo sapiens
aattagtatttctttgttcataaattgcatatgaacaactattaaccttgtaacattttttcaccatttgtggaaaccaagaacctaaatgctaatagattcattctactctcacaagctgagaaaggattctgaatgtaaagttgagtatttaaattatttttgaagtacatacgtcagaagtggttcataatccataatggactaagcatgtaaaataactactatacaacattattttacacctcccctctcaatctctctctctgtttctatatataagcaataagcgttcttggataaactttaaaaaaatatatttagtctttgaccctcgttcttgacacagagcttctaagaacttgtaatttcctaaatgataggaacatctgacacagmgctgctaaatctactggaatttattgggcaatagaagcatcctttgttctaatgaaacaactcatagtgggctcctggatggggactggtcatcagaaagaccaacccaggattagaagcttggaaattttagccccattccccattctctgaagaggggagaggggctagaaatcgagtcaattaattatgtttatgcaat

SEQ ID NO: 618252 - DNA, 566 bp, Homo sapiens
ttaaaatttgactttttcccttaatttagtgagttgccaacagttctaacttgcatctatcttccctcatcctggagctcttgatcctcttatacttctctatgttttcttttttcagtcacacttatcacttcctaatatttaacaaaacttattttatattttattcattactgtcttattcttccttttagagttggttatttgaagccagtgatgtgtgtatgtgtgcatgcatgcgtgtgtgtatatttgtgttttcactaattactgtatccagagcacttggagatccttctggcactcagaaacatatatttaacaagtaagtatttgttaaaagaatgatttttagacggtgactaaagtaaaactaataatcttatctgtttttataggatgaaatgtttcmgtgtgaaggaaggatcattataaatttgccacgtacaaagtacaacttaagttatatatcaaaacaccttagctttttatttatttttttgttgccatttcaacaattgcattttaaatctcattcaagtttgcaatacaattccacctatgga

SEQ ID NO: 618253 - DNA, 586 bp, Homo sapiens
gctctgctcctgcagcaaacttctgcctggacatccaggtgtttccatacatcctgttaaaccaaggcagaggttcccaaacctcaattcttgacttctgtgcaccctcaggcctaacaccacatgtaagacaccaaggcttggggcttacaccctctgaaacaatggcctgagctgtacattggccccttcaagccacagctggtgttgaagcagctaggatgcaaggcctcatgtcccaraggttgcatggagcaaggggacctaggcccggctcaggaaattatttttctctcctaggcctccaggcctgtgatgggaggggctactgtgaaggtctctgatatgccctggaaacatgtcagatatatttttcccattttattggtgattaacatttggctccttgttacttaaacaaatgtctgcagcctgcttgaatttctccccaggaaatgaagtttttttttctatggcatcatcaggctgcaaattttccaaacttttatgctctccttcctcttgaatgctttgccacttagaaatttcttccaccagatactctcagttatctctctcaagttca

SEQ ID NO: 618254 - DNA, 586 bp, Homo sapiens
gctctgctcctgcagcaaacttctgcctggacatccaggtgtttccatacatcctgttaaaccaaggcagaggttcccaaacctcaattcttgacttctgtgcaccctcaggcctaacaccacatgtaagacaccaaggcttggggcttacaccctctgaaacaatggcctgagctgtacattggccccttcaagccacagctggtgttgaagcagctaggatgcaaggcctcatgtcccaaaggttgcatggarcaaggggacctaggcccggctcaggaaattatttttctctcctaggcctccaggcctgtgatgggaggggctactgtgaaggtctctgatatgccctggaaacatgtcagatatatttttcccattttattggtgattaacatttggctccttgttacttaaacaaatgtctgcagcctgcttgaatttctccccaggaaatgaagtttttttttctatggcatcatcaggctgcaaattttccaaacttttatgctctccttcctcttgaatgctttgccacttagaaatttcttccaccagatactctcagttatctctctcaagttca

SEQ ID NO: 618255 - DNA, 571 bp, Homo sapiens
tttctcttcacttaaagaaaccaacagttatttatgttgccacgtagtactttttatttattcagaattttaaactaatatggttatcattacacacacacacacacgtatacacactaatttgatactttaatgaagtttaaaataacatatgatattggaacgttacccctggaatttgtgatttatgcttgttctgggaaaatgttttaaataattatttctttatttattttgtcttgaaaaagatgactgcttagatttttattcaatgtcttctaatatggactaatgaaagatctggcrtgggatctggccagcagcctgcaatgcaactgggctctctctttgttcccaggcagatcagcaggtcgagaaataatagacacacacaagatagtgaaagctgggtccagggaggtcactgccttctggtcctgtggtgccgccaatgcactagatataccagcatttattattaagtttagtgagggtgggggtaggttagtgaggtatttagggtcatttgattatgaggtgagatggtcacattgggatgaagtaattgtta

SEQ ID NO: 618256 - DNA, 571 bp, Homo sapiens
tttctcttcacttaaagaaaccaacagttatttatgttgccacgtagtactttttatttattcagaattttaaactaatatggttatcattacacacacacacacacgtatacacactaatttgatactttaatgaagtttaaaataacatatgatattggaacgttacccctggaatttgtgatttatgcttgttctgggaaaatgttttaaataattatttctttatttattttgtcttgaaaaagatgactgcttagatttttattcaatgtcttctaatatggactaatgaaagatctggcatgggatctggccagcagcctgcaatgcaactgggctctctctttgttcccaggcagatcagcaggtcgagaaataatagacacacacaagatagtgaaagctgggtccagggaggtcactgccttctggtcctgtggtgccgccaatgcactagatataccagcatttattattaagtttagtgagggtgggggtaggttagtgaggkatttagggtcatttgattatgaggtgagatggtcacattgggatgaagtaattgtta

SEQ ID NO: 618257 - DNA, 516 bp, Homo sapiens
ctagaagagccgtgaaaagatgagggcgtttatagccctatcttatccgtatggacaggtgcccctcatgtgtccgtttataggctctccacaagggtcacattycattcccagagctatgaacatctgcttttctgggataggaatcttggtgatgtgaaacctccctgactgcatgtccatttataggctctctgcaggaggaagcacatcatgagctgttggctcattctggcattgcaacctggcattgtcttttcacaatcctgcatgcaattttgtatttacaataatcaggagcatttcatcttttattctgtagcaatagtttcagggggtctccttacaaaatataaaatattttcctatacaattcaacataatgatgtaatctaaattaagttgaacatattaaatgtcctaaatagcacatgtttcaaagaaaaattttaactttatactttagtcttttctttcatagaaatatgtgtttttgcaaataggttaaatacaata

SEQ ID NO: 618258 - DNA, 573 bp, Homo sapiens
tttgtttgtttttatttttaaggtaagttttaacaaaatttttaaaataagtaactggatatggggctatttgggtttttatttatgtctgcatttgtaaaatgttttttgaaaaatttcttgttttcataagttggtaaattcatagtacaaaattgctyattgtattcccttgaagtcttttgaatttctgcaaaatatttaataataattccatgaatttttaatattgacaatttctctttttattttgctagtgttttaaaatttgtattaacctattcaaagaaacaaattttgaaattgttaatttctctcactttttgcctattttctgtttagttgattcacaccattacctttattgtgtccttccttctacttattttgagttaaattatctccttttcttaaagtagaaacttagataattaatttcaatgaattttcttttctaatctaggtatttaaaactacaaatttgcttacatatcatgtattcctggaataaactctacttggtaataatatgttatctattttaaatatcattagatttattctgttaatata

SEQ ID NO: 618259 - DNA, 579 bp, Homo sapiens
ttatcccagcaccatttgttgaatatggtctcctttccccattttatgtttttgtttgctttgttgaaggtcagttggtggtaaatatttgggtttatttctgggttctctactgtgttccattggtctatgtgcctatttttattccagtaccacgctgttttggtgactatagccttatagtatagtttgaaatcagctaatgtgatgcctccaaaytcgttctttttacttagccttacactggccatcggattctttttttgttccatgtgaattttaggattgttttttctagttcagtgaagaataatggtgctgttttgatgggaattgcattgaaattgtagattgctcttggcactataatcatttttcacaatattgattctaccaatctgtgagcatgggatgtgtttctatttgtttgtgtcatctatgatgtctttcagaagtgttatgtagttttccttgtagaggtctttcacctccttggttaggtatattcctaagtgttttattttattttatttttttacagctattgtaaacggggttttgttcttgatttgattatca

SEQ ID NO: 618260 - DNA, 603 bp, Homo sapiens
tgttttggtgactatagccttatagtatagtttgaaatcagctaatgtgatgcctccaaattcgttctttttacttagccttacactggccatcggattctttttttgttccatgtgaattttaggattgttttttctagttcagtgaagaataatggtgctgttttgatgggaattgcattgaaattgtagattgctcttggcactataatcatttttcacaatattgattctaccaatctgtgagcatgggatgtgtttctatttgtttgtgtcatctatgatgtctttcagaagtgttatgtagttttccttgtagaggtctttcacctccttggttaggtatattcctaagtgttttattttattttwtttttttacagctattgtaaacggggttttgttcttgatttgattatcaggttggtcgctgttggtgtatagcagatctactgatctgtgtacattcattttctatctggaaactttgctgaatttgcttatcagtcctaggagctttttggaggagtctttaggattttctaggtgcacgatcatatcatcagcagacagtgacagtttgacttcctttttattgattca

SEQ ID NO: 618261 - DNA, 457 bp, Homo sapiens
ttacaccaattatccatacatatgctggaatccttagcatgatttcaagaaagacttatgcctctataactctttttgtagctacttttaccataataattataactaatgtgtaacatcaaatctcaactgcttctacaaagtatacttgtgtacacagtaattacaaattaaactaaacctaccaaatgagcacatgaaaaactcattatgtacttaattttgcaaatgctatttaatcatttttccataaaactaggcaatatctgttgctaaaaaacaaaacagggaaattaaaatatgaagttatatactttccaacaagtagaatttctaaytgtgattgcctaacatttagaaaaaggttatagtcattcgaaataattgttttctgtctcttcatatcttggatgtcatcagaagattttaactctgtttgcactattatcactgtatt

SEQ ID NO: 618262 - DNA, 556 bp, Homo sapiens
aaaaccaaacctgtggacactgatttcagatactgagaccttgagttaagcctccagaactatgagaaaataagtttatgttgtttaagccacctagtctgtggtagtttattatgacarccctagcaaactaatacagtgagttctaagtaagagtgttgtatgcatgggcagttgcagacacaaaaggagctagtgaagagtgtcttgaaagcttaggaacccttttccagccggtgaaatggaccgaaggcattggagagagagaaaactgcttccaaaggcagttagattttattcacttattcaacaaatacttaattaacctattgtacagtctagggtgttgtgatacaatgaggcacaaaaacatatatggctccagctctcatacaacttataatttatggagaaaggcatttagaaaaacattaagaaataaatcattgcaaaactgtgttcctataagctgaaataaatgtagaaagctaaataaataaatgcatataacacagaattaatgccttctcctcagctgagttcttaaaaaattcta

SEQ ID NO: 618263 - DNA, 583 bp, Homo sapiens
ataggtattatatgtattttaacgttctacttagccttccaacatcagtgtcatatacctgcttggttctgttgattatttttgtgtcttggcacaaacagctggcagtgtttttgtatttcttgttttttatgaatcttgtaatattttactgaaggaagcccaacatctcatatatgacagtagaaacagaactaaataacttgcttgtgggacttgtggrgggtgagttagaaataatcgccatgcctctccttctgatagatcttctgctagtatgaggccaggagttgcacttggttaggattatatttttgctattgttaccctcagcacagcagagctatcaaattcttctagtgataacatatatacgttaagggatggttttatcatctctgcatcactcttagctttagatccttgctgtgtgccttagaaaggtttattctccagggttttgttcttatgctggtcttcttctaagagtttattctgttacctgatactcattaatttttaatctggtggcagagtgtagaagggacattctctgctgttcctattaagcctcagtcaaaag

SEQ ID NO: 618264 - DNA, 583 bp, Homo sapiens
ataggtattatatgtattttaacgttctacttagccttccaacatcagtgtcatatacctgcttggttctgttgattatttttgtgtcttggcacaaacagctggcagtgtttttgtatttcttgttttttatgaatcttgtaatattttactgaaggaagcccaacatctcatatatgacagtagaaacagaactaaataacttgcttgtgggacttgtggagggtgagttagaaataatcgccatgcctctccttctgatagatcttctgctagtatgaggccaggagttkcacttggttaggattatatttttgctattgttaccctcagcacagcagagctatcaaattcttctagtgataacatatatacgttaagggatggttttatcatctctgcatcactcttagctttagatccttgctgtgtgccttagaaaggtttattctccagggttttgttcttatgctggtcttcttctaagagtttattctgttacctgatactcattaatttttaatctggtggcagagtgtagaagggacattctctgctgttcctattaagcctcagtcaaaag

SEQ ID NO: 618265 - DNA, 595 bp, Homo sapiens
tccttatacaaactcatataaaagcccaatcagatttagcatgttacaattctgcaagcacttcatttggtgtaaaacgtcaaaatttgaatgaaatgaaatatggttggctgacaaccttcaattttgcgtctttgtaatggaaggatcaccatatagataaaagactatgatcattcataaaaagattagttattagaaaacaatcacatttaacaaaattgtttttccctactccattttaaaagattttttgtatactataattttcttagttatgcaacatatctccatcatcttactaaaaatattgacatatatacagtttctcaaacagtaaatatagcaaatttcaactgtaaatccataaagtcatctttttgttagaaaatgtggaaggtagtctatttggatctcmgtaattcagaagcctcaggagctgtgatcttgtgatgaaaatatgaatgaaaaattgatttcaatgcttttaacatttttttggtttttaactgatacatcgtagttgtacatatttttggatatatgtgacattttgatacatgtgtaaaatgtataatgagaaaattgagggttg

SEQ ID NO: 618266 - DNA, 575 bp, Homo sapiens
ctaataaataaatctctgtaactagtagggtttagctatgaaagtctgttgctaatgccccacaattcaaaatgcacaaaaatataacatcttgttcaagtaatcatttaagtaaaacartacattcatttaccatgtttccactcaaaatcagtcacactagtggtctcagcaattgtgaggtggaaattgttcttttaaattgaaaaagaagtgaggcctaaatttcccttactttttaactctaatatttccaatattcctgacacaaatccactgctcttaaataaatgtgtcatattacatacaaacataatttcagggcagagactattttgtgtacatagtttcttactgtgagaatacacaaatattttaaattcttaaattacccacttaatggtggagacatcaagtacttttccagagtttattataagtagtgtgatgtgtaaattatttcatctctcaagatgaacagcaaatacttccagaatttttggataactcttacaaaaaaaaattgcatttatattatttataaagagaggtatcattcatctcagtagaatgta

SEQ ID NO: 618267 - DNA, 400 bp, Homo sapiens
ataataaaaggttgcttgaagggtccaacgtgcattgcttcagtgatgaatgcactgaaggcccagacttcatcacaatgtaatatcagtatagcaaaattgcacgtgtaccccatgaatttatacacaaagtaaagatgaataaaatgagtatcaagcacttcaattccacgaactcattttatctcagaaagagtcaatgatgacatcattagtaatgattttctcaatatcattcctataactatctattattagacattcattgtacctcaacccaaagataaaaaatgtataaattytatgggtaatctcttgaggtggaatcaatatgctaataataatatatacattaaaacttcaaaggacatctttcaaatttcatatttaagcaaaagga

SEQ ID NO: 618268 - DNA, 422 bp, Homo sapiens
gaactagctaaaatgataactttagtattagaagtccatggcttattgaaacaagctgtacaaatcttccagtcccttaaggaaatatacattcattctcaagtattacaaatgcatgacagaaagtacatgtactatgaatgataatgtaattctcctacttgtttaataaccaytagaattttctttctcagtatcactgccacttacaacattatgatcaatattctgttaggaagttttattatcattcatgcgtaagattcaatcacagaaaaaaagtggtaatacttttgaacacatttcttgtcattgctacttccgccataagatattataaaaaaaattgtggcttttttattgtttccacagtgggaaagtaaggatctgagaaatgttaatttccacaaaatatatacaaa

SEQ ID NO: 618269 - DNA, 561 bp, Homo sapiens
cttctttcatttctctcatcagcattttatagttttcattgtagagatctttcactttcttggttaaacttattcctaggtatcttttttgtagctgttgtaaatgtatttttaatcttaacccccctctaaggaagcaatttataattgaagacaattcagaggtattttccttctagtcctgcaaaactcaatcttaggttctgtaagcctcttgtaggatacagtccacaccaaataatatctgaagttatccatcttagtagagatatcactttgctgaacctcaagacacagatgtactaaggcttagccacagtgaacagttgcccagatctttcatctaactccaaggagatttttatccatctccttttggctgaggaggactaacaactccctttacatttctaatcagttccagagacatggggtctttgttartgttttttaaaaatatcgatcactttgagcaattgaggaaatattcattaccaaggcaacaaatataagtgctcctctcgaagccaaaaatattccaaaggtctgtaggctgaagta

SEQ ID NO: 618270 - DNA, 411 bp, Homo sapiens
atctgtttctttttgttttttcttcctctccaaatctagaaagtggttgagaggcagaaaagtttacggttttctagcatttaacaaaggctccatgaccgtgtgagaatggtttttatagcactatcattttgaaggaaggtgtatatgcctgttacactgaaagtgtttggcagcttcacagtgcttcatgtctaatgcatatggagatcattggcaattgctycctactggactccaagactgcagtatgtgtatagagatgggaaacaggcccatcctgtgggctaaactcaagagtttaaatatctcctttgagcagaggaaggctcatttatcgtttcctcttcctgaattcccttgttcatttgggtgctatcaatcatccttttgttaggaaaaagaaattaa

SEQ ID NO: 618271 - DNA, 405 bp, Homo sapiens
gacacttctttcaaaggatctgtgaattcttttgttttcctggtacatttctgcagtggttcttggagcaaaagttcacagtgtgaatctcctcatgctgttcggtctgtctaagtggaagatgcatggtagccatgtctcctacctgccatcttggaagggaatccttcttctccttttttattgccaaatttaatatctaagaccttcaccacaccaacaatataacagggttctcctttcttcacatcctcttcatcatttgttattccctgtcttttggataaaagccattttaacggaggtgaattgatatctcactrtagttttgatttgcatttatctgattatcaatgacattgagcaccttttcatatgcttgtttgccatttgtatgtcttcttt

SEQ ID NO: 618272 - DNA, 458 bp, Homo sapiens
tttgtgggaaggccaggtactaggctccttcattgccttagatgatccaagagactgagtaatcaagatggagcaaagagcaagaagagtgtctgcaacacttttaacttcacaaagaagttaccaggcagaaggggacaattgcagtgactgattttcctgacaaaatgacagtgtcttgacaatggctatgaagtcttgatgacccttaacatctcatagaacaaagaagtcagtagagcaaggtgaaaatgttaaaggaggaatacaagaaacacaaaagaaagatgacagggtgacaagttaaacataatccacggaataagaaacgtcagaagcctcctccgcagtacacctacaaacacctgcccttttgttaatagataaaagagagcctctcactgtaactccttaayttccttggtggagggaaatcagatggctagaaagtgtggtgg

SEQ ID NO: 618273 - DNA, 564 bp, Homo sapiens
tactcaatgcaatctacagatccaatgcaatccctatcaaaatgccgatgacacagaagtaagaaaagtatcctaaaatttatatagaactgcaaaagacccagaatagcctaaggtatcctgagcaaaaataacaaaactggaggaatcacattacctgacttcaaattatactactaagctatagtaaccaaagcagcatgatattggcataaaaacagacacatagacaaatggaacagaatggggaacccagaaacaaatctatacatgtgcagtggactcatttttgatgaaggggccaagaacagaaattgggggaaaggtcattctcttcaatacatgactaggaaaactgatattcatatgcagaagattaaactagacccctatctccgccttatctgaaagttaaatcataatggacttatgacctaaatytatgaaactactacaagaaaacataggggaaactctacaggacattggtctgggaaaaaattattgagtaatatcctacaagaataagcaaccaaaacaaaaattgacatcaagtcaaaaggt

SEQ ID NO: 618274 - DNA, 603 bp, Homo sapiens
gctatagtaaccaaagcagcatgatattggcataaaaacagacacatagacaaatggaacagaatggggaacccagaaacaaatctatacatgtgcagtggactcatttttgatgaaggggccaagaacagaaattgggggaaaggtcattctcttcaatacatgactaggaaaactgatattcatatgcagaagattaaactagacccctatctccgccttatctgaaagttaaatcataatggacttatgacctaaatctatgaaactactacaagaaaacataggggaaactctacaggacattggtctgggaaaaaattattgagtaatatcctacaagaataagcaaccaaaacaaaaattgacatcaagtcaaaaggtttctgtacagaaaaggaaacaatcaataaaatgaagataacacacacagaatgggagaaaacattatcaaactatccatctgacaaggaattaataatcagaatatataaggagctcaaacaattctataggaaaaaaaactaacaatctgattttaraatgggcaaaagatctgaatagacattttacaaaagaagacatacaaatggcaaacaggca

SEQ ID NO: 618275 - DNA, 561 bp, Homo sapiens
ttcacgctttccagttacgttctgatctcctgggttccrgtttcaagaagtggcaggtagatgagtgtagctgcagcttaaggaaagtaggaaccagagtgagactggagaggaccttagctaatgaatctgaactttattttataagtgcaaaaggttttaacaaggtagtgataaaaccagtgacttagaaagagaatgggcagtagggtagaccaaagaaagaatgctattaaagactgaaaaatacatgatggagggcctgaaataagaagagtgagagtaagaaaggggcagtaattgtagaggtatcatggaatagcaatcagaaatacacaggagcaactgagtacgggagtgaggggaaagggcataccgattttttcaaaagcccattctctttttgcgtctagtgaggagagggtgttctttatctgtgattgtgtcactcttaccagagagcttggtgctatgtgtgtccctgtaaaaccccccagcttccattaaacaaagtgctcttcttaaatgccttccttgtaagacctggctgccctaccccaa

SEQ ID NO: 618276 - DNA, 264 bp, Homo sapiens
cacataaaagaaaatctctagctcttttaagcatggtatttagaaaccaagcacttagtgctaggtatgctcattgcttttggtgtgtcactacaaccaagctctcttagtgggtgawgttaggaaatatatatgtaactggttgaatagtgtatccacaaagcttaatatctacccataactcagaatgtgcctttatttggaaaaagagcctttgcaaatataaccaattaagatgaggtcatatttgattagagtgggccc

SEQ ID NO: 618277 - DNA, 544 bp, Homo sapiens
gatagaggcaacgatgggagagatgcagctacaaactaaagatcaccaaagaatgtcaaggagtgctttctaccactagaggcgtgaccagaggcatgggatcttctccctcagggaaggcatcaaccctgccaatgacttaattttggatttctggcctccaaacagtgagaaaatacatttctgttgttataaaccaccaaatatgggtaatttgtacagcagccctaggaaaataacacaatatgtatctatatgtttgtgtatgtatatatttatagccacaattatatctatatttatttgtaatatatatgattatctatctatctatctatctatctatctatstatctatctatctatctataatctatctatctctatgcatgctcctcaagaatttacctccaattctaatctggtactatgggaattaattccagttttcttcctttccatatttgtaactcccttctcttgtagtgagaaacttaactcccattattttgattttgattttacatatttaaaggtaaagatc

SEQ ID NO: 618278 - DNA, 424 bp, Homo sapiens
ggcacattattttggtggcattttacctcatgctggaagagaaaaaaaaaattcttggtttgaaactctctctccaagtcacagaagcatcaaagtctttccagcaacagtgtgaaataatgaaaaaaagctttccgttgcatttcagataaatactgttgaaaactaagattactcctgaaactcacagcactcctcccatagtggccatcaagagatattgattaatggattgactgattaattaaaaagatagaactaaagaaaaggaaggaaatggtagtcttttatgcatttacacatgcataataatattattgatatatatatggatgatattactaaattgccatttayacattgttgtgtttgagattgtttagtggtaataggagtagtaaagaatgggtgttataccattcat

SEQ ID NO: 618279 - DNA, 573 bp, Homo sapiens
cagcatgtgactaatcctgccaaaactgtatcctccccttcaaggcagcagtttrccttctggaccagggtatgtctagaaatgtcatctgggagctaggacctggaatggggcctcacaaatctgcctgatgccccaacctcttgttgctgtgaactatgctggctgcggttcagggaggggtggtacaagcactcctttggctgcctcagctggtgtctcactaggtcccatgccacctttgtccactggctctaaggccaggccagcactggaagttgcctaagaattgcagtccttgtgttctagattgcctttcaagtttccctagaacctcaaagcactttagtccatggtggtgaggcttgccaagaaatagaagttccaaccactgggatgagtgattcccttctggctagtgctggtccaaatgctccctccatgggtgggcaccagctgaacctagtacagctttgctctcactgtgactgggcagcattgagttcaatgctaagtcttccagatggtatggtctccctccctcaagggcacagattctctttttccccttgt

SEQ ID NO: 618280 - DNA, 573 bp, Homo sapiens
cagcatgtgactaatcctgccaaaactgtatcctccccttcaaggcagcagtttaccttctggaccagggtatgtctagaaatgtcatctgggagctaggacctggaatggggcctcacaaatctgcctgatgccccaacctcttgttgctgtgaactmtgctggctgcggttcagggaggggtggtacaagcactcctttggctgcctcagctggtgtctcactaggtcccatgccacctttgtccactggctctaaggccaggccagcactggaagttgcctaagaattgcagtccttgtgttctagattgcctttcaagtttccctagaacctcaaagcactttagtccatggtggtgaggcttgccaagaaatagaagttccaaccactgggatgagtgattcccttctggctagtgctggtccaaatgctccctccatgggtgggcaccagctgaacctagtacagctttgctctcactgtgactgggcagcattgagttcaatgctaagtcttccagatggtatggtctccctccctcaagggcacagattctctttttccccttgt

SEQ ID NO: 618281 - DNA, 573 bp, Homo sapiens
cagcatgtgactaatcctgccaaaactgtatcctccccttcaaggcagcagtttaccttctggaccagggtatgtctagaaatgtcatctgggagctaggacctggaatggggcctcacaaatctgcctgatgccccaacctcttgttgctgtgaactatgctggctgsggttcagggaggggtggtacaagcactcctttggctgcctcagctggtgtctcactaggtcccatgccacctttgtccactggctctaaggccaggccagcactggaagttgcctaagaattgcagtccttgtgttctagattgcctttcaagtttccctagaacctcaaagcactttagtccatggtggtgaggcttgccaagaaatagaagttccaaccactgggatgagtgattcccttctggctagtgctggtccaaatgctccctccatgggtgggcaccagctgaacctagtacagctttgctctcactgtgactgggcagcattgagttcaatgctaagtcttccagatggtatggtctccctccctcaagggcacagattctctttttccccttgt

SEQ ID NO: 618282 - DNA, 573 bp, Homo sapiens
cagcatgtgactaatcctgccaaaactgtatcctccccttcaaggcagcagtttaccttctggaccagggtatgtctagaaatgtcatctgggagctaggacctggaatggggcctcacaaatctgcctgatgccccaacctcttgttgctgtgaactatgctggctgcggttcagggaggggtggtacaagcactccttyggctgcctcagctggtgtctcactaggtcccatgccacctttgtccactggctctaaggccaggccagcactggaagttgcctaagaattgcagtccttgtgttctagattgcctttcaagtttccctagaacctcaaagcactttagtccatggtggtgaggcttgccaagaaatagaagttccaaccactgggatgagtgattcccttctggctagtgctggtccaaatgctccctccatgggtgggcaccagctgaacctagtacagctttgctctcactgtgactgggcagcattgagttcaatgctaagtcttccagatggtatggtctccctccctcaagggcacagattctctttttccccttgt

SEQ ID NO: 618283 - DNA, 579 bp, Homo sapiens
agtcttccagatggtatggtctccctccctcaagggcacagattctctttttccccttgtggctgctgccatggtatggggaaggggtggagtcagcaattcaagactgttttttcctaccctcttcacaggtgcyagcacgtctaatcctgcataagtagaagttgtaactaatagaaggttactaccagtggtgtgctggtaaatatttatcaaatggctccttgcaggagagaaatcagattggtagtgcttcacaattgctgtgatataaatactccccaccatggctcatttctagctaccaacatgatatcactagatatgtaggtaagatgagatgtgaacaatcagcattgatgagctgaacagactcttgctgccattgtttacaacacagcttatgctcagaattccattttccaaattaatatagaccacagattgacaaacttttttctgagaaggtgctgatagtcaatattttaggctttgcataccacataatttctgtctcaactattcaactctgtcattgtagtgcaaaatttgtcataaacaaatagataagtgaatggg

SEQ ID NO: 618284 - DNA, 601 bp, Homo sapiens
tatgatcatctgttattactgcagtgtcagtgtgtagaaatgtgggttaaagggggkgacctaagccaataaagtgcaggctaatagtgtttactcaactctattgtttaggaaatgcaggtatgtttctatcagatctattaattctatcacactagaagatgtgagaagattgtagaaaatataaaagatggcaaattttctaggagtctggctcacattgaacctatcgcaaacttatttacatgatatattaattatttatcttaagacatatagttcttagtgagtatgggtataggtgtctatctcttgctaaaatttttctaacttaacaaagatgcagacttcagcactaactgatcgatatgccttaccaggggctgtcttgataatcagtttttacaaatagcattgggtcagaggggttgtggaattgtaagtcctttagggaatgccattccagcaaaagccaggcacataggcaattgatacagtagggctctattcactttcaactcatctttctttcccttataatcaattattttgcagtctagttatagcactcccaggtggagaagaaaagtttgagttccat

SEQ ID NO: 618285 - DNA, 601 bp, Homo sapiens
tatgatcatctgttattactgcagtgtcagtgtgtagaaatgtgggttaaagggggggacctaagccaataaagtgcaggctaatagtgtttactcaactctattgtttaggaaatgcaggtatgtttctatcagatctattaattctatcacactagaagatgtgagaagattgtagaaaatataaaagatggcaaattttctaggagtctggctcacattgaacctatcgcaaacttatttacatgatatattaattatttatcttaagacatatagttcttagtgagtatgggtataggtgtctatctcttgctaaaatttttctaacttaacaaagatgcagacttcagcactaactgatcgatatgmcttaccaggggctgtcttgataatcagtttttacaaatagcattgggtcagaggggttgtggaattgtaagtcctttagggaatgccattccagcaaaagccaggcacataggcaattgatacagtagggctctattcactttcaactcatctttctttcccttataatcaattattttgcagtctagttatagcactcccaggtggagaagaaaagtttgagttccat

SEQ ID NO: 618286 - DNA, 577 bp, Homo sapiens
ttggttatactggttctactacaggctctacaattatgtagctgagtgatcttgagctcgtcacttcaaatctccaggactctatttcatcactgtaacatgagaaggttcaattagatacaaatttaccttctaattctatgcctgaaatcaacaatgatgcttactgaatacaaatcctttgggaaacactaggactcttcttcactttttgctttgtaaagatcctgagtcagacaccttaagccatttttttgattcccaggttcattttctgatttggtttcagakgaaaaatggttgctctgtcctgcagaactggtttttgtaaagctccaaggtatacatccctttattccatttatagacatgttaattatctagtcaaataacacccaacccaggtccagctacccaagaggtcaaagaaagtacaataaaacattttcctagtgggaaattccaagaaacaaaaccagtctctggagctgctgagataacattaatgtggaaatgcatttcctgacttctgctcagagatagaactaccctggaagccagaagacaggtaccccag

SEQ ID NO: 618287 - DNA, 510 bp, Homo sapiens
ggcacagaccgcgtgtctccctctgtggggaccagtcccttgaggagctcagactgcctctagcctggctgggtggggtggggaccgtgggggctggcgtggcagctgtgggctgcaccaaggcctgtcagggaggaatgattaatgaacagccgcaccagctgaggctaacctttggagagctgagcagggcatctgcagaactgtcagygctctgacaaggacagagctgaacaaccaattacgccgccatcactaaggtgggctgtcactttaatcccagccattcacttaggcaaggacagggaaatttctcctctgcagaggcgtgtgcctcggccaccttaaccatttcaagacagggcagggaccctggttgggagctgctccagctgtgtcctgacaagtctccccacttccaggctttccccgcttcccagtctctctttcataccggccacgagagcagaattccagccacatttacgcctgtgatttcattctgctgcc

SEQ ID NO: 618288 - DNA, 587 bp, Homo sapiens
ctgttctctcaatctggaatgtcctccccccattccttgctataaagctagtaattatgttttactgctaataacaagggctgaaatcagagcagcttaagaaagatggaggcttggctgggcgtggtggctcacgcttgtaatcccagtgcttttggaggctgaggcaggtggatcacaaggtcaggagttcaagaccagcctggccaagatggtgaaacccygtctctactaaaaatacaaaaatcagccaggcgtgatggtgggtacctgtaatcccagctactcgggaggctgatgcagagaattgcttgaacccaggaggtggaggttgcagtgagccaagatcgcatcactgcactccagcctgggcaacagagcaagactctgtcaaaaaaaaagaaaagaaaaagaaatacggaggcttatttttctttcatgtaacatgaaatttagcaataagtaaagtagtagcatgacagggtcatcagggacccaggcgtcttccatctttccattccaccccccttattgtggctttcatcctcaaagtcaactcactcatggtcacaggatggttgccagag

SEQ ID NO: 618289 - DNA, 586 bp, Homo sapiens
attggcattctctgctcaggggctggtcctctggttctctgtagcatgcctagctcttcccctcccctgagatggctgagacagtccgcaggtgggacttgaggcttccagactcctttgtcctaattgcaatcagcagtgacttctcactcactggtaccacccattagcccctctgctgcttctcctctgctgtgggagcatagctgtcactctggaaacacagtccctgggctgcggagggaagaaggcccaaaggaggaaggctggctcttatttctgctgcataggaccattcttttccctcttcccaccctccctttgcccccagaactgaatccaaaataaatgaacagactccccarttcctgagttttaatggaactaacgagctgatcacagagtcccaatgctgtgactgcttccattctggctagtgttagattgcattactattttcatttgttttcattattattagcttttagcagtgaaatggagttaaaattattacagtttgtaacatgctttttgtactaataattcaagtacttttgagtaggagctgagagcattaatttgtcaa

SEQ ID NO: 618290 - DNA, 518 bp, Homo sapiens
tgattttaatgttaaaacaaataaatagctaagtaaacattggtcttcaactccatcctctggttccaaaaattacctaggactcargaaatttgaggaatttattcattgaagtactcaaatgttatatgtgggatttgttatatgtgggatttaaacagaaatatgtcattgctgccatttgaatgaatgtcacaaaaaggtttaggcaaaactatccacattttgatagcctacttagcatcgcatggggtcataaacttgccacaaagaaaatctgactaggctgatgagtgctgtttggtgtataggttcagagtcttcctcaactaaggaacaggaataattgatcccatagccctttcagctctatgagtttctcatagtttgtgtctataatagtaatcatgaaaaacactaagtatatcaggagtgggttaaatatccaaaactattttatctgtattagaagaacagaaatgactcttcaaaaataagccaatgactaggctcatcat

SEQ ID NO: 618291 - DNA, 529 bp, Homo sapiens
cgcggcggcctcttctagctcgggtgctgggaggccccgtcctgatcctctgtcgccctggccgatctccctcagggccacggggaagaggaacctgagcagctctgaggggcgagtctctgacggtggggctccccctcgtcctgccaggaccctgccccaaggagaagaccccttaggacgttaccagatttaaacaatgttttctcctgctcttcagagcacctgggataaggttcctgatgggtcttgggagcaaactaacatgtcgctccaggcgctcaagaccatccctctgattttcatattttggggctgagagcgtttaagaaggactgaaaaacgctgcagtctttgaggggctaagtttggaggatgcgggagtgggagaggatgccttcttggctccttggagtggactggcaggtaaggaaacacaaactccgtttccccttgcaggctggactgcagggcctgggatggaaaattggacmgtcaaagagtaacagtatttatgtagaggttggct

SEQ ID NO: 618292 - DNA, 687 bp, Homo sapiens
agacgcaggcttctatgagctctgcctgttgaactgcagtaaaaatagatctccttccccagagaggcttggatgtgggcacaatatcagttcagacgatggtcaatgcatgtacttaatagagtgaaaagactttggactgtgaagtcagattacctgggtctgaattgttattcttctacttctttgtagtatgctttcaccacattaaaaattgtctgagcctcaatttttttatctgcaaaatggagctaatacctacacaggggcttttaagagaatcaaatgcaacaatgtttgaaaagcaacatactcccctttatggaaaaagagcctgtaaaggaaccaatacaatggctgggcgtggtgactcacacctgtaatcctagcactttgggaggccgaggtgggtggattgcctgagctcaggagttcgagaccagcctgggcaacatggtgaaaccccgactctactaaaatacaaaagattatcctggcgtggtggtgtgcacctgtkatctaagctacttgggaggttgaagcaggagaattgctggaacctgggaggcagaggttgcagtgagccaagatcacaccactacactccagcctgagtgacacaagactgtgtctcaaaaataaataaatgaataagtaaataaatacaaaataaataaaataaaggaa

SEQ ID NO: 618293 - DNA, 557 bp, Homo sapiens
accatttgacccagcaatcccattattgggtatatacccaagggaatataaatcattctactaaaatgatgcatgcacatgtatgttcactgcagcactattcacaatagcaaagatatggaatcaatctaaatgcccatcaatgatagattggataaagaaaatgtggtacatatacaccatggaatactatgcagccataaaaaagaacaaggtcacgtccmtcgcagagacatggatggagctggtggtcattatctttagaaaactaaaacaggaacagaaaaccaaatgccacgtgttctcacttataagtgacagctaaatgatgagaacatatggacacaaagaggggaacaacaggcatgggggcctatcagaaggtgaagggtgggaggagaaagaagatcagggaaaacaacgaatggatactaagcttaatacctgggtaatgaaataatctgttcaacaaaactccatgacacaagtttacctatgtaacaaacctgcacatgtacctctgaacttaaaataaaagtttttaaaaaagaaattta

SEQ ID NO: 618294 - DNA, 633 bp, Homo sapiens
ccacaccatcaatgcaaaaagccccagcatttgcatcgcagtcaacctcattcaagcaaagttatctccagtaaggaatttcccctgtagaaagcatgcacattttgattttacctgtcctgagactgaatctttgcttattataatagcaaaaaacacatccctgggtggagatttgagatgctaatacgacatgcaatgtatgaacaaacatgtacagctattgtgcatgtgcccccagaggaccactcaaaacatgcttactagtaacaccctcttttcaccctcttatgtataatcgtgtaagactcatataaagggagtttccccagaaacagttaacgctgtcttatccttaggaacagtgygctctgaatcatctctctcagagtgtactgtctattttgcacctaactttcagagtattctttttcctttgcaataaatatctctatgctgcatctccttgctgtatgtctctaaaattcttttaaattgagaagacaagaactgaggtttcacaaccgtcatcaacacaacctggcaatatgtatgcaatcaacaaagtcattgaatgccctagaaataggtgggatttggtgcaaaaaatgtccaacactgttgcatacttgc

SEQ ID NO: 618295 - DNA, 529 bp, Homo sapiens
tactattcatattgagataagataaagtaagtttcttaatttctcccaggttgaaatgattaactaataaagagtatatggggtggggaaaataagtagatgcatcctgtaatatctagcatgtagtcatttgaagaacatttaacatgyaatttttattttttaaaagctgcatttgttgtgtgtttgtgtatgtaagtgcgtgtgtgtgtttgtgtcaaatgaaaaaataaaagtagatcagcaaactctcatgatttcaaaatttcccaaagcaaatttatcttatagaaataaaatatcgctaatatctctattggcgttaacaatattctaaaactttgcatatatttgattgagtcaatattttgtaaatgctttctagaaatcattgataatgaagtttaaaaaataaataaataaataaatgacaaatgagaaatctagaaagccaatatgttttacttttactgtttcttattatatgcttgaaacaacttcaaaaaatattcatagacctagaattata

SEQ ID NO: 618296 - DNA, 595 bp, Homo sapiens
aattctataattgggtattttaataagtattatgtagaaggaaggaagactagactgaggttaaaactataattggtaaagaagcagcaggcactcatattagctaggataaggagatatttgatcatttttatggcttgggcaatgttgatgttgtgtctgtgttcacatatgattatagagtgatcttacttttgtcttgatctatcacggtcacaactctgtcttgtctgatgttctgtgaaattgtttatgttcaacagaagaataccaatgcttggctgtgattgccaggccagctcaaagcaacagcaaaccaagctggtagtaccaggccatctcctggatgtcaaggtcygcttttctctttctcggtatccacactagaatccttgatttactctcttccacctcactcaatcaaaaaccattacctcacagacttcccttctatgtggcactaccacccacacatatgctagcccaaaacctaagattcactgttgatgatgcccttttcttcattttccatagccaatcaccaaatcccattgtcttctttcttttatttcttccgccattgttctggtccaaa

SEQ ID NO: 618297 - DNA, 616 bp, Homo sapiens
tcgtcacctagctttatttctttttagtaagtatggcattgtgtcttctttccattcccatttccaccacattaattaatttccttacactttgttcctgatttacaacagtttctcacctatgctgcctgcttgcacttttccatycttcagttcatcttgtatgttggtgctagaataatcttaaaatgccactttcatccagtttcatggatactgttcctcttcctttccatttttccagcagttagctgtttttttagttcatctttcccttactagtcactggacacataacacagtaacacagtcattgtagtattctttttctattgcttaggactctgcattttgtctccactgtaaaccccttggcggcagtatctcctctggtttctaaagtatgttgtgacttcagcagagtatctgaatggatgactctgaattggttctagcatcatgtttaggagaatgccactattctaatattctgaaaatctgctgggaagtaatgaatggggtgaattttattacggatttcaaaagttttgtagcgtttatgtaacagaacattggacattataatatgataaattataaaacgtgctaaaacttt

SEQ ID NO: 618298 - DNA, 365 bp, Homo sapiens
cactttggaaaacaatttggcagttcctcagaaaagttaaatataaagttaccatatgacccagcaattctacttctgggtttatatccaaagaattgaaaacacacattcacacaaaaacttgcatgcattttcatagcaatattattcacaatagacaaaaagtgaaaacaacccaaacatccatcaactgataagtraataaacaaaatgtgatatatccatttaatggattattatttggccattaaaacaaaatgaaatactggccaggcatggtagcttacgcctgtaatcccaatactgggaggccgaggcagacagatcacacagtcaggagatgaagaccatcctggtcaacatgg

SEQ ID NO: 618299 - DNA, 541 bp, Homo sapiens
ttcaaatcttacttatttcttttttctttctttttttttttttttttttttgagatggagtctcgctctgttgcccaggctggctcggctcactgcaacctccacctcccaggttcaagcgattctcacgcctcagccttctgagtagctgggattacaggcgtgagccaccgtgcccgtcccaaatcttacttatttctgtactgtgttttaaaatgytttttatcacagcataattatatttgttattttatttcattttataatcatcatgtatgcaaagtggggttgaggcaggggaggcatgttgtttcaacctgagttcctaaaattgatgctgtgacaattcttggatgaagctttcctaggctagttttgtcatgataaaggaatgtcttattaaagtctctcaatccttgcctttttagaaatcataatcaaagttcctttaaagtttctctaaattttagaaaagcatttctattatgtatgaggctctttgaagaaacctatgattccaatagcttttcacttgaaatat

SEQ ID NO: 618300 - DNA, 634 bp, Homo sapiens
catgttgtttcaacctgagttcctaaaattgatgctgtgacaattcttggatgaagctttcctaggctagttttgtcatgataaaggamtgtcttattaaagtctctcaatccttgcctttttagaaatcataatcaaagttcctttaaagtttctctaaattttagaaaagcatttctattatgtatgaggctctttgaagaaacctatgattccaatagcttttcacttgaaatattatttccaactgtgctaaatttataataatttccagcccttttaatatatctaacagttaacatttattcagagcccttactctatgtcagatactgtgtttggattttacacgaattgtctcacttaattctcacaataaccctatttgtgcccattattcaaataaagaaacaggaatcaaggcaaagcaaagtgctcatacagagagcaagtagcagggctaggacttgaaaccagatctgtctgatgccaaagcctctggtcttctacaaaattacggtgaggtcccaccagtaacacagtcccatttaggggtattttagagaggcaaagcatggagtcaggttgattcctttgggataccttccaggtctcagtacggattagtatttgc

SEQ ID NO: 618301 - DNA, 576 bp, Homo sapiens
ctgatatcctgtgttagtaggtaagagcaagcaccagcaaaactcaggttataatacaatggacaattgtgaggattcaagtaatacatgtaaaagcacctagcagaacacctggcactttattgggacccagataagatgctttgtcctgctgttattattatgagaaaagtcagttgtgtattatcacaaagaccatgctgtctaatctgttttccactgcctttaacaagcactgttttaccttttctttgcctatgtttatctcattctgttaatgaacagatcaaccaaaagacaaggctttttcctcacacctgctgtttactcacatgtttgctactttattatctttcttgkctttaaagagaaagaactgacttgattccagtgttgccaagtgtcagagaggtccaataaaatgattttgcttcactcagccaataaaacatatcttctggtcttatttgcaatggaaaatatgacatctgttctaatttcccactctttttcccctaggcagagtctactctctcctgagaatgttccccaaagtgtttgaaatactggcaagag

SEQ ID NO: 618302 - DNA, 615 bp, Homo sapiens
aagattctgtctctcttaaaaacaaccaaaacaacaagaaaaatcttaaaaccttagaaatagaccttaaactttgcctaaatgtagcattcagttatgagtagcccaggtgagtttcctacacgccatcctccactaaaattcatctataaaatgttaccagtctgagagatgtgaatggtatcatcgttgtttaaatctatatatcgttaataacctgtggatggatatctttccataaaattctcagccatatctatttcttcttgaaaattgcctaatcatctcccttacccttgaattgacaatttgaaaaawaaaaataaaaatcaaccagcgcagtggctcacacatgcaatcccagcactttgggaggccaaggcaggaggattacttgaggccaggagttcaagaccagcctgggcaacatggagaaaccccatctctacaaaaattttaaaaattagctgggcttggtgtcttgcctgtagtcgcagctacttgggagggtgacatggtgggatcactggagactaggagtcgaggctacagagctatgattgcaccactgcactctagcctgagtgacagaatgagaatctgtctcaaaaaaag

SEQ ID NO: 618303 - DNA, 615 bp, Homo sapiens
aagattctgtctctcttaaaaacaaccaaaacaacaagaaaaatcttaaaaccttagaaatagaccttaaactttgcctaaatgtagcattcagttatgagtagcccaggtgagtttcctacacgccatcctccactaaaattcatctataaaatgttaccagtctgagagatgtgaatggtatcatcgttgtttaaatctatatatcgttaataacctgtggatggatatctttccataaaattctcagccatatctatttcttcttgaaaattgcctaatcatctcccttacccttgaattgacaatttgaaaaataaaaawaaaaatcaaccagcgcagtggctcacacatgcaatcccagcactttgggaggccaaggcaggaggattacttgaggccaggagttcaagaccagcctgggcaacatggagaaaccccatctctacaaaaattttaaaaattagctgggcttggtgtcttgcctgtagtcgcagctacttgggagggtgacatggtgggatcactggagactaggagtcgaggctacagagctatgattgcaccactgcactctagcctgagtgacagaatgagaatctgtctcaaaaaaag

SEQ ID NO: 618304 - DNA, 615 bp, Homo sapiens
aagattctgtctctcttaaaaacaaccaaaacaacaagaaaaatcttaaaaccttagaaatagaccttaaactttgcctaaatgtagcattcagttatgagtagcccaggtgagtttcctacacgccatcctccactaaaattcatctataaaatgttaccagtctgagagatgtgaatggtatcatcgttgtttaaatctatatatcgttaataacctgtggatggatatctttccataaaattctcagccatatctatttcttcttgaaaattgcctaatcatctcccttacccttgaattgacaatttgaaaaataaaaataaaaatcaaccagcgcagtggctcacacatgcaatcccagcactttgggaggccaaggcaggaggattacttgaggccaggagttcaagaccagcctgggcaacatggagaaaccccatctctacaaaaattttaaaaattagctgggcttggtgtcttgcctgtagtygcagctacttgggagggtgacatggtgggatcactggagactaggagtcgaggctacagagctatgattgcaccactgcactctagcctgagtgacagaatgagaatctgtctcaaaaaaag

SEQ ID NO: 618305 - DNA, 591 bp, Homo sapiens
gcggtcattgcatttatcagcgccatatgacaatcagtactttaggaaatacaaaatgattcagtttgtaagtggggaaatgacacaatgttttagaaagttggattcggttttgacagtgatgaataaagcaaagtgtcatggcatgggggatatccacaacatgaaataaatatgtaatgtatctgaagtagtaatattaagtgctatgttgacaagttaaattggaatggagactaaagaatgatggtggctggtattttagataggatagagagggaagatacttttcaggtgcccatagagaaagaacttaaagggagtaaaaaatgctgtgggactcctagggaaaccagtgttccagaaagagaaaaaaaaaaatcaaattcaaagggcttgaagcagccaagtgataaagtgatttggaaagcttgtggaatagcaaggtgcctgatatggatggttcaaataaggcaagaaaaagagtgcaacaaattaacattagggtccccatcatggacctaatgatgtaggtctataattagaaattgataatttctcagcatcrtcactgcccccacactggttcaa

SEQ ID NO: 618306 - DNA, 382 bp, Homo sapiens
agggttttttttaacctttttatttttatgcaggtttttttctaaataatcttttaattttagaatacttttagatttacagaaaatctgtaaatgtaacacaaacaattcctatatacccacaccagttttctcattttattagcatcttcctttaktacatttgccataaacatggtacatttgtcataaacaataaaccaacattactaaatgattataaagtacatactttattagatttccttagtgctatggtttgaatgagttccctccaaaattcaggtgttgccaatttgatagtattaacaggtggtacctttatggagctattaggccataagggtttctcactcatgaatgggattagagccattggtaa

SEQ ID NO: 618307 - DNA, 475 bp, Homo sapiens
gtctggttttttttcttttttttgtgttcataagttcttataattttgctcctacttataagtgagaacatgcagtatttggttttctgttcctgcattagttcggtaaggataacagcctccagctccatccacgttcctgcaaaagacattatctcatttttaatgggtgcatagtattccacagtgtgtatgtaccacattaccacrttttctttacccaatctgtcattgatgggcatataggttgattccatgtctttgctattgtgaatggtactgcagtgaacatttgtgtgcatgtgtctttatggtacaatgatttatattcatcttggtatataaccagtaatgggactggggggtttaatttttatcaaaggccttttctgcatctatttgagataatatgtggtttttgtctttagttctgtttctgtgatcaatcacatttattgatttgtgtgtgttgaac

SEQ ID NO: 618308 - DNA, 520 bp, Homo sapiens
ctggttgcaattttaactaccttagatttgggctatattttagctatccactgtattcacatgccacctacctgtcaaatctaaaagtgattatttaaaattattaatagtttcagttctgagctttataggtaaaatattactttttctgctagcaacctcaccaccaaaatgttccacacatttgctaacaattttttctaataacactaatcatgtaaatgactatatgttgaatctgaattatgtatttattcactcatttatttatcaatgtatcttgtttctctattgagcaaattaacaaaattcttactttctcaaatcttaattttgaaaaatataccaagtgttataagtgaaaattttatttttcttttcagtaaaaaaaaacctctcagaatgtatatttaaaaattcwgagtgaaaaaacttatttcgatttatctcttcttatgtctatatttttatcaaccagagtataaatttttaaattttgaaaaagtacatgtacacacat

SEQ ID NO: 618309 - DNA, 612 bp, Homo sapiens
ctttttaatgatttctgtctctttggtaagtttctcatgtatgcactgaattgcttttctgacttatttgtattatttttctgtgttcttttgtatctcactgagctttgttaatatcattttttttctggaatttcataagtttctttttcattggaatctattgctagagaaacaccgtttccttgaaaggtatgatatttccttaatatttttatgttgtttgtgttcttacactgatttctgtgcttctagtgtaagggttgcttcttccaatgttttgaagttgctttcataggggcgggctttattctgaagatgtatctattatgttagttggtgtgttaatccatttgtgttgctataaaggaatacctgatactgggtaatttataaaggaaagatgtttatttatctcattgttctgtagctgtacaaggagcatggcactagcatctgcttctcgtgagtacctcaggaaacttccaatcatgacagaaggcaaatggtgggggggcgggtgtgggaggtgtcacatggcaaaaaagggagcaagatagagcagtagaaagtgtgagatactcttytgagcatccagctcttgtgtgaata

SEQ ID NO: 618310 - DNA, 563 bp, Homo sapiens
atttcttctttgtagtaaatgcatccctactgtgttattttctatattttacgtaagttcaaggtatgacaatgcatatgtggcaaagaygtatgtagtctgctttataaaaagtgtctaaggaaacaaaattttctttcctggttatatattcagaaagttgttattttctgtacatagtgtggttttggtttactaatgtttggccaatgttagaaacatgcataaatagaaatttactcataagaaaatgagtaatgtaaatcagaactgtttgagaaaagaccgtgtgttaatgtttttaccacaattccatttttctgagcaatagactgtgtcttcatgacaccaaaacatctggatgtaaagtgaaaaatgtagtcagtcgtctagaggtttctaaatatccagatgctttgtgttggttagacaaagatttcaaatgattgactgaattgctcaccctcacagttaacgtgaatagattactccgtctggcactctggggaggcagacagtcagaagatagaagatggatcatgagacctcatagaggaaggagt

SEQ ID NO: 618311 - DNA, 563 bp, Homo sapiens
atttcttctttgtagtaaatgcatccctactgtgttattttctatattttacgtaagttcaaggtatgacaatgcatatgtggcaaagatrtatgtagtctgctttataaaaagtgtctaaggaaacaaaattttctttcctggttatatattcagaaagttgttattttctgtacatagtgtggttttggtttactaatgtttggccaatgttagaaacatgcataaatagaaatttactcataagaaaatgagtaatgtaaatcagaactgtttgagaaaagaccgtgtgttaatgtttttaccacaattccatttttctgagcaatagactgtgtcttcatgacaccaaaacatctggatgtaaagtgaaaaatgtagtcagtcgtctagaggtttctaaatatccagatgctttgtgttggttagacaaagatttcaaatgattgactgaattgctcaccctcacagttaacgtgaatagattactccgtctggcactctggggaggcagacagtcagaagatagaagatggatcatgagacctcatagaggaaggagt

SEQ ID NO: 618312 - DNA, 579 bp, Homo sapiens
agtaggtcttaaaaaaatgacagaacctgggataaaaactgataaggtagagaactgtggcataagatacaagaaagacagaataccatgcccaaaaaccagtctaaggtcagaaaaccaggaaatataagattagcaaaaccaatatccaaagtcagwctcagatagatattgaggttgaggttcaaaattttaaaaaatttaaaaagttagaagttaagatattttaaaggtaaacaagaaattattttctttcataatacagctttcatgcctgcagtattaatttcactcttgggtataaatagaagagtgttacaaagatccagaaaccagacacacactcaacaacagtgatttaaaaacaatcaagttttatttttaaaaaatcagtcattattgtaaacctgcaacagaaaaaacaaattaaaaatacgaattaaattctacttgggaaaaaaaagagaaatgtattgatactggttttgatcactggtgaagacttacgaagcagagtaacaagaaagttatactttggagggaactatattattttatttttatggtttagactatgga

SEQ ID NO: 618313 - DNA, 579 bp, Homo sapiens
agtaggtcttaaaaaaatgacagaacctgggataaaaactgataaggtagagaactgtggcataagatacaagaaagacagaataccatgcccaaaaaccagtctaaggtcagaaaaccaggaaatataagattagcaaaaccaatatccaaagtcagtctcagatagatattgaggttgaggttcaaaattttaaaaaatttaaaaagttagaagttaagatattttaaaggtaaacaagaaattattttctttcataatacagctttcatgcctgcagtattaatttcactcttgggtataaatagaagagtgttacaaagatccagaaaccagacacacactcaacaacagtgatttaaaaacaatcaagttttatttttaaaaaatcagtcattattgtaaacctgcaacagaaaaaacaaattaaaaatacgaattaaattctacttgggaaaaaaaagagaaatgtattgatactggttttgatcactggtgaagacttacraagcagagtaacaagaaagttatactttggagggaactatattattttatttttatggtttagactatgga

SEQ ID NO: 618314 - DNA, 563 bp, Homo sapiens
  misc_feature 1, 2, 3, 4, 5, 6, 7, 8, 9, 10, 11, 12, 13, 14, 15, 16, 17,18, 19, 20, 21, 22, 23, 24, 25, 26, 27, 28, 29, 30, 31,32, 33, 34, 35: n = A,T,C or G
nnnnnnnnnnnnnnnnnnnnnnnnnnnnnnnnnnntgaacttttctttgttggaagacattatattgttgattcaacctcgctactcattatttatttgttcaggttttgtatttctcctgattcaatcctggtaggttgtatgcatcaagaaaattatccatttcctctaggttttccagtttattggcagataattrttcataatcgtgtctaaaaatcttttgtatttctgtggtatccgttgaaatattgccttttctatttttgattttgtttattttggtcttccctcttctcatttagtctagctagcagtttatcaattttatttgtctttttgaaaaaataattttttgtttcattgatcctttttatttttatttcttgttttgtttagttctactctgatttttatgatttcttgtattctgctaatttggattcagtttattcttgcttttctagttccttgaggtgcatcattacattgttttcttgaaatctttgtacttttttgatgtatcagtttattgctataatcttccctcttagcacagctta

SEQ ID NO: 618315 - DNA, 447 bp, Homo sapiens
agttttactctatcttagatatttgatctgtgacaaaagcaaaatatgcttatttctcattaaaaagtgtatgtcaggctgggggttagcawaaaggcaagcagattgaaaaggctcagtcatgtgctgcctgcttgttttaatacttttgctccaaataagctcatgcatttccacagtttaaaattccacatgtgtctttggatgggtgtttcccttaagataaaatcaaatagaatcagaaagaatgtacccccccgacacacacatgcacatgtattactccttttttagtctcagttgtatactatggctattactggatggctgccagtattcatattggtgagatgcaatgtttgaaaaaaaattgaaaagatatttctccatattgctagaggaaatacatgatctaatgataagcaatgggtaaagatctttccagga

SEQ ID NO: 618316 - DNA, 616 bp, Homo sapiens
aacagaacaaaggatcaaagtcacatgattatctcaatagttgcagaaaaaaaatttgacaaaagtcaacacctttcatgatttaaaaaaattccaaaaaacttccaaaaagaatgaaattaacctgataaaggcaatatataaaaagcccataactaaaatactcaataatgagaagctgaaaggtttttctctaagatcaggagcaaggcaaggatgcytatgcttgctatctctatttaacatagcactggaagtcctagctagagcaattagtcaagagaaagaaatagaaggcatacaaatcagaaaggaagaagtaaaattttctctatttgcagaagacataattttatatgcagaaaatcctaaaaattcaacagaaaaaatcttagaagtaataaatttagcaaagttgaagatacaaaaacaacagaaaaattagtatcattttcatatactaacagtgaacactacaaaaaagaaatttaaaaatcaaatttaaaatatcataaaatagaaataaaacatttaagaataaacttaaccaagaatattaaagactggtgctatgaaaactacaaaacattgctgaaaaaaattgaagaggctacaa

SEQ ID NO: 618317 - DNA, 547 bp, Homo sapiens
aatatatcaactttccagcccaatgtcataatttagttttcaaggatcttgatcacyttccctttcacaagatatcacatggtttactatattgatgaccttatgttgattgaacacagtgagtgtgaagtagcaaatactctaagacatatgtcaggggttgagaaataaagctgactaaaattcaagggcctcctactttattgaaatttccagggatccgttgacatacagcatgaccagatattccttctaaggtgaaggataagttgttctatctggcttctcctaaaaccacgaatgcacaatgcctagtgtgcctatttggattttggagacaaaatattcctcatttgtgtgtgctactctgactctttaaccaaatgacctaaaaagctactagttttgagtgggtcccagaatgaaagaaggctctgaaacaggtcccaggatgctgtctgtacaagctgctctgccacttgggccatataatccaatggagccaatggtgcttgaaatatcagtggcagatagggatgctgtttgg

SEQ ID NO: 618318 - DNA, 547 bp, Homo sapiens
tcgcacaatgattcaggaatactcgtgttttgatcttgattgtagtaaacagtactatacattctagtaatcttcaaattgggcataggtgtgctcaggtactatatagataattcaatgatgtgcagaaaataaatattaaagtttctacttaaagctattattttaaaatgtctatttttacactttttataatatacataaaatcatacatagtagtatatgaatatacataaatagaaacaaaaatgttggaatatggatgcattaacaaacacttttttaatgaatgatgcctaagatcaatattttggaaatggttgacctgttaaayatgggagtggtgtcctagatattaagtattagcatagtaacttttcctgatattttcctgagattatgcttgttgaagaagcttattcatgggttctctctttataccaggtgttaagcaactcatacaatacatttgacaatggtgcttttcattgacatagaggtccacgtgtaaaatggtaaagcgggcaaagtttgttcgtcagaagca

SEQ ID NO: 618319 - DNA, 516 bp, Homo sapiens
agggggtgtggagaggacctggagggaaggtgtggctccattccagtaaacaagacactatcagctttgagaagcctggcagctactcatggcttaactaaatgaactttaatgttgtagatccaccaaaagttctatatattcatgctgacaccatttatttcagctttggggacaccttgactcagttcttgcattcacattgccttttagctgaagcttaggggtatggctccattgtcatgactaaaaccttcctttctccctcctccagcagagtagaaacaatcaaaacaccatttgagtgccttgtttaatcctttcactcactgctcagctttttaacattcagtaacaggtaggacagccagagccctttacttcttgccccccatcacttttgcaacagcatgcactaatggatctcagatagtcattttatattcctwgcctggcttgtaaggccctcatcctctctcctctagagagccatgtctctgtcagcaccctatcctc

SEQ ID NO: 618320 - DNA, 614 bp, Homo sapiens
caagttagcctgctacagtttcacggatgctggttggagacatgagactcgcaatcagagacaaataaatctattactcacaaggcagcaagcagcataccttcatgtttatgtctgtttttcttgaccccaaggctcacaactgtaatacaaagaagcacaagtggatgctgtgcacagtaggtttgtgtcacacctgaggaagctcaagtttggggaaccattatcttttctaatgagctgtaaagaaaactgattgaaatttgctttggagggagacatctgcattatattggggggtaaaaataccaatcctttgctctggaaaatgatagtttcartatatttcaatgctgtttgttttataaacatccttaaaaagatagtccagaacaaatggcagttaatgtcccctcttttcacagaaacgtaagatacccgtggaaacacgtctcccaacaagtatatgtgttgtaatgtaacaatatacaagtcataatgttaagtaatgaagtctcaaaggaatatgcataatatgattttgcttatgtaaagacatatgatgtttgggttgtgttcctctacatgtttctacaaaatcttaaacaacaaaa

SEQ ID NO: 618321 - DNA, 614 bp, Homo sapiens
caagttagcctgctacagtttcacggatgctggttggagacatgagactcgcaatcagagacaaataaatctattactcacaaggcagcaagcagcataccttcatgtttatgtctgtttttcttgaccccaaggctcacaactgtaatacaaagaagcacaagtggatgctgtgcacagtaggtttgtgtcacacctgaggaagctcaagtttggggaaccattatcttttctaatgagctgtaaagaaaactgattgaaatttgctttggagggagacatctgcattatattggggggtaaaaataccaatcctttgctctggaaaatgatagtttcagtatatttcaatgctgtttgttttataaacatccttaaaaagatagtccagaacaaatggcagttaaygtcccctcttttcacagaaacgtaagatacccgtggaaacacgtctcccaacaagtatatgtgttgtaatgtaacaatatacaagtcataatgttaagtaatgaagtctcaaaggaatatgcataatatgattttgcttatgtaaagacatatgatgtttgggttgtgttcctctacatgtttctacaaaatcttaaacaacaaaa

SEQ ID NO: 618322 - DNA, 645 bp, Homo sapiens
gttttatatactttcagtctttttgtctttctgtgtccacttttatttatgtgaaaaataacaaagaattttgataatctgaaatttttgtaaaatgactcaagtttcttcactgtttttcattcattcattgaygaagtatttattcagtacttaaatatgacaagcactcttctacatgctagccatacagaggttaacacaacaatatgtcatcatgaaactaatattctaatgggaaacaaacagtaaacagaaaaataaacattctaatgtgctacaaaaaataaaaagtagaataagggtatagagctttataaatatgttcctttaggtagaatagtaatggaacggctctgtttggaacaaacacatgaaaaaagtgacagaatgaaccatgcaaagttgatagtgaaagaaggcagtcacgtaaaaaaataacatcttaaacttaaatttttacagttgacaggtgtaaaaaaaacacagaggttttaaatgttcagtagttttaagttgtatataaacatatcaacctaataattatctctcccacatagggttgagacagttagacaagaatattaaaataactagtaaagataaaaaaggaatatgttaagccatgataatttgaaaggaaat

SEQ ID NO: 618323 - DNA, 645 bp, Homo sapiens
gttttatatactttcagtctttttgtctttctgtgtccacttttatttatgtgaaaaataacaaagaattttgataatctgaaatttttgtaaaatgactcaagtttcttcactgtttttcattcattcattgacgaagtatttattcagtacttaaatatgacaagcactcttctacatgctagccatacagaggttaacacaacaatatgtcatcatgaaactaatattctaatgggaaacaaacagtaaacagaaaaataaacrttctaatgtgctacaaaaaataaaaagtagaataagggtatagagctttataaatatgttcctttaggtagaatagtaatggaacggctctgtttggaacaaacacatgaaaaaagtgacagaatgaaccatgcaaagttgatagtgaaagaaggcagtcacgtaaaaaaataacatcttaaacttaaatttttacagttgacaggtgtaaaaaaaacacagaggttttaaatgttcagtagttttaagttgtatataaacatatcaacctaataattatctctcccacatagggttgagacagttagacaagaatattaaaataactagtaaagataaaaaaggaatatgttaagccatgataatttgaaaggaaat

SEQ ID NO: 618324 - DNA, 645 bp, Homo sapiens
gttttatatactttcagtctttttgtctttctgtgtccacttttatttatgtgaaaaataacaaagaattttgataatctgaaatttttgtaaaatgactcaagtttcttcactgtttttcattcattcattgacgaagtatttattcagtacttaaatatgacaagcactcttctacatgctagccatacagaggttaacacaacaatatgtcatcatgaaactaatattctaatgggaaacaaacagtaaacagaaaaataaacattctaatgtgctacaaaaaataaaaagtagaataagggwatagagctttataaatatgttcctttaggtagaatagtaatggaacggctctgtttggaacaaacacatgaaaaaagtgacagaatgaaccatgcaaagttgatagtgaaagaaggcagtcacgtaaaaaaataacatcttaaacttaaatttttacagttgacaggtgtaaaaaaaacacagaggttttaaatgttcagtagttttaagttgtatataaacatatcaacctaataattatctctcccacatagggttgagacagttagacaagaatattaaaataactagtaaagataaaaaaggaatatgttaagccatgataatttgaaaggaaat

SEQ ID NO: 618325 - DNA, 584 bp, Homo sapiens
aattgtacttaacaaaatatcttattgatcagaaatgtttttgtattcccagaaacttcactattaaatgccagtraggaagactcatttagagacatgtaaatgtcagatataagaatggagttctggagatatatacaaagtggattggtatctgatctcttctgtgagattaacctctagctcactatcatttataccactttttctggctctggggtttggagactgctgtggctggctagaaagccctaagcaaatttttctatcattttacataattcccaggaagcaaggtgatcatatttcccagtctaaaataaggtctagggatctgataaaagatagtttggtctactttctgaaaatattgttaatacacaaatatattgtaatttatgtgattttcaatgaaatatggtgacagtccccatttcaaatattctatcttggaaaattcataataaatgaccttattaccagtagtacttctgttaatctgcataaaatgcattcaatgaacacacaataaatgtcacacatgatgaaagtttgcctgtgatagcttgttcaatcctttccaa

SEQ ID NO: 618326 - DNA, 609 bp, Homo sapiens
tggaataaaatcgttcaatacaattccctctccagttcttcctgttaaaataaagtgaatcggctgagcgtggtggctcacacctgtaatcccagcaatttggtaggcctcagcctcaggtggataacctgaggtcaggagttggctaggaccagcctagccaatgtggtgaaaccctgtctctactaaacatacaaaaaattagccaggcatggtggcacatgcctgtaatcccagctactcgggaggctgaggcaggagaatcacttgaygcccggagggggagattgcagtgagccgagatctcgtcattgcactccaacctgggcaacaagagtgaaactccgtctcaaaaaacaaacaaacaaaaaaataaagtaactcacaagcataatggcagccaacctcttttggaaagcaaacgacatatttttgaaatcaataagtgaccctgcagctagcagcacacaatcaccctctcatgaaccaagttcaggtggaactattcttaaagcacaactaggagaccaggtggcaggattctcatgcaaaggtggagcacttcccactgagcaggctctctgagtctcaccacagggtgatggaata

SEQ ID NO: 618327 - DNA, 538 bp, Homo sapiens
aaacactcaaaaaagaaaaagaatcaaagcatattagtacaaaagaatcaacataaaggaaagcagtaagagaagaaaaaagagagaaaagagarctaaaagacagaaaattaacaaaatggcaactgtaagtccttccctatcaataattagtttatatgttaaaaaatgaaattccacaattaaaagatataaagtgggtgaaagggtaaaaaaaaaagattcaactatatactgtctaaacagacttactttagatttaaggacacgcataagccaaaaaaaggaatagaaataaatatttcatgtcagtggtaaccaaaagagacaagattttctgcacttatttccagacgagaaagactttaacacaaaaactgtcacaagagacaagaaaggacattatataaagataaaatgtttatttcatcaggaaactataacaattacaatacatatgcactcaacattagaggacctaaatatataaagcaagcattaactgaactgacaagataaatatagaaagcaatataat

SEQ ID NO: 618328 - DNA, 506 bp, Homo sapiens
gcttcaggaacaaagtagttcctgtttttaatcattttatggaagaaagttgggttggaggaatctagaaaaactcagaatttagtcaagtccacagttacataatgaagacttgaaaacagtacacagagctacaagctaataactgatatatattatagcttttcttgagaaatacaattttttctctatatgttgattacaaaggaatctcagattttaaaaatcacttgagtctagcaagctaaaccaaggcagactctatatttcacctatagtcttaaggttcctgggcatgccaggaagtgacgattcttatttactcactgtaaggctgasaactcttgaagtcaggcattacacgcatattttaaaatatgacatttcagtcaaagccttggcaatataactaatgtcttcaattgtatcctactataaagagagagcagatttttactggacttgtgtaaataaccatactgccataagaatactcatgaatagat

SEQ ID NO: 618329 - DNA, 519 bp, Homo sapiens
tagtcaagtccacagttacataatgaagacttgaaaacagtacacagagctacaagctaataactgatatatattatagcttttcttgagaaatacaattttttctctatatgttgattacaaaggaatctcagattttaaaaatcacttgagtctagcaagctaaaccaaggcagactctatatttcacctatagtcttaaggttcctgggcatgccaggaagtgacgattcttatttactcactgtaaggctgacaactcttgaagtcaggcattacacgcatattttaaaatatgacatttcagtcaaagccttggcaatataactaatgtcttcaattgtatcctactataaagagagagcagatttttactggacttgtgtaaataaccatactgccataagaatactcatgaatagattctaaattctgaaggaatccagtagagataaaaagcaaatgtttccaacttgtttacaaaagtatacyttaccaaattgctgtaaactatagtta

SEQ ID NO: 618330 - DNA, 605 bp, Homo sapiens
tacaaagttattttaatttttaacctaaaaatatatctttaaatctataactttctttatatctctctctcctacttatgatttactttatatcttaattttatttgttaaatacatatttaaataacccccaaattagacaaaatatttttctttttaataaaaaacacattttatgtttttcttataattttatatgtattaatacacccaactatatttagtctttttatgaaatttaagaaaccaagaacagatctatgttcagcaatttgtttccatttttwatcttatttttagaaatgacccacttaataagtacctattatttaacataactttaagatttcaaagtacataaaaagtctgtttataaacatttatctcatttacattgacttaatttatttttaataatttactcagactacttattagaactgagatattagacaaagctactcattatttcaagctatttttctattaaccattttcacagcctacgaatatctgatattcacctaagtaagaaccttaaagttaaatatatgggtactttaagggggtggagcaagatgatggaagagaagtctccaccaatc

SEQ ID NO: 618331 - DNA, 577 bp, Homo sapiens
caggttgcctgtccactggcatttattttcctctggtttcttactaacaaaacccctgttttatcagggacaatttcccttacttaaaaacattcaatttccctctgcagtagtcatatgacacagctccagccaatgagatgggaaaacactgcattcccggtcccattcttggaaagtcatgtgacacagctccggccaatgagagaggggcagaggttgctgcagggcattctgggaaagcctgcaggactccactagaacagccattgcccatcctgacaggggacttgggtcccagagaaggagcagccaccatgctgtgacctcagggcatccacacacatggaggacatgaaggggaaatagaggaggagactggccctgatggcatcttggagctgctgggccttcactagtggccactaccagatgtcccttgaagtgrgaaaaataaatccctaatttgtttaggcctctgttggccaggtttccatcattctgggcacagcattcctgagtatacaagtagcagtgggagatggaggttttggggggtgtagacagtgcaccagat

SEQ ID NO: 618332 - DNA, 524 bp, Homo sapiens
ttcttctctgctggactccagtctggatggaaatcatctggccaccaagaagggggatctgaacatggcctcacatgaggaagagattttttaaaatatggaggaggcactgatgggattcatcatttgagcccctgcaacaaggccccgccatscatccctgagcttttcagtggcataaaaccattaactcccttctgagttcaagctgggatgagctgagtttcctattacataaaataaaagagcctagctgtctcccctctagcacctatgtctccaagctgagaccagcacaaaactttgctgcctcagcctcttctctctaggtgtgaggttcatctctccctgcccattctcccccattttctcctttcccacagagaaggctgccaaaactacccagtaatggcacctccaaggatgaggacacattagccctagtctctaatgaaccgagcagccctgtcaccaccagacccggcatcacacagtgacctggagggctgccgagtcagcactgt

SEQ ID NO: 618333 - DNA, 524 bp, Homo sapiens
ttcttctctgctggactccagtctggatggaaatcatctggccaccaagaagggggatctgaacatggcctcacatgaggaagagattttttaaaatatggaggaggcactgatgggattcatcatttgagcccctgcaacaaggccccgccatgcatccctgagcttttcagtggcataaaaccattaactcccttctgagttcaagctgggatgagctgagtttcctattacataaaataaaagagcctagctgtctcccctctagcacctatgtctccaagctgagaccagcacaaaactttgctgcctcagcctcttctctctargtgtgaggttcatctctccctgcccattctcccccattttctcctttcccacagagaaggctgccaaaactacccagtaatggcacctccaaggatgaggacacattagccctagtctctaatgaaccgagcagccctgtcaccaccagacccggcatcacacagtgacctggagggctgccgagtcagcactgt

SEQ ID NO: 618334 - DNA, 572 bp, Homo sapiens
ggttgccccacaactatcttgtcgtttgggcaggaaggccccttgcccacatctctgagtgtcacctctgggccatctcaatgtcgacccactctcctgctgcccaggggtgcccggggcctcctcagatggtcagtagtgggacaggtgagggctggaagccagggtaccacacctcaccccagtcaacagtcatctgtgcacccaactcaagtcaccgacactgacagatttgaacacctgctgccaggaaccatactgagagctgcccataggcccacccccgtggccctcacaaccaccctgtcaggaggattcatctgctctgcctcccaggtggggaaactgaggcattgagaggtgaagccactgccccaaggtcacccacatgcccctaaggaacytgaagggtcagaggagaagggaacacacatacctccctccttcccactgcccctgtctgcagagacatggtttccagtaacctccagggacagcctcctggaatctccccttcaaatccttcctgaccaatgtttacctgaaatcatcccactgatcccaccaagcaa

SEQ ID NO: 618335 - DNA, 509 bp, Homo sapiens
cttgttcaagcgacagtcactggggcattgtgtctgcagagaagtctgctccactttgaactttgtggcaattacaaaatggcttgttatccaaaatgatttgtggaggtggaaagrtttcagatgaagaactcagtggtgggactgctggacccaggcagaaatgcaaggccatcagttagccattcgggtaaaacacaatgaccgtcatgaaattttaattaaactcttacttgtgtgaataatgaagcgtagattcttcagtgctgacttcctcaggccttctctgaaaggaaagctctgcttcaggtgcatggctctgtgagaatctgcaaatgtcccctctactgaggagccaaagatggatcttcaccgctgtaagcccagaaagctgctcctatgaactctcctccagggaggtcagtttctccccatttcctgcctggattggccccgcaggaagtggcaggtgaaaggagtggatgggaagaagagaaaaaaaggcaagg

SEQ ID NO: 618336 - DNA, 505 bp, Homo sapiens
ttgatgatggaactattctgaatcttgactatcgtggaagataaccaaaccaacacaggtgttaaattgtatagcgctaaatacacacacacacacgcacacaaaatacaagtaaaaactggaaatctgagtaagatgggtgggttgtaccaaggtcagtatcctggttgtaatttgtcctatagttttacaagatgttaccatgggtggaaactgggtcaagggtacacaaaatctctctgttttcctccttttctttttataaattaaacttttaaattctcccacagggatgaggaggacttcytgagctgggtgcttccttgctggtgtcatgggtggagctttcattaaatccagtggggaggaagaagcctacttgggccaccttctgttgggagcagtagagaaactctgggcctgggtctcctgggtgggtgaaggggtctgagatgcccgctactatactgttcctccagtcctggggtccttaaccagtcacatt

SEQ ID NO: 618337 - DNA, 554 bp, Homo sapiens
ttcactactatgcctgtctcacctcctggttgtatacccctaaggatgggaagctcactacctctcaagacatctcaggacagctttgacttggaaagtccttccttcaggccacattgagggcatctacttcatattccacatggcagcacatgtatttgaagataattctcatccttccagggattttctgtccccaggttctacaatcccactcctttggcattcctcattaaacagcccctccaaccaagcttctctctctcttttgagctctctgatgcaacttcccagggaaggtctgcccagggcagggcccaactgagccctctctctgtcccaaggatccagcagggccctggctcaagtttccctcttttgttttttgttttgttttgttttgcttttrtttttgtttttttgttgacccttcctgaatgaggagccatctgcccagacatggggttggtcatggacaattgggtaaattctcctttattccccaacctgttcacctgattcctgtcagaaatgttccgcctgaactgtagcag

SEQ ID NO: 618338 - DNA, 377 bp, Homo sapiens
aagtaacaggagtagaaagatattgggtgyttattccctggctccctccctcttaactatagctgcaatggctctctttctctcttgaagccccagctccatctggtgacccctcttctgaggctgcagctctctctgaggtctggtaacagcttctttctggaccgggatggaaacagccccccactgttgccggcccccagtggcctcaccatcccctgctgccttcctgtatccctgccacaccttggtgaattgccctccattaccctcccttcaatcaccctctcccattggtccttggtggtctgctccctgctaagaccctgactgatagtggatactccttgatgagcattcagatttcatttgaagtg

SEQ ID NO: 618339 - DNA, 363 bp, Homo sapiens
gtaacaggagtagaaagatattgggtgcttattccctggctccctccctcttaactatagctgcaatggctctctttctctcttgaagccccagctccatctggtgacccctcttctgaggctgcagctctctctgaggtctggtaacagcttcyttctggaccgggatggaaacagccccccactgttgccggcccccagtggcctcaccatcccctgctgccttcctgtatccctgccacaccttggtgaattgccctccattaccctcccttcaatcaccctctcccattggtccttggtggtctgctccctgctaagaccctgactgatagtggatactccttgatgagcattcagatt

SEQ ID NO: 618340 - DNA, 377 bp, Homo sapiens
aagtaacaggagtagaaagatattgggtgcttattccctggctccctccctcttaactatagctgcaatggctctctttctctcttgaagccccagctccatctggtgacccctcttctgaggctgcagctctctctgaggtctggtaacagcttctttctggaccgggrtggaaacagccccccactgttgccggcccccagtggcctcaccatcccctgctgccttcctgtatccctgccacaccttggtgaattgccctccattaccctcccttcaatcaccctctcccattggtccttggtggtctgctccctgctaagaccctgactgatagtggatactccttgatgagcattcagatttcatttgaagtg

SEQ ID NO: 618341 - DNA, 546 bp, Homo sapiens
tctcctctctgcctctcactccagtcctccacctccaccccctcctttctctccctccttcctttcagtgactgtgtttattttcagaacctcgaaagtcttcccacgcctctgacatttactctttggaattagaatattttctatttctttttcccaaagcgaggctgttgggtaagatttccctggggttcctacctgcccttctggaggtgaagtgctggggccaaagctggcataagtcagcccagcactgactgcgtcagccagcaattattaggcacccactgtgcaccaggcctttctcatgaattatcrcgttcagtccatgtaagaactctggggggggttggtggtaccatctgcacatatcagatgcatgaactggaggctaagtaatgagtctgtgctccttcagcaagtgagggacggaacagggataaaactcatacttctgtcactccaaagtccatttctttcctctgtgctctgcttgcagggttcatgggtttactggtgcattgaagggcatgcagcatttgggca

SEQ ID NO: 618342 - DNA, 546 bp, Homo sapiens
tctcctctctgcctctcactccagtcctccacctccaccccctcctttctctccctccttcctttcagtgactgtgtttattttcagaacctcgaaagtcttcccacgcctctgacatttactctttggaattagaatattttctatttctttttcccaaagcgaggctgttgggtaagatttccctggggttcctacctgcccttctggaggtgaagtgctggggccaaagctggcataagtcagcccagcactgactgcgtcagccagcaattattaggcacccactgtgcaccaggcctttctcatgaattatcacgttcagtccatgtaagaactctggggggggttggtggtaccatctgcacatatcagatgcatgaactggaggytaagtaatgagtctgtgctccttcagcaagtgagggacggaacagggataaaactcatacttctgtcactccaaagtccatttctttcctctgtgctctgcttgcagggttcatgggtttactggtgcattgaagggcatgcagcatttgggca

SEQ ID NO: 618343 - DNA, 619 bp, Homo sapiens
cccaggctgctgcaatagggtacaacaaactgggtggcttaaaacaacaaaagtattctgtctcagaatcaggaggccagtggcccaaatcaaggtgtgggcagggctgtgctccgtctgaagatgctggggaaggatctgttcaggcctctctacaagctcatggtaacctcagacattccttggccatcttctccccatgtctcctcacatcatcttccctctgtatcatctctgtgtccaaatttcttctttttataagaacctcagtcatgttggattatggcccacactaatgactaatgatctcgttttaattggattacctctgtaaaggccttattttctttctttttttttttgagatggagtctcgctctgtcaccaggctggagtgcagtggcatgatctcagctcactgcaaactctgcctcccgggttcaagtgattctcctgcctcagcctcccaagtagctgggactacaggcacgcgccaccatgcccagctaatttttgtattttttagtacagacggagtttcaccacgttgaccaggctggtctcgatctcctgamctggtgatccacccgccttggcctcccaaagtactgggactaca

SEQ ID NO: 618344 - DNA, 601 bp, Homo sapiens
tgatgtttactctgtgtgtgtgtgtttttaaataatggcttttattatgttgaggtagttccttttcattcttggtttggtgagtatttttttttttatcatgagatgatcatgtgttttattttccattgagatgatcatgtggttttgtttcatcattcttttaatgagatatattacattaatcaattttcttgtgttgaattatccttgcattccaggaagaaattttgctaggtcttcgtgtataacatttttatatgctgccaaatttggtttgttagtattttgttgagaatttttacatcattgttcataaaggatatttgtagttttcttgtagatgactttggtatcagggtaatrttggcttaatagaatgagttagaaagtgttccttgctcttcactatttttggaaaagtttgagaataattgggattagttctttaaagacttggcagaattcacccatgaagttttcagatgcagagattgtctttgttgagagatttctgattactgattcaattatgttattataatagttataggtctattcagattttctatttctttgtgatctggtgttcatagatttt

SEQ ID NO: 618345 - DNA, 567 bp, Homo sapiens
gtcttctttctttttttcttagttcatctaagtaaaagtttgtcaattttgttaatcttttcagagaacaaacttttggttttattggttttctcttgttttcgtattatctatttcatttatctctgctccaattttcattgttttcttccttcttctagctttggctttagtttgttcttctttttctagtttgttaaattgtaacattaggttgctgatttcagatctttcttgctttttaaaatgtaatcatttrtagctataagttttcctcttagcactgctttcactgcatcccatatgttttggtatggtatgttgtgttttcattttcactcatctttaagtattttcaagtttcccttagatttcttctttgatccattcgttgtttaagagtgtgttgtttgattcccatgaatttgtgaattttccagttttacttctattactgatttctaactttattccattgtggttggagaagataccttgtaatctatattttgaaatatattgagacttaattttttgtctaatgtgtatttggtcctggaaaacttc

SEQ ID NO: 618346 - DNA, 450 bp, Homo sapiens
tgttctggaatcctatgtgacagaaaaacattccgaccacagcagcagtgttctggaatcctatgtgcggtacaaactttcagaccacagcaggagagttctggaatcctatgtgagggacaaactttcagaccccaggarcagtgttctgaaatcctatgttaagggcaagcatttacatcccagtgtgaatgttctcgaatcctaggtaagggacaaacattcagaccacagcaggagtgttctcgaatcctatgtgagggacattcagaccctcttagcagtgttctggagccctatgtgatgaacaatctttcagaccacagcaggagtgttctggaatcctatgtgagggtcattcagaccacagcaggagtgttctggaatcctatgtgagggtcaaacattcagaccccagcagtagtgttctggaatcctatgtgagggcaa

SEQ ID NO: 618347 - DNA, 191 bp, Homo sapiens
gtgcctggagcctacccaacctgacgcccccaaagccctcacagggtctgacctcccagcatgcacctgcctctccctgaaccccaactgcccaccctgcctgttccctggcctcctycatcctgtgcagcccatagactgtgaccatctctccagccactctggcccttcctttacctttgtcctgtcag

SEQ ID NO: 618348 - DNA, 191 bp, Homo sapiens
gtgcctggagcctacccaacctgacgcccccaaagccctcacagggtctgacctcccagcatgcacctgcctctccctgaaccccaactgcccaccctgcctgttccctggcctcctccatcctgtgcagcccatagactgtgaccatctctscagccactctggcccttcctttacctttgtcctgtcag

SEQ ID NO: 618349 - DNA, 564 bp, Homo sapiens
tgacacataacaaaaaaagtaaacaatggattaagacattgaaatggcccacatgctggaattagaagatragaaatttaaaataagctattataagcatattcaaggatttaaggaatagatggtcataagagagaatatatggagaatctcaacagagaagtaaaaatgataaagggataataggacaaattttagaactgagagacagaatatcttatataaaagtgtcattttatgcacataccagtaaattaaagatggcagaaaaaactatcagtgcacttaaaaacagatcaagaacaatttcccaatacagctaatacaaaggagaaaaataataaaaatatgaccagtagcactaacataattggactcctagaaagagtagagaagaaaatgagacagaaaaagctatttgaaaaagtaaagaccaaaagttttcctaattgtcagcatatatcaacttacaggtttaagaaactcaaagaacagaataaaaatatacagaaccaaatgtagacataccatagtcaaaccactgggcaaaaaaagagtaaatct

SEQ ID NO: 618350 - DNA, 562 bp, Homo sapiens
actaatgttagaaaagagtcactcttcaaaggaaaataaaagagcctatctctacaaaatatcatacacataatctaacatataatttaacctgcctagacatagaaccaggaaaatatgacacataacaaaaaaagtaaacaatggattaagacattgaaatggcccacatgctggaattagaagatgagaaatttaaaataagctattataagcatattcaaggatttaaggaatagatggtcataagagagaatatatggagaatctcaacagagaagtaaaaatgataaagrgataataggacaaattttagaactgagagacagaatatcttatataaaagtgtcattttatgcacataccagtaaattaaagatggcagaaaaaactatcagtgcacttaaaaacagatcaagaacaatttcccaatacagctaatacaaaggagaaaaataataaaaatatgaccagtagcactaacataattggactcctagaaagagtagagaagaaaatgagacagaaaaagctatttgaaaaagtaaagaccaaaagtttt

SEQ ID NO: 618351 - DNA, 564 bp, Homo sapiens
tgacacataacaaaaaaagtaaacaatggattaagacattgaaatggcccacatgctggaattagaagatgagaaatttaaaataagctattataagcatattcaaggatttaaggaatagatggtcataagagagaatatatggagaatctcaacagagaagtaaaaatgataaagggataayaggacaaattttagaactgagagacagaatatcttatataaaagtgtcattttatgcacataccagtaaattaaagatggcagaaaaaactatcagtgcacttaaaaacagatcaagaacaatttcccaatacagctaatacaaaggagaaaaataataaaaatatgaccagtagcactaacataattggactcctagaaagagtagagaagaaaatgagacagaaaaagctatttgaaaaagtaaagaccaaaagttttcctaattgtcagcatatatcaacttacaggtttaagaaactcaaagaacagaataaaaatatacagaaccaaatgtagacataccatagtcaaaccactgggcaaaaaaagagtaaatct

SEQ ID NO: 618352 - DNA, 488 bp, Homo sapiens
taaagctccagaagtgtatcagagtagctataatttgcattgtgaagggcccaatggacaacctgggactgttcaaccaattgcaacttctgtacctataaatttatgggggagagatttattatgacaatggggagcacaagttctaattccataacaattatacagccctcaaagtcaacatatgatgcacgaaatggggcatgtccctggtataggagtagaaaaaaaattgcaagktttgaaagaactgcttcaaacggaaagacaaagttcctgccaaagattaggataccatttttgatggtggccatagttaagcctccagaacctatacctttaaaatggttaacacataagccaatttggatagaataatggctgctaagcaaagagaaactggatgctttagagaaattagttactgaacaattagaaaatgggcacatagctccaacattttcccctttgaattctccagttttcat

SEQ ID NO: 618353 - DNA, 343 bp, Homo sapiens
acatatgatgcacgaaatggggcatgtccctggtataggagtagaaaaaaaattgcaagttttgaaagaactgcttcaaacggaaagacaaagttcctgccaaagattaggataccatttttgatggtggccatagttaagcctccagaacctatacctttaaaatggttaacasataagccaatttggatagaataatggctgctaagcaaagagaaactggatgctttagagaaattagttactgaacaattagaaaatgggcacatagctccaacattttcccctttgaattctccagttttcataattaagaaaaaatcaggtaaatggagaatgttaa

SEQ ID NO: 618354 - DNA, 343 bp, Homo sapiens
acatatgatgcacgaaatggggcatgtccctggtataggagtagaaaaaaaattgcaagttttgaaagaactgcttcaaacggaaagacaaagttcctgccaaagattaggataccatttttgatggtggccatagttaagcctccagaacctatacctttaaaatggttaacacataagccaatttggatagaataatggctgctaagcaaagrgaaactggatgctttagagaaattagttactgaacaattagaaaatgggcacatagctccaacattttcccctttgaattctccagttttcataattaagaaaaaatcaggtaaatggagaatgttaa

SEQ ID NO: 618355 - DNA, 562 bp, Homo sapiens
actaatgttagaaaagagtcactcttcaaaggaaaataaaagagcctatctctacaaaatatcatacacataatctaacatataatttaacctgcctagacatagaaccaggaaaatatgacacataacaaaaaaagtaaacaatggattaagacattgaaatggcccacatgctggaattagaagatgagaaatttaaaataagctattataagcatattcaaggatttaaggaatagatggtcataagagagaatatatggagaatctcaacagagaagtaaaaatgataaagggataataggacaaattttagaactgagagacagartatcttatataaaagtgtcattttatgcacataccagtaaattaaagatggcagaaaaaactatcagtgcacttaaaaacagatcaagaacaatttcccaatacagctaatacaaaggagaaaaataataaaaatatgaccagtagcactaacataattggactcctagaaagagtagagaagaaaatgagacagaaaaagctatttgaaaaagtaaagaccaaaagtttt

SEQ ID NO: 618356 - DNA, 564 bp, Homo sapiens
tgacacataacaaaaaaagtaaacaatggattaagacattgaaatggcccacatgctggaattagaagatgagaaatttaaaataagctattataagcatattcaaggatttaaggaatagatggtcataagagagaatatatggagaatctcaacagagaagtaaaaatgataaagggataataggacaaattttagaactgagagacagaatatcttatataaaartgtcattttatgcacataccagtaaattaaagatggcagaaaaaactatcagtgcacttaaaaacagatcaagaacaatttcccaatacagctaatacaaaggagaaaaataataaaaatatgaccagtagcactaacataattggactcctagaaagagtagagaagaaaatgagacagaaaaagctatttgaaaaagtaaagaccaaaagttttcctaattgtcagcatatatcaacttacaggtttaagaaactcaaagaacagaataaaaatatacagaaccaaatgtagacataccatagtcaaaccactgggcaaaaaaagagtaaatct

SEQ ID NO: 618357 - DNA, 562 bp, Homo sapiens
actaatgttagaaaagagtcactcttcaaaggaaaataaaagagcctatctctacaaaatatcatacacataatctaacatataatttaacctgcctagacatagaaccaggaaaatatgacacataacaaaaaaagtaaacaatggattaagacattgaaatggcccacatgctggaattagaagatgagaaatttaaaataagctattataagcatattcaaggatttaaggaatagatggtcataagagagaatatatggagaatctcaacagagaagtaaaaatgataaagggataataggacaaattttagaactgagagacagaatatcttatataaaagtgtcattttatgcacataccagtaaattaaagatggcagaaaaaactatcagtgcacttaaaaacagatcaagaacaatttcccaatacagctaatacaaaggagaaaaataataaaawtatgaccagtagcactaacataattggactcctagaaagagtagagaagaaaatgagacagaaaaagctatttgaaaaagtaaagaccaaaagtttt

SEQ ID NO: 618358 - DNA, 602 bp, Homo sapiens
ataccatagtcaaaccactgggcaaaaaaagagtaaatcttgaaagtagctaaagggagggagaaaataatttacatacgtggaaacaaataggtcatctacctgtcatcagaaatgacactttaaaaagcaatgaaactacatcttcaaaataaaaaaaaaaaactgtcagctccaaattctataactagaaaaagtaattcttgagaaaataaagatttattcagataaaagaaagcttcraacaattgtcattagcagacctagatacaagaaatgcaaacggaaattttttagactaaagaaagataacaacagatggaaattctgacctacaggaagtaaggagaagctctaggaatggcatgtgcataaacaggaaaaactaaggcttttttcttttagttttataacaaacaactgatggtttaaataaaaaattaagagtactattgataacgtatgtagagtaaaatattctaaattaatagctctgacaggagtctaaatgcaacaattttgccacaacttttctttatgttccatgaaaacgttgactattaacagtaagtggactgcgataagcccaggatgtttattac

SEQ ID NO: 618359 - DNA, 608 bp, Homo sapiens
aacaattttgccacaacttttctttatgttccatgaaaacgttgactattaacagtaagtggactgcgataagcccaggatgtttattacaatccctagagaaccaccacattatatgaagatattcttctaaaatgccaataaaggaattaaaatggaacgctgaatattgttcagttaatataaaaaggcatgaaagaaagaacagaggagcaaaaaatgatggaacaaatagaagataagagcaaaataggctgggcgcggtggctcagcctgtaatcccagcactttgggaggccgaggcgagtggatcacgaggtcaggagatcgagaccatcctggctaacacggtgaaaccycatctctactaaaaatgcaaaaattagccgggcatggtggcgggcacttgtagtcccagctactccggatgctgaggcaggaaaatggcatgaatccgggaggcagagcttgcagtgaggcgagatcccgccactgcactccagcctgggcgacagggacagactccgtctcaaaaaaaaaaaaaaaaaaaaaaaaaagcaaaaatagtaggcttaactccaaccttatcaataattatttcaaatgta

SEQ ID NO: 618360 - DNA, 608 bp, Homo sapiens
aacaattttgccacaacttttctttatgttccatgaaaacgttgactattaacagtaagtggactgcgataagcccaggatgtttattacaatccctagagaaccaccacattatatgaagatattcttctaaaatgccaataaaggaattaaaatggaacgctgaatattgttcagttaatataaaaaggcatgaaagaaagaacagaggagcaaaaaatgatggaacaaatagaagataagagcaaaataggctgggcgcggtggctcagcctgtaatcccagcactttgggaggccgaggcgagtggatcacgaggtcaggagatcgagaccatcctggctaacacggtgaaacctcatctctactaaaaatgcaaaaattagccgggcatggtggygggcacttgtagtcccagctactccggatgctgaggcaggaaaatggcatgaatccgggaggcagagcttgcagtgaggcgagatcccgccactgcactccagcctgggcgacagggacagactccgtctcaaaaaaaaaaaaaaaaaaaaaaaaaagcaaaaatagtaggcttaactccaaccttatcaataattatttcaaatgta

SEQ ID NO: 618361 - DNA, 509 bp, Homo sapiens
ctccagaccctgtttgcctgggtatcaccagtggaggctcagttggaaatgcatgaaccacctgccttctgtgttgatcycactgggtgctgcagaccggagctgttcctattcagacatcttgccagctctcctgtaatacttttatgaatgggtgtagtcctatcttctcaaggtccccaaataacttgaggttcctgggcccgtcagaaagtgtcattctttacttcttaccacaaggacagcaactttgtaaaggacccttgtagacaagacaccaagccagtcattctaaggggctttgcattggtgctataaagtcaacctcaattccttaaagtggtctggttgtatctgccgttcgagttaaagccttgataaaacaaacagtgtctccaattgaatcctgttaccaaaaacagattcttattgaaattatgcaaataattatattgccataatttaggagtgctcacgaaagtcttctgaattctggagaaatcagttag

SEQ ID NO: 618362 - DNA, 285 bp, Homo sapiens
gaaatgcatgaaccacctgccttctgtgttgatctcactgggtgctgcagaccggagctgttcctaytcagacatcttgccagctctcctgtaatacttttatgaatgggtgtagtcctatcttctcaaggtccccaaataacttgaggttcctgggcccgtcagaaagtgtcattctttacttcttaccacaaggacagcaactttgtaaaggacccttgtagacaagacaccaagccagtcattctaaggggctttgcattggtgctataaagtcaacctcaa

SEQ ID NO: 618363 - DNA, 285 bp, Homo sapiens
gaaatgcatgaaccacctgccttctgtgttgatctcactgggtgctgcagaccggagctgttcctattcagacatcttgccagctctcctgtaatacttttatgaatgggtgtagtcctatcttctcaaggtccccaaataacttgaggttcctrggcccgtcagaaagtgtcattctttacttcttaccacaaggacagcaactttgtaaaggacccttgtagacaagacaccaagccagtcattctaaggggctttgcattggtgctataaagtcaacctcaa

SEQ ID NO: 618364 - DNA, 285 bp, Homo sapiens
gaaatgcatgaaccacctgccttctgtgttgatctcactgggtgctgcagaccggagctgttcctattcagacatcttgccagctctcctgtaatacttttatgaatgggtgtagtcctatcttctcaaggtccccaaataacttgaggttcctgggcccgtcagaaagtgtcattctttacttcttaccacaaggacagcaactttgtaaaggacccttgtagacaagacaccaagccagtcattctaaggggctttgyattggtgctataaagtcaacctcaa

SEQ ID NO: 618365 - DNA, 509 bp, Homo sapiens
ctccagaccctgtttgcctgggtatcaccagtggaggctcagttggaaatgcatgaaccacctgccttctgtgttgatctcactgggtgctgcagaccggagctgttcctattcagacatcttgccagctctcctgtaatacttttatgaatgggtgtagtcctatcttctcaaggtccccaaataacttgaggttcctgggcccgtcagaaagtgtcattctttacttcttaccacaaggacagcaactttgtaaaggacccttgtagacaagacaccaagccagtcattctaaggggctttgcattggtgctataaagtcaasctcaattccttaaagtggtctggttgtatctgccgttcgagttaaagccttgataaaacaaacagtgtctccaattgaatcctgttaccaaaaacagattcttattgaaattatgcaaataattatattgccataatttaggagtgctcacgaaagtcttctgaattctggagaaatcagttag

SEQ ID NO: 618366 - DNA, 351 bp, Homo sapiens
tggcatgaatccgggaggcagagcttgcagtgaggcgagatcccgccactgcactccagcctgggcgacagggmcagactccgtctcaaaaaaaaaaaaaaaaaaaaaaaaaagcaaaaatagtaggcttaactccaaccttatcaataattatttcaaatgtaatttaaatactccaaataaaacacagattgtccaactatataataaaagtacctataagagatgcatgccaaatattatggtatagataagttgagagttaaataatttccaagtataccaaggaaacaacaagcacaagaaatcttatgtggctatattaatataagaaaaagtaggacttccaaa

SEQ ID NO: 618367 - DNA, 618 bp, Homo sapiens
aggcaggaaaatggcatgaatccgggaggcagagcttgcagtgaggcgagatcccgccactgcactccagcctgggcgacagggacagactccgtctcaaaaaaaaaaaaaaaaaaaaaaaaaagcaaaaatagtaggcttaactccaaccttatcaataattatttcaaatgtaatttaaatactccaaataaaacacwgattgtccaactatataataaaagtacctataagagatgcatgccaaatattatggtatagataagttgagagttaaataatttccaagtataccaaggaaacaacaagcacaagaaatcttatgtggctatattaatataagaaaaagtaggacttccaaacaagcaatattacaacagaaagctatttcataatgataaaatgtcaagtaattatgaagacataatgctgtattgctgatagaataactaaagaaagttaaggtaaaataattttgacaacaccctgacctaatcgatattgaccaagaaaatagaatatatgttctattatgctacacatgaaacatttatcaataggctatagaccacaaaatatctgtcaagaagtttcaaaacactgtaatcatagaaagta

SEQ ID NO: 618368 - DNA, 529 bp, Homo sapiens
gtccaactatataataaaagtacctataagagatgcatgccaaatattatggtatagataagttgagagttaaataatttccaagtataccaaggaaacaacaagcacaagaaatcttatgtggctatattaatataagaaaaagtaggacttccaaacaagcaatattacaacagaaagctatttcataatgataaaatgtcaagtaattatgaagacataatgctgtattgctgatagaataactaaagaaagttaaggtaaaataattttgacaacaccctgacctaatcratattgaccaagaaaatagaatatatgttctattatgctacacatgaaacatttatcaataggctatagaccacaaaatatctgtcaagaagtttcaaaacactgtaatcatagaaagtatactttctgaccataatgaaaatgagttgaaatgggtgaaaacaagctacccaggaaagtctacactattggaagatttaaatacaccttaaaatgccctttagctcaaggaaga

SEQ ID NO: 618369 - DNA, 571 bp, Homo sapiens
ctgacctaatcgatattgaccaagaaaatagaatatatgttctattatgctacacatgaaacatttatcaataggctatagaccacaaaatatctgtcaagaagtttcaaaacactgtaatcatagaaagtatactttctgaccataatgaaaatgagttgaaatgggtgaaaacaagctacccaggaaagtctacrctattggaagatttaaatacaccttaaaatgccctttagctcaaggaagaaatcataagaaacaccttaaaatacattgaactgaatacaaataaaaatatactatatcaaaatatgtgggataagttaagcagacccagagtaaattttttgtataaatgcttattctaaaaaacagaagttcaaaacaagtgcactaattttctaccttaaaaagaaaatctaaaacaagagagcaaattaagtccaaaacaagtagaagaaagaaaataaaacagaaattagaaatcaatgagacagaaaacagacacaggagaaaattaacatggccaaaagttagttctgtgagaaagaaagaaaacgcaaattataaa

SEQ ID NO: 618370 - DNA, 571 bp, Homo sapiens
ctgacctaatcgatattgaccaagaaaatagaatatatgttctattatgctacacatgaaacatttatcaataggctatagaccacaaaatatctgtcaagaagtttcaaaacactgtaatcatagaaagtatactttctgaccataatgaaaatgagttgaaatgggtgaaaacaagctacccaggaaagtctacactattggaagatttaaatacaccttaaaatgccctttagctcaagraagaaatcataagaaacaccttaaaatacattgaactgaatacaaataaaaatatactatatcaaaatatgtgggataagttaagcagacccagagtaaattttttgtataaatgcttattctaaaaaacagaagttcaaaacaagtgcactaattttctaccttaaaaagaaaatctaaaacaagagagcaaattaagtccaaaacaagtagaagaaagaaaataaaacagaaattagaaatcaatgagacagaaaacagacacaggagaaaattaacatggccaaaagttagttctgtgagaaagaaagaaaacgcaaattataaa

SEQ ID NO: 618371 - DNA, 571 bp, Homo sapiens
ctgacctaatcgatattgaccaagaaaatagaatatatgttctattatgctacacatgaaacatttatcaataggctatagaccacaaaatatctgtcaagaagtttcaaaacactgtaatcatagaaagtatactttctgaccataatgaaaatgagttgaaatgggtgaaaacaagctacccaggaaagtctacactattggaagatttaaatacaccttaaaatgccctttagctcaaggaagaaatcataagaaacaccttaaaatacattgaactgaatacaaataaaaatatactatatcaaaatatgtgggataagttaagcagacccagagtaaattttttgtataaatgcttattctaaaaaasagaagttcaaaacaagtgcactaattttctaccttaaaaagaaaatctaaaacaagagagcaaattaagtccaaaacaagtagaagaaagaaaataaaacagaaattagaaatcaatgagacagaaaacagacacaggagaaaattaacatggccaaaagttagttctgtgagaaagaaagaaaacgcaaattataaa

SEQ ID NO: 618372 - DNA, 459 bp, Homo sapiens
ccaaagagttttgctggtgaattctttcaaacgttttaaaaaaataaaatttttaaattatttcagaagaaggggggaattccaaacttgttttatgagtcagaatcctgatagcaaaactacaaaacccaggaatgtaaaattgatttcaacttaaagggctatcaccattctaatctgtgattctaattaatttggctatcttagatactttatacaagtggaatcatacagtttgtccttctgtgactgatttactttacgtagcattaatktcctctaggttcatccatgttgcatattgccggattttcttgttttaaagctgaataatattccgttgtatgaatataccacattttctttatctattcatctgccaataaacattaacctatttccacattttgattagtgtaaataatgctgcaatgagcctaagaatcatcccaatctcaa

SEQ ID NO: 618373 - DNA, 428 bp, Homo sapiens
atcagaccattctaaagggcttgaggcaatatctctttgtggttttgatttgcatttccctgatgattagtgatgctgagcatttttttcatgtacctgttggtaatttggatattttctttggagaaatatctattgctgattaaaaaaaaaaactctcagcaagctagaaaaagaaattttctmgaagtggtggaaagcatccacaacaaaacatataaacaatattatatttaattgtgaaagcgtaaatgtttaaaccacatagattaggacaagaaaaggatgtgtgtgttcatcacctctattcaacattttactggtgatcctagattgagtataaatatttaggggataactattgtcactgaagcccaaatcttggtcatcctcagggaaaaaaaaaaagttgattaggttgtatataa

SEQ ID NO: 618374 - DNA, 460 bp, Homo sapiens
ctctgacataaattcaacacacggaggggkacacaagttatgagactgacctggcctcttcatctcataaaaggggttcttgttgctggtaacacagattaaaactatttcaattatattcaaggtaaaaagattagcaatgatatgtaagatgaaaaaatcaccccgcaggaagacaaaagtctcacaaaaggatatttaaactagccaacactttgaaattcaggcagagatcgtgctttctgggtgaactaaagtagcaagaacaaagtagaggctccaattctaggaaaaatgggccctaataaggtttacaatccagaaactcaagatatccagacagaaggatgcagtctccgctttcaaggcagtagcagtacctggattactatgccaatccccaacacaatcataaacacaaatttgattgaggaagaagcttgcccaccagaagatttag

SEQ ID NO: 618375 - DNA, 460 bp, Homo sapiens
ctctgacataaattcaacacacggaggggtacacaagttatgagactgacctggcctcttcatctcataaaaggggttcttgttgctggtaacacagattaaaactatttcaattayattcaaggtaaaaagattagcaatgatatgtaagatgaaaaaatcaccccgcaggaagacaaaagtctcacaaaaggatatttaaactagccaacactttgaaattcaggcagagatcgtgctttctgggtgaactaaagtagcaagaacaaagtagaggctccaattctaggaaaaatgggccctaataaggtttacaatccagaaactcaagatatccagacagaaggatgcagtctccgctttcaaggcagtagcagtacctggattactatgccaatccccaacacaatcataaacacaaatttgattgaggaagaagcttgcccaccagaagatttag

SEQ ID NO: 618376 - DNA, 605 bp, Homo sapiens
gggataactattgtcactgaagcccaaatcttggtcatcctcagggaaaaaaaaaaagttgattaggttgtatataatctaattctacttgctaatttaatttctctaaaattacagcttgtatcaactctagaatttattgggcacctcctaggacataaacactggaatttggtgagagacatcaaataggaaagaacctggctctgacataaattcaacacacggaggggtacacaagttatgagactgacctggcctcttcatctcataaaaggggttcttgttgctggtaacacagattaaaactatttcaattatattcaaggtaaaaagattagcaatgatatgtaagatgaaaaaatcaccccgcaggaagacaaaagtctcacaaawggatatttaaactagccaacactttgaaattcaggcagagatcgtgctttctgggtgaactaaagtagcaagaacaaagtagaggctccaattctaggaaaaatgggccctaataaggtttacaatccagaaactcaagatatccagacagaaggatgcagtctccgctttcaaggcagtagcagtacctggattactatgccaatccc

SEQ ID NO: 618377 - DNA, 380 bp, Homo sapiens
gtaactgtctcaaaatttcaaggaatgcctgagaagcaattcrtgttcaaaggctgccctcttgcgacaatgtgttgtatgttttactgtaaaagtaatcttattttaccttataacctctacaatccaattcataacaacataaaaaggaaataaaaccttacataattttgaattttaaaaagtaccttgtttatatggctcctttagctaatgaatagtcaatttggtaaatattccagtgagttgaaggcttgaatccatctcacttaactagcttgatggatgtatttctaaacctatacaacccactcctctgcttttaaaaaatcaaagttagctgtagattgagatgtcagtgacacagtttatagaacata

SEQ ID NO: 618378 - DNA, 380 bp, Homo sapiens
gtaactgtctcaaaatttcaaggaatgcctgagaagcaattcgtgttcaaaggctgccctcttgygacaatgtgttgtatgttttactgtaaaagtaatcttattttaccttataacctctacaatccaattcataacaacataaaaaggaaataaaaccttacataattttgaattttaaaaagtaccttgtttatatggctcctttagctaatgaatagtcaatttggtaaatattccagtgagttgaaggcttgaatccatctcacttaactagcttgatggatgtatttctaaacctatacaacccactcctctgcttttaaaaaatcaaagttagctgtagattgagatgtcagtgacacagtttatagaacata

SEQ ID NO: 618379 - DNA, 380 bp, Homo sapiens
gtaactgtctcaaaatttcaaggaatgcctgagaagcaattcgtgttcaaaggctgccctcttgcgacaatgtgttgtatgttttactgtaaaagtaatcttattttaccttataacctctacaatccaattcataacaacataaaaaggaaayaaaaccttacataattttgaattttaaaaagtaccttgtttatatggctcctttagctaatgaatagtcaatttggtaaatattccagtgagttgaaggcttgaatccatctcacttaactagcttgatggatgtatttctaaacctatacaacccactcctctgcttttaaaaaatcaaagttagctgtagattgagatgtcagtgacacagtttatagaacata

SEQ ID NO: 618380 - DNA, 624 bp, Homo sapiens
acataataaattcaaaaagttctgtaactcagacaatttagatagaagtgaggactttggcctagacagccctgttcactctaaagatggattaaacaaggaaaaagatattgatatcaaaaattcaatcaggaatttgattaaagcatttcattaaatgtgataatttcttagtatattatcttacatatgcaatattcatgtgtaacaaattaaatacaagtaaacatttgagcatattatctgcagcataatttacatatcaatttacatattcagttttgctcacatgaaaacttsgatcttctcaataagaaaatttgtgaaatctttaattcctcatccccaggaatgtaaataaataaatataaatattgtaagtcagtgattttttcctaggaagacagtaaaattactttacacgccttctcattgtaaacctaaataacaaacagagaaaggttctctaaaggaaaaagacacatcttagggaggaggacactgcaatgggaatatgcatgacaaagcaaactgtgtagattcaaatggtaaaggaagacaaggtctttaaaagaaaagtgatcaacctggaattatgggggagtagaaaaaaataaataaagg

SEQ ID NO: 618381 - DNA, 301 bp, Homo sapiens
tggagcagaaattctagtttctgtatggtcagtgtgggcactaataaaggcagcccttgagccatttcaaacagatgatgaggcagaytcagatgaggaagaggaggatgagtgtaaaaaactaacttcaaattctgagtgtggggagcagctaccagaggagattaaacaaaagaaagaaaaactttaaaaagtatgttctactagcctgttggctccacctgctgaattaagtgaatggccacctcctctctctcttctaaatgggtgagaaaataaattagctgaaaaacttactgct

SEQ ID NO: 618382 - DNA, 301 bp, Homo sapiens
tggagcagaaattctagtttctgtatggtcagtgtgggcactaataaaggcagcccttgagccatttcaaacagatgatgaggcagactcagatgaggaagaggaggatgagtgtaaaaaactaacttcaaattctgagtgtgrggagcagctaccagaggagattaaacaaaagaaagaaaaactttaaaaagtatgttctactagcctgttggctccacctgctgaattaagtgaatggccacctcctctctctcttctaaatgggtgagaaaataaattagctgaaaaacttactgct

SEQ ID NO: 618383 - DNA, 301 bp, Homo sapiens
tggagcagaaattctagtttctgtatggtcagtgtgggcactaataaaggcagcccttgagccatttcaaacagatgatgaggcagactcagatgaggaagaggaggatgagtgtaaaaaactaacttcaaattctgagtgtggggagcagctaccrgaggagattaaacaaaagaaagaaaaactttaaaaagtatgttctactagcctgttggctccacctgctgaattaagtgaatggccacctcctctctctcttctaaatgggtgagaaaataaattagctgaaaaacttactgct

SEQ ID NO: 618384 - DNA, 301 bp, Homo sapiens
tggagcagaaattctagtttctgtatggtcagtgtgggcactaataaaggcagcccttgagccatttcaaacagatgatgaggcagactcagatgaggaagaggaggatgagtgtaaaaaactaacttcaaattctgagtgtggggagcagctaccagaggagattaaasaaaagaaagaaaaactttaaaaagtatgttctactagcctgttggctccacctgctgaattaagtgaatggccacctcctctctctcttctaaatgggtgagaaaataaattagctgaaaaacttactgct

SEQ ID NO: 618385 - DNA, 601 bp, Homo sapiens
attaagtgaatggccacctcctctctctcttctaaatgggtgagaaaataaattagctgaaaaacttactgctcctgtagttacaacattaaaacctggagcaattggtggtggtagacaaaattctattcaaaaagctaaagccaagggagaccttgaagcatggcaatttcccgttactataatccagcaagtaggacagaatatagctaattaggctgctttctcttttaagttactaaagaatttaagcaagccattagtcaatatggactgaactctctttttgtgcaaactttatttaaaaatatggctcttgataatagattactaccatataattaggatactttgacaaaacctgttctcactccatctcagtacttgcagtttaaaacttggtaggctgatgaagctcaaactcaggcaaaagaaaacacacaagtgcagccacctgtgcctgttttctttgatcagttaatatgagttgkccctaactggggttgattagagaatcaagcactaatggaagatgttgccattgttcagctgtgcttcatgtgcttacatgcatagaaaaggataaacgttaccggggaaa

SEQ ID NO: 618386 - DNA, 392 bp, Homo sapiens
acagtaactatgcattgtagtttttagtgttcaagtttaagcttcttatgttaaagttacgccagctttaattctattgtaacaakatttatttttgtaattccatttttggattcttgatttcttggtaaagaaatacagttatttttgtataccaatcttatatagtgttacattcctaaatttgttcatgagtcctaacactttttagtaaatttcttatgattttctaaatgcaagatcatgtcatctgtacataaagataactgtacttcttcctttccaatctagatgccatttatttatttacattgccaagttgtccctgctaccactgttatcaagtaaaagggtctcactgcccaaagcactagaagccagtaacatgacac

SEQ ID NO: 618387 - DNA, 392 bp, Homo sapiens
acagtaactatgcattgtagtttttagtgttcaagtttaagcttcttatgttaaagttacgccagctttaattctattgtaacaagatttatttttgtaattccatttttggattcttgatttcttggtaaagaaatacagttatttttgtataccaatctyatatagtgttacattcctaaatttgttcatgagtcctaacactttttagtaaatttcttatgattttctaaatgcaagatcatgtcatctgtacataaagataactgtacttcttcctttccaatctagatgccatttatttatttacattgccaagttgtccctgctaccactgttatcaagtaaaagggtctcactgcccaaagcactagaagccagtaacatgacac

SEQ ID NO: 618388 - DNA, 392 bp, Homo sapiens
acagtaactatgcattgtagtttttagtgttcaagtttaagcttcttatgttaaagttacgccagctttaattctattgtaacaagatttatttttgtaattccatttttggattcttgatttcttggtaaagaaatacagttatttttgtataccaatcttatatagtgttacattcctaaatttgttcatgagtcctaacactttttagtaaatttmttatgattttctaaatgcaagatcatgtcatctgtacataaagataactgtacttcttcctttccaatctagatgccatttatttatttacattgccaagttgtccctgctaccactgttatcaagtaaaagggtctcactgcccaaagcactagaagccagtaacatgacac

SEQ ID NO: 618389 - DNA, 578 bp, Homo sapiens
ttttggggagccaagacagttggaccacttgagcccaggagttcaagaccaacctgaaaaacatagcaaataattttaaaacctacctgggcatggtgatgcatgcctgtggtcccggctactcaggaggctgaggtgggaggattgcttgaaccctggtagtcatgtagcttactacagtaagccatcattataccactgcactccagcctgggtgacagagtgagccactgtctcaaaaaatgagcaaaaacaaaaaagaagatatataaatgtcaaataggtatatgaaaagatgctcaatatcactgatcatcagagaaattcaaatcaaaactacaataagatatcatcttacccccattaaaatggcttttatgcaaaagacaggcaataacaaatgcttgcaagaatgtagggaaaagagaacmctcttactctgttggtgggaatgtaaattattacattcactatggagaacaatatggaggtccctcaaaaaattaaaaatagaactatcatatgatacagcaatcccactgctgggtatatacccaagggagggaaaattagtatat

SEQ ID NO: 618390 - DNA, 567 bp, Homo sapiens
gtcatgtagcttactacagtaagccatcattataccactgcactccagcctgggtgacagagtgagccactgtctcaaaaaatgagcaaaaacaaaaaagaagatatataaatgtcaaataggtatatgaaaagatgctcaatatcactgatcatcagagaaattcaaatcaaaactacaataagatatcatcttacccccattaaaatggcttttatgcaaaagacaggcaataacaaatgcttgcaagaatgtagggaaaagagaacactcttactctgttggygggaatgtaaattattacattcactatggagaacaatatggaggtccctcaaaaaattaaaaatagaactatcatatgatacagcaatcccactgctgggtatatacccaagggagggaaaattagtatatgaaagagatatctgcattcccatatttatttcagcactattcataatagccaagatttggaagcaacctaagtgtgcatcaacagatgaagggataaagaaaatgtagtacatgtacacaatggagtaatcttcggccatgaaaaagaat

SEQ ID NO: 618391 - DNA, 567 bp, Homo sapiens
gtcatgtagcttactacagtaagccatcattataccactgcactccagcctgggtgacagagtgagccactgtctcaaaaaatgagcaaaaacaaaaaagaagatatataaatgtcaaataggtatatgaaaagatgctcaatatcactgatcatcagagaaattcaaatcaaaactacaataagatatcatcttacccccattaaaatggcttttatgcaaaagacaggcaataacaaatgcttgcaagaatgtagggaaaagagaacactcttactctgttggtgggaatgtaaattattacattcactatggagaacaatatggaggtccctcaaaaaattaaaaataraactatcatatgatacagcaatcccactgctgggtatatacccaagggagggaaaattagtatatgaaagagatatctgcattcccatatttatttcagcactattcataatagccaagatttggaagcaacctaagtgtgcatcaacagatgaagggataaagaaaatgtagtacatgtacacaatggagtaatcttcggccatgaaaaagaat

SEQ ID NO: 618392 - DNA, 644 bp, Homo sapiens
gagaaatacacatcaccagctcctcaactcagagctccaagggaatggccaaggaagctgtattgtccwaagaaatttgagactgttttgacttacaataaatcctgctcaatcatatgtatgtatacacacacacacagccacacacacagacggtgttgtcagtgaagcctctaacaatgcatcttgactggacagatttgacaattaaaatggctggaagaaaataggcttcataagtgtcacttactattcacattacacattaaaaggacatctcctaaattaaatcttgtctatgataaaaaggcagaaaatcatgacccaaggctcatttataactgcagaaatgttcaagatagaccaaggcttgctatgtttaggaactgacaagtacaggtctttataatctaccattttgcctcatttgataccaggtgaccttcataatgcaggcaatagagaattgcaagatttgtcagagatttcaggtctttggaaagctatgctctttcacaagaacagccatggaaacaggaagaaagtcaattcccacttaaagtaatcagaatttacaaatattcctctcttcattgaaatctcaataggcacttcaatattatatttaattaattcttttgtta

SEQ ID NO: 618393 - DNA, 514 bp, Homo sapiens
cagaagaatggaggaatctttttgacaacaacaattctagtgatcttcctcatcactggttccaaaaccaagcccatggaagacctgcatagggataatgtggagaacatgcaagagaaatacacatcaccagctcctcaactcagagctccaagggaatggccaaggaagctgtattgtccaaagaaatttgagactgttttgacttacaataaatcctgcwcaatcatatgtatgtatacacacacacacagccacacacacagacggtgttgtcagtgaagcctctaacaatgcatcttgactggacagatttgacaattaaaatggctggaagaaaataggcttcataagtgtcacttactattcacattacacattaaaaggacatctcctaaattaaatcttgtctatgataaaaaggcagaaaatcatgacccaaggctcatttataactgcagaaatgttcaagatagaccaaggcttgctatgtttaggaactgacaagtacagg

SEQ ID NO: 618394 - DNA, 574 bp, Homo sapiens
aatgcatcttgactggacagatttgacaattaaaatggctggaagaaaataggcttcataagtgtcacttactattcacattacacattaaaaggacatctcctaaattaaatcttgtctatgataaaaaggcagaaaatcatgacccaaggctcatttataactgcagaaatgttcaagatagaccaaggcttgctatgtttaggaactgacaagtacaggtctttataatctaccattttgcctcatttgataccaggtgaccttcataatgcaggcaatagagaattgcaagatttgtcagagatttcaggtctttggaaagctatgytctttcacaagaacagccatggaaacaggaagaaagtcaattcccacttaaagtaatcagaatttacaaatattcctctcttcattgaaatctcaataggcacttcaatattatatttaattaattcttttgttacaatcatgcatcacataacaacattttgtcaaggatagtgcacatgtatgacagtggtgcaataaaatcataacgctgtacttttactgtacctcttgtatgtttaga

SEQ ID NO: 618395 - DNA, 328 bp, Homo sapiens
aggcttgctatgtttaggaactgacaagtacaggtctttataatctaccattttgcctcatttgataccaggtgaccttcataatgcaggcaatagagaattgcaagatttgtcagagatttcaggtctttggaaagctatgctctttcacaagaacagccatggaaacaggaagaaagtcaattcccacttaargtaatcagaatttacaaatattcctctcttcattgaaatctcaataggcacttcaatattatatttaattaattcttttgttacaatcatgcatcacataacaacattttgtcaaggatagtgcacatgtatg

SEQ ID NO: 618396 - DNA, 535 bp, Homo sapiens
tgactggacagatttgacaattaaaatggctggaagaaaataggcttcataagtgtcacttactattcacattacacattaaaaggacatctcctaaattaaatcttgtctatgataaaaaggcagaaaatcatgacccaaggctcatttataactgcagaaatgttcaagatagaccaaggcttgctatgtttaggaactgacaagtacaggtctttataatctaccattttgcctcatttgataccaggtgaccttcataatgcaggcaatagagaattgcaagatttgtcagagatttcaggtctttggaaagctatgctctttcacaagaacagccatggaaacaggaagaaagtcaattcccacttaaagtaatcagaatttacaaatattcctctcttcattraaatctcaataggcacttcaatattatatttaattaattcttttgttacaatcatgcatcacataacaacattttgtcaaggatagtgcacatgtatgacagtggtgcaataaaatcataacgctg

SEQ ID NO: 618397 - DNA, 580 bp, Homo sapiens
caagatagaccaaggcttgctatgtttaggaactgacaagtacaggtctttataatctaccattttgcctcatttgataccaggtgaccttcataatgcaggcaatagagaattgcaagatttgtcagagatttcaggtctttggaaagctatgctctttcacaagaacagccatggaaacaggaagaaagtcaattcccacttaaagtaatcagaatttacaaatattcctctcttcattgaaatctcaataggcacttcaatattatatttaattaattcttttgttacaatcatgcatcacataacaacattttgtcaaggatagtgcacatgtatgacagtggtgcaataaaatcataacgctgtacttttactgtacctcttgtatgtttagacatgtatagatacacttactgtatagatataagtaagtatagatatacttaactgttgtgttacaattgyctacagtattcagtacagtaacatgctgcacaggtttgtagcctaggaggaataggctataccacctaacctagatatgtaatcagctatagcatctaggtttgtgtaagta

SEQ ID NO: 618398 - DNA, 584 bp, Homo sapiens
ttagttaacactatgggaacttcatgggaaatggacactctagctccaccataaatagaaactgtttatgtcaaaaaacacataaaagcatagttgcaagattacatttccttccagatatttcatttagtatctccacagatcactaacttcctgaatagcattcttgtgtctccactgcctcacatttgatttcaggtcattccatcaattgtcaaagaygcatccaacattaacttcccaactactggtttggattgtgtcaacattgtcattctgggccacaacaacacaaaaggctaactcagtgaggtaacatagacactgatcagtgagattttgctgacgggtggtaccattttttaccaagatcaagggtattcataccttcaggcatctagataacattgaaaagggcaggttcatagataaaaagggaaagaggacgggtttttgcactatacatgagctaccgtgtctcctgtttaacctgagtctgaagagattcaaagtgcaggtgccatgaatgcctctttaatagctccatgtcgattgattttctgggctacacttcccagcattca

SEQ ID NO: 618399 - DNA, 584 bp, Homo sapiens
ttagttaacactatgggaacttcatgggaaatggacactctagctccaccataaatagaaactgtttatgtcaaaaaacacataaaagcatagttgcaagattacatttccttccagatatttcatttagtatctccacagatcactaacttcctgaatagcattcttgtgtctccactgcctcacatttgatttcaggtcattccatcaattgtcaaagacgcatccaacattaacttcccaactactggtttggattgtgtcaacattgtcattctgggccacaacaacacaaaaggctaactcagtgaggtaacatagacactgatcagtgagattttgctgacgggtggtaccattttttaccaagatcaagggtattcataccttcaggcatctagataacattgaaaagggcaggttcatagataaaaagggaaagaggacgggtttttgcactatacatgagctamcgtgtctcctgtttaacctgagtctgaagagattcaaagtgcaggtgccatgaatgcctctttaatagctccatgtcgattgattttctgggctacacttcccagcattca

SEQ ID NO: 618400 - DNA, 584 bp, Homo sapiens
ttagttaacactatgggaacttcatgggaaatggacactctagctccaccataaatagaaactgtttatgtcaaaaaacacataaaagcatagttgcaagattacatttccttccagatatttcatttagtatctccacagatcactaacttcctgaatagcattcttgtgtctccactgcctcacatttgatttcaggtcattccatcaattgtcaaagacgcatccaacattaacttcccaactactggtttggattgtgtcaacattgtcattctgggccacaacaacacaaaaggctaactcagtgaggtaacatagacactgatcagtgagattttgctgacgggtggtaccattttttaccaagatcaagggtattcataccttcaggcatctagataacattgaaaagggcaggttcatagataaaaagggaaagaggacgggtttttgcactatacatgagctaccrtgtctcctgtttaacctgagtctgaagagattcaaagtgcaggtgccatgaatgcctctttaatagctccatgtcgattgattttctgggctacacttcccagcattca

SEQ ID NO: 618401 - DNA, 296 bp, Homo sapiens
gaattccctgtcaaatgaaaatgtacttttcatctaatgtgtatatataactgatatatatgacatattatatctggtatatatgtataygtatcagtaatatatatatatatatatatatatatatatatatatatataacttatgatatataataaacaacataggctgggcacggtggctcacacctttaatcccagcactttgggaggcggaggtgggcagatcacttgaggtcaggagttcgagaccagcctggccaacgtgatgaaaccccctctctactaaatatacaa

SEQ ID NO: 618402 - DNA, 296 bp, Homo sapiens
gaattccctgtcaaatgaaaatgtacttttcatctaatgtgtatatataactgatatatatgacatattatatctggtatatatgtatacgtatcagtaatatatatatatatatatatatatatatatatatatatawaacttatgatatataataaacaacataggctgggcacggtggctcacacctttaatcccagcactttgggaggcggaggtgggcagatcacttgaggtcaggagttcgagaccagcctggccaacgtgatgaaaccccctctctactaaatatacaa

SEQ ID NO: 618403 - DNA, 296 bp, Homo sapiens
gaattccctgtcaaatgaaaatgtacttttcatctaatgtgtatatataactgatatatatgacatattatatctggtatatatgtatacgtatcagtaatatatatatatatatatatatatatatatatatatatataacttatgatatataataaacaacataggcygggcacggtggctcacacctttaatcccagcactttgggaggcggaggtgggcagatcacttgaggtcaggagttcgagaccagcctggccaacgtgatgaaaccccctctctactaaatatacaa

SEQ ID NO: 618404 - DNA, 296 bp, Homo sapiens
gaattccctgtcaaatgaaaatgtacttttcatctaatgtgtatatataactgatatatatgacatattatatctggtatatatgtatacgtatcagtaatatatatatatatatatatatatatatatatatatatataacttatgatatataataaacaacataggctgggcacggtggctcacacctttaatcccagcactttgggaggcggaggygggcagatcacttgaggtcaggagttcgagaccagcctggccaacgtgatgaaaccccctctctactaaatatacaa

SEQ ID NO: 618405 - DNA, 476 bp, Homo sapiens
caattctcattcagttttttgtgttttgcttgatttcaattggaaattctcattcagctttttagagtcctggaagattttcctagtccaatggtatgatccccaaagttatctgaaaccatatttaagagaacttgtcagagwcctttccattagaagtaatttagatgatagctgattgtaaaggctttttttttgagacaaggtctggttctatcactcaggatggagtgcagtggcatgatcttggctcaccacaatttctccctcccaaactcaagccatcctcctacctcagcctccgaagtagttgggaccataggcatgcaccatcatgctggctaatttttgtatttttgtagagacagggttttaccatgttgcccaggatgctttcaaacttctgagttcaagcaattcacccacctcggccttgcaaagtgctgggatttttacacgtgtgagccaccgtgccc

SEQ ID NO: 618406 - DNA, 476 bp, Homo sapiens
caattctcattcagttttttgtgttttgcttgatttcaattggaaattctcattcagctttttagagtcctggaagattttcctagtccaatggtatgatccccaaagttatctgaaaccatatttaagagaacttgtcagagacctttccattaraagtaatttagatgatagctgattgtaaaggctttttttttgagacaaggtctggttctatcactcaggatggagtgcagtggcatgatcttggctcaccacaatttctccctcccaaactcaagccatcctcctacctcagcctccgaagtagttgggaccataggcatgcaccatcatgctggctaatttttgtatttttgtagagacagggttttaccatgttgcccaggatgctttcaaacttctgagttcaagcaattcacccacctcggccttgcaaagtgctgggatttttacacgtgtgagccaccgtgccc

SEQ ID NO: 618407 - DNA, 510 bp, Homo sapiens
tggggtgcactccaaactttgataaattaaagaccctgcttattccttgagtaatgctacactgacaactgatttagtgaatgccactgtgaaaataataaacctcttggtgaatatatttagacatgtcttggaacctgtacacatcttaaccagggatgttacttggtctttctatgttcaggagtgtgtggagatagaaaawcatacaggattgtaattgttgcctgtgagactaacagaaaattcaagctagtgaagtacgcttatgcatggcacacttctcgccagcaattttaggaagttctacccacaacccatatgtcttttgatatgtgggttaccttggagagagaaaaagaaactctgaacacaagcatgaaatactttagaattttatctagagttggacttgtccgaaagcttttgtataaacttgcttgatgagcaactgttgtccactggtaccttcactgtacaatccacacacaacaaaacttcacaactgga

SEQ ID NO: 618408 - DNA, 572 bp, Homo sapiens
tcaggatggagtgcagtggcatgatcttggctcaccacaatttctccctcccaaactcaagccatcctcctacctcagcctccgaagtagttgggaccataggcatgcaccatcatgctggctaatttttgtatttttgtagagacagggttttaccatgttgcccaggatgctttcaaacttctgagttcaagcaattcacccacctcggccttgcaaagtgctgggatttttacacgtgtgagccaccgtgccctrcaccacgcccagcaccgtgccctgcacagcctccagcagcacgcccggcctgtaaagggttttagagaagaactttaaacaatcaccgtggatgacaaaaacttagaatatcctttggttaaaatccagtggaagttctcgacctgtgagaaaatttagttatttctattatatgtagcattttaagataacagccagaatcatgactgacggcaacacatcagatccatcagacttccacaaattttatataatctttagaatatttatattaataatatatctatacatatacaactttagagaatatttaa

SEQ ID NO: 618409 - DNA, 572 bp, Homo sapiens
tcaggatggagtgcagtggcatgatcttggctcaccacaatttctccctcccaaactcaagccatcctcctacctcagcctccgaagtagttgggaccataggcatgcaccatcatgctggctaatttttgtatttttgtagagacagggttttaccatgttgcccaggatgctttcaaacttctgagttcaagcaattcacccacctcggccttgcaaagtgctgggatttttacacgtgtgagccaccgtgccctgcaccacgcccagcaccgtgccctgcacagcctccagcagcacgcccggcctgtaaagggttttagagaagaactttaaacaatcaccrtggatgacaaaaacttagaatatcctttggttaaaatccagtggaagttctcgacctgtgagaaaatttagttatttctattatatgtagcattttaagataacagccagaatcatgactgacggcaacacatcagatccatcagacttccacaaattttatataatctttagaatatttatattaataatatatctatacatatacaactttagagaatatttaa

SEQ ID NO: 618410 - DNA, 572 bp, Homo sapiens
tcaggatggagtgcagtggcatgatcttggctcaccacaatttctccctcccaaactcaagccatcctcctacctcagcctccgaagtagttgggaccataggcatgcaccatcatgctggctaatttttgtatttttgtagagacagggttttaccatgttgcccaggatgctttcaaacttctgagttcaagcaattcacccacctcggccttgcaaagtgctgggatttttacacgtgtgagccaccgtgccctgcaccacgcccagcaccgtgccctgcacagcctccagcagcacgcccggcctgtaaagggttttagagaagaactttaaacaatcaccgtggatgacaaaaacttagaatatcctttggttaaaatccagtggaagttctcgacctgygagaaaatttagttatttctattatatgtagcattttaagataacagccagaatcatgactgacggcaacacatcagatccatcagacttccacaaattttatataatctttagaatatttatattaataatatatctatacatatacaactttagagaatatttaa

SEQ ID NO: 618411 - DNA, 572 bp, Homo sapiens
tcaggatggagtgcagtggcatgatcttggctcaccacaatttctccctcccaaactcaagccatcctcctacctcagcctccgaagtagttgggaccataggcatgcaccatcatgctggctaatttttgtatttttgtagagacagggttttaccatgttgcccaggatgctttcaaacttctgagttcaagcaattcacccacctcggccttgcaaagtgctgggatttttacacgtgtgagccaccgtgccctgcaccacgcccagcaccgtgccctgcacagcctccagcagcacgcccggcctgtaaagggttttagagaagaactttaaacaatcaccgtggatgacaaaaacttagaatatcctttggttaaaatccagtggaagttctcgacctgtgagaaaatttagttatttctattatatgtagcattttaagataacagccagaatcatgactgayggcaacacatcagatccatcagacttccacaaattttatataatctttagaatatttatattaataatatatctatacatatacaactttagagaatatttaa

SEQ ID NO: 618412 - DNA, 364 bp, Homo sapiens
ggacagatcatcagaggtcaggagtttgacaccagcctggccaacatggagaaatcttgtctctactaaaaatacaaaattagccgggcgtggtggcatgtgtctgtagtctcagctayttgggaggttgaggcaggagaatcgcttgaaccttggggcagaggttgcaatggacctagatcacgccactgcactccagcctgggtgacaaagcaagattctgtctcagagaaaaaaaaaagaagatttagtgttacttatcttttggcaatgcttcccatacaatgttatcaactaagatttagcaaagatgtcaaaaaattgaaaacatttgaccaaaacagaatgactgtttattgttttt

SEQ ID NO: 618413 - DNA, 607 bp, Homo sapiens
gggtaaaactcctgtggcataactgtgtcttcttacgggaagctaatttaaatcacttggaagtcaattccgatgacaaggagacttgaatttaattagacatagaaagagtgtgtccagggtcatgagtgagcataatattacaaagaatgtcaacaggaaaaccagagcatagagcaatggggatccatagctcacaatgatagcaagaaaatttcctggttacatgaagtaattaagacayatttaaatccaagagtataaaattagacctgatgaaaaagctgaaggagttatcatcccagccaagcaggaaacccaagccttttattccttctcaagaaggaacaggagacagtgatgtgatctgtgagtcatgtgtaacatgaaagtacaggaaaagttgaacttctgatatacaaatctgaaaagtttttatagtaatagatttcaggattaaaagtcaatatttattacctcttattatgagcaaataaatacattaagaaaactttgttgttttaaccaaaatttttagttttttatcactatgtttttaatattatagctaatttaaataaactttataaacaatctatctgatctc

SEQ ID NO: 618414 - DNA, 607 bp, Homo sapiens
gggtaaaactcctgtggcataactgtgtcttcttacgggaagctaatttaaatcacttggaagtcaattccgatgacaaggagacttgaatttaattagacatagaaagagtgtgtccagggtcatgagtgagcataatattacaaagaatgtcaacaggaaaaccagagcatagagcaatggggatccatagctcacaatgatagcaagaaaatttcctggttacatgaagtaattaagacacatttaaatccaagagtataaaattagacctgatgaaaaagctgaaggagttatcatcccagccaagcaggaaacccaagccttttattccttctcaagaaggaacaggagacagtgatgtgatctgtgagtcatgtgtaacatgaaagtacaggaaaagttgaacttctgatatacaaatctgaaaagtttttatagtaatagatttcaggattaaaagtcaatatttattacctcttmttatgagcaaataaatacattaagaaaactttgttgttttaaccaaaatttttagttttttatcactatgtttttaatattatagctaatttaaataaactttataaacaatctatctgatctc

SEQ ID NO: 618415 - DNA, 607 bp, Homo sapiens
gggtaaaactcctgtggcataactgtgtcttcttacgggaagctaatttaaatcacttggaagtcaattccgatgacaaggagacttgaatttaattagacatagaaagagtgtgtccagggtcatgagtgagcataatattacaaagaatgtcaacaggaaaaccagagcatagagcaatggggatccatagctcacaatgatagcaagaaaatttcctggttacatgaagtaattaagacacatttaaatccaagagtataaaattagacctgatgaaaaagctgaaggagttatcatcccagccaagcaggaaacccaagccttttattccttctcaagaaggaacaggagacagtgatgtgatctgtgagtcatgtgtaacatgaaagtacaggaaaagttgaacttctgatatacaaatctgaaaagtttttatagtaatagatttcaggattaaaagtcaatatttattacctcttattatgagcaaataaatacattaagaaaacyttgttgttttaaccaaaatttttagttttttatcactatgtttttaatattatagctaatttaaataaactttataaacaatctatctgatctc

SEQ ID NO: 618416 - DNA, 584 bp, Homo sapiens
atcagatgaaatactatataaaatgtccagaaaatctagtgttaatgaggctgtgcagcctggacatttgatgtctcctctgtgggaatgtgaactaacccaaccattctgaataattattggctctgtgtgttaacagtctagagtcctgaaacaaggatcttaattctaaaataaaatcctattctaagaatataccaagggttgataatcaaggaagtttcaaagttatagagaagaaccttaatcctagcattatatatgtaatcacccatataaaccagatagtgttgaatgaaactgcagaaaaacaaagagcctacagaatatgtttctctttgtgtacaactgtaaatgtacacatctrtccatgtaaaattttacatctcaggaggataggtaccaacatgttaacatgctatatctataagataagaaattttacttccctacaatttcatacacacacacacacacacacacacacacacacactctcaaacacacatacacacacaccgaggttatatacacacacaaatatatatataaacatacatgtttatataggtacacacacacat

SEQ ID NO: 618417 - DNA, 503 bp, Homo sapiens
cagcaattttaggaagttctacccacaacccatatgtcttttgatatgtgggttaccttggagagagaaaaagaaactctgaacacaagcatgaaatactttagaattttatctagagttggacttgtccgaaagcttttgtataaacttgcttgatgagcaactgttgtccactggtaccttcactgtacaatccacacacaacaaaacttcacaactggacacctaaatttgcactttgtttggtaaagttgaatgaaaaatgttgtcttttaagcttatgctctcttatgaaagctgttattagattaattttackccaagatatgccagttaggaaataacttccaatttaatttcaccagctccctgtgggtggactaattactcacacatcacacttactctggtggtgaaatgcctcaaaagaaggtctccagagtgttgctctacctagaaggacaagaatgaagagacataaaaatcattcattaagaaggaag

SEQ ID NO: 618418 - DNA, 443 bp, Homo sapiens
tccaatccctctataaccttggagatctatgaaccagagaaatagagactggttcttaaggaggtaataagtgtgccttctatcgtttataataatatgcattgtcttaacaattgaataattaaaagttaatgccctcataatatgcaaaatttttaataaacacattggtccctgtgttcaagtagttggtaatcaaattagtgaagtatggtaagtcttttgaagagcattaaacagcagaaaatgtaagaaatttgtctctataatagtgtggrccttctgtgtttcctaagggcacattcatatgatctaataactgagcagagagaagcctaaaggatattttatggtttcatttttttgtttttcccaattaacatacatttctagattaaaagtcaactatcttttccttgggagtcaactataggagaagatag

SEQ ID NO: 618419 - DNA, 443 bp, Homo sapiens
tccaatccctctataaccttggagatctatgaaccagagaaatagagactggttcttaaggaggtaataagtgtgccttctatcgtttataataatatgcattgtcttaacaattgaataattaaaagttaatgccctcataatatgcaaaatttttaataaacacattggtccctgtgttcaagtagttggtaatcaaattagtgaagtatggtaagtcttttgaagagcattaaacagcagaaaatgtaagaaatttgtctctataatagtgtggaccttctgtgtttcctaagggcacattcatatgatctaataactgagcagagagaagcctaaaggatattttatggtttcatttttttgtttttsccaattaacatacatttctagattaaaagtcaactatcttttccttgggagtcaactataggagaagatag

SEQ ID NO: 618420 - DNA, 520 bp, Homo sapiens
tatgacgatgaatttgtcaataatttttaggatatgacattaaaagctcaggcagtaaaagcaaaaatatatcaaacctaaaaacttctgtaccacaaaggtcacaaccaacaggttaaaaggcaaactgtagaataaaagaaaatrccagttgagtgtcccttatttgaaatgcttgggatgtgtttcagattttgtaatatttgcattattcttactggttgagcatctcgaattcaaacacctgagtctgcgatgctccaataagcatttcctttgagtgtcatgatggcactcaaaaagtttcagactttggagcatttgggatttcagatttttggatcagagacattcaacctatagttgcacatcatgtatctcataagaagtgaacattcagaatacgtaaagtactcctacagagagactaccagaagcagagaggagcagacacattttcacactagggcacctcctatctctcccggattccaattagggcagagtaagtgctagttct

SEQ ID NO: 618421 - DNA, 597 bp, Homo sapiens
gagaaagtgagacatcaaactaaaattactagaaaccccmaggaagaaggaaaaagaaacgaagaaaacagaaaaacaattaaaccagttaattaaaccttggcatgaccagaagatcagagtttcctaaaggagtggaaatttattgatttgaagaggatttattgattactgatttgaagaggaagaaaaaccatgaatggtctaaagcaaaagcctagtgtctgaagaagtcagtagggtgaaaacaagagctggccagaatatccacagatggtgacaagttggcaaagcctttactagactactcgtgaggctaactagaggccaaggagccaacactgcccctgtccttacagagagaccctacacaggattcccagatatacatggaaggacaacatcttatcaggtcctctctgtgcagatgtggttatcattccaaataatgagctccagccccaagattgttccatcctcaattgctttgagtgggcaatgtaggctctccacacacgacctacatgtaggttccttgggtacccagatgggagccgtgaaacacaaaccctccatggtcaggtctctatttgtttc

SEQ ID NO: 618422 - DNA, 599 bp, Homo sapiens
aggaaaaagaaacgaagaaaacagaaaaacaattaaaccagttaattaaaccttggyatgaccagaagatcagagtttcctaaaggagtggaaatttattgatttgaagaggatttattgattactgatttgaagaggaagaaaaaccatgaatggtctaaagcaaaagcctagtgtctgaagaagtcagtagggtgaaaacaagagctggccagaatatccacagatggtgacaagttggcaaagcctttactagactactcgtgaggctaactagaggccaaggagccaacactgcccctgtccttacagagagaccctacacaggattcccagatatacatggaaggacaacatcttatcaggtcctctctgtgcagatgtggttatcattccaaataatgagctccagccccaagattgttccatcctcaattgctttgagtgggcaatgtaggctctccacacacgacctacatgtaggttccttgggtacccagatgggagccgtgaaacacaaaccctccatggtcaggtctctatttgtttcctgcctttttcccagcaattcccaggccccagcagcggtggtctacctc

SEQ ID NO: 618423 - DNA, 599 bp, Homo sapiens
aggaaaaagaaacgaagaaaacagaaaaacaattaaaccagttaattaaaccttggcrtgaccagaagatcagagtttcctaaaggagtggaaatttattgatttgaagaggatttattgattactgatttgaagaggaagaaaaaccatgaatggtctaaagcaaaagcctagtgtctgaagaagtcagtagggtgaaaacaagagctggccagaatatccacagatggtgacaagttggcaaagcctttactagactactcgtgaggctaactagaggccaaggagccaacactgcccctgtccttacagagagaccctacacaggattcccagatatacatggaaggacaacatcttatcaggtcctctctgtgcagatgtggttatcattccaaataatgagctccagccccaagattgttccatcctcaattgctttgagtgggcaatgtaggctctccacacacgacctacatgtaggttccttgggtacccagatgggagccgtgaaacacaaaccctccatggtcaggtctctatttgtttcctgcctttttcccagcaattcccaggccccagcagcggtggtctacctc

SEQ ID NO: 618424 - DNA, 562 bp, Homo sapiens
cactagggcacctcctatctctcccggattccaattagggcagagtaagtgctagttctctgccaacccaggattaggccctgcagctgcagtgaaaataatcacagaagaaaactaagaaataaaaaaatggagaaagtgagacatcaaactaaaattactagaaaccccaaggaagaaggaaaaagaaacgaagaaaacagaaaaacaattaaaccagttaattaaaccttggcatgaccagaagatcagagtttcctaaaggagtggaaatttattgatttgaagaggatttattgattactgatttgaagaggaagaaaaaccatgaatggtctaaagcaaaagcctagtgtctgaagaagtcagtagggtgaaaacaagagctggccagaatwtccacagatggtgacaagttggcaaagcctttactagactactcgtgaggctaactagaggccaaggagccaacactgcccctgtccttacagagagaccctacacaggattcccagatatacatggaaggacaacatcttatcaggtcctctctgtgcagatg

SEQ ID NO: 618425 - DNA, 562 bp, Homo sapiens
cactagggcacctcctatctctcccggattccaattagggcagagtaagtgctagttctctgccaacccaggattaggccctgcagctgcagtgaaaataatcacagaagaaaactaagaaataaaaaaatggagaaagtgagacatcaaactaaaattactagaaaccccaaggaagaaggaaaaagaaacgaagaaaacagaaaaacaattaaaccagttaattaaaccttggcatgaccagaagatcagagtttcctaaaggagtggaaatttattgatttgaagaggatttattgattactgatttgaagaggaagaaaaaccatgaatggtctaaagcaaaagcctagtgtctgaagaagtcagtagggtgaaaacaagagctggccagaatatccacagatggtgacaagttkgcaaagcctttactagactactcgtgaggctaactagaggccaaggagccaacactgcccctgtccttacagagagaccctacacaggattcccagatatacatggaaggacaacatcttatcaggtcctctctgtgcagatg

SEQ ID NO: 618426 - DNA, 564 bp, Homo sapiens
gattactgatttgaagaggaagaaaaaccatgaatggtctaaagcaaaagcctagtgtctgaagaagtcagtagggtgaaaacaagagctggccagaatatccacagatggtgacaagttggcaaagcctttactagactactcgtgaggctaactagaggccaaggagccracactgcccctgtccttacagagagaccctacacaggattcccagatatacatggaaggacaacatcttatcaggtcctctctgtgcagatgtggttatcattccaaataatgagctccagccccaagattgttccatcctcaattgctttgagtgggcaatgtaggctctccacacacgacctacatgtaggttccttgggtacccagatgggagccgtgaaacacaaaccctccatggtcaggtctctatttgtttcctgcctttttcccagcaattcccaggccccagcagcggtggtctacctctgctgattctcattcagaatctaaacttagaaacaattataacctagaccccaattctacctgaaagtaacagaataacataat

SEQ ID NO: 618427 - DNA, 562 bp, Homo sapiens
cactagggcacctcctatctctcccggattccaattagggcagagtaagtgctagttctctgccaacccaggattaggccctgcagctgcagtgaaaataatcacagaagaaaactaagaaataaaaaaatggagaaagtgagacatcaaactaaaattactagaaaccccaaggaagaaggaaaaagaaacgaagaaaacagaaaaacaattaaaccagttaattaaaccttggcatgaccagaagatcagagtttcctaaaggagtggaaatttattgatttgaagaggatttattgattactgatttgaagaggaagaaaaaccatgaatggtctaaagcaaaagcctagtgtctgaagaagtcagtagggtgaaaacaagagctggccagaatatccacagatggtgacaagttggcaaagcctttactagactactcgtgaggctaactagaggccaaggagccaacactgcccctgtccttacagasagaccctacacaggattcccagatatacatggaaggacaacatcttatcaggtcctctctgtgcagatg

SEQ ID NO: 618428 - DNA, 564 bp, Homo sapiens
gattactgatttgaagaggaagaaaaaccatgaatggtctaaagcaaaagcctagtgtctgaagaagtcagtagggtgaaaacaagagctggccagaatatccacagatggtgacaagttggcaaagcctttactagactactcgtgaggctaactagaggccaaggagccaacactgcccctgtccttacagagagaccctacacaggattcccagatatacatggaaggacaacatcttatcaggtcctctctgtgcagatgtggttatcattccaaataatgagctccagccccaagattgttccatcctcaattgctttgagtgggcaatgtaggctctccacacacgacctacatgtaggttccttgggtacccagatgggagccrtgaaacacaaaccctccatggtcaggtctctatttgtttcctgcctttttcccagcaattcccaggccccagcagcggtggtctacctctgctgattctcattcagaatctaaacttagaaacaattataacctagaccccaattctacctgaaagtaacagaataacataat

SEQ ID NO: 618429 - DNA, 564 bp, Homo sapiens
gattactgatttgaagaggaagaaaaaccatgaatggtctaaagcaaaagcctagtgtctgaagaagtcagtagggtgaaaacaagagctggccagaatatccacagatggtgacaagttggcaaagcctttactagactactcgtgaggctaactagaggccaaggagccaacactgcccctgtccttacagagagaccctacacaggattcccagatatacatggaaggacaacatcttatcaggtcctctctgtgcagatgtggttatcattccaaataatgagctccagccccaagattgttccatcctcaattgctttgagtgggcaatgtaggctctccacacacgacctacatgtaggttccttgggtacccagatgggagccgtgaaacrcaaaccctccatggtcaggtctctatttgtttcctgcctttttcccagcaattcccaggccccagcagcggtggtctacctctgctgattctcattcagaatctaaacttagaaacaattataacctagaccccaattctacctgaaagtaacagaataacataat

SEQ ID NO: 618430 - DNA, 212 bp, Homo sapiens
ggtacccagatgggagccgtgaaacacaaaccctccatggtcaggtctctatttgtttcctgcctttttcccagcaatycccaggccccagcagcggtggtctacctctgctgattctcattcagaatctaaacttagaaacaattataacctagaccccaattctacctgaaagtaacagaataacataatctataccctgcagcatgact

SEQ ID NO: 618431 - DNA, 212 bp, Homo sapiens
ggtacccagatgggagccgtgaaacacaaaccctccatggtcaggtctctatttgtttcctgcctttttcccagcaattcccaggccccagcagyggtggtctacctctgctgattctcattcagaatctaaacttagaaacaattataacctagaccccaattctacctgaaagtaacagaataacataatctataccctgcagcatgact

SEQ ID NO: 618432 - DNA, 631 bp, Homo sapiens
agcctataaaaaattatttcaaaaagccaaaatattaatcaaactggaatatttagaaatatttaacccaaaagaagttaggaaagaatacatagaagatcaaaacacagacgaaggccagacatggttgctcatgcctgtaatccgaacactttgggaggccaaggtgggtagattgcttgagctcaggagttcaagaccagcctgtgcaacatggcaaaaccctatctctacaaaaaaatataaaaattagccaggtgtgtttccatgcrcctgtagtcccagctactcagtgggctccagtgaggattggttgggcctgggaagcagaggttgaagtgagccaacattgcaccattgcactacagtctcggtgacagagcaagaccctgtcttaaaaaaaaaaaacaaacaaatagaaaataagtagaaaaatggcagacctaaatccaaccttagcaatgattagttacaatgtaactggacaaatactctacttaagacagagactgccagacctgagaggaaagcaagacccaacaatacggcatccacagagacacaatttaaatacaaagacacaaagtatgagaaaaaatatgctatgcagacactaatcataaaaatatgc

SEQ ID NO: 618433 - DNA, 631 bp, Homo sapiens
agcctataaaaaattatttcaaaaagccaaaatattaatcaaactggaatatttagaaatatttaacccaaaagaagttaggaaagaatacatagaagatcaaaacacagacgaaggccagacatggttgctcatgcctgtaatccgaacactttgggaggccaaggtgggtagattgcttgagctcaggagttcaagaccagcctgtgcaacatggcaaaaccctatctctacaaaaaaatataaaaattagccaggtgtgtttccatgcacctgtagtcccagctactcagtgggctccagtgaggattggttgggcctgggaagcagaggttgaagtragccaacattgcaccattgcactacagtctcggtgacagagcaagaccctgtcttaaaaaaaaaaaacaaacaaatagaaaataagtagaaaaatggcagacctaaatccaaccttagcaatgattagttacaatgtaactggacaaatactctacttaagacagagactgccagacctgagaggaaagcaagacccaacaatacggcatccacagagacacaatttaaatacaaagacacaaagtatgagaaaaaatatgctatgcagacactaatcataaaaatatgc

SEQ ID NO: 618434 - DNA, 585 bp, Homo sapiens
ttcttcacaaattatcttttcctagttccctattggrcaatttttgtaggctccatatgctattaatttatattcacttttagaagaattttcatcaaaagcaaaagtcttatgtaaattgtttatatgctatttgtacttctatgtatatatacacacatagccacatacatatatgtaactccggaggcctgcctggactgttaaataactgtattgaacaaaagcaagaaaaagctgttcaaatttcaaacaacaagttgaactgaagagctcacatctttgaatgaaatagacactagtagcctttaaaaattaaacatttctactgttttaaaaattatagccatcatagtatgaggaaaaatgtaataatcttttttaattcttaccgttttattaaccagagtccttatgccctgacttcattggtacccctttgacattaaacagaacacttaatttaaaattctgataaataaattaattacatcatttacttgaggtactctttcacctttcaagaaatattttgagaattcattagctaaacattgctataatgcaggctagtaataaatggaa

SEQ ID NO: 618435 - DNA, 538 bp, Homo sapiens
gggcaatttttgtaggctccatatgctattaatttatattcacttttagaagaattttcatcaaaagcaaaagtcttatgtaaattgtttatatgctatttgtacttctatgtatatatacacacatagccacatacatatatgtaactccggaggcctgcctggactgttaaataactgtattgaacaaaagcaagaaaaagctgttcaaatttcaaacaacaagttgaactgaagagctcacatctttgaatgaaatagacactagtagcctttaaaaattaaacatttctactgttttaaaaattatagccatcatagtatgaggaaaaatgtaataatcttttttaattcttaccgttttattaaccagagtccttatgccctgacttcattggtacccctttgasattaaacagaacacttaatttaaaattctgataaataaattaattacatcatttacttgaggtactctttcacctttcaagaaatattttgagaattcattagctaaacattgctataatgcaggcta

SEQ ID NO: 618436 - DNA, 542 bp, Homo sapiens
cactttctttgctcatccgtgggagcaactcatcctctcacgttttctccagaggctgctgcagtctcgccagatcttcaggctctttctctgattctagtgctcttgttatttccaccatatctgcagttacttcctccacagaagtcgtgaacccctgtgtcatctgtgagggttggaataatcttcccaacttctctctctttttttttttttttttttgagatgaagtcttgcctgggctggagtgcagtgatgcgatctcagctcactgcaacctccacttcccgtgttcaagsaattctcctgcctcagcctcccaagtgtttgggattacagtcacccccgaccaggcccagctaattttttgtgtgtttttagtacagacaggatttcactatgttggccaggctggtctcaaattcctgatctcgtgatccacgtgccttggcctcccaaagtgctgggattacaggcgtgagccaccaagcccagccccaacttctcctaatgttgctattttgatcttcttttttaaatca

SEQ ID NO: 618437 - DNA, 542 bp, Homo sapiens
cactttctttgctcatccgtgggagcaactcatcctctcacgttttctccagaggctgctgcagtctcgccagatcttcaggctctttctctgattctagtgctcttgttatttccaccatatctgcagttacttcctccacagaagtcgtgaacccctgtgtcatctgtgagggttggaataatcttcccaacttctctctctttttttttttttttttttgagatgaagtcttgcctgggctggagtgcagtgatgcgatctcagctcactgcaacctccacttcccgtgttcaaggaattctcctgcctcagcctcccaagtgtttgggattacagtcacccccgaccaggcccagctaattttttktgtgtttttagtacagacaggatttcactatgttggccaggctggtctcaaattcctgatctcgtgatccacgtgccttggcctcccaaagtgctgggattacaggcgtgagccaccaagcccagccccaacttctcctaatgttgctattttgatcttcttttttaaatca

SEQ ID NO: 618438 - DNA, 542 bp, Homo sapiens
cactttctttgctcatccgtgggagcaactcatcctctcacgttttctccagaggctgctgcagtctcgccagatcttcaggctctttctctgattctagtgctcttgttatttccaccatatctgcagttacttcctccacagaagtcgtgaacccctgtgtcatctgtgagggttggaataatcttcccaacttctctctctttttttttttttttttttgagatgaagtcttgcctgggctggagtgcagtgatgcgatctcagctcactgcaacctccacttcccgtgttcaaggaattctcctgcctcagcctcccaagtgtttgggattacagtcacccccgaccaggcccagctaattttttgtgtgtttttagtacagacaggatttcactatgttggccaggctggtctcaaattcctgayctcgtgatccacgtgccttggcctcccaaagtgctgggattacaggcgtgagccaccaagcccagccccaacttctcctaatgttgctattttgatcttcttttttaaatca

SEQ ID NO: 618439 - DNA, 542 bp, Homo sapiens
cactttctttgctcatccgtgggagcaactcatcctctcacgttttctccagaggctgctgcagtctcgccagatcttcaggctctttctctgattctagtgctcttgttatttccaccatatctgcagttacttcctccacagaagtcgtgaacccctgtgtcatctgtgagggttggaataatcttcccaacttctctctctttttttttttttttttttgagatgaagtcttgcctgggctggagtgcagtgatgcgatctcagctcactgcaacctccacttcccgtgttcaaggaattctcctgcctcagcctcccaagtgtttgggattacagtcacccccgaccaggcccagctaattttttgtgtgtttttagtacagacaggatttcactatgttggccaggctggtctcaaattcctgatctcgtgatccacgtgccttggcctcccaaagtgctgggattacaggcgtgagccaccaagcccrgccccaacttctcctaatgttgctattttgatcttcttttttaaatca

SEQ ID NO: 618440 - DNA, 583 bp, Homo sapiens
tagaatggtgaatcctttccrgtaggttttcaattattttgcccagatccatcaaaggaatcactttctagagaagctatagctttatgaaatatatttttaagtgataagacttgaaagttgaaattattctttgatccaagggcaccagaatgaatgttgggttagtaggcatgaaaacaatattcagctctttatacatctctgtaaaagcccttgagtaccagcggcattgtcagtgagcggtaatactttgaaaggaatcttatttcttgagcagtagttgtcgacagtgggcttaagatattcagtaagccatatttgtaaaccgatagtctgtcatccaggctttgttcccatttgtagagtataggcagagctgtgttttatcataattcttcagggaccttggatttcagaatagtaaatcatcattggtttcaagttaacatcaccaattgcattaggccttaacaaaagagtcagcatgtcctttgaagccttaaagccaggcatcaactcctctctagctgggaacttcctggatggcatctccttctagtagaaggctgttttgtctcca

SEQ ID NO: 618441 - DNA, 590 bp, Homo sapiens
tggcatctagaatggtgaatcctttccagtaggttttcaattattttgcccagatccatcaaaggaatcactttctagagaagctatagctttatgaaatatatttttaagtgataagacttgaaagttgaaattaytctttgatccaagggcaccagaatgaatgttgggttagtaggcatgaaaacaatattcagctctttatacatctctgtaaaagcccttgagtaccagcggcattgtcagtgagcggtaatactttgaaaggaatcttatttcttgagcagtagttgtcgacagtgggcttaagatattcagtaagccatatttgtaaaccgatagtctgtcatccaggctttgttcccatttgtagagtataggcagagctgtgttttatcataattcttcagggaccttggatttcagaatagtaaatcatcattggtttcaagttaacatcaccaattgcattaggccttaacaaaagagtcagcatgtcctttgaagccttaaagccaggcatcaactcctctctagctgggaacttcctggatggcatctccttctagtagaaggctgttttgtctcca

SEQ ID NO: 618442 - DNA, 362 bp, Homo sapiens
tatagctttatgaaatatatttttaagtgataagacttgaaagttgaaattattctktgatccaagggcaccagaatgaatgttgggttagtaggcatgaaaacaatattcagctctttatacatctctgtaaaagcccttgagtaccagcggcattgtcagtgagcggtaatactttgaaaggaatcttatttcttgagcagtagttgtcgacagtgggcttaagatattcagtaagccatatttgtaaaccgatagtctgtcatccaggctttgttcccatttgtagagtataggcagagctgtgttttatcataattcttcagggaccttggatttcagaatagtaaatcatcattggt

SEQ ID NO: 618443 - DNA, 362 bp, Homo sapiens
tatagctttatgaaatatatttttaagtgataagacttgaaagttgaaattattctttgatccaagggcacyagaatgaatgttgggttagtaggcatgaaaacaatattcagctctttatacatctctgtaaaagcccttgagtaccagcggcattgtcagtgagcggtaatactttgaaaggaatcttatttcttgagcagtagttgtcgacagtgggcttaagatattcagtaagccatatttgtaaaccgatagtctgtcatccaggctttgttcccatttgtagagtataggcagagctgtgttttatcataattcttcagggaccttggatttcagaatagtaaatcatcattggt

SEQ ID NO: 618444 - DNA, 503 bp, Homo sapiens
agctttatgaaatatatttttaagtgataagacttgaaagttgaaattattctttgatccaagggcaccagaatgaatgttgkgttagtaggcatgaaaacaatattcagctctttatacatctctgtaaaagcccttgagtaccagcggcattgtcagtgagcggtaatactttgaaaggaatcttatttcttgagcagtagttgtcgacagtgggcttaagatattcagtaagccatatttgtaaaccgatagtctgtcatccaggctttgttcccatttgtagagtataggcagagctgtgttttatcataattcttcagggaccttggatttcagaatagtaaatcatcattggtttcaagttaacatcaccaattgcattaggccttaacaaaagagtcagcatgtcctttgaagccttaaagccaggcatcaactcctctctagctgggaacttcctggatggcatctccttctagtagaaggctgttttgtctcca

SEQ ID NO: 618445 - DNA, 344 bp, Homo sapiens
tatttttaagtgataagacttgaaagttgaaattattctttgatccaagggcaccagaatgaatgttgggttagtaggcaygaaaacaatattcagctctttatacatctctgtaaaagcccttgagtaccagcggcattgtcagtgagcggtaatactttgaaaggaatcttatttcttgagcagtagttgtcgacagtgggcttaagatattcagtaagccatatttgtaaaccgatagtctgtcatccaggctttgttcccatttgtagagtataggcagagctgtgttttatcataattcttcagggaccttggatttcagaatagtaaatcatcattgg

SEQ ID NO: 618446 - DNA, 479 bp, Homo sapiens
tatatttttaagtgataagacttgaaagttgaaattattctttgatccaagggcaccagaatgaatgttgggttagtaggcatgaaaacaatattcagctctttrtacatctctgtaaaagcccttgagtaccagcggcattgtcagtgagcggtaatactttgaaaggaatcttatttcttgagcagtagttgtcgacagtgggcttaagatattcagtaagccatatttgtaaaccgatagtctgtcatccaggctttgttcccatttgtagagtataggcagagctgtgttttatcataattcttcagggaccttggatttcagaatagtaaatcatcattggtttcaagttaacatcaccaattgcattaggccttaacaaaagagtcagcatgtcctttgaagccttaaagccaggcatcaactcctctctagctgggaacttcctggatggcatctccttctagtagaaggct

SEQ ID NO: 618447 - DNA, 590 bp, Homo sapiens
tggcatctagaatggtgaatcctttccagtaggttttcaattattttgcccagatccatcaaaggaatcactttctagagaagctatagctttatgaaatatatttttaagtgataagacttgaaagttgaaattattctttgatccaagggcaccagaatgaatgttgggttagtaggcatgaaaacaatattcagctctttatacatctckgtaaaagcccttgagtaccagcggcattgtcagtgagcggtaatactttgaaaggaatcttatttcttgagcagtagttgtcgacagtgggcttaagatattcagtaagccatatttgtaaaccgatagtctgtcatccaggctttgttcccatttgtagagtataggcagagctgtgttttatcataattcttcagggaccttggatttcagaatagtaaatcatcattggtttcaagttaacatcaccaattgcattaggccttaacaaaagagtcagcatgtcctttgaagccttaaagccaggcatcaactcctctctagctgggaacttcctggatggcatctccttctagtagaaggctgttttgtctcca

SEQ ID NO: 618448 - DNA, 503 bp, Homo sapiens
agctttatgaaatatatttttaagtgataagacttgaaagttgaaattattctttgatccaagggcaccagaatgaatgttgggttagtaggcatgaaaacaatattcagctctttatacatctctgtaaaagyccttgagtaccagcggcattgtcagtgagcggtaatactttgaaaggaatcttatttcttgagcagtagttgtcgacagtgggcttaagatattcagtaagccatatttgtaaaccgatagtctgtcatccaggctttgttcccatttgtagagtataggcagagctgtgttttatcataattcttcagggaccttggatttcagaatagtaaatcatcattggtttcaagttaacatcaccaattgcattaggccttaacaaaagagtcagcatgtcctttgaagccttaaagccaggcatcaactcctctctagctgggaacttcctggatggcatctccttctagtagaaggctgttttgtctcca

SEQ ID NO: 618449 - DNA, 344 bp, Homo sapiens
tatttttaagtgataagacttgaaagttgaaattattctttgatccaagggcaccagaatgaatgttgggttagtaggcatgaaaacaatattcagctctttatacatctctgtaaaagcccttgagtaccagsggcattgtcagtgagcggtaatactttgaaaggaatcttatttcttgagcagtagttgtcgacagtgggcttaagatattcagtaagccatatttgtaaaccgatagtctgtcatccaggctttgttcccatttgtagagtataggcagagctgtgttttatcataattcttcagggaccttggatttcagaatagtaaatcatcattgg

SEQ ID NO: 618450 - DNA, 344 bp, Homo sapiens
tatttttaagtgataagacttgaaagttgaaattattctttgatccaagggcaccagaatgaatgttgggttagtaggcatgaaaacaatattcagctctttatacatctctgtaaaagcccttgagtaccagcggcattgtcagtgagcggtaatactttgaaaggaatcttatttcttgagcagtagttgtcgacaktgggcttaagatattcagtaagccatatttgtaaaccgatagtctgtcatccaggctttgttcccatttgtagagtataggcagagctgtgttttatcataattcttcagggaccttggatttcagaatagtaaatcatcattgg

SEQ ID NO: 618451 - DNA, 521 bp, Homo sapiens
gaaatatatttttaagtgataagacttgaaagttgaaattattctttgatccaagggcaccagaatgaatgttgggttagtaggcatgaaaacaatattcagctctttatacatctctgtaaaagcccttgagtaccagcggcattgtcagtgagcggtaatactttgaaaggaatcttatttcttgagcagtagttgtcgacagtgggcttaagatattcagtaagccatatttgtaaaccgatagtctgtcatccaggctttgttcccatttgtagagtataggcagagctgtgttttatcataattcttcagggaccttggatttcagaatagtaaatcatcattggtttcawgttaacatcaccaattgcattaggccttaacaaaagagtcagcatgtcctttgaagccttaaagccaggcatcaactcctctctagctgggaacttcctggatggcatctccttctagtagaaggctgttttgtctccattgcaaatctgtttagtgcagccatc

SEQ ID NO: 618452 - DNA, 521 bp, Homo sapiens
gaaatatatttttaagtgataagacttgaaagttgaaattattctttgatccaagggcaccagaatgaatgttgggttagtaggcatgaaaacaatattcagctctttatacatctctgtaaaagcccttgagtaccagcggcattgtcagtgagcggtaatactttgaaaggaatcttatttcttgagcagtagttgtcgacagtgggcttaagatattcagtaagccatatttgtaaaccgatagtctgtcatccaggctttgttcccatttgtagagtataggcagagctgtgttttatcataattcttcagggaccttggatttcagaatagtaaatcatcattggtttcaagttaacatcaccaaytgcattaggccttaacaaaagagtcagcatgtcctttgaagccttaaagccaggcatcaactcctctctagctgggaacttcctggatggcatctccttctagtagaaggctgttttgtctccattgcaaatctgtttagtgcagccatc

SEQ ID NO: 618453 - DNA, 502 bp, Homo sapiens
gctttatgaaatatatttttaagtgataagacttgaaagttgaaattattctttgatccaagggcaccagaatgaatgttgggttagtaggcatgaaaacaatattcagctctttatacatctctgtaaaagcccttgagtaccagcggcattgtcagtgagcggtaatactttgaaaggaatcttatttcttgagcagtagttgtcgacagtgggcttaagatattcagtaagccatatttgtaaaccgatagtctgtcatccaggctttgttcccatttgtagagtataggcagagctgtgttttatcataattcttcagggaccttggatttcagaatagtaaatcatcattggtttcaagttaacatcaccaattgcattagsccttaacaaaagagtcagcatgtcctttgaagccttaaagccaggcatcaactcctctctagctgggaacttcctggatggcatctccttctagtagaaggctgttttgtctcca

SEQ ID NO: 618454 - DNA, 492 bp, Homo sapiens
ttgaaagttgaaattattctttgatccaagggcaccagaatgaatgttgggttagtaggcatgaaaacaatattcagctctttatacatctctgtaaaagcccttgagtaccagcggcattgtcagtgagcggtaatactttgaaaggaatcttatttcttgagcagtagttgtcgacagtgggcttaagatattcagtaagccatatttgtaaaccgatagtctgtcatccaggctttgttcccatttgtagagtataggcagagctgtgttttatcataattcttcagggaccttggatttcagaatagtaaatcatcattggtttcaagttaacatcaccaattgcattaggcsttaacaaaagagtcagcatgtcctttgaagccttaaagccaggcatcaactcctctctagctgggaacttcctggatggcatctccttctagtagaaggctgttttgtctccattgcaaatctgtttagtgcagc

SEQ ID NO: 618455 - DNA, 507 bp, Homo sapiens
ctatagctttatgaaatatatttttaagtgataagacttgaaagttgaaattattctttgatccaagggcaccagaatgaatgttgggttagtaggcatgaaaacaatattcagctctttatacatctctgtaaaagcccttgagtaccagcggcattgtcagtgagcggtaatactttgaaaggaatcttatttcttgagcagtagttgtcgacagtgggcttaagatattcagtaagccatatttgtaaaccgatagtctgtcatccaggctttgttcccatttgtagagtataggcagagctgtgttttatcataattcttcagggaccttggatttcagaatagtaaatcatcattggtttcaagttaacatcaccaattgcattaggccttaayaaaagagtcagcatgtcctttgaagccttaaagccaggcatcaactcctctctagctgggaacttcctggatggcatctccttctagtagaaggctgttttgtctcca

SEQ ID NO: 618456 - DNA, 521 bp, Homo sapiens
gaaatatatttttaagtgataagacttgaaagttgaaattattctttgatccaagggcaccagaatgaatgttgggttagtaggcatgaaaacaatattcagctctttatacatctctgtaaaagcccttgagtaccagcggcattgtcagtgagcggtaatactttgaaaggaatcttatttcttgagcagtagttgtcgacagtgggcttaagatattcagtaagccatatttgtaaaccgatagtctgtcatccaggctttgttcccatttgtagagtataggcagagctgtgttttatcataattcttcagggaccttggatttcagaatagtaaatcatcattggtttcaagttaacatcaccaattgcattaggccttaacaaaagagtcagcatgtcctttgaagccttaaagccaggmatcaactcctctctagctgggaacttcctggatggcatctccttctagtagaaggctgttttgtctccattgcaaatctgtttagtgcagccatc

SEQ ID NO: 618457 - DNA, 369 bp, Homo sapiens
gtaatactttgaaaggaatcttatttcttgagcagtagttgtcgacagtgggcttaagatattcagtaagccatatttgtaaaccgatagtctgtcatccaggctttgttcccatttgtagagtataggcagagctgtgttttatcataattcttcagggaccttggatttcagaatagtaaatcatcattggtttcaagttaacatcaccaattgcattaggccttaacaaaagagtcagcatgtcctttgaagccttaaagccaggcatcaactcctctctagctgggaacttcctrgatggcatctccttctagtagaaggctgttttgtctccattgcaaatctgtttagtgcagccatcttaat

SEQ ID NO: 618458 - DNA, 517 bp, Homo sapiens
gaaatatatttttaagtgataagacttgaaagttgaaattattctttgatccaagggcaccagaatgaatgttgggttagtaggcatgaaaacaatattcagctctttatacatctctgtaaaagcccttgagtaccagcggcattgtcagtgagcggtaatactttgaaaggaatcttatttcttgagcagtagttgtcgacagtgggcttaagatattcagtaagccatatttgtaaaccgatagtctgtcatccaggctttgttcccatttgtagagtataggcagagctgtgttttatcataattcttcagggaccttggatttcagaatagtaaatcatcattggtttcaagttaacatcaccaattgcattaggccttaacaaaagagtcagcatgtcctttgaagccttaaagccaggcatcaactcctctctagctgggaacttcctggatggcatctccttctmgtagaaggctgttttgtctccattgcaaatctgtttagtgcagc

SEQ ID NO: 618459 - DNA, 521 bp, Homo sapiens
gaaatatatttttaagtgataagacttgaaagttgaaattattctttgatccaagggcaccagaatgaatgttgggttagtaggcatgaaaacaatattcagctctttatacatctctgtaaaagcccttgagtaccagcggcattgtcagtgagcggtaatactttgaaaggaatcttatttcttgagcagtagttgtcgacagtgggcttaagatattcagtaagccatatttgtaaaccgatagtctgtcatccaggctttgttcccatttgtagagtataggcagagctgtgttttatcataattcttcagggaccttggatttcagaatagtaaatcatcattggtttcaagttaacatcaccaattgcattaggccttaacaaaagagtcagcatgtcctttgaagccttaaagccaggcatcaactcctctctagctgggaacttcctggatggcatctccttctagtagaakgctgttttgtctccattgcaaatctgtttagtgcagccatc

SEQ ID NO: 618460 - DNA, 484 bp, Homo sapiens
cttttccatcagtacttgctgctttatcttgcgcttttatgttatggagatgacttttttccttaaacctcaagaaacaagctcttctagcttcagacttttcttctgcagctgcctcacctctctaagtcttcatagaattgaagggagaccgggtgcggtggctgtcacacctgtaatcctagcactttgggaggccgaggcgggcagatcacctgaggtcgggagttcgacaccagtctgaccaacgtggagaaaccccgtctctactaaaaatacaaaaaattagccaggcgtggtggtgcatgcctgtaatcccagctactcgggatgctgaggcaggagaatggcttgaacttgggaggcagaggttgcgatgagccaagatcaygccattgtactccagcttgggcaagaagaatgaaactctgtctcaaaaacaaagaaaaaaagtaaaaagagagttaggcttaggcttaatgga

SEQ ID NO: 618461 - DNA, 289 bp, Homo sapiens
ttgaatgcagttcttatctttgtgtctctgtaggtaaggtgttttctgccccacctctggtttctttcagagttttcctttatcttttatttcatatagtttgaaaattatatgtccaartgtaggttgttggcatttattctgcctggtgttctctgagcttcctggatctttggtttggtgtctgacattaatactggaagttctcagacatggttgttgcaggactttcttctatttcttctcctcctggtattctcattactctgtttcaccttttgtagttgtc

SEQ ID NO: 618462 - DNA, 289 bp, Homo sapiens
ttgaatgcagttcttatctttgtgtctctgtaggtaaggtgttttctgccccacctctggtttctttcagagttttcctttatcttttatttcatatagtttgaaaattatatgtccaaatgtaggttgttggcatttattctgcctggtgttctctgagcttcctggatctttggtttggtgtctgacattaatactggaagttctcagacatggttgttgcagractttcttctatttcttctcctcctggtattctcattactctgtttcaccttttgtagttgtc

SEQ ID NO: 618463 - DNA, 617 bp, Homo sapiens
caactacaccctagtaaagattcagttccttaccttttaccacataatattccaaagtagtggctttaaaaattttttgctaaccataaaagaagtttgaaaaactmtgtattacatctctttttaaagatgatagctagacattttattcaaaagtttaaattgtttgaaggattatcatttctgatttattgtgaatgttaacattttgaaataaaagtgttacatgattaaaaaaatcaacccagtggactctaaatgccccagtaatttgacacccatcagaagctacttaagaggaaaatgaacaagttctttaataatagaaaataaaatgtgtttcattattctctattatttatttcaattttactttcccatggaattttttcttcgtgtaaagttttattgatcagcttatatacttcttttcaaaaactatatataaaattttttcaaacttttctagcacatttcctgtgaacatagtgttctgtattttattctgagttgttagttataattaataactgtagaaattgatcaaaacaacataaatatattataaaattttatgcatcattattaaacataaaaagtaaaatgtattggaaatg

SEQ ID NO: 618464 - DNA, 381 bp, Homo sapiens
agtagttatatgcttgattttctaaagaagtcatactcacacttgttttcctttttctgaaaatarctgtttctgtgtcagggcattttaagcattaaattccttcgtcacttgacatgagtgaaaccaaactttgtatcaacttctttttcttaattgtcttgtaatttcaagggggtggagaaaaataagagatcctcaatcgctggaaatttttcatatcagatgaaaacataattttgcagtaatacaatgatatcgtgccacattttatcaaagctctgtataatgtgtaagtgtgaaacacattctagaaacaagcaacactgcaattactatttttaataatatgaaattcataattctttatagccttattca

SEQ ID NO: 618465 - DNA, 651 bp, Homo sapiens
ccaaaaaggaaaaacattgccaaaccttctttgatttatgcagagaatattttcttatatggagaatgagggctgatgggtaaaatcgtctcaatctctttcataaacttcaaaaaaacatatccrgagttttggagctaagtctgccctaattgaaatggcaaattttctttaagaaccagaacacttacaatatctattctcatccatgtcccctcaactatttctttaattgctatttgcagacacattctgctactctttcacaacttctagactgtctgtctttcctgcccagaaggccttctaatctatctgaaatatctaagatgacaacttttgagactagtacctgctcttgtccgcccaaatacagcaggcatcaatggggttaaaaagtaaagctcttttactataatttgtatgcaattaaaagcatttaaaattaacattgggaataacagttttattacatttagaaatacttcctaaacatattcgggcaaaaaaatgtccctcacttccctaaaggcctgaaacgaagcaaaaggcattttcacaaggtgttcacatgcagaaggcacgtggttttcggcatcagctggtgtgtgcacattcatcaagagtcacacttccaacagcacctgctat

SEQ ID NO: 618466 - DNA, 651 bp, Homo sapiens
ccaaaaaggaaaaacattgccaaaccttctttgatttatgcagagaatattttcttatatggagaatgagggctgatgggtaaaatcgtctcaatctctttcataaacttcaaaaaaacatatccagagttttggagctaagtctgccctaattgaaatggcaaattttctttaagaaccagaacacttacaatatctattctcatccatgtcccctcaactatttctttaattgctatttgcagacacattctgctactctttcacaacttctagactgtctgtctttcctgcccagaaggccttctaatckatctgaaatatctaagatgacaacttttgagactagtacctgctcttgtccgcccaaatacagcaggcatcaatggggttaaaaagtaaagctcttttactataatttgtatgcaattaaaagcatttaaaattaacattgggaataacagttttattacatttagaaatacttcctaaacatattcgggcaaaaaaatgtccctcacttccctaaaggcctgaaacgaagcaaaaggcattttcacaaggtgttcacatgcagaaggcacgtggttttcggcatcagctggtgtgtgcacattcatcaagagtcacacttccaacagcacctgctat

SEQ ID NO: 618467 - DNA, 651 bp, Homo sapiens
ccaaaaaggaaaaacattgccaaaccttctttgatttatgcagagaatattttcttatatggagaatgagggctgatgggtaaaatcgtctcaatctctttcataaacttcaaaaaaacatatccagagttttggagctaagtctgccctaattgaaatggcaaattttctttaagaaccagaacacttacaatatctattctcatccatgtcccctcaactatttctttaattgctatttgcagacacattctgctactctttcacaacttctagactgtctgtctttcctgcccagaaggccttctaatctatctgaaatatctaagatgacaacttttgagactagtacctgctcttgtccgcccaaatacagcaggcatcaatggggttaaaaagtaaagctcttttactataatttgtatgcaattaaaagcatttaaaattaacattgggaataacagttttattacatttagaaatacttcctaaacatattcrggcaaaaaaatgtccctcacttccctaaaggcctgaaacgaagcaaaaggcattttcacaaggtgttcacatgcagaaggcacgtggttttcggcatcagctggtgtgtgcacattcatcaagagtcacacttccaacagcacctgctat

SEQ ID NO: 618468 - DNA, 560 bp, Homo sapiens
gacatgttgctcttttgctcttggagggccttatctatttatagatagacagatagatagatatttacacacacaaacataatataaatcatatatacatacatatgctcatagttgttaaattctatctattgagtattatatagtaatccatttaatattatactatacaatgttaacgttaatatttattatataatagtttcktattttaaagctaataaaatttatattaaatatgaagttgacattttgaaagtaccaaagttgattctcccaactgcattctgggacaaaatgatgaagaaattcaggttagaagaactgagaaaacttgagaaatgccttttagctaagtataaataaataaataacatttttagacccaaagtccagtgttattttcatgttgcattaaacatttctcttttatattgagtgaagatatttctcttcataattcctaacctttaatcctagtcctcaacttaaaagcaatcttccatgtttttctgcaatacaataggccctagaaacataaatattgaatgaatattggc

SEQ ID NO: 618469 - DNA, 613 bp, Homo sapiens
atgtgaaatcacaccaaatagcactttcagatcaaataaacaaaacacccacaacttcagctggaatttgtgccagcctccaaatagcctctctgagtttaggtagcttctgtctgagaaatgttgcatcaatataaaacatatcacatgttttgttacctttctgtttttaagatctctataaaggtagtaggaagaagccagagtagtttcctttataaagtgagcaggcatggggtatttgatgttatcttcttgctgtggctgattaacacactrgggaagaaatgtgcaaaatgagcagtcaggactgtttccatggttgccaagctctttgcatagaacaaaagtaaggcagcctcagaaggtccctcagtcctggagttcagcatgattgagtgctggaaatgtacaagggggtattccttgcaaaagacagttcacatataatcttacaacctcattaaagcaaattggttacaaaaatattttaaatgaaatataacaatgttaatgcaatgcttttgtgtagcaaaattttatagaggactttatagggggaggaaactaacctttaccatatgcattctacttccttggaacaagctagacc

SEQ ID NO: 618470 - DNA, 522 bp, Homo sapiens
tttatacattttataatcaggtggttattcttagagaataacttttctcctcayatgtcttattttttcttccacacttctttaaaaagggtctaatatgttgcactatagagatatctgctagggacaactaaaaatccattctgtcttgttatatctttgtcagaagaatgaattctgttctgtctcaatctgacctctcaaatgttatgctttgacagactctctctccttcacctgtcagacagtcctggaaataagaggagaaaaacactcagtaaatccctcaggattcatctatattacagaagaaaaatcaaatgcaagattgaaatataatgattctgtttccttccctgggaaatgtacagagcagggattcacaaaatcttgttctttatgttttgggggacacatgaagctatcatattggttatgtttaaattctaatcctcagcaaaagaagctctgtcatcctctggttgctctcttctgtcaccctcctcatcacacacaatgggt

SEQ ID NO: 618471 - DNA, 635 bp, Homo sapiens
tcaaaacactgggaattctggaattagaaaaaaaaatgtattagtgcataagcacatgaggacagatttttcaatttaattgagcaccagctatttatttctctctctctgtctttctcaatctttctccctccttsctcctgcccctaccacatagaaagacacagattcttaatttgtagatgagggaaaactgaagggattaaggttttaattaacttattcaaggtcccgtgacctgaaaattgtggaactgagattcaaatcactccaaaataagctgggtttttataaatttaactattgggattttggtcaaatcaaatttaagtgatcagagcattaaaactcgttcactgaattggatgcttgaatcaccagtgaaaccatctttaccctagattacaatgaacccactcttttctcctttcctctattattttcagaacacttcctctctttctttcctggtgaaaccatatttttcttatactcctaaagtgtttcccctacacttttgaagcaggaaagtttcccttgttcccctcacagggcatgggataggggtatggctcacttcttcagtgccccgctgctcaaacctctaggagagcatacaggcaggcaggctgtgg

SEQ ID NO: 618472 - DNA, 635 bp, Homo sapiens
tcaaaacactgggaattctggaattagaaaaaaaaatgtattagtgcataagcacatgaggacagatttttcaatttaattgagcaccagctatttatttctctctctctgtctttctcaatctttctccctccttgctccygcccctaccacatagaaagacacagattcttaatttgtagatgagggaaaactgaagggattaaggttttaattaacttattcaaggtcccgtgacctgaaaattgtggaactgagattcaaatcactccaaaataagctgggtttttataaatttaactattgggattttggtcaaatcaaatttaagtgatcagagcattaaaactcgttcactgaattggatgcttgaatcaccagtgaaaccatctttaccctagattacaatgaacccactcttttctcctttcctctattattttcagaacacttcctctctttctttcctggtgaaaccatatttttcttatactcctaaagtgtttcccctacacttttgaagcaggaaagtttcccttgttcccctcacagggcatgggataggggtatggctcacttcttcagtgccccgctgctcaaacctctaggagagcatacaggcaggcaggctgtgg

SEQ ID NO: 618473 - DNA, 618 bp, Homo sapiens
ttatcaatctttatgtctccagtgcctgctgcaaaacctagagatacttgtgggtatatgatgctatatgatgtacttaggttctttttgggtgtatggtgtatttgtgttatgaagtatggtgtatggcatatttgtgttgccacacttagcacttgtcatgggaagaattatgcttcccccaaaccaacttcatatgttgaaagttttaaaccctagtacctcagaatgtgactgtatttggagatatttttaaacaggtgactatgttaaagtcatgtaattagggagggccctaagccaatacaactgatctcataagaagaaaaaatttacacacagccatgcacagaaggaagactacatgaagataccgggagaagacagccatctatgagccgatagaggggcctcagaagaagccagctctgctacaccttgatcttgaacttccagcctccagaactgtgagaaaataaatttctgctgcttgagccatgcagtttgtggtactctggtaggcagccctaataaactaacacagcaactataaaagtaacttatttttatattagggcctatctrtctgtgagctatcaacttcattactttgaaata

SEQ ID NO: 618474 - DNA, 590 bp, Homo sapiens
ctggctaatttttgtatttttagtagacatggggtttcaccatattggtcaggctgggcttgaactcctgacctcgtgatccgcctgcctcggcctcccaaagtgctgggattacagttgtgagccaccgcccttggccataaaattttttaaaaagaaattaatcctgtctagcatttactgaatgctaaacatgtgccaggttctgttctaaatgttccacatgcattaattcagttaatctttgtacaatctaccagacaggaaaaaaaaaatgtacaaaagtaaccaagacagttttgggtttgttgggttttttgttttgttttgttttggtagaaacgttggtctcactatgttgctcaggctggtctcaaactcctgggctcaagcaatcctcctgcctcagcctcccaaagtgcctgcctctgcaggcatgagccaccaccctcagcctcaaggcaatttttaaaaagaacaaaaagtagacttgccctatcaartattaaaacatactaaaaagctctgataagtccaggcgtggtggcttacacctataatcctagcactttgggaagccaaggcaggag

SEQ ID NO: 618475 - DNA, 527 bp, Homo sapiens
tgcagtgagccaagatgatgccactgcactccagcctgggcaatagagtgagactctgtctcaaaaaaaaaagtgttcccttttcaccacatccatgacaacatctattgttttttgactttttaaataatgggcattcttgcaaaagtaaggttagttcttaatttgattctcaggttggtcattgttggtgtatagtagtgctactgatttgtgtacgttgattttgtaacttgagactttactgaatttgtttatcaaatctaggagtcttttggaggagtccttactgttttctaagtatgtgattatatcattgwtgaacagcaagagtttgacttcctcttttccagattgggctccccttatttctttcttttgcctgattgctctggctaagacttccagtacaacgttgaatagaagtggtgaatgtgggcatccttgtcttgttccagttcttggggaatgctttcaactttttcctatacagtatgatgttagctgtgggtttgtcatatatgatg

SEQ ID NO: 618476 - DNA, 527 bp, Homo sapiens
tgcagtgagccaagatgatgccactgcactccagcctgggcaatagagtgagactctgtctcaaaaaaaaaagtgttcccttttcaccacatccatgacaacatctattgttttttgactttttaaataatgggcattcttgcaaaagtaaggttagttcttaatttgattctcaggttggtcattgttggtgtatagtagtgctactgatttgtgtacgttgattttgtaacttgagactttactgaatttgtttatcaaatctaggagtcttttggaggagtccttactgttttctaagtatgtgattatatcattgttgaacagcaagagtttgacttcctcttttccagattgggctcccyttatttctttcttttgcctgattgctctggctaagacttccagtacaacgttgaatagaagtggtgaatgtgggcatccttgtcttgttccagttcttggggaatgctttcaactttttcctatacagtatgatgttagctgtgggtttgtcatatatgatg

SEQ ID NO: 618477 - DNA, 631 bp, Homo sapiens
tcttaactcatttcaacattaactcaaaagtccacagtccaaagtctcatctgagacaaggcaagtcccttctgcctatgagcctgtaaaatcaaaagcaagttagttacttcctagatacattgggtaaatacagccattccaagtgggagaaattggccaaaacaaaggtgttacaggccccatgcaagtctgaaatccagcggggcagtgaaatcttaaaccttcaaaatgatatcctttgactccatgtctcacatccaggtcacactgatgcaagagttgggctcccatggccttgggcagctccacccctttggctttgcatgatatagcccccmactcctggctactttcacaggctggcattgagtgtctgtggcttttccaggtgcacggtgcaaactgtcagtggatctaccattctgaggtctagagaacagtggccctcttctcacagcgccactaggtggtgccccagtagggaatctgtgtgggggctgcaaccccacatttcccttccacactgccctagcagaggttctccatgagggccccgccccacagcaaacttctgcttgggtatccaggtgtttccatacatcttctgaaatctaggctgaggttctca

SEQ ID NO: 618478 - DNA, 617 bp, Homo sapiens
tctgtcttttcctttctttctttgactttctatgtctttctctcgcgttctctgtctctctctttgactccttctctttgtctctctgtttcttcctctcttttttctctgtctctttctctctttcctttctgctggtctttccctgactctgctagctgcttatgctgctgttctcccttctccttcccctttttgatggctttggcagtgtaagactgccaaatccttgggtttttgcactgtgtgcaataactctgtgatttccttgtggtatttaatgggggtcctccagaggttaggaactccctttctttccatattgcagcatgggcatctaggattagataagcatacttgctatctgtatacacayttattcttcttccatttcccagttctaaggctcaggtaagtgccactggttctgctaactggatgctggtccctgggggaagaggcttactttcaagtatgtttacatcactaactatggcataacctacccttcgtatcccattctccacaaatgaacttccatcagtatataggttaaggtcaggattagctaaggggacttctaagagatcatctcaggtggcataaatctggactat

SEQ ID NO: 618479 - DNA, 617 bp, Homo sapiens
tctgtcttttcctttctttctttgactttctatgtctttctctcgcgttctctgtctctctctttgactccttctctttgtctctctgtttcttcctctcttttttctctgtctctttctctctttcctttctgctggtctttccctgactctgctagctgcttatgctgctgttctcccttctccttcccctttttgatggctttggcagtgtaagactgccaaatccttgggtttttgcactgtgtgcaataactctgtgatttccttgtggtatttaatgggggtcctccagaggttaggaactccctttctttccatattgcagcatgggcatctaggattagataagcatacttgctatctgtatacacacttattcttcttccatttcccagttctaaggctcaggtaagtgccactrgttctgctaactggatgctggtccctgggggaagaggcttactttcaagtatgtttacatcactaactatggcataacctacccttcgtatcccattctccacaaatgaacttccatcagtatataggttaaggtcaggattagctaaggggacttctaagagatcatctcaggtggcataaatctggactat

SEQ ID NO: 618480 - DNA, 617 bp, Homo sapiens
tctgtcttttcctttctttctttgactttctatgtctttctctcgcgttctctgtctctctctttgactccttctctttgtctctctgtttcttcctctcttttttctctgtctctttctctctttcctttctgctggtctttccctgactctgctagctgcttatgctgctgttctcccttctccttcccctttttgatggctttggcagtgtaagactgccaaatccttgggtttttgcactgtgtgcaataactctgtgatttccttgtggtatttaatgggggtcctccagaggttaggaactccctttctttccatattgcagcatgggcatctaggattagataagcatacttgctatctgtatacacacttattcttcttccatttcccagttctaaggctcaggtaagtgccactggttctgctaactggatgctggtccctgggggaagaggcttactttcaagtatgtttacatcactaactatggcataacctrcccttcgtatcccattctccacaaatgaacttccatcagtatataggttaaggtcaggattagctaaggggacttctaagagatcatctcaggtggcataaatctggactat

SEQ ID NO: 618481 - DNA, 419 bp, Homo sapiens
acaaatagagtgtgtccaggaagaaaactggaggcttacaactcgaaaacatgtcacatgggaattcactgcaaggaccaggaatgttaaaagagcagacatcacttggcctggcacagtggctcacgcctgtaatcccagcacttgggaggctgaggcgggcagatcacgaggtcaagagatcragaccatcctggccaccatggtgaaaacctgtctgtactaaaattacaaaaattagctgggtgtggtggcacacgcctgtagtcccagttactcgaaaggctgaggcaggagaatcacttgaacccgaacccgggaggcagaggttgcagtgagctgagattgcgccactgcactccagcctggcaacagagtgagactccatctcaaaaaaaaaaaggagcagacatcactta

SEQ ID NO: 618482 - DNA, 602 bp, Homo sapiens
gactaaactattgttaaaatacattccagtaattgggatttaaatacagatgagtgcttgacacaataacacatttgcatttatcttagaataaaaattctaaatatcctctacaattttaatttattttgcaaagatttactgagaactgtctctgtgctaggcaccaagttggtgataaagatacaaaggtagataaatacagtccctgccctcaagtgcttcactgtctagaaggaaattgaactggacaaataaacaaatagctttaaaacaatgtgctcaattccacaagaaagattgaccctgaagttcccaggacccctaatgagaatgcaattaattcttgctcaaaggaccagaaaaggctgacattcaggcatagcaccaccaccatgctggttgtttacagccagtgttcattttgattgatcagggccatagcactcctgaatgcagaggtgcaaggcaagctgaagaagggaattccagggtacagaactttttaaaaatygaaatacacttcttggatttacctgtccatttgtaccatcaattggcaattacagttgcgtctggttttgatttacactaggaactca

SEQ ID NO: 618483 - DNA, 430 bp, Homo sapiens
gaattcattaataaatattcattatttttattagattcattttttattcttgattttaaaaaagattaaaacatttttgtggagccctaaaactgccayggccccaaggcaccgcacctatggtgcctaatgggtaagtcacattacacacacacgtacacacacacacacacacacacacacacacacacacacacaccatcctcccgaccaggggcctggcctcctgttgtctcagcttagaagactataggtaaggtcatcttatccacttctgctctagactctggggctcatgttatttttttcacacattcttttacttctcacagattagtttggtaacccctgtctctttcttatgttggaatgcaaagatctaagcttctggttagagcttcagtatggaaataaattaagagtgtgttct

SEQ ID NO: 618484 - DNA, 430 bp, Homo sapiens
gaattcattaataaatattcattatttttattagattcattttttattcttgattttaaaaaagattaaaacatttttgtggagccctaaaactgccatggccccaaggcaccgcacctatggtgcctaatgggtaagtcacattacacacacaygtacacacacacacacacacacacacacacacacacacacacaccatcctcccgaccaggggcctggcctcctgttgtctcagcttagaagactataggtaaggtcatcttatccacttctgctctagactctggggctcatgttatttttttcacacattcttttacttctcacagattagtttggtaacccctgtctctttcttatgttggaatgcaaagatctaagcttctggttagagcttcagtatggaaataaattaagagtgtgttct

SEQ ID NO: 618485 - DNA, 432 bp, Homo sapiens
tttctgttacaagtattaaagctctaacttccctctaagcattgttttagctgtatcttattaattttcatatgttgagttttaattaccacttggcttgaggtattttatagattcccttgtgatttcttcctgacctatgggttatttagaaattattttttgggctgggcgtggtggctcaggcctgtaatcccagcactttgggaggctgaggaggyaaattgcttgagtttatgaattcaagaccagcctggccaacatggcaaaaccccgtctctactaaaactatttaaaaaattagccaggtgtggtggcacacgactgtagtcccaactacttgggaggctgaggaggaagaatcgctcgaaaccaggaggcagaagttacagtgagccaagattgtgccactgcactccagcctgggtgaca

SEQ ID NO: 618486 - DNA, 432 bp, Homo sapiens
tttctgttacaagtattaaagctctaacttccctctaagcattgttttagctgtatcttattaattttcatatgttgagttttaattaccacttggcttgaggtattttatagattcccttgtgatttcttcctgacctatgggttatttagaaattattttttgggctgggcgtggtggctcaggcctgtaatcccagcactttgggaggctgaggaggcaaattgcttgagtttatgaattcaagaccagcctggccaacatggcaaaaccccrtctctactaaaactatttaaaaaattagccaggtgtggtggcacacgactgtagtcccaactacttgggaggctgaggaggaagaatcgctcgaaaccaggaggcagaagttacagtgagccaagattgtgccactgcactccagcctgggtgaca

SEQ ID NO: 618487 - DNA, 432 bp, Homo sapiens
tttctgttacaagtattaaagctctaacttccctctaagcattgttttagctgtatcttattaattttcatatgttgagttttaattaccacttggcttgaggtattttatagattcccttgtgatttcttcctgacctatgggttatttagaaattattttttgggctgggcgtggtggctcaggcctgtaatcccagcactttgggaggctgaggaggcaaattgcttgagtttatgaattcaagaccagcctggccaacatggcaaaaccccgtctctactaaaactatttaaaaaattagccaggtgtggtggcacacgactgtagtcccaactacttgggaggctgaggaggaagaatcgctcgaaaccaggaggcagaagttrcagtgagccaagattgtgccactgcactccagcctgggtgaca

SEQ ID NO: 618488 - DNA, 543 bp, Homo sapiens
tctatttctcagcccattaataaggtcaggagcagcaacaccagactagaagaaaagcttacctatmgatttttctgccacctcttgagtgcgtccagctttccgacaagtctcagtgccatctactgtgcgctctgggtattgcaattgcttttttttttttttttttttttttttagaatgagactaagtcagagaacacaaagaacttctttccccacagtggagatggctctgaaagcgtttaaggaatagcttagatgagtggctaacacattctcccggttctgaattctaagaccacagactccatgtccagtccccaaagagaggctttgcaagctacagaatacccctctgactgggacctcaggagctaaactgaccacgtaattggttctagaaagtgaaacgttttaatttgaaacatccaaatgagcattttgtgaaaagctactgccgtccatcaaatacaacacagccagggagtcatcgctctattgcccttgtcaatcctacatctatagttttttttgctacagc

SEQ ID NO: 618489 - DNA, 543 bp, Homo sapiens
tctatttctcagcccattaataaggtcaggagcagcaacaccagactagaagaaaagcttacctatagatttttctgccacctcttgagtgcgtccagctttccgacaagtctcagtgccatctactgtgcgctctgggtattgcaawtgcttttttttttttttttttttttttttagaatgagactaagtcagagaacacaaagaacttctttccccacagtggagatggctctgaaagcgtttaaggaatagcttagatgagtggctaacacattctcccggttctgaattctaagaccacagactccatgtccagtccccaaagagaggctttgcaagctacagaatacccctctgactgggacctcaggagctaaactgaccacgtaattggttctagaaagtgaaacgttttaatttgaaacatccaaatgagcattttgtgaaaagctactgccgtccatcaaatacaacacagccagggagtcatcgctctattgcccttgtcaatcctacatctatagttttttttgctacagc

SEQ ID NO: 618490 - DNA, 537 bp, Homo sapiens
gctattacccagacataaatggtaacaccctaggcgattacagagactgaaatgtcaacttcatcttttgcttctgaatctagacctttgactacaaaaaaattctgaaacataaacgaataccctaaatatgcaaagtgttaggcttaatattatgctttccaaatatattgaaattactaaatgagagtaaaatcttttgaagatgtattttcagtagattatgggtagttttatttcttatataaaatgagtgttaaagatgtaaatttatttaataccttggtattttatttctacattttcatgttagcaaataattcaaattagcatgaaaatgaaaaataattaataaaaaggttaatcatatttttactgaaccttaatatagtcccattaatgttmagtttgaaaatgaacaaaagtgtaaaagagttattttatcaagaatacatgtttttgaatattttattcaaaaatgaccattactggaattaaaataagtataaatacaggtaattttgagagcagagatta

SEQ ID NO: 618491 - DNA, 556 bp, Homo sapiens
gaattctctcttgcctttctgtttttttctttctattttagaaatcctaaaaacgtgactgggatcggtggctcacacctgtaatcccagcacttcgggaggccaaggccatcagatcatgaggtcagaagtttgagacaagcctggccaacatggtgaaactctgtctctactaaaaatacaaacatcagctgggtgtggtagcatgcacctgtaatcccagctactggaaaggctgaggcaggagaatcccttgaacccaggaggtggagcttgcagtgagccgaggacacaccattgcactccagcctgggacagagtgagactccatctgaaaaaagaaaaaagaaatcctaaaaacattgttccttatatactgaartaaaacaaaagcataaacactaagtcatcttaattatcatttaaaaattttgacttgaaatatgcctaaacggagttaatgtatgtaattcaatctgtgtttctcttcatcaagatgattctaaattaaatcctttaagaaaatatgccattatgaatagaaaatataaaacat

SEQ ID NO: 618492 - DNA, 557 bp, Homo sapiens
gaattctctcttgcctttctgtttttttctttctattttagaaatcctaaaaacgtgactgggatcggtggctcacacctgtaatcccagcacttcgggaggccaaggccatcagatcatgaggtcagaagtttgagacaagcctggccaacatggtgaaactctgtctctactaaaaatacaaacatcagctgggtgtggtagcatgcacctgtaatcccagctactggaaaggctgaggcaggagaatcccttgaacccaggaggtggagcttgcagtgagccgaggacacaccattgcactccagcctgggacagagtgagactccatctgaaaaaagaaaaaagaaatcctaaaaacattgttccttatatactgaaataaaacaaaagcataaacactaagtcatcttaattatcatttaaaaattttgacttgaaatatgcctaawcggagttaatgtatgtaattcaatctgtgtttctcttcatcaagatgattctaaattaaatcctttaagaaaatatgccattatgaatagaaaatataaaacatc

SEQ ID NO: 618493 - DNA, 562 bp, Homo sapiens
cataagcaaagtagatattattagcagatctctatgaaccagaagagagactcatagaggttgacgggattatagtgtagagctagtaaatattttaatgtagtgctttattgtattatgaagttgtgtcacaaaatgtatttggctgattttgtagttgtactctagatactcatccaagtatctgtttttaaatgaatttgatagtgacacaacaactaatcctaaatttgtccccactcaagagatttgttctgaaagttgtcaatcattaatttgtaagaaaaaagttttttttttaacataattcctgatcttaatttygattactctaagcaaatttttttatcaatatgaagaaaatattttacaggatatctcatttactcaaaacggtcattggtaagggggaaattatttttcctgaatctgctgtgatccaagaaatcgttgtttctttcagagcatcccgcgggtgttcagcaagtttcctataaaggaagctcgaaagccctttaaccagaataaaaaccgttatgttgacattcttccttgtgagtat

SEQ ID NO: 618494 - DNA, 278 bp, Homo sapiens
ctgtggcttgtctcttcactttgttgattgttttctttgctatacagaagctttctaacttgatgtaattctacttgttcatttttgctatggttgcctgtgcttgtggggtattgttgaataaaactttgcacraaccaatgccctggagagtttccccaacattttcttttagtagtttcatagattaaggtcttagatctaagtctaatccattttttttatttaatgtttgtatacagcaagagatagggctttagtttcattcttccacatat

SEQ ID NO: 618495 - DNA, 408 bp, Homo sapiens
tcacatatatgcatatacccaagagaagcatcaactagaaacatttgcaagaatgtgcattgcattcagcattgtcaaaatagcaaaaaaaaaaaaaaaaaaaaagtgaaatacatatcaatgaaagaatggaaacaccgtaaatatgtatcaataggggaataggaagacaaaatgtggacatgtgaactctctgtacaacaaatgctatgttgtggtagaaagcaatgatctaggtttgtgtctgtctgtttggagagatgctcagatgaaaacaatgagtgagtaaagctgccatacgaaacattcaagatataatttatgtgatttaaaaaaaacatgaaaatgtacaatgcktgtgattacagatacatagatagcagtgtagaaacataaaaacaaattgtt

SEQ ID NO: 618496 - DNA, 601 bp, Homo sapiens
ttaaagttgggctaacccattatagacaacaaagtagatagtccatccaagttcagcaaaataatcatatttgaagctraagttctccataaaggaacatctctaaattagaataactggcttgatgattaacactaaatcattaatttagaaataagactgatatttaatcctgtacaatcatcaaatctttaaagaaaatgtaaatattccccaagaggtgagaggcagtggattcatgataaatgcactgtggaaactctgggctttgtttatatacttgcttgatactgttcttcaaagtctaaaaagaaaatcttgaaagaatattcaaacttctcaacagttctgaccccaataatttatcatctaaaatattagaagaaataagtccctgaatgctctcgggaaagtaaatcttctctgagttggcagcaggatttcaatctcaatcaaactgggtctcctaagtcttgatttatgagaagtagacaaatttttctttaaaaaaaaaacagaaaacttataaggttcacatacaacctaaatgaattctgtggtgtttgtatgctagagataacagagaagtaaattatacaat

SEQ ID NO: 618497 - DNA, 450 bp, Homo sapiens
gtttcaataaaagaaaagaatgcataatagtttgagtgactgaagaggtaagtgaaagcaaactttattttttgtgcccataattggtgattctaatccccttttctcattaataagtaaagatgtaataagtaaccttaatataaattagaaactgtggcttcattgtaaaatttacttcttttcatctgttaaataagcacaaggatctatatactactataagggttaattgttaattttatatgttacaatagtgaaataattagaagtagggacacaaaataaatgtgagttgaatggacaataatcggtgctgtatagttaagacatataaaatcagacaaaagagtaaagatatagaaaaccaaaccaatctaaaggttgtgtttgaccttcatgakaagctattacagaattcaccaaaacgagtttttattacttcatgaa

SEQ ID NO: 618498 - DNA, 601 bp, Homo sapiens
ggaatctattcctttgatttaggctgtggcctcctttcttttgttttctaccttctacaacttgttgaaattgctctacttctaatttcccttctctcattttcactgtcattataaatctatggcattttcagttttttaatattagcagggttcctggaaagaagggggaaacacatgtgtgcttagaatgcaagctttatctgaagacttggctattttattaagtttgttgagaaaagtctgatgctgcttaatatttttgtagaacttaatctaattattatggattggaatgctaacttacagtcatttgcagtttcttgcaaaatcttacttcagagtattctagaagttagatgttgcctctgatgaggtttttattcacaaatatcttgaaacaatcatgctgattgatatatgtatactagtaatcactggtatggattgacaatttcagtgaaaggaatttcagatagagataagacaaggaacactttgggtcattttargagcctattgcaataagaacttcttccctaaaaatgttcactgcaatccacctatatattcacattcatgtatcccatccatttttata

SEQ ID NO: 618499 - DNA, 670 bp, Homo sapiens
taaaagcaaatagaatctaatgtaggctctcaaaaacatcaaatctggagtgtattcaaaactcccaacaaaaccttctgaaatgatattgccccagtcaatctgaatctctttcgtgtgctttgcagttattccaaaagcaagacaaaggaagattgagcaggctcctcttacgctctagaccatcaatattctctccscagctcacttcagactctcttctttccctctttgttttctcattcccctgttatccttactccattcccccactagtaataaggcccaggagccaacggggcaggtagaaggagggtgtggagctcggaattggccagtgtttcaatcccttttattcaaaattgccctttggtgggccatttcattagtgagattttatcaaaagaaacgtgtatgcgtcatacaattgtctataatgctaaagaattaaaataacttgaatatccaaatataagcacactgcctacaatcaaatgtaatgcaagtattaaatgcttttacttcagacatcttttgacgtggaaatgtatttagagtacacttttcattttttgaaagaaattatgaaagaaaatatacaacctgttaccattttgaaaagaaatatcatgtattttatatacatagaaaatgttaatattggttgcca

SEQ ID NO: 618500 - DNA, 670 bp, Homo sapiens
taaaagcaaatagaatctaatgtaggctctcaaaaacatcaaatctggagtgtattcaaaactcccaacaaaaccttctgaaatgatattgccccagtcaatctgaatctctttcgtgtgctttgcagttattccaaaagcaagacaaaggaagattgagcaggctcctcttacgctctagaccatcaatattctctccgcagctcacttcagactctcttctttccctctttgttttctcattcccctgttatccttactccattcccccactagtaataaggcccaggagccaacggggcagrtagaaggagggtgtggagctcggaattggccagtgtttcaatcccttttattcaaaattgccctttggtgggccatttcattagtgagattttatcaaaagaaacgtgtatgcgtcatacaattgtctataatgctaaagaattaaaataacttgaatatccaaatataagcacactgcctacaatcaaatgtaatgcaagtattaaatgcttttacttcagacatcttttgacgtggaaatgtatttagagtacacttttcattttttgaaagaaattatgaaagaaaatatacaacctgttaccattttgaaaagaaatatcatgtattttatatacatagaaaatgttaatattggttgcca

SEQ ID NO: 618501 - DNA, 670 bp, Homo sapiens
taaaagcaaatagaatctaatgtaggctctcaaaaacatcaaatctggagtgtattcaaaactcccaacaaaaccttctgaaatgatattgccccagtcaatctgaatctctttcgtgtgctttgcagttattccaaaagcaagacaaaggaagattgagcaggctcctcttacgctctagaccatcaatattctctccgcagctcacttcagactctcttctttccctctttgttttctcattcccctgttatccttactccattcccccactagtaataaggcccaggagccaacggggcaggtagaaggagggtgtggagctcggaattggccagtgtttcaatcccttttattcaaaattgccctttggtgggccatttcattagtgagattttatcaaaagaaacgtgtatgcgtcatacaattgtctataaygctaaagaattaaaataacttgaatatccaaatataagcacactgcctacaatcaaatgtaatgcaagtattaaatgcttttacttcagacatcttttgacgtggaaatgtatttagagtacacttttcattttttgaaagaaattatgaaagaaaatatacaacctgttaccattttgaaaagaaatatcatgtattttatatacatagaaaatgttaatattggttgcca

SEQ ID NO: 618502 - DNA, 567 bp, Homo sapiens
cgtggtagtgggtgcctgtaatcccagctgcttgggtggctgaggcaggagaattgcttgaacccaggaagcggaggttgcagtgagccgagatcacgctattgtactccagcctgggcaaaaagagcgaaactctgtctcaaaagaaaaaaaattatgccaaagcataaatataacacatattttggttaggggaaactgaggacaaataaaatatacacagcattcacttataactatcttaaaagcacttaacgctatctgaaaattatcttgtttgctatctgttgaatgcatatatcttcccagtaggaaataagacctatgagtagaaacctcatctacyttgttcaccaacaagtatgtattcattgaaaattgtaactgtatataatatatacctataaatatttgatgactgaaataaaaaacaaatattaaaatgtagatcgaaaagtgaaagaatttgactaagataaaagaaagttttggcaattcctgagtgtacttcacaatttaagtttctgtttattgggaattagatgttagtttcttccattaagaaag

SEQ ID NO: 618503 - DNA, 554 bp, Homo sapiens
ctcaatatcactaatcatcaggcaaatgcaaatcaaaaccataatgccatacctactcctgcatgaatggccacaatcaaaaatgaaaaaatgatagatgttgacatggttgtggtgaaaagggaacacttttgcaytgctggtgggaatgtaaactagcacaaccactatggaaaacaatatggatgttccttaaagaactaaaagtaaatctgccattagatccagcaatcccactagcgggtatctacagagaggaaaataagtcattatatgaaaaatacacttccacacgcatgtttgtagcagcacagttcacaattgcaaacatatagaaccatctcaaatgcccatcaatgcacgagtggataaagaaaatgtggtatatatatataacatggaatactactcagccataaaaaggaatgaaataatggcatttgcagcaacatggatggagctagagaccattattctaaatgaagtaactcaggaatggaaaaccaaatatcatatgctctcacttttaggtgggagctaagctatgaggacgc

SEQ ID NO: 618504 - DNA, 613 bp, Homo sapiens
taagaaaatgagaaaatttacaaatatatggaaacaacacactcttgaacaatcactgggtcaaaaagaaaagcaaaagaaaaatttaaaaatatattgagatgaaatgaaaacacaacgtactaaaacttatgggatgcagcaaagacagtactaagaggaagtttatcatgataaatgtcaacattataaaagaagatctcaagttaacatcctaactttataccttaaggaactataaaaagatattaagcctaaagtaatagcataggaataaagtaataagatacagagcaataatatatctaatcgagaattttaaaactatagaaaaaaatttaaaaaatttctttgaaaaatacacaaaattgacaaactcttacctagatttaagggaaaaaagagagaagactcaaataaataagaaaggggggrcactaataagtaaaatcagaaatgaaacaggaggcaatctcctttttcaggataagagattatttgaattcttatatgcctacaaattggataacctagaaaaaatagataaatttctaaaaacatacaatctactaagactgaatcaagaagaaatagaaagtttacatagactaat

SEQ ID NO: 618505 - DNA, 506 bp, Homo sapiens
ggacttgccagactccagaactgtaaaaaacaaatttgttttgtttgtttataagccactagtttttatatgtctgttatatcagcctgactggactaagacaggcggctaccctctgtggatgtgtgggtgcctatgcaactatagagagaagggattttttctaatgtttcatttctttgttgacagggtctcgctcggtcacccaagctggagtgcagtggtgcaatcgtagctcacagcaacctccaactcccaagtagctacaattacaggtgtgcaccaccatgtccagataatttctgtgtgtgtgtatgtatgtatatacttgtatgtatgtatatgtatgtgtgtgtatatatatatatatatatatatatatatatatatatatatatatayacatacacactcacatgtatatatacacatacatatttttaagtagagacaaggtttcaccatgttggccaggctgttcttgaactcctggcctcaagtgatct

SEQ ID NO: 618506 - DNA, 521 bp, Homo sapiens
tgagggtagaaaaatgtgtaataaactcagcctttgtgaggaaatttcaccagagctgagaatgggtcagattttacacctcagtcatgactggacartggtgaatgggggtatctgtgcaaagagaaggatttgagcaaaggctcagggagaaggcagggggcacgtggtgggacagtccagagcctttggcctggggatatgcatgaggctgaaagtcacaccaggaagggctgactcagctgttgacttcagactctggattgggagtgatctcatcagctctattttccaaggagattattccagcaagagtgtatgggctgagaggataacagcctagaattggaggcagcatagtggcccacgcctataatcccatctactagggagacagaggcaggaggatcacttgagcctagatgtttaaggctgcagtgagctatgattgtaccactgcactacagcctgggcaaaagagaaagacctcatttttctttttttaaaaagagtctagaagt

SEQ ID NO: 618507 - DNA, 521 bp, Homo sapiens
tgagggtagaaaaatgtgtaataaactcagcctttgtgaggaaatttcaccagagctgagaatgggtcagattttacacctcagtcatgactggacaatggtgaatgggggtatctgtgcaaagagaaggatttgagcaaaggctcagggagaaggcagggggcacgtggtgggacagtccagagcctttggcctggggatatgcatgaggctgaaagtcacaccaggaagggctgactcagctgttgacttcagactctggattgggagtgatctcatcagctctattttccaaggagattattccarcaagagtgtatgggctgagaggataacagcctagaattggaggcagcatagtggcccacgcctataatcccatctactagggagacagaggcaggaggatcacttgagcctagatgtttaaggctgcagtgagctatgattgtaccactgcactacagcctgggcaaaagagaaagacctcatttttctttttttaaaaagagtctagaagt

SEQ ID NO: 618508 - DNA, 630 bp, Homo sapiens
actctggattgggagtgatctcatcagctctattttccaaggagattattccagcaagagtgtatgggctgagaggataacagcctagaattggaggcagcatagtggcccacgcctataatcccatctactagggagacagaggcaggaggatcacttgagcctagatgtttaaggctgcagtgagctatgattgtaccactgcactacagmctgggcaaaagagaaagacctcatttttctttttttaaaaagagtctagaagtggagaaaccaatggcagttgtctggctatgagatgatgaagacctacactaaagtgtgaaaaagagaacataaagagttaagagacatttcaccgggacttagtgacagactgtactgggcaagtgaaagtaaggcaaacagagcctggtggtataactttctgaaacggggtgtttagaaaaggcagtctacttgagaaaggaaaggacttcagatttttgaacatgctggacttgctcaagtgtttattcttcatgattatcagattagaataattaaacagcttaatttaggcagaggcctgaaagctgggttattctagagtcattttcatgctgtgagacttctgagctcattcataaa

SEQ ID NO: 618509 - DNA, 618 bp, Homo sapiens
ttcaatatattctcactggaaattaaaatttacagatagtgtaaaacccactccaataaaatatagcactgtaaaatgttaaaggtaacccactctcacccccaaatatcctgctttatatggattcactaataataacaaaagagccaggttttgcttttgttacttgacraaacaagaagatttctagtataaagaaccacgctggaaaaattgtacttttggtttatatgttttcatgaaagtcagaacttgttaaaccccttgggcttctggaagaatgcagaggatttaaagagcatttcttactggacctcccagatgctggcaaagttcaagggaatgaagaggtgttaggagaaaacaggcagatatacacatacaatgggcattcattccattttttatttctggtagaagatagcccttctttacaaaaaataagattcacaaaaataaaattctcagctttctctaatctttgcaaagtagccctcttctttttctcatctcaaattactgaagaaacaaacaccatacctttctattagactggctgaagactgcgctccatgagacctttgccttttgttcataaatgtgtagaatttgtgcacc

SEQ ID NO: 618510 - DNA, 579 bp, Homo sapiens
cttcaccttctgccatgattttaagtttcctgaggcctccccagccattgcagaactgtgtgtcaattaaacctctctagtttataaattactcagtctcaggtagttstttatagtggtatgaaaatggactaatacactttgtatttttgctcctttttttttcctttccttttttcttccttgaataacctctctgctaatggtccgtctggctaactctacttagcccaagcgtcacctcatgtttgaagcccttcctgatttcctctgctgatttaggtgcccagcatccttagtgttcacactaagctttatgaaatacatctatcaaaacaattaccttgtagcataaatacttgtttctcctgattggactctgaagtctaagactgtagcttttagtttgtatctccataaatgatcacaggcttggtatatagaaattcagtgaatgaattaaggtaagatttccaagatatgttactcagcaagtcttcaaaagcagttatgttcaaaagcagacatctctacatccagtgaattaatgtaggtgaatgtaatgctttggtaaaaaag

SEQ ID NO: 618511 - DNA, 620 bp, Homo sapiens
tgctacgttttttaagccacaattgtgtcaactagcgttgtgcccgcggacgccacatcagttctggcgaatgtggctgttttcgggccttctgtgccgcttcacttgagaactgcaggagggttgaaaatgggcgtgaccgcgcagtctgcactcccttccctgaagcccagaaagtgtcagccaaggagggagaacacctggcccagtgggaccagtcttgctccttttgggaaagtgataggatgggaggagaattcctgtagtataactgaatttctcattcagagagattgttactttgtcagagaagtataaggtattagtaaaacttgttccacattgtgtagagttgaataaggataatgaaaacattactttcacagtcgcctggcctgccaggtctcccttctaacctttaaggaccatctttgggtggaagcgcagtaaaggtggtcctrggggaaatcatggactttagtcagagtcccacgggctgactggtctgctgtcactcacatgatctcttagaggctccttctatctgcttcccagggcagctgggtttctgcttggctggggcagggagtgggcagcagaggagcaacaggcaagagggt

SEQ ID NO: 618512 - DNA, 489 bp, Homo sapiens
actttcacagtcgcctggcctgccaggtctcccttctaacctttaaggaccatctttgggtggaagcgcagtaaaggtggtcctgggggaaatcatggactttagtcagagtcccacgggctgactggtctgctgtcactcacatgatctcttagaggctccttctatctgcttcccagggcagctgggtttctgcttggctggggcagggagtgggcagcagaggagcaacaggcaagagggttctgaggtcacctttcctgggctgtcattaattgtgggatcttagattggtaactaaactccaggtcatagtcgcctcatctgtaccaacaatacrtacctcataggactattgtaagagttaagatcatgtatgtgagtcctggtacatggattgtgcttaatatgttagtgtcctgaaatctgaaaaaagggcaaatatgacacatgcatataaaaatggtatcagtagtgtggagaattaaa

SEQ ID NO: 618513 - DNA, 469 bp, Homo sapiens
cattgccactttctaacgagggaggcaagaatgggcacaaccccacagtgtcactaaacactcatgccctgcttcatctcttgcactgggaaccccaaggccatagatgacttaaacaaaacatggctgaaagagacacgcccgatgcacatgcagattgtcccctaaattgagcacatgaataaaacttacccaaagttttcataagcatccaagtttcttgtgtgcccagagctaaaccctaaattgtagggcccaaggctaagtcaacatcctatcggcaaattggtggaaagtagggtcaaaactaggatttggatagatrggtagatacaccgactcagtattagttttacctaatggaatatggctatgttattcaacccaaactgatggaaaaaattaccagttttaacaaccaaatccagtttttaaataacacaaaatctaagtatgccaattacgaacc

SEQ ID NO: 618514 - DNA, 469 bp, Homo sapiens
cattgccactttctaacgagggaggcaagaatgggcacaaccccacagtgtcactaaacactcatgccctgcttcatctcttgcactgggaaccccaaggccatagatgacttaaacaaaacatggctgaaagagacacgcccgatgcacatgcagattgtcccctaaattgagcacatgaataaaacttacccaaagttttcataagcatccaagtttcttgtgtgcccagagctaaaccctaaattgtagggcccaaggctaagtcaacatcctatcggcaaattggtggaaagtagggtcaaaactaggatttggatagatgggtagatacaycgactcagtattagttttacctaatggaatatggctatgttattcaacccaaactgatggaaaaaattaccagttttaacaaccaaatccagtttttaaataacacaaaatctaagtatgccaattacgaacc

SEQ ID NO: 618515 - DNA, 455 bp, Homo sapiens
agacagcatctttaccttgcttctttttaatcaataactaaaaagatttgcaagtcttaaaattgtatcccttcctatgtcaaccagcccggagtacaatggcatgatcatggcttaccgcagcctcaagctcctgggctccagcaatcctcatgccacagcctcccaagtaattgggactacaagtgtgcaccaccatgtctggctaattatttttgttttgttattttttgtttttgagacagagtctcatcctgtcacccaggctggagtgcagtggcgtgatcttggcttactgcaagctccgcctcccggattcaagtgattctcatgcctccacttcccaagtagctgggattatgtgtgtgtaccaccacgcccrgctaatttttgtatatttagtagagatggagtttcaccacgttggccaagctggtctcaaactcctaacctcg

SEQ ID NO: 618516 - DNA, 516 bp, Homo sapiens
aaaagagaacagagtgggcccccatttccagcatcaacaatgatcagggttttgccacactgggttcatccatcaatcccagccatccatcaatgccagccagccatgktttttacccctacctaccttattatgcttctctaaaagtagggatatttttggttgggtgcaggggctcatgtctgtaatcctagcactttgggaggctgaggtgggtggattacctgaggtcaggagttcgacaccagcctggccaacatggggaagccccatctctactaaaaatacaaaaattagccaggtgtagtggcgtgtgcctgtaatcccagctactccagaggctgaggcaggagaatcacttgaacctgagaggcggaggttgcagtgagctgcgatcataccactgcattccagcctaggcaacaagagtgaaactgcgtctcaaaaaaaaaaaacaaaaagggggacattttcttaaccatgatgccactatctatcgcatcaaaaaatccaagg

SEQ ID NO: 618517 - DNA, 536 bp, Homo sapiens
gcattcacaaaaaaaatctgtacttctaaaacatcatacttaatgtgaaagactaaatggcttccccctaagattgagaacaaggctaggatgtcagctttcaccacttccactcaatattgtattggaggttctagctagtgcaataatgcaagaaaagcaagcagacaagtaaatgtatctaggctcaaaaggaaaatgcgaagctgtctttattctcagacaacatgatcctgtatgcagataacaccaaggaatccaaaaaattaccagaactaatacatgagttcagcgagatgtcagtactgaacaatatataaaaatcagttgtttctgtattctagcatggacaatcaaaatggagtcaagaaaacygttctctttttaatagcctcaaaattaataaaatcttggaataaaattttaaaaaagcaagtgtaagtcttgcatgctgaaagctaccaacgattgctgggagaaattaaaatctgaacaaaaatgatggacattctgtgttcatggattggaaggttcaa

SEQ ID NO: 618518 - DNA, 594 bp, Homo sapiens
tgatacataatgattgtacatatttctggggtacaagtgacattttgatatattcatataacatgtaacaatcaaattagggtaattagcatatctatcacttcacacattgatcatttatttgtattgggaagcttacaaataatcttctagctattttgaaatatatggcaaattataactatagtcaccctactgtattatcaaacactgtaatttatttcttctatccaacttatttttgtatccattaaccaacttaattagttcccccaactcccacaatgggccatttttgattgtagagtacaatatgaaggctctggtccaactgagaaaatagtatctgatataaaaaaaaaagtgtaattctaaaagccttttagtaaagtaatataaatagcaaatctccctcctgagattaaaatgtagtaacactactttttctaaaattcttgtaaaaaattgttaatgaagggattgatatagcttacttttatatctgattattttacagcttacagtgcaccattttaaagattttgtgcartcttgcaggaaattccaggactggttaatgtatcatgaaatatt

SEQ ID NO: 618519 - DNA, 565 bp, Homo sapiens
tttcagcaagacaaaagatcarttagaagaagagaggttgtaaataattatacaataaataatataattttatgtttccaccacaaatccagacctggccctgaaattagtgtgccctggaagtgtgccatggggaaatggaggagaggtgaggggggcaggtagctttgtgaagataggattctgtacccttgatggtgactctggatctcaggcagcatccaactctaaaggctatcaaagatggaggggcccagctctctgcctttgctgcaaggcggtggggaaaagaattggataattggtcaatatttaaagactttatgtaacatggattttgtagcctccatatttgccctgccctgatttaacaagagtggatggttgtgggtgtggtggttgctattccatggctcatgagaaggtggagagtggaaggagaatggggccttcatggaactgaggccagccacccagagagagtggccagaaatgaggctgggctgttgtaaggtgcttcaggatattttaaggagttcagtcctaactacagtgggaaggtata

SEQ ID NO: 618520 - DNA, 529 bp, Homo sapiens
gggttagggttttaatatacgacttttttttttgtgggggaggacaattcagcccataatcctcatcttaggaagtgggttgagcaacaaaatgtccaaatrttaaacctaacaatttgccttgcttttaaaaagctctcccagtggttctattttcaatcacgttgtaggtcaaaatttaggaagattataatgcaaagattcacctactgtgattgagaattgaacccaatgtcatttgatgtcttttctactcatattatttgatgattttatgtcactctgattagtacaacgttacagattaaacatagacaaggaaactagatttttggtcatgtgccaactttagttggcaagtgctttctgaagcactgtaacgaggagagttgtgagaccatgttcaggctttaggtggaaaagggtcctaatgtattatttatgtttgccatagaatagggagtagaacagctccgcatgtgctacgcatgtgtctttcttgtaatagtcatctaaacagagactaaac

SEQ ID NO: 618521 - DNA, 529 bp, Homo sapiens
gggttagggttttaatatacgacttttttttttgtgggggaggacaattcagcccataatcctcatcttaggaagtgggttgagcaacaaaatgtccaaatgttaaacctaacaatttgccttgcttttaaaaagctctcccagtggttctattttcaatcacgttgtaggtcaaaatttaggaagattataatgcaaagattcacctactgtgattgagaattgaacccaatgycatttgatgtcttttctactcatattatttgatgattttatgtcactctgattagtacaacgttacagattaaacatagacaaggaaactagatttttggtcatgtgccaactttagttggcaagtgctttctgaagcactgtaacgaggagagttgtgagaccatgttcaggctttaggtggaaaagggtcctaatgtattatttatgtttgccatagaatagggagtagaacagctccgcatgtgctacgcatgtgtctttcttgtaatagtcatctaaacagagactaaac

SEQ ID NO: 618522 - DNA, 529 bp, Homo sapiens
gggttagggttttaatatacgacttttttttttgtgggggaggacaattcagcccataatcctcatcttaggaagtgggttgagcaacaaaatgtccaaatgttaaacctaacaatttgccttgcttttaaaaagctctcccagtggttctattttcaatcacgttgtaggtcaaaatttaggaagattataatgcaaagattcacctactgtgattgagaattgaacccaatgtcatttgatgtcttttctactcatattatttgatgattttatgtcactctgattagtacaaygttacagattaaacatagacaaggaaactagatttttggtcatgtgccaactttagttggcaagtgctttctgaagcactgtaacgaggagagttgtgagaccatgttcaggctttaggtggaaaagggtcctaatgtattatttatgtttgccatagaatagggagtagaacagctccgcatgtgctacgcatgtgtctttcttgtaatagtcatctaaacagagactaaac

SEQ ID NO: 618523 - DNA, 529 bp, Homo sapiens
gggttagggttttaatatacgacttttttttttgtgggggaggacaattcagcccataatcctcatcttaggaagtgggttgagcaacaaaatgtccaaatgttaaacctaacaatttgccttgcttttaaaaagctctcccagtggttctattttcaatcacgttgtaggtcaaaatttaggaagattataatgcaaagattcacctactgtgattgagaattgaacccaatgtcatttgatgtcttttctactcatattatttgatgattttatgtcactctgattagtacaacgttacagattaaacatagacaaggaaactagatttttggtcatgtgccaactttagttggcaagtgctttctgaagcactgtaaygaggagagttgtgagaccatgttcaggctttaggtggaaaagggtcctaatgtattatttatgtttgccatagaatagggagtagaacagctccgcatgtgctacgcatgtgtctttcttgtaatagtcatctaaacagagactaaac

SEQ ID NO: 618524 - DNA, 609 bp, Homo sapiens
ctagatctcttttttcagcttaataatttttaaatacttctagctagatgaacttgaagaatatatttattaaatcttaatcttttattttatattgtcaagatattttgamtgtctttttttcagcttaataatattccatactaggaaagtggaaagaaatatatcagtaattctggtttctatatttaactgaaaattcttagttccacttaactgcttgctcaaaatagagtcagactgtttgttacttgcattttcagagatactcactcactctatatccactataacatgtactgcccatttctttttatccagacttggcttttctccatatgtgattgattctacagactcattgtctatgtccctcatgcagagcctcttatttttcttcccacagtggtaataacaaagatcttactctgcttactttttgattagaagagtgccacaaactggttcagagattcaaactcttccctcattgcagaaaacacagataatattacacttcttaaattaaaaaaaaaaaaaacatttccttgctcagtagttttactccctaattgttccattttcagtagctgccttcactaccctgta

SEQ ID NO: 618525 - DNA, 609 bp, Homo sapiens
ctagatctcttttttcagcttaataatttttaaatacttctagctagatgaacttgaagaatatatttattaaatcttaatcttttattttatattgtcaagatattttgactgtctttttttcagcttaataatattccatactaggaaagtggaaagaaatatatcagtaattctggtttctatatttaactgaaaattcttagttccacttaactgcttgctcaaaatagagtcagactgtttgttacttgcattttcagagatactcactcactctatatccactataacatgtactgcccatttctttttatccagacttggcttttctccatatgtgattgattctacagaytcattgtctatgtccctcatgcagagcctcttatttttcttcccacagtggtaataacaaagatcttactctgcttactttttgattagaagagtgccacaaactggttcagagattcaaactcttccctcattgcagaaaacacagataatattacacttcttaaattaaaaaaaaaaaaaacatttccttgctcagtagttttactccctaattgttccattttcagtagctgccttcactaccctgta

SEQ ID NO: 618526 - DNA, 555 bp, Homo sapiens
tgtgataataactgggtattcttttaaactgctaagttttagtaatttgttatataacattacaaaaatagtattattttaagttctattgttatgaaaaaacaataaatgagagcctatctttgtgtttacatttgastcatgctaatttttgggaagattcattaatttttggaaacactaattataaattatagttccatcttataattgcattacttttagtttgaaaattaatcttttataattgacatttctttccattttatatttttggtgattttcttcctcaatacaacttgccataatgacaataaactcagcaaagctgacgtaacccaaaccttctgattgtgttttatgttatttatttaaccagagaattttattttttagaattttcatgggtacatagtatgtatatatatatgtgtgtgtgtgtgtgtatatatatatgggtatatatatatgtgtatatgtgtgtgtgtgtgtgtgtgcgcgtagggtatatgagatgtttgacacagtcatgcaatgtgaaataattacatcatg

SEQ ID NO: 618527 - DNA, 555 bp, Homo sapiens
tgtgataataactgggtattcttttaaactgctaagttttagtaatttgttatataacattacaaaaatagtattattttaagttctattgttatgaaaaaacaataaatgagagcctatctttgtgtttacatttgactcatgctaatttttgggaagattcattaatttttggaaacactaattataaattatagttccatcttataattgcattacttttagtttgaaaattaatcttttataattgacatttctttccattttatatttttggtgattttcttcctcaatacaacttgccataatgacaataaactcagcaaagctgacgtaacccaaacyttctgattgtgttttatgttatttatttaaccagagaattttattttttagaattttcatgggtacatagtatgtatatatatatgtgtgtgtgtgtgtgtatatatatatgggtatatatatatgtgtatatgtgtgtgtgtgtgtgtgtgcgcgtagggtatatgagatgtttgacacagtcatgcaatgtgaaataattacatcatg

SEQ ID NO: 618528 - DNA, 628 bp, Homo sapiens
atttattgagcacctactatgtcactgggctagttgctagaacaacaaaattgaatacaaggcacagtttccctaaagaattgatcttatagtttagtgactttagtgttgaaaactgatacacaagcagcacatttcattataagattttaagtgctatgataargatatgttcaagatgtttttctgctgattaagaagtccctgagacaatgccagtcctgaggctaagatactttaatacacaaatcactttgtgtgatgatgtttttcttttgtcatcagaaactcctgtagaatgatttaagctctatgccttgtatataaagctgctcctacaacttgcttataaacttgattctgaaagtacgtatatgtagtatgcgtcaaatgtaaatacacaatagggatttagttagagttatttgttttaaaatgtcttttcatcttttaaatgttgcagcagatcaattatgaaagcactgctcagtattgatatggcaggttacatggcctgtgtttgtttgactgctcccagtaaatcacattcttactcagttggcagtctgagaaggggaagcccaaggatatctctggtattttgacaagtagactttgcaatacacag

SEQ ID NO: 618529 - DNA, 563 bp, Homo sapiens
taagttaaaaagaaggggtacaaagttaaggcatataattttattagtttctttttttatttttttattgtttacacagtgttaagttgctatcaggttaaaataatgggttgtaagatagtatttgcaaacctcatgataagttcaaaccaaaaaacacaccacagatacacaaaaaattkgaaaagcaggaaactaaatcatattaccagagaaaattacctgaactaaaagaagacgaacgaaagaaagaaagaaagaaagaaagaaagaaagaaagaaagaaagaaaaagaaagagagagaaagaaagaaccacaaaactagcagaaaacaaataacaaaatagaaagagtacatccttactcgttaataataacactgattatcaatggatgaaactctccaatcaaaagacagagtagctaaatggattaatttaaaaaagagacccattgatatgctgcctataagaaagacaactcacctacaaagatacaaacatagactgaaaataaagagatggaaagagatattccatgccaacagaaaccaaaaaaatag

SEQ ID NO: 618530 - DNA, 563 bp, Homo sapiens
taagttaaaaagaaggggtacaaagttaaggcatataattttattagtttctttttttatttttttattgtttacacagtgttaagttgctatcaggttaaaataatgggttgtaagatagtatttgcaaacctcatgataagttcaaaccaaaaaacacaccacagatacacaaaaaatttgaaaagcaggaaactaaatcatattaccagagaaaattacctgaactaaaagaagacgaacgaaagaaagaaagaaagaaagaaagaaagaaagaaagaaagaaagaaaaagaaagagagagaaagaaagaaccacaaaactagcagaaaacaaataacaaaatagaaagagtacatccttactcgttaataataacactgattatcaatggatgaaactctccaatcaaaagacagagtagctaaatggattaatttaaaaaagagacccattgatatgctgcctataagaaagacamctcacctacaaagatacaaacatagactgaaaataaagagatggaaagagatattccatgccaacagaaaccaaaaaaatag

SEQ ID NO: 618531 - DNA, 585 bp, Homo sapiens
tttgatgaaagtgattacatttgaagcactacaagtatatacaaagaaaatgactagcaagattacaagcaaagatgcattttgcaatttgtgcatattggagcattgaccagctgccctgcagagttactgagccttcttgtcttagagtcctttgatgcaccaaaatagtggaaactgtcagttcctctgagtctggtaattagctgaaatttactcttcaacacccatctattcagcaccataatgtttcataaccagtgacatactgtgcctgcttcaaacctactctcttctccgtctttaagcttttaaagcttttattccccttctcacttgagaataaaacttttttcatgaaatcaccttgcttttttttaattaaacattttttattttctttgttctaacaaaaatgtattcatttgtggattttttgccttgttatattgtaaatgccaacatttatggcctgggatgcaaacactamacattattgaataaaaatcaatggcttattaacaaacatattgattgtttagtaatgagatgaagatatgtttacatatcatgcactctgaccct

SEQ ID NO: 618532 - DNA, 542 bp, Homo sapiens
tcttacttggcctttctgattttcaagtcattcacctcactattgcaattattgccctttcattctgaaatgttgataaagaatctcttaaaatcccatcctcaaacaaaattagtaataacatcttaagacaggtgtaactgatcttcatatggggaagaggttggaacactgtcacgctttgagaggaatttgtttgatacccacatgatccamgtgagcatttcttggtttccccttgcccaatttaatgagaaatagacaagtgtaggaattacactccgaaaaaagcatagagattttgtgctcagattctctactgcaggaaaacaactgagactagaactggtgctagctgagggtgatggaaatctagaatggatattatgagaggaagagaaggaatgttatttgtggtcttaagagtaggctgccatcgtgggggctgttgtttttccaacttataaattggtttcccccagtggttcatgttctagactagttgaaataagcccattttaccagtctatactattgaatgc

SEQ ID NO: 618533 - DNA, 616 bp, Homo sapiens
ggtcaacaggaaaacatgtgaacaaatgtctctgcatcataaacaaggtaaagaaaaaagtgctgtgcttttcatgtgcatatacataaacatctcaatgccttaaagagcagtattgcctccagcatgtctcacctccagccctagggcggtttttctcctatctcagtagatggaatatacaatcgggttttacaccaagacacattccattgcccagggacgagctggagacagatgccttcctcttatctcaactgcaaagaggccttcctcttttactaatcctcctcagcacagaccctctacyggtgtcgggctgggggacggtcaggtgtttcccttcccacaaggccatatttcagactatcacatggggagaaaccttggaaaatacatggcattcctagacagaggtccctgaggccttctgcagtgttttgtgtccctgggtacttgagagtagggagtggtgatgacttttaacaagcaagctgccttcaagcatttgtttaacaaagcacatcctgcatagccctaaatccatttgaccttgagtcaagacagcatatgtctctgcgagcacggggttgggggtagggttacagattaacag

SEQ ID NO: 618534 - DNA, 581 bp, Homo sapiens
gtccactgttcactccagtatctcctctgttctcaagtgcataaccctccaggttgccctaaggataggcttccaggtaactgccattggtgcaggaagccaggccactggaaggcaaactgccccaatggcataaaaatagggaaaagccctgcgtggcttgtcttctctaccacaagggcccccaggacagaatcccaacccttaatggccttgagtggaagggatctctgctccagcagctaccagctcagatatcatcatcaacagaacaaagccaagggcaactctggaggtggcaagtaaaattataaatgctccttttgcattcaaaakctgcctactctgtgctaatctccttctctaagcaactctcctccaaataatgttgggtaatcagggcaaataatatccctttccttcaaaaggaaagattcatacccctttatattacttaagggaccaattaccattctcccaccagtccctggtaaagttgaaataccccacacctctctagggcaaaaatacactttccatgatttgtgctcacttaatatttactccacctctgaattcat

SEQ ID NO: 618535 - DNA, 591 bp, Homo sapiens
cccaacccttaatggccttgagtggaagggatctctgctccagcagctaccagctcagatatcatcatcaacagaacaaagccaagggcaactctggaggtggcaagtaaaattataaatgctccttttgcattcaaaagctgcctactctgtgctaatctccttctctaagcaactctcctccaaataatgttgggtaatcagggcaaataatatcccyttccttcaaaaggaaagattcatacccctttatattacttaagggaccaattaccattctcccaccagtccctggtaaagttgaaataccccacacctctctagggcaaaaatacactttccatgatttgtgctcacttaatatttactccacctctgaattcatttttctctctaatatccctatttctctcagacaagctaactaaattgttaaccaataacttcaacctggacagtcctacctctggggtttagaaataacccacacttattcaggcaagccctagcaaaaatctaactgagcagtctcttgagcggggataacttctacagtatgcagataacttctgtatctgctccccactcaca

SEQ ID NO: 618536 - DNA, 637 bp, Homo sapiens
caaataatatccctttccttcaaaaggaaagattcatacccctttatattacttaagggaccaattaccattctcccaccagtccctggtaaagttgaaataccccacacctctctagggcaaaaatacactttccatgatttgtgctcacttaatatttactccacctctgaattcatttttctctctaatatccctatttctctcagacaagctaactaaattgttaaccaataacttcaacctggacagtcctacctctggggtttagaaataacccacacttattcaggcaagccctagcaaaaatctaactgagcagtctcttgagcggggataacttctacagtatgcagrtaacttctgtatctgctccccactcacaagatgtgcatagtaacatacactacaatccataacttcctaacagaaggaaaatgacttttgtctaattacagttatgggtggcatgtgcaggatcatagaacatggggagcttttttctccccacagaggaaaacttaagatcagatgagacagctggaaaagatccctttgctactaaaaagtggctgcctgaacttttgattcactgttgctgcaacgggtgggtctttctctggcttcactatgctcc

SEQ ID NO: 618537 - DNA, 503 bp, Homo sapiens
gtcccagctactcaggaggctgaggcaggagaattgcttgaacccgggaggcggagcttacagtgagctgagatcgcgccgctgcactccagcctgggcgacagagcgagattccatctcaaaaaaaaaaaaaaaacatacaaagaaacaggaaattatgccccakactcaagaaaataaagtagtcaatagaaactgtcccagagaaagtccacacattggacttactatgaaaagtcttaaaatcagctattataaatatgttcaaagaactaaaggaaaatgtgagaatgatgtatcaccaaataaagaatgtcaataaagaaataggaattatttaaaagaaccaaatagaaattctggagtcaaaaagtacaatgactaaaataaaatattcactagaggagctcaatagcagatttgagctggcagaaaaaaaaaaacagtggatttatagatgggtcagtagatgttatccagtctgcagaacagaaataataatt

SEQ ID NO: 618538 - DNA, 585 bp, Homo sapiens
actgggtatatatctaaaagaaatgaaatcagtatattgaagagatgtttgcactcttatgtctattgcagcattattcacaataaccaaaatatggaatcaacataagtgcccatcagtgaatgaatggataaaaaaatgtggtatatataaacagtggaatgctattcagccataaaaagaatgaaattctgtcatttgcagcaacatggatggaaggtcattatgtgaagtgaagtgaagtaagtcaagcacagaaagacaaatatcacatgttctcattcatatgtgggagcaaaaacagtgaatttcatgaagatagagagtaaattggtgrttagcagatgctgggaaaggtagtgagtaggagcagatgaagagaggttgattaatgagtataaatatgcagtttgacataggaaataagacctagtgtttgataggtgagtagtacgactacagtttacagtaccccattatatatttcaaatagctagaagagaataatctgaatgttattagcataaagaaaagacaaatatttgaggtgatggataccctaattacaatgatttggtctttaca

SEQ ID NO: 618539 - DNA, 589 bp, Homo sapiens
acatgctgaaaccctgtccctactaaaagtgcaaaaaatagctgggcgtggtggcatgcacctgttgtcccagctactcaggaggctgaggcaaaagaatcacttaaacctgggaggcggaggttgcagtgagccaaaatcacaycactgcactccagcctgggcgacagagtgagactctctcaaaaaaaaaaaaagtcaaaaaataacaagtgccattaaggttaaagagttaacgaaacacttatacactgctggtgggaaggtaaattagtacagccactgtgaaaagcagtttggacaactctcaaataacttaaaacagagctaccatttaactcagcaatccattactgggtatacgtccaaaagaaaataaaccattctaccagaaagacacccgcactcatttgttcatcacagcactgtttacaatagcaaagatacagaacctaggtgcccctcaacggtagattggataaagaaaatgtggtacttatacaccatggaatactatgcagctatgaaaaagaacaaaatcatgttctttgcagaaagagaatgaaatcatgtcctttgcagcaacaga

SEQ ID NO: 618540 - DNA, 583 bp, Homo sapiens
ttgagcacatcctcagtcagatctcatatatccaagggccaaatatattcccccatttttttatcaaagagaagagacacacaagaaagctgcatatggtcatgcaagttctccatagcacaactctaggacatgccagttacttggtgaatgatgttccttggagttgaacagtgtacaacctgaacctgtgtgaccatatgcaaagtccctcaggactcaatattagggaaataaagcacagtgattaaaagtgcaagatttggagacagctgctacmcctcttctggccctcactgtgctcttgatagaaggtggttgctcttattttgatgcttacaggacagaaaagcatcagaagggtgaacctagaaggacaatcactgctctcaagtaatccatgtttttcttttgtctctccaaggataaaagatgtggggtctctatggagtagatactcctggtctttccacactgaagatgcagcaggggcataagtaaaaattacaaaacaagtcataactgcaaaggaaaaacgtacctttataaaggaaaggtcacttcatcaaatgatcaaacatag

SEQ ID NO: 618541 - DNA, 497 bp, Homo sapiens
atccatttgcccactgtttgcgtatctactgcttatcctggagaggttaargggttaagtaatagctctggtgacaaaattgctcagtttgaatcctaacttcttactttctgactgagtgatattaagcaagtaactgaatctctctgtgcctcagttttctcatgtaaaattggagatgataataatatctatgtcatatggatgttttgaaaattaaatgagttagtctgtttaaagcatttgaaaggtgtttgacatataatacacaccagaaagtaaatgttagcttctattgttgcctccccactagatgtcaggcacttttctgggttctgaggattcaaagtgagttaagatagtcccccagactttcagagttccatgtagaggggaaggcagatatagaaaaaaagaatacattataatttagtgagaaaattgtattaatataagtttttgcaagttacagtagtagcaagagaagtgagggacca

SEQ ID NO: 618542 - DNA, 587 bp, Homo sapiens
tcttactcattctttctaactataatttttgtatccattaactgtccccacctccccaccctcaacacccactactcttccgagcctccagtaaccatccttctaccctccatctccatgagttcaattattttgatttttagagcccacaaataagttagaacatgaggtgtttgtctttctgtttctgggttatttcacttaacataccgaactccagtcccatccatgttcagtccatgctgttacaaatctaatttctttttatggctgaatagtacaccactgattataggcaccatattttatttatctattcatctgttgatggactcataggttgtttccaaatcttggctatcgtgaacggggcaacaacaagcatgagagygcaggtatctctttgctatattgatttcctttcttttgggtatatacccagcagtaggattgctggatcctgtggcagctctattttcagtatttttcagcatcatccaaactgttttccatagtggttgtattagtttgcatttccatcaacagggtacaagtgttcctatttctccacatcctccccagcattt

SEQ ID NO: 618543 - DNA, 556 bp, Homo sapiens
tacacctgttagccaattttgtattttctttagagaaatatcaatcatgtctttggccatttttaaattgggttatttgttttcccactactgagttgtataagttctttataattttttgttgttaactccttatcaaatatatggcttgcaaataattttgtttccatctataggctgccatttcattttgttaattgtttccttgatgtgaagaaggttttttgtgtgtgatttagtcccacttatttttgcttttgtggtctgaacttttgcagtgatattttaaaaaaatattgtcaaagccaaagtccaggagattttcctctattttcccttctargagttttataggttcttgtcctatatgagtcttttatcctgtttgagttgagtttgtgtatgatgtaagacagaggtaaaatttttattattttgcatgtggaaatccagttttccaagcaccgtttattgaagagagtattttttcttcattgtgtactcttgatgcccttgtcaaaaattaagttaccataaatttttgtatttatgtctt

SEQ ID NO: 618544 - DNA, 436 bp, Homo sapiens
ctgtcttgatttaatgtctctctgatcatgtgaagtggctcacattcctcagataaaaattcttttaaaaatctttcttctttaaagcatagatgatcaaaagctcagccaaggtgtccctctttgccaggaacactcattcccggatagtctttcccacrgtgagggcaggggaggaaaggagctgcctcactgaggaatttttaagagcgccccaaagcccaattgaaagtacgtcacagagtagaaaaaaaaaagaagaaaagaaaagaagagagagagacttcagttaaatctacagctgtcacttgtttaatcatctctcgtcttcagataccataaaatcagttttctcagaagtaaaacaggaaatatataacattaataatttgaatagcacagatataattcacacaagaatgagaatcacaaagag

SEQ ID NO: 618545 - DNA, 547 bp, Homo sapiens
gccactgcactcctgcctaggcaacagagctagaccctgtctcaaaataaaaaagaaaggataaaggagatttgattaatagattaataaaytgttctttcctgattggttatgatgttgaactacttcccaaattatgtaaccaaatttctgtgtggctctggtgctattaggtcaaaactttggggaactaagcatgagatagcatactcctgtttccttctctgtcccagggaaatacaaattcccttttgcctcaattagagaaggatgtctattcttgctacaaattatgatttatgtcctggtgtcaaatgaagataagaataagatcaaagaaaggcaagatgattgtggaagagaaagaaaaaggattaatttagatttatttaaccaagaaacatttattttgtatctcctatttccaggctgagtgctaagaaataaaatgatgagtagagtatagcctttctcctcaaggagcttaccctctaatcatgggagagacagacatgtaactagttaaaccatattgtttggtggcttg

SEQ ID NO: 618546 - DNA, 547 bp, Homo sapiens
gccactgcactcctgcctaggcaacagagctagaccctgtctcaaaataaaaaagaaaggataaaggagatttgattaatagattaataaattgttctttcctgattggttatgatgttgaactacttcccaaattatgtaaccaaatttctgtgtggctctggtgctattaggtcaaaactttggggaactaagcatgagatagcatactcctgtttccttctctgtcccagggaaatacaaattcccttttgcctcaattagagaaggatgtctattcttgctacaaattatgatttatgtcctggtgtcaaatgaagataagaataagatcaaagaaaggcaagatgattgtggaagagaaagaaaaaggattaatttagatttatttaaccaagaaacatttatttygtatctcctatttccaggctgagtgctaagaaataaaatgatgagtagagtatagcctttctcctcaaggagcttaccctctaatcatgggagagacagacatgtaactagttaaaccatattgtttggtggcttg

SEQ ID NO: 618547 - DNA, 616 bp, Homo sapiens
acagaaaacaatcacggatgttggaggactttaaaatatcttagaagtttagcagttcatcctatgtcacagagtttctgtgtgcgatgtccaccatgtccttctgttgtacaacccctcagttaagccaggagggtgcctctcccctcacgaccagcctgggcaacacggcgaaatcccgtctctacaaaaaatacaaaaattagcccatcgtgtggcgcacgcctgtagtcccagctccttggggtgctgaggcaagaaaatcgctcggccccaggaggtcgaggctgcagtgagccatgtttgcactactgcatgccaacctgggtgaccaaggctggaatatcatacatccatgtgtagaaagtttgttgtgccggcaagtaaatgacaaaggggacattaacagaactgagaaacaaattggaatacgatttggtaccgctcccacgaaagataaatttgcagaatgtactcaaattggaaacattaaataaattctataatgtaaaattagcacatcctgttgtccacactatagaaatatctgcacaagtgacckaagatatgtgtacaagaatgatggtgattgcagcatcatttgtaatcctaaaac

SEQ ID NO: 618548 - DNA, 406 bp, Homo sapiens
ccttccagattcaagtgattcccctgccttaggctcccaagtagctgggactacaggtgtgtgccacaacgcaaaatacaataattttttgtatttttagtagagacagggtttcaccatcttggccaggatggtctcgatctcctgaccttgtgatscgcctgcctcagcctcccaaagtgctgggattacaggcgtgagccactgcacccagccagcatgtcattttttaacaggcttgttggggtataactgatatgtaaaccgaacatatatttatgtacaactgggtacgttttgacatacatatatacctatgcaacaaccatcaccacggtcaagacagagaacacatccatccatcactgccatgagattcctgagattcctggtgtccctttgtaat

SEQ ID NO: 618549 - DNA, 406 bp, Homo sapiens
ccttccagattcaagtgattcccctgccttaggctcccaagtagctgggactacaggtgtgtgccacaacgcaaaatacaataattttttgtatttttagtagagacagggtttcaccatcttggccaggatggtctcgatctcctgaccttgtgatgcgcctgcctcagcctcccaaagtgctgggattacaggcgtgagccactgcacccagccagcatgtcattttttaacaggyttgttggggtataactgatatgtaaaccgaacatatatttatgtacaactgggtacgttttgacatacatatatacctatgcaacaaccatcaccacggtcaagacagagaacacatccatccatcactgccatgagattcctgagattcctggtgtccctttgtaat

SEQ ID NO: 618550 - DNA, 406 bp, Homo sapiens
ccttccagattcaagtgattcccctgccttaggctcccaagtagctgggactacaggtgtgtgccacaacgcaaaatacaataattttttgtatttttagtagagacagggtttcaccatcttggccaggatggtctcgatctcctgaccttgtgatgcgcctgcctcagcctcccaaagtgctgggattacaggcgtgagccactgcacccagccagcatgtcattttttaacaggcttrttggggtataactgatatgtaaaccgaacatatatttatgtacaactgggtacgttttgacatacatatatacctatgcaacaaccatcaccacggtcaagacagagaacacatccatccatcactgccatgagattcctgagattcctggtgtccctttgtaat

SEQ ID NO: 618551 - DNA, 439 bp, Homo sapiens
ctttaaacaacagtgtcaaggatttaaaagacatacaacagaattttttaaaagttaaactactacataaattgatgatgatatatttacatcatataccaattatagataagtacattcactaaaggtgatagagtaagatatgggtctgttttgttcactgatatgttatcagtatctagaacagaacctagcacatggtaggcagatattcagcagatatttgagactggaagaatagttgtgagagtcacttacagagaagatatggaagtaagggagcagaatatagcaagtccttaatgtcatcaataagttcttggaaacagcagctttaagcaaaactatataccaagtcctcaaaaaaatgtttcrttcaacatttcattataatgctgtgagaaaaatgtagttttgttatacatcatttcacttaaaa

SEQ ID NO: 618552 - DNA, 575 bp, Homo sapiens
tctgtccttttctccttttgatacaccgtttagtacaccatctccactcacctccatggccataccttcaattttattcaaatcaggaaccacttctgttcagtttctctaaagctgagctttcaaactctcctgccagctatttctgggtcatgttaatcwttatttttctctggttcttgtagatgctcatttatctgacagtaaccttatttgtcaaatgaaggtgacaataacatgattatgctgttttcagcttacattaggtggatgccttgcccttctctgggctgccctgatggttgtggtgttcagtgatgtctccaactcttccttctttctaaccaggccttcctctctctctggcttcccacacagcagccaagactcagccccactggtgcagtccctgcccatctttctctagcacccctgaggcctgagctggaaagcaggcactgggccacacttgcctgagtaggaccttttctaccttctttgtgatattttccaattcctccaccatagggttgctttttagtctccagcaagatgttaacccaccaagccctctc

SEQ ID NO: 618553 - DNA, 476 bp, Homo sapiens
gctttttagtctccagcaagatgttaacccaccaagccctctctctccgttcttctcatacaagtcaatttctttcagtattacctcatcagaatgatgactagaatgttgagtttagtcccccatgaatccattcattccttgatccyttgattctagattttaatatgtactatgtatatttatacatattacatttagttacggggcatcgtattagataccacacacaaattatactcaagacttggtttataaaaatacacctaataatttttcaaactagaagttacattctcctggaacacccctcctttaaaggaatatctttttgttctgaagaatggaaacattctgaactcagtgactcatgggcttttgcttttgcttgtggggtatggataattctgtaagaggagagtcctgccaccttaggtctcagtggggacggctaggtgtgcatgtgcttcatgtgc

SEQ ID NO: 618554 - DNA, 476 bp, Homo sapiens
gctttttagtctccagcaagatgttaacccaccaagccctctctctccgttcttctcatacaagtcaatttctttcagtattacctcatcagaatgatgactagaatgttgagtttagtcccccatgaatccattcattccttgatcccttgattctagattttaatatgtactatgtatatttatacatattacatttagttacggggcatcgtattagataccacacacaaattatactcaagacttggtttataaaaatacacctaataatttttcaaactagaagttacattctcctggaacacccctccwttaaaggaatatctttttgttctgaagaatggaaacattctgaactcagtgactcatgggcttttgcttttgcttgtggggtatggataattctgtaagaggagagtcctgccaccttaggtctcagtggggacggctaggtgtgcatgtgcttcatgtgc

SEQ ID NO: 618555 - DNA, 396 bp, Homo sapiens
gacgcttggcctgctttcgccttccaggagaagatttccagtccacttgtaagatcacaggtcctcagtgggcttcctgctagtttctgttcccatcaccctcccaccccrtcagctcctgcccctgtatcttggttcactctcacattgtcctcatctctcctttttactccaatttttcttcgttgatgccaggtcaggagactggagaaatgcaattcagctcactctggaagtcattagacatttgggagtctgcctctgaatgagcttttggtagagggatcttgaggccagttatgtgttctactcttcatgaaaaagtaaaagcaatttgcaacctaataaactgatttcactgcacactcctgggttaagaacagcaatttgattttg

SEQ ID NO: 618556 - DNA, 396 bp, Homo sapiens
gacgcttggcctgctttcgccttccaggagaagatttccagtccacttgtaagatcacaggtcctcagtgggcttcctgctagtttctgttcccatcaccctcccaccccatcagctcctgcccctgtatcttggttcactctcacattgtcctcatctctcctttttactccaatttttcttckttgatgccaggtcaggagactggagaaatgcaattcagctcactctggaagtcattagacatttgggagtctgcctctgaatgagcttttggtagagggatcttgaggccagttatgtgttctactcttcatgaaaaagtaaaagcaatttgcaacctaataaactgatttcactgcacactcctgggttaagaacagcaatttgattttg

SEQ ID NO: 618557 - DNA, 396 bp, Homo sapiens
gacgcttggcctgctttcgccttccaggagaagatttccagtccacttgtaagatcacaggtcctcagtgggcttcctgctagtttctgttcccatcaccctcccaccccatcagctcctgcccctgtatcttggttcactctcacattgtcctcatctctcctttttactccaatttttcttcgttgatrccaggtcaggagactggagaaatgcaattcagctcactctggaagtcattagacatttgggagtctgcctctgaatgagcttttggtagagggatcttgaggccagttatgtgttctactcttcatgaaaaagtaaaagcaatttgcaacctaataaactgatttcactgcacactcctgggttaagaacagcaatttgattttg

SEQ ID NO: 618558 - DNA, 396 bp, Homo sapiens
gacgcttggcctgctttcgccttccaggagaagatttccagtccacttgtaagatcacaggtcctcagtgggcttcctgctagtttctgttcccatcaccctcccaccccatcagctcctgcccctgtatcttggttcactctcacattgtcctcatctctcctttttactccaatttttcttcgttgatgccaggtcaggagactggagaaatgcaattcagctcactctkgaagtcattagacatttgggagtctgcctctgaatgagcttttggtagagggatcttgaggccagttatgtgttctactcttcatgaaaaagtaaaagcaatttgcaacctaataaactgatttcactgcacactcctgggttaagaacagcaatttgattttg

SEQ ID NO: 618559 - DNA, 500 bp, Homo sapiens
aatattagaagtgtgtctagttcaaagggaggaaaaccatcaaaaacatttttagtgcaatatttaacatgagctatacaacccttcctaaatgccaaaggcacacacaggacacacacacagacacacacacacacacacactcacgaagaatacaaatgactagaaccaagaaatgtaaatacattctgctacgtatggtaaacatagcctacaatgtggaagagattagaaaataaacatggaaatgaaatgtttttattaattcgcatcagtacccaccaaaaccaatcagcataatcaaatattataacactgaatgtaaaaaacaatccaaaagtccagagtgataggcaaaaggttttaattgtatagattaaaattaactttggacaaaaattaaaactcaggcaragaatgttttcttctttttgcaacagcagacactagtaaaaacaaaggcacagtaaaaattgagacccaaaatttgcagcgtagag

SEQ ID NO: 618560 - DNA, 496 bp, Homo sapiens
aatacattctgctacgtatggtaaacatagcctacaatgtggaagagattagaaaataaacatggaaatgaaatgtttttattaattcgcatcagtacccaccaaaaccaatcagcataatcaaatattataacactgaatgtaaaaaacaatccaaaagtccagagtgataggcaaaaggttttaattgtatagattaaaattaactttggacaaaaattaaaactcaggcaaagaatgttttcttctttttgcaacagcagacactagtaaaaacaaaggcacagtaaaaattgagacccaaaatttgcagygtagagatatgaatataataatagacacaggcagggaggattaataaatgataaaatgtttagaggatgatcattagaatacaggatatttatactcttgaaaaccactttcccaagtacttcattataagtaaggtgtctctaaaagggacagatctcctagacccctccttaaccaagta

SEQ ID NO: 618561 - DNA, 433 bp, Homo sapiens
tggtgatatggactatgtgaaggagacaggtcagttgtcctgctcagtgttctacattctgcagttgtctggtgattacctcctatgaaactcaggctaagcgttttctgcaagaacatggcattgytcatattctgcaccggcagagtcctgggtgacatgctgtctcctgccagcggctcctgagtcctgttctctacaggatggaattgagaggagcagggctaaggcctcccaatgctgtttgtccatctagctgtggtcttcctaagtactgacaccaattggaggctgaaggactgtggcttctctaaccaaaggagcctagcgggttaacaattgtcaagagcagttggtggttctgaaatacaatcctcagccaaggatccctcctgtgttacagatggatcagctaaaacaagccaacactgaa

SEQ ID NO: 618562 - DNA, 313 bp, Homo sapiens
aactccatggacattgttcagggacagatgactwaatcacagatgacaagagatactgaatcgaagttaggaggcctgacagatactgcctgtgcacctcctgcactgaggtgactatgagattgtcacacttgcctggggtcgagtaacttgatactggggactggcaaacaaaggcatgacattagctgagaaggacaaaaaaactccctgatatctgtttagaaacccatcacagttttttattcaaatgaatttgtgtttatagagcctgtcttcagagtttatcttcctcagcctagagagaggtatg

SEQ ID NO: 618563 - DNA, 313 bp, Homo sapiens
aactccatggacattgttcagggacagatgactaaatcacagatgacaagagatactgaatcgaagytaggaggcctgacagatactgcctgtgcacctcctgcactgaggtgactatgagattgtcacacttgcctggggtcgagtaacttgatactggggactggcaaacaaaggcatgacattagctgagaaggacaaaaaaactccctgatatctgtttagaaacccatcacagttttttattcaaatgaatttgtgtttatagagcctgtcttcagagtttatcttcctcagcctagagagaggtatg

SEQ ID NO: 618564 - DNA, 313 bp, Homo sapiens
aactccatggacattgttcagggacagatgactaaatcacagatgacaagagatactgaatcgaagttaggaggcctgacagatactgcctgtgcacctcctgcactsaggtgactatgagattgtcacacttgcctggggtcgagtaacttgatactggggactggcaaacaaaggcatgacattagctgagaaggacaaaaaaactccctgatatctgtttagaaacccatcacagttttttattcaaatgaatttgtgtttatagagcctgtcttcagagtttatcttcctcagcctagagagaggtatg

SEQ ID NO: 618565 - DNA, 621 bp, Homo sapiens
gttttgcaaagtatttgtattgttttacatttctatgaaagatgtaggccatttccagttgctctacattcccacacacttaatattttcagtcttttaaactatgccaggtgtgtagtgatatcctaaaatttggttttctcatgcctaatgttcatttagatatcttcttatggaaaatatcttctcaaatttttatattcattgatatactgggctgtttgtcaatttctttgtaataggagttctttatatattttgaatgagtccatttatacatacatattttttgctgtattatatagcaaataattattcctggtctagagatagcgtttaagttgttaaacaacaacataataaggagaagctttttaaaaatgaagtgcaattcgcttgatttcttattgtggtgagtgctacagtatctagtctaagaaatattttcctgtgtcaagttcatgaaactatttcctatttttcctttacaaggtttctaattttaactttcacatcttaagwtaatttcaatatatgatggagagtggttaatattaactttttaaaacaacaaatattatttcactcaaaatcgttttacttaaaagtctttcatttccc

SEQ ID NO: 618566 - DNA, 621 bp, Homo sapiens
gttttgcaaagtatttgtattgttttacatttctatgaaagatgtaggccatttccagttgctctacattcccacacacttaatattttcagtcttttaaactatgccaggtgtgtagtgatatcctaaaatttggttttctcatgcctaatgttcatttagatatcttcttatggaaaatatcttctcaaatttttatattcattgatatactgggctgtttgtcaatttctttgtaataggagttctttatatattttgaatgagtccatttatacatacatattttttgctgtattatatagcaaataattattcctggtctagagatagcgtttaagttgttaaacaacaacataataaggagaagctttttaaaaatgaagtgcaattcgcttgatttcttattgtggtgagtgctacagtatctagtctaagaaatattttcctgtgtcaagttcatgaaactatttcctatttttcctttacaaggtttctaattttaactttcacatcttaagttaatttcaayatatgatggagagtggttaatattaactttttaaaacaacaaatattatttcactcaaaatcgttttacttaaaagtctttcatttccc

SEQ ID NO: 618567 - DNA, 541 bp, Homo sapiens
atatttttaaaatatcttagttttaatttctaatatggtaaatagcaacagacgtaactcacataaagaagagtttttttggggggtcttcaataattttaagagtattatgggggttgagaaccactgatatttaaaataaggggagaagtgttgccatttactagatggctaaagttttagttttaaaatatcattccagataatttatataatttgtaccttttctacatgcaataaatagccaagaggtaatttgttttgtgaaaagtgctactcattagggataacctcttaagaataggtttaaatattaatagcaaatcactrcacaacaaaacaaatcaaggctagaaaggaaataagtaatcttctaaatttaaagagaaaatgccaaatagacacagaacgccattaccaaattcccaaaggcagaaacttggatttagatgattataaaaaggaagaaaattctaagatggaatgtgtcttatataaaaatgagcctcaattcttatctagtaggaatctgagatcatta

SEQ ID NO: 618568 - DNA, 612 bp, Homo sapiens
gtgctgctggattcagtttgcaagtatttgttgaagacttttacatcgatattcatcaaggatattgacttgaagttttcttttattgttgtgtctctgctaggttttggtatcagtatgatgcagaatgagttgggttagaatctcttctcctcagtttttgggaatagtttcaataggagtggtaccagctcttctttgtatatctggtagaatttgggtgtgaatcagtcaggtcctcaacttttttggttcatgggctatttattactgttacattttcagagctcattataggggtctgttcagggaattagtttcttcctagttcagttttgaaagggtggatatgtccaggaatgtagccatcactgctaggttttctattttgtgtgcatagaagtatttgtatttatttctcttggttatttttatttctgtggggtcaatggtaacactccctttgtcatttctaattgtgattttttggatcttctctcttttcttcttcagtaggctagctagcagcttattatttttttcaaaaaaaaaactggattcgttgatcttttgaatggtttttcrcgtctcaatctccttcattcagtttag

SEQ ID NO: 618569 - DNA, 545 bp, Homo sapiens
tttctgccttaatttttatgttcacccaggagttagtcaggaccatgttgtttaatttccatgtttttgtgtagttttgagaaatctccttggtattaatttctatttttatttgcactgctgtttgagagtgttcttggtatgatttcaatttttaaaaatgtattgagacttgctttatgaccaatcaagttgttgatcttagaatatgttcmatgtgcagataaaaagaatgtatattctgtcattgttgtgtggagtgttctatagatgtccgtaggcccagttcatcaagtgttgagttgaagtccagagtttctttgttagctttctgcctcagtgattggtctaatgctgtcagtggagtgtcgaagtgtcccactattatcatgtggttatctaagtctttttgtaggccaagaataacttgtttttgcaaatcttggtgcaccaatgttgggtgtgtagatacttatgatgggtgtgtagatacttatgatagttaagtcttcttgttggattgtactctttatcattatgtaatg

SEQ ID NO: 618570 - DNA, 545 bp, Homo sapiens
tttctgccttaatttttatgttcacccaggagttagtcaggaccatgttgtttaatttccatgtttttgtgtagttttgagaaatctccttggtattaatttctatttttatttgcactgctgtttgagagtgttcttggtatgatttcaatttttaaaaatgtattgagacttgctttatgaccaatcaagttgttgatcttagaatatgttccatgtgcagataaaaagaatgtatattctgtcattgttgtgtggagtgttctatagatgtccgtaggcccagttcatcaagtgttgagttgaagtccagagtttctttgttagctttctgcctcagtgattggtctaatgctgtcagtggagtktcgaagtgtcccactattatcatgtggttatctaagtctttttgtaggccaagaataacttgtttttgcaaatcttggtgcaccaatgttgggtgtgtagatacttatgatgggtgtgtagatacttatgatagttaagtcttcttgttggattgtactctttatcattatgtaatg

SEQ ID NO: 618571 - DNA, 545 bp, Homo sapiens
tttctgccttaatttttatgttcacccaggagttagtcaggaccatgttgtttaatttccatgtttttgtgtagttttgagaaatctccttggtattaatttctatttttatttgcactgctgtttgagagtgttcttggtatgatttcaatttttaaaaatgtattgagacttgctttatgaccaatcaagttgttgatcttagaatatgttccatgtgcagataaaaagaatgtatattctgtcattgttgtgtggagtgttctatagatgtccgtaggcccagttcatcaagtgttgagttgaagtccagagtttctttgttagctttctgcctcagtgattggtctaatgctgtcagtggagtgtcgaagtgtcccactattatyatgtggttatctaagtctttttgtaggccaagaataacttgtttttgcaaatcttggtgcaccaatgttgggtgtgtagatacttatgatgggtgtgtagatacttatgatagttaagtcttcttgttggattgtactctttatcattatgtaatg

SEQ ID NO: 618572 - DNA, 561 bp, Homo sapiens
ttcaccatgttagtcaggctggtctcaaactcctgacctcagttgatccacctgccttggccttacaaaatgctaggattagcgtgagccaccgcgcccagccttatttattttaagtaatacactttgtagtagcaatatcactaattcatgatagttacatttaataaagggataagctttttcataatttttcaacttcgttctatcttttttttttttttttttttttttgagatggagtctcgctctgtcacccaggctgkagggcaatggggtgatcttggcttactgcaaactccgcctcccggattcaagcgattcttgtgcctcagcctcctgagtagctgggattacaggcatgcaccaccatgcctggctaatttttgtacttttagtagagacagggtttcaccatgtttgccaagctggtctcacactgctgacctcaggtgatccacccgccttggtctcccgatgtgctgggattacaggcatgagccactgcacccggcctaaacttagttctatctttatattttaacagaacttataaagtac

SEQ ID NO: 618573 - DNA, 561 bp, Homo sapiens
ttcaccatgttagtcaggctggtctcaaactcctgacctcagttgatccacctgccttggccttacaaaatgctaggattagcgtgagccaccgcgcccagccttatttattttaagtaatacactttgtagtagcaatatcactaattcatgatagttacatttaataaagggataagctttttcataatttttcaacttcgttctatcttttttttttttttttttttttttgagatggagtctcgctctgtcacccaggctgtagggcaatggggtgatcttggcttactgcaaactccgcctcccggattcaagcgattcttgtgcctcagcctcctgagtagctgggattacaggcatgcaccaccatgcctggctaatttttgtacttttagtagagacagggtttcaccatgtttgccaagctggtctcacactgctgacctcaggtgatccacccrccttggtctcccgatgtgctgggattacaggcatgagccactgcacccggcctaaacttagttctatctttatattttaacagaacttataaagtac

SEQ ID NO: 618574 - DNA, 614 bp, Homo sapiens
atactctcctgctccaccagctccatctgcaatatttgctccctaacagtagccacattcaaatatttattcttctgtcatttattcccatatttctaaataccatgcwcagactgctattaattttcatgataaatattctgcattggctccaaagtatggaatatgaagattttgctctcttgtgtcttcttatacacaatacctgtccactcccaatacagatgtattaccaaatggttagtcaatgtttactttattatgactatgtattgttcacagctgatccacaaggacatcatatttcctttcttgtactatattttattgtatgtacagcttaaaattactttgttactttgcttaatttttgtgcctgtcactaattcatccccaaacattctcccaatatttcaaactcctgtcagtatggtcaaacatagaaggtcatctcaagagcctgcgtgtttccttggcaacccctctccagcagccctccatctccaacctcagctgtggactccaagactatttcatagtgatatcctggagctttccttcagattcatcctttgaagtctgttcattgctctcctatgttggatcccccacct

SEQ ID NO: 618575 - DNA, 528 bp, Homo sapiens
atgtcctactggagggttctctcccaaaggcatattgaattttacctttggaatcttctgccatttggaataactgtttttccagtttcaaaacaatgtaagaccctctgcatattgagttacatgacaatgttttaagaaaaagtgtgaggcaggaaagattattgtaaggcaaaaaatgaggattggagttggatttggaaatcagcctgaggcagcttgaagtactgacctctctagttttcacrtggtctctccctgtgatgtcacttatttctgtatgcctgcatcccccttttgattaactgtcaacctactgtatccaccagtaggattcctggagtgagccagtctgtttaggtagctctggatcattgtctgattgggcagtgatctgtgctcctggccaccctatagggtcagtcagcctagagatgagttcccctcaggtcacttgatcatccttggtccagtaagatccacccgtgcacaggcagcccagaactgcttcttggaacagggtccctg

SEQ ID NO: 618576 - DNA, 644 bp, Homo sapiens
aaggggtgagaagcaggccagctaatcctagaaatagattccatggcaaagggagcttgttgcttgacagagggccaaactttgaatgactgggatctgaagtattcccattgtgttgtcatcctttcacttaatatcctttcacactcttgctacttgaactgacagccctaacctgttatcactacgtagtgcagctccatgacataaaatatacagctaattacaatgcacttcacagtggcatatgacagcaagggtgctagaagaagacccgcccaagcaagaagccactagatgcatttaagagctgcttcccaggacagtgacagtagagaaatgctctgtgtttatgtgtatataatacatatataatgcatagattgcatatatgtgtatatgtgtatacacacacaacacaaacatatttgtacacattgttaattktgttctttagcttgcagcaaagatataaagtaaaaaaagatcaatacataaattgagtattcagaacacagcaaacagaagtgacctgtttggcagggcctggttctcttaatctgacagtcttctatttttaactgataagtatcatttagctattattctctctgccatgatttcaaaacaaaccagtgaaaagt

SEQ ID NO: 618577 - DNA, 594 bp, Homo sapiens
aagcgggttcaagaggaagtttgtttgcagggcatggccagtgggaagttggctataagagtaatgttggaatcaaagcagaaagctctaggagtgcatatcaaaccacctccagtgtgagtcaagccagagacctaactaatctaatgcactgaaatgaattctgaggtattgaatttgcattaactgtaattgacccatcctggaaattcttcgccctttacaaaaaggtctggttttatccttttcctccatgaccaaaccaatttcaatgggggcatggtgactctctcgaggttactctcgggacttctggtacattgctgaaatgtaaatggctccagctatgctttcacacatagcttctgaagatctgattaatctcttttaaacggacatggaattgtatttgtctacaccagatgagagaggtcatcacttttacaaccatatggctgggcactgccttaaatcctaacaccttttgtcactaccrttgttttgcactttatctgttctcttttgccttttgatttccacctaattcctccatagtttgggaaataggttcaaattgaggatagcttaaaataa

SEQ ID NO: 618578 - DNA, 596 bp, Homo sapiens
gctaaatttgttatatttggaaataactttatgagccatgaaattgggaaatgagtgaggacacataagttagggggtcaattactcagccttggaacaccaacaagcagaggtggtgaagacatagaagctacaataaatgaccctaataaagaggggccaatggggttgggggaaaccaagaaagagtgggggtctgggaagccaaatgaaaaatgtgaagaaagggtgtggccaagagagtcaactgctactctcaggacctaagcaggracctcaccctgtgtttcctatttcagttcatggcttcagtaacatcttcctaatcactcaaactaggagacatcttccaataagtatttctcccattctttgcccaccatatctcccctagcaggtgtacatccccgagttcttcctctctcttttatccccatatgagactactctaaatcaagtccccacaatctcttaggtggacgagtcagccccctaactgtctaccagcctccacgttgttgcttctggaatccattcttgcaaatgccatgttactttcctgacacagaccagatcatttcctcctcagaaacact

SEQ ID NO: 618579 - DNA, 546 bp, Homo sapiens
atacacagtggaacactagtcaaccataaaatatatggaaaccttgccatttgctatagcatggatgaatttggaggacattaagtaaaataagccaagcacagaaatacaaatactgcacgatctcacttacatgtggaaccaaaaatgttgatctcacagaactagagagcagggaatggtgtttaccaggggctggggaggttagggaaggaggagagatgctggtaraaggatataaaatttcagtgagttaggaggaataacttcaagagatctactatatagcatggtgactacagttaattatatattgtattattgaaaaatactagaagagtggatataaactaatagctatgtaagataatggatatgttaattagctacttagtcattttacaatgtgtatatacccaaaaatatcatattttgctcagtaaatgcatataatttttctgtcaattaaaaatttaaaaaaatgtattgaattgcatacttatgatttgtgaacttcgtagcaggtatgacagacttttacttttt

SEQ ID NO: 618580 - DNA, 583 bp, Homo sapiens
catctgcctacctaaacactcacccactggaatgcattgtaggagatttacttcatgcaagtggacagcagaatcatatgatctgccacacaagtgtccctactctataaaactatactttctctctctttcttgactacatccctttcagatttatgggttcaaaaactgagcaatgttctctgctcacaaattactcctggatgtttactaacatcccagacacaaagggctagatgttcttgtgctgcccygtttctgtgcattttcccctctgagctccacatttcacaggtctcgttagctaatggacccgattgtcagtccctcctgaatgaaggaaaatactaggagttcttccattacagcctggtgttacttcattaccttcctagctcatgcttgatcttacacttggcccacttacctacactaatggaggagtcaagagaatttgctatctttatcattgttcttgttttctttttcactttacggttactgtatgctatcttttaaaagtctgaaaaccactttgtgtgctttatggaacaagaacagaaataaaacagctagagatagg

SEQ ID NO: 618581 - DNA, 458 bp, Homo sapiens
cactataggaatatcacgtgcagaattccatctgatctccttaaagttagccagagacacartccactctgtgctgatattatgacccattgatttctatttgctttggcgcaaattatggaactatctgagatatttggagttaattaggaagtgcttacttgggactatgtattagttcattttcacacgtctataaagaactgcctgaggacagacaatttataacgaaagaggtttaattgactcacagttctacatggctggggaggcctcaggaaacttagaatcatggtggaaggcaaaggggaagcaaggcatgtcttacatggcagcttgtgggggtggggagagggaaagccaaacacttttaaatcatcagaacttgtgagaactcactgactagcatgagaacagcatggggaaaactgcccccatgatccaattacctcctacca

SEQ ID NO: 618582 - DNA, 550 bp, Homo sapiens
ctgccataacaaattactgcaaacttggtggcttaaaacaacagaaatttattccctcccagttctgaaggccagaagtctgaagtaaagatggtattgagtttgcgctccctccaaaggctctaagtgagattctgtccctccctttccagtttctggtggctctcaggattcctgggcttatggctgcatcactccaatctctgcctccatcttcaccccaccctcttctctgggtctctctagtttctttctgcctttatcctataatgacaaaattggattkacagggctcatccagatagtctggaatgatctcatttcaatgtctttaacttaattacctctgaaatgaccctatttccaaataaggtcatagttacaagttccaagtggacatattctgggaggaggagcacccttcaagccacatcagtaagcatatctctatatgttttattttaaatactgtttcaataaatattcaaaacatatgatgagggtaaaaaaaagtgtgattctcttaatgcaaatatgtagataaaataaa

SEQ ID NO: 618583 - DNA, 626 bp, Homo sapiens
tttggccatggctgtagctctgactatagagaaaagagcagcatgccattggaggtagggtctgggcaaatcaactgatttctcatcctatctcacaggctcccttgggtccagagcacaatatgagtcattttatttactcttggtactttgtggtgccagaattaacagcagcccagctctgaaaggaagcttgacatatttttccaggagtccctattgctmgaaactcagaatatggaattgacataaatctaatgaagtaaaagctctctcttcccctccctagaatcacagaaagcagtggcatttggaaaattgtgttttaaacgagttgacgagggcaggagttcagtagaagccagttatgaatttatatatatttggagatttctgctctattcctttccattctgctgtttgaagataaatcatattcggctttagggagtttaatttaaatatcatgcatgtacacctgaggattccttttaaaaacagaaaaagaagttttagaaccacataggttatgaacaaaaataaaatttaaatttaaaaaaaaagaatacaagtgttttctttaatttcatcctagaaattattaatagaagaagaaaaaacttagg

SEQ ID NO: 618584 - DNA, 624 bp, Homo sapiens
ctgtacactgctttgggcagtatgacaaatggatttccttttgtttgtaccatttatgattttatttcatcagcgttttaaatttcttcttgcagatatctttcacctctttggttagatgtattcctaggtactttttgttgttgttgcttttgtaattgggattgtgttcttggtttggctctcagtttgaactgtattgctgtatagaaatgctactgatctttggacattgattttttaaatactgatttttttatactggagttatttatcagagccaggagccttctggctttcagggttttatagatatagaatcatatcatccatgaagaaatctctgcctcttaattgaaacattcactccatttatatttaaggcaattactgataaggtgggatttacatctrccattttgctatttttttctatatgtcttatgtcactaatgccatgtccattacagccttctctagtgataaatagatattttctggtgtaccattttagttcccttgacatttttaaattatattttttgagttactttcttagtggttgccctgaggattataattaacatctgaatttataacaaggtagtttggatttatatcaac

SEQ ID NO: 618585 - DNA, 600 bp, Homo sapiens
tatgcttttttcacttaaaatgtgaaaaatatcttgacttatccttaatgatagtattttattaggcacaaagtattctgttgaaattatcactttatggcaaaataaaaaaaaatgtagttgtgctgaagacagagcatatttgcagtgatactgggggaaatactcaagtacctgaaagttgctcattttagatagttttaataactcctcaaataactgtggaatcaayggttaattttagttttgtgagaaattaacagagcagagaaaaaatggaaggacggcagtgagggtaaatctgacgagctaaaagtatttaactgagacatttatttcctaaactgaagtataataggaagggcaggggttaggagagaccagaaatttgtaggatgttatcaagtgccaactcaaatgaaggcaatgaaaatggcaagaatttgtaccgatacagagcatttagtgacaaccagactcttctagttgcactataaaagaaggaaggagtataattattattatttacttcacaaacatttttgagggtctactacaagccaggcagaagagcaggcaagtcactcatttagggactca

SEQ ID NO: 618586 - DNA, 559 bp, Homo sapiens
tatttcctttataaattacccagtctcaagttgtgtttttattagcagtgtgagaacagactcatacaatatgttaaatactctgaagtggaattgtttcatcatagtgtggaggcatttataatttcattaaaaatgctgaagagttctctaaagttcttgttcattaacactctcatcggcaatgtataagagctccaattactttaatttcttgtgagcattgtgaatattttgatattagccattctaacaggtgaaacatggtatcttatcttggttttgtagggtcaatgcaaaatttccccttcaccctctgaaggtttgtggaaaatgatctgacaagaggaagattaatagtagatgaagcatagaaatgtatttgatcatagttttacataacatgagagcctttagaatgagaatccaaaagtacaggggagattgtccatttttatgattaggttgaacaaaatgtggacagccttgtgaaaatatgactgcactaaaaagataggactgtgggagggaggttccargatggccaaagagaaatgac

SEQ ID NO: 618587 - DNA, 489 bp, Homo sapiens
gctattgatattactgtgagtattgaaatcctttrtctctgacccaggagacttcttgtcttttgccagcatccatgaaactgcagcaggctaactagttagattgcaagaattgtaaattcccagacccttcacatttcttgacattgatatgtatagtctcataaactcttgcaaagatttatttgcccccatcattcaaatccccaaaactgtactgtctaactccatcttcagctcaaataaacaccaggctaaatcctgacgtttgctggataatttaattagctctttcccagtaactctgcatcatagaccttccaactgtcctgctctgtaaacatgtgccacagttttagctaggaacagcttaagacctttagaaaacttgagtagtgaaaagattatcgtgccctccacatgtgtaattcaaaacaaaaatagtaataaacagcaaaggaagtttaaggaagtccagcgaattctgat

SEQ ID NO: 618588 - DNA, 489 bp, Homo sapiens
gctattgatattactgtgagtattgaaatcctttgtctctgacccaggagacttcttgtcttttgccrgcatccatgaaactgcagcaggctaactagttagattgcaagaattgtaaattcccagacccttcacatttcttgacattgatatgtatagtctcataaactcttgcaaagatttatttgcccccatcattcaaatccccaaaactgtactgtctaactccatcttcagctcaaataaacaccaggctaaatcctgacgtttgctggataatttaattagctctttcccagtaactctgcatcatagaccttccaactgtcctgctctgtaaacatgtgccacagttttagctaggaacagcttaagacctttagaaaacttgagtagtgaaaagattatcgtgccctccacatgtgtaattcaaaacaaaaatagtaataaacagcaaaggaagtttaaggaagtccagcgaattctgat

SEQ ID NO: 618589 - DNA, 567 bp, Homo sapiens
tgaaagaaactatatcctgactagtccagatggatattacttaacctgctttaagatcctctagggaggaacaaccacaacaaatccaagaaaggtccccttcctagcaactgtgcatccttccagctgccttatcaatgatatcatcccttcgatatgttacagagtccatttggacaatttttaaagggactcatgacattctggtaaaagagaattatgatttctggactctttaaaattcaaatgtagggggraaaaaagcaagtcttctgtttgatcataaaagctataaagatgcaaagagagaaaggtccattctagcatttcaataatatctgttttcactgaaaacctgagctgactttaatcatctacacttcagactgggctaatacctcagaaagctgcaaatactgtgaacgctgtcacactagcacaaagcctttgcaaaaatttccccaaaatacacagattaaaaagcacattttctctctctctgttttcctctctctctctctctctctcacacgcacacacacatacacatgcacaaaatttgtcatt

SEQ ID NO: 618590 - DNA, 543 bp, Homo sapiens
ttaattgttaaattattttcattgtaggaaagataaatctttcaattaatatagtattgttcatgctaaaaaatgtcttatccattaaaaagatactcagttgtaatagagtagttcaatcaatactggtaaattgcacattttgaggggataattggtaaatgcaaactcaactagaaaagaagagaaagcagtgtgtctttgttccttctgtggtaaaggaattcagaccaccaccagtcaacataccttgaattatgaaaacagcacctactatttcatcattcagagagatcactcacaaacctctttttcaattgtatctaatttttttgtgctggcattaggcaatggaccacctttgtatttaaagtcttttctttaaaaagattttaaatttcagaaaaagcctttgcacttaaacagtgcttccttwtctgtcactttcatgcttaaatggtcgtccaatttgacattaactttatcgagaataataagtctcaatagagcttctattatccagtgttctgtgagtaggtagca

SEQ ID NO: 618591 - DNA, 471 bp, Homo sapiens
aaagtataacattgtatgaagttgatgactattaaaactatttgagtgtttaagttttgtcaggttctctttggtgatgtcagttaagtgtctttcattaattcttatatgcctcacttttcctgtaaataacttattaaccacccactactttttttctgactgattaaatggtataaatgtcgagaaaaacaacatgaatgacataaatgccaagaatcagttgaaatgtaaaaatatatttaatacagaggttctgtttatgactccttaaaacatacttaaggaagcacacagttaactaataacagcaattaactaggattggtagaaaacctttattttcttattctatagtccatttgtgaggagcttaatataagaaagttagtaggtcaaactaataatagggcaaagtactgttccaagaacttgtytaatgatgttccagtgccaaaaatgctctgaaaa

SEQ ID NO: 618592 - DNA, 532 bp, Homo sapiens
tcttttttaaaaagtttaaacattttaaaacagaaataattgatttaaaaatcagaatgaataaaaaaagattccaacataaagaaataaattaaagagaagtaaacatggattgggtagaagaaacaaaaagcagctcaaaatatttaaatccaaatgtgtcaataattacaataattttaaattaaaacattgaaacgttctatgaataaaaaaagacagtcacactggatttgtaaacaaaaaaaaatctaactataggtgatttacaagctatgtcagtaaattataaaaatccagaaagacagaaaacaagtagatgaaaagagatacaccacacatacactaacaaaaatcaccatagtatgtcaatgtaagacacaataggatttaaggcaaatraccttaccagagattcagaaggttcctttcatgaaatgaaaaagttgagtttgccagaaatatggaatttttatacatatgcaccaataacataagcagcatttaaaaagaagacaaaactacaagaaga

SEQ ID NO: 618593 - DNA, 459 bp, Homo sapiens
caaaaaattaaaggaaatcaaaaaataaatactactttaaatagcacaatttaatgmatgtttctacagtcctaacgtgatacacatccataaaccaaattctgcttaatttattcaaagttaactttaatttaaaataatttaataatattcatcattacatttactgctgagtctttttcttctaacagttctaagtgtcaggcaaaatattttcatctaattcatcatccatactctaggatacaataagaaaatctttttaagaactaaatgaggtgctggagccaagatggctgaacaggaacagctccagtctacagatcccagtgtgagtgacgcagaagacggatgatttctgcatttccaaccgaggtactgggttcatcacactgcggagtgtcagacagtggttgcaggacagtgggtgcggggcaccgagcctaagctgaagcaggg

SEQ ID NO: 618594 - DNA, 509 bp, Homo sapiens
taatattgttaaaatgcccatcagttatgaatttaatccctatcaaaatcccagyaacattttttgacagaaatagaaaaaatccaaaaattcatatgtaaccataaaagacgctgaatagccaaagcaatcttgagcaagaaaaacaaagctggaggcactgtacatcctaattttaaaacatattatttagctacagcaaacaagacagcatggtactggtacaaaaacagacatgtagatcactggaataaaatatacaatggtgttgaaaaactagatatccacatgcagaagaataaaattataccttcatctcacactatatacaaaaatcaactcaaattggattaaggacacataaatttaggatctgaaactagaattgctagaagaaaatatgggaaacactcaattatgttgatctgggcaaagatttttttaatatgaccccaaaagcaaggtaataaaagcaaaaataagtaaatggtattaaaccaaactaaaaa

SEQ ID NO: 618595 - DNA, 534 bp, Homo sapiens
gttaaagcattaatcttcacatcaagaagttccataaattcaaaaataaactcatagaaatccacacatacatgtatcatagtcaaattgtsatatgaaattgttttctagaaattgcaacatttgtaatttgagatgggcttttgagtttaaaatttatattcaggtgtaagatttttcctttggctgaaaaaacctcacccattttctcagctataagaagaaaggctttgagatagaatcaccagagcaagatggaggaagaaccctatccatccacaggaacatcaaattgaatgactatccatgcaagaatacaccttcacaagaactaaaggaatcaggtgagaggtcatggtacctggttttagcataataactagaaaatattcattgaagagagcagaaagtacagtctcacacccctcccccaaaccgaagtggcacagtgtgtagaaaaatctttcttcttgaaggagaggaaagtatcagggggtgggggctgtattggaacttagtaccagctttgctaca

SEQ ID NO: 618596 - DNA, 420 bp, Homo sapiens
ttgacatatttgcttcaatakcaaccgtatttgtagctattttctctttattgtcctagttctttgtttctttttcaccttccacacctttcctgccttctctggctttaattacatatttaatatgatcctatatcttctcctttctcaggatatcaattacatttcctaaaattttgtatagtggtttccttagaatttacaatgtacatttatagaatatccaagtccacttttaaatatcactatatcgcttcatggataatgcaggtattctgatttcagagaattcccatttcctgccttttgtcactcataagattcctgtcatttatttcacttatatataagctataatcatggagaacattgttaccattattattatgaatagtctgtatctgttagatcaattaagag

SEQ ID NO: 618597 - DNA, 496 bp, Homo sapiens
gaattcagaaatggaagtaattgcattttattctctaaaagtaactattatggcactcccaatcattgtgagtttcaggctataataaattcactagacaaaacagactttaaactaatactacatttatttggcttcttaacataatacagaagagggaatacagaaagcacagtgtctctctcactggggcacccagcagttaccacataccttgtttcttttgttcttttcacctatattgaccatgtgcagctactaataaaggaataaaagggtatatggtacttgatacagaacaaagagagcactgataccgtggcatcatatggcaataggacacaaaatatcaccactggatactcctaatcaaatacttaaaaatagcaggtttctgagtgaccatgtctttgataccttaacatacttttgccaaagtaatgagtgtaatgagattagctggtyactcttattatgttagacaaagtggggaaag

SEQ ID NO: 618598 - DNA, 611 bp, Homo sapiens
gcagaggattttggtctgtagtttttttgtgtgtccttgttcagctttggtaacagggtggcttcgtataatgaattgtagaggattctctctttttataatttttggaacagtttcaacaggattggtaccagttcctctttgcacatttggtagaatttggctgtcaatccatccagttctgagctttttttttattgggagatttttattactagttcaatcttactactccttattggtctgttcaggatttctgtttcttcctggttcagtcgtggaaggttgtatgtttacagaaatttatccatttcctctaggtttttctctttgtgagcatatagttattcatgtactctgataatctttttaaatttctgtggtatcagttcttatgtctcctttttcatatctgattatgtttacttgkatttttttttggttagtctagatagtgatttatcaatttttaaaaatcttttcagggaactgagttttcatttggttgatccattgtattattattattatttctttttgaaattatactttaagttctgggatacatgtgcagaacgtgcagttttgttacgtaggtatacatgtgccat

SEQ ID NO: 618599 - DNA, 520 bp, Homo sapiens
ctggtcttgaactcatgagctcaagtagtcctcccaccccagcctctcgagtagctgggactacaggtgcacacaccatgcctggctaatgttttttaatttttttagagatggggtcttgctgtgttgcccagactggtcttaaactcctggcctcaggcagttctcctgcctcakcctcctgagtaattgggactataggtgattatagggactatacttctttcacttggcatgattttgagattcacctgtgttgcatcaattctgttacatttcattgctgagtgctatctcatccatcctattttttcacctttattgccaagtctcctccaaacagaacctgtattatctccactgcttcacctctcatttactcctcaatcactactatttgtttcagcttttattatttccatgagactgctccttgctaagataactcttatttgtcagatttcatggtcactctttggaactatcatttgacttttttgaaggattcacctcagatttg

SEQ ID NO: 618600 - DNA, 520 bp, Homo sapiens
ctggtcttgaactcatgagctcaagtagtcctcccaccccagcctctcgagtagctgggactacaggtgcacacaccatgcctggctaatgttttttaatttttttagagatggggtcttgctgtgttgcccagactggtcttaaactcctggcctcaggcagttctcctgcctcagcctcctgagtaattgggactataggtgattatagggactatacttctttcacttggcatgattttgagattcaccygtgttgcatcaattctgttacatttcattgctgagtgctatctcatccatcctattttttcacctttattgccaagtctcctccaaacagaacctgtattatctccactgcttcacctctcatttactcctcaatcactactatttgtttcagcttttattatttccatgagactgctccttgctaagataactcttatttgtcagatttcatggtcactctttggaactatcatttgacttttttgaaggattcacctcagatttg

SEQ ID NO: 618601 - DNA, 621 bp, Homo sapiens
tctagtttcattcttctgcatatagatatccagtttttccagcactatttattcaccagattgtcttttctccagtgtatttttggcatatttcttgaaaaygagttcactgcaggtatgtaaacttctttctgcattctcttctctgttccattggtctacgtgtctgttattatgccagtgccatgatgtttaggttactatagccctgtggtatgatttaaagtcaggtatgtgatacttccaattttattaactttgcccatcacagtttagactattctgagtcttttgtggatccatataactttgagaatttttttctatttctatgagaaatgtcattggcattttgacaggaattgcattgaatctgcagattactatgggttgtatggacattttaacaatattgattctttcaatccatgaacatggagtatctttccatgttttggtgtcccctttaatttctttcatcaatattgtacagttttcattataggcatctttcacttctttggttaagttaattcctaggtatttaattttatttgtggttattgtcaatgaaatttttaacatttctttttcagattgttcccttttggcatatagaaa

SEQ ID NO: 618602 - DNA, 621 bp, Homo sapiens
tctagtttcattcttctgcatatagatatccagtttttccagcactatttattcaccagattgtcttttctccagtgtatttttggcatatttcttgaaaatgagttcactgcaggtatgtaaacttctttctgcattctcttctctgttccattggtctacgtgtctgttattatgccagtgccatgatgtttaggttactatagccctgtggtatgatttaaagtcaggtatgtgatacttccaattttattaactttgcccatcacagtttagactattctgagtcttttgtggatccatataactttgagaatttttttctatttctatgagaaatgtcattggcattttgacaggaattgcattgaatctgcagattactatgggttgtatggacattttaacaatattgattctttcaatccatgaacatggagtatctttccatgttttggtgtcccctttaatttctttcatcaatattgtacagttttcattataggcatctttcacttctttggttaagttaattcctaggtatttaattwtatttgtggttattgtcaatgaaatttttaacatttctttttcagattgttcccttttggcatatagaaa

SEQ ID NO: 618603 - DNA, 576 bp, Homo sapiens
gtcggagaaagtaagtcctttacaggataaggcctctgtggagcagtcattgtcaagcattgacagtcatgtttttgttaaagaggtaaaaaaaaaaaaacctggagaaaaaaggagtttgctgctgtgacaggagaaggtagagagggaagagatgtgcagtgggggtaagctgggcagctttgagagtttgattgttttgataatggctggtaaagaaattggaatgaaggaattcctggggtaggagagggagggagttgggcattcctcaggcagatcagcacatgaagagtgaaatttaaccactgcaatatgtgtgtcccaaatgccaaggccaccctgtctgttggtggtatcacggctttggctttttgaagcttgttgtgagggaagtggggaatcagtctgctccctgctctgctcaaattattgtgctaaggagactttgccatggtatgatttttgaggcacgtgatgattctgtctgatttgtaaactgacaacgtgatcagggccaaagaggaagttcagctaggccaaaccttmctaagaagaagtcactgtcccacagtt

SEQ ID NO: 618604 - DNA, 255 bp, Homo sapiens
cactgcagcctctgcctcccgggttcaagtgattcttgtgccacagcctcctgagcagctgggactacaggcgcgtgctaccatgcccagctaatatttttgtatttttagtagagatgggattttgccaygttgtccaggctggcttcgaactcctggcctcaagcggtacacccgccttggccttccaaagtgctgggattataggcgtgagccactgcgctgggccagtaatcagtatctttttagcatatt

SEQ ID NO: 618605 - DNA, 581 bp, Homo sapiens
attcatgtacctcacacaaatgtatcaacaacacaacaaaatgtctgtatgaaataataattattatatcccttatatggaaacagatccagagaggaagatacactagcatgtgtaaatagaggattcaagwattaaacatccatctgtccaactgactacaacctctttcataaaatgctaatttctctcctgcttctaattttcttatcaaaaattgtcatctattgttattgggtctatgggtgggtagtgactccttggtttccattttgttctagcggattactgtcttctttatttttgttctagtgtttattgagagtcctaattaattaacctggctgctctgacttccatcagctcaccattgtctcttctcccagctcataatttctgtaacagagctctaggctatgctgaagttctgctatatgttgccagtctctctagatccaagtgcctcttgtcggccaagtttacatgcacgtgtttaaaatcttcttattgactctatatacaaagtcttcacatgccttcctccttaaaataatagcattgtgagaagaaaaaaaaaatca

SEQ ID NO: 618606 - DNA, 581 bp, Homo sapiens
attcatgtacctcacacaaatgtatcaacaacacaacaaaatgtctgtatgaaataataattattatatcccttatatggaaacagatccagagaggaagatacactagcatgtgtaaatagaggattcaagtattaaacatccatctgtccaactgactacaacctctttcataaaatgctaatttctctcctgcttctaattttcttatcaaamattgtcatctattgttattgggtctatgggtgggtagtgactccttggtttccattttgttctagcggattactgtcttctttatttttgttctagtgtttattgagagtcctaattaattaacctggctgctctgacttccatcagctcaccattgtctcttctcccagctcataatttctgtaacagagctctaggctatgctgaagttctgctatatgttgccagtctctctagatccaagtgcctcttgtcggccaagtttacatgcacgtgtttaaaatcttcttattgactctatatacaaagtcttcacatgccttcctccttaaaataatagcattgtgagaagaaaaaaaaaatca

SEQ ID NO: 618607 - DNA, 581 bp, Homo sapiens
attcatgtacctcacacaaatgtatcaacaacacaacaaaatgtctgtatgaaataataattattatatcccttatatggaaacagatccagagaggaagatacactagcatgtgtaaatagaggattcaagtattaaacatccatctgtccaactgactacaacctctttcataaaatgctaatttctctcctgcttctaattttcttatcaaaaattgtcatctattgttattgggtctatgggtgggtagtgactccttggtttccattttgttctagcggattactgtcttctttatttttgttctagtgtttattgagagtcctaattaattaacctggctgctctgacttccatcagctcaccattgtctcttctcccagctcataatttctgtaacagagctctaggctatgctgaagttctgctatatgttgccagtctctctagatccaagtgcctcttgtcggccaagtttacatgcacgtgtttaaaatcttcttattgactctatatacaaagtcttcacatgccttcctccttaaaataatagcrttgtgagaagaaaaaaaaaatca

SEQ ID NO: 618608 - DNA, 607 bp, Homo sapiens
cccactgtttcaacaacgagagtggaaaaatattttttcatttatgtttatatgcagctatttgtagtctaaattaatatcctagcaattgatggtgaaattaaaattatttctgtcagatgtggtamtttgatgacagtggataagcatgggaataaaagaaagttttgaggaagaggggacagtttttgtttacttaatgattattccaaagatgttaagtaaacattctatagaatgcaacatatagtggaatacagcattgaaacaatttaataatgtagtcaatgaatccagtttttagaaatgggatccattttctaaaactgagcatacagatacttcatgagatgctttatcactcatcctaaaccaaaccaactccttcccttgactgtcttgcagtgcatagggcatctctacactctaggaaaggaattatcaatctgtttatatgccacttataaaatcatacttaatgtacgattaggcataaatttacttgcatttttaaattttgtaaaatgttaacggaaagtgttcttgaaaaacatttctgagaattccaaaaaatgaacaaattttaatacataagggacaatatctt

SEQ ID NO: 618609 - DNA, 513 bp, Homo sapiens
cttagctgtaacataaatttaatatactctcttttattaaaagtcaagctgtttattcacagtagctcttaggtctacgtttcattttacacatatatgtggatgtaatagctttttccttagaacttttaaaaaatagaattcagtaaaagtcctatatttgtattttctatgtgtcaagaacagataagcatcattaatgtgaaccaaatttcaattgaggagctgaaattaggaagaattgaaaaacacctgaaataaatcttcaagtaataaaggggaaagtttactttagaattagtgtatcaaaaatgagaaaattggctgggcgcagtggctcacgcctgtaatcccagcactttgggaggctgaggcatgcagatcacctgaggtcaggagttcaagacctgyctggccaacatggtgaaaccctgtctccactaaaaatacaaaaattagccgggcatggtggtacgctcctgtggtcccagctactcgggaggctgaggcagg

SEQ ID NO: 618610 - DNA, 546 bp, Homo sapiens
aagcccttgtgtttaatgttcatgcaaataagctatttgcaggtggcttttgggcagggtcaagtattttcaaatatttttcaaaactgggtcaagttttttaattgtcaaaaattaccagctagaggaaaacctcctaaaaactttattatgctatttcccaagtaaatgaaatgacaagtcacttatcatttaaaaattacatatgaaaattcttttccttatgatttcgtcaataaataaattctagaggattctagatatatttatttggcatttttttttaatgtggtatcaaattttgtggayattctttagagaatcaaattcttaaaatggcattgaacatttaatttaaaatgtccttcttgaaccatacatgtttattaaaaaattattttatataggttatccattaaaaaacaattttctatatatgtaaacatttatgataactgctcattattttggtccatacttatttatctacctatttattaaacaatacaaatcatacgctttgtaaaaataaaggcctagtctaat

SEQ ID NO: 618611 - DNA, 528 bp, Homo sapiens
gtggcttttgggcagggtcaagtattttcaaatatttttcaaaactgggtcaagttttttaattgtcaaaaattaccagctagaggaaaacctcctaaaaactttattatgctatttcccaagtaaatgaaatgacaagtcacttatcatttaaaaattacatatgaaaattcttttccttatgatttcgtcaataaataaattctagaggattctagatatatttatttggcatttttttttaatgtggtatcaaattttgtggacattctttagagaatcaaattcttaaaatggcattgaacatttaatttaaaatgtccttcttgaaccatacatgtttattaaaaarttattttatataggttatccattaaaaaacaattttctatatatgtaaacatttatgataactgctcattattttggtccatacttatttatctacctatttattaaacaatacaaatcatacgctttgtaaaaataaaggcctagtctaatattactctctgtcagaaataaaat

SEQ ID NO: 618612 - DNA, 546 bp, Homo sapiens
aagcccttgtgtttaatgttcatgcaaataagctatttgcaggtggcttttgggcagggtcaagtattttcaaatatttttcaaaactgggtcaagttttttaattgtcaaaaattaccagctagaggaaaacctcctaaaaactttattatgctatttcccaagtaaatgaaatgacaagtcacttatcatttaaaaattacatatgaaaattcttttccttatgatttcgtcaataaataaattctagaggattctagatatatttatttggcatttttttttaatgtggtatcaaattttgtggacattctttagagaatcaaattcttaaaatggcattgaacatttaatttaaaatgtccttcttgaaccatacatgtttattaaaaaattattttatataggttatccattaaaaaacaattttctatatatgtaaacatttatgataactgctcattattttggtccatacttatttatctacctatttaktaaacaatacaaatcatacgctttgtaaaaataaaggcctagtctaat

SEQ ID NO: 618613 - DNA, 631 bp, Homo sapiens
aaattcttttccttatgatttcgtcaataaataaattctagaggattctagatatatttatttggcatttttttttaatgtggtatcaaattttgtggacattctttagagaatcaaattcttaaaatggcattgaacatttaatttaaaatgtccttcttgaaccatacatgtttattaaaaaattattttatataggttatccattaaaaaacaattttctatatatgtaaacatttatgataactgctcattattttggtccatacttatttatctacctatttattaaacaatacaaatcatacgctttgtaaaaataaaggcctagtctaatattactctctgtcagaaataaaataattcagagaagtctgtattagaagacaaaataaaacaaaacagaaaatgatgagaatcacaaaaccattgccaaatttccagctatggcatttactctccatgtggccttaggtatcttactctcttattttaacctttctttgattactgtaaaaataatttgttactaagaarccctcttgctttagtagctgtgagtataaaattaagaacataattctcaaaaagtgttttagtcttcctggaaacattttaaaatatcaattaa

SEQ ID NO: 618614 - DNA, 607 bp, Homo sapiens
cccactgtttcaacaacgagagtggaaaaatattttttcatttatgtttatatgcagctatttgtagtctaaattaatatcctagcaattgatggtgaaattaaaattatttctgtcagatgtggtactttgatgacagtggataagcatgggaataaaagaaagttttgaggaagaggggacagtttttgtttacttaatgattattccaaagatgttaagtaaacattctatagaatgcaacatatagtggaatacagcattgaaacaatttaataatgtagtcaatgaatccagtttttagaaatgggatccattttctaaaactgagcatacagatacttcatgagatgctttatcackcatcctaaaccaaaccaactccttcccttgactgtcttgcagtgcatagggcatctctacactctaggaaaggaattatcaatctgtttatatgccacttataaaatcatacttaatgtacgattaggcataaatttacttgcatttttaaattttgtaaaatgttaacggaaagtgttcttgaaaaacatttctgagaattccaaaaaatgaacaaattttaatacataagggacaatatctt

SEQ ID NO: 618615 - DNA, 576 bp, Homo sapiens
ataatgaatccctgataaatattagtctataattgaaaatctattaaaatgactatttcttagggtacgcggaaatattacatctaaccaagtaaagaaaagttgccatgggatggaatagtatattttcctgcatgtctgcttcaaggcagaatcctaatggtcatgtatgtaggtaaattattctttttwcagcaacttctggtaggtggtatttggtgcagtataaaaggcaaggggtgtagtgagggtaaagcgtaagtactttgatcttgagccttgactatattggacttgggatctcggaaatcttggggataagcagtggattaaatccataaattagtaaagtgttgattatacaacaggtagaggtacgtgccacttttggagggacagtcttcttttttaaaaaaaacaaaaggccttaaaggctttatgtatatataaagccttttttaattataataaaaaccattttttaatgaaacaatctgcacatatacaattccactctcaagaaaggcaattatttacataattatgcagaaattcctataattatgaaaataatgc

SEQ ID NO: 618616 - DNA, 576 bp, Homo sapiens
ataatgaatccctgataaatattagtctataattgaaaatctattaaaatgactatttcttagggtacgcggaaatattacatctaaccaagtaaagaaaagttgccatgggatggaatagtatattttcctgcatgtctgcttcaaggcagaatcctaatggtcatgtatgtaggtaaattattcttttttcagcaacttctggkaggtggtatttggtgcagtataaaaggcaaggggtgtagtgagggtaaagcgtaagtactttgatcttgagccttgactatattggacttgggatctcggaaatcttggggataagcagtggattaaatccataaattagtaaagtgttgattatacaacaggtagaggtacgtgccacttttggagggacagtcttcttttttaaaaaaaacaaaaggccttaaaggctttatgtatatataaagccttttttaattataataaaaaccattttttaatgaaacaatctgcacatatacaattccactctcaagaaaggcaattatttacataattatgcagaaattcctataattatgaaaataatgc

SEQ ID NO: 618617 - DNA, 576 bp, Homo sapiens
ataatgaatccctgataaatattagtctataattgaaaatctattaaaatgactatttcttagggtacgcggaaatattacatctaaccaagtaaagaaaagttgccatgggatggaatagtatattttcctgcatgtctgcttcaaggcagaatcctaatggtcatgtatgtaggtaaattattcttttttcagcaacttctggtaggtggtatttggtgcagtataaaaggcaaggggtgtagtgagggtaaagygtaagtactttgatcttgagccttgactatattggacttgggatctcggaaatcttggggataagcagtggattaaatccataaattagtaaagtgttgattatacaacaggtagaggtacgtgccacttttggagggacagtcttcttttttaaaaaaaacaaaaggccttaaaggctttatgtatatataaagccttttttaattataataaaaaccattttttaatgaaacaatctgcacatatacaattccactctcaagaaaggcaattatttacataattatgcagaaattcctataattatgaaaataatgc

SEQ ID NO: 618618 - DNA, 539 bp, Homo sapiens
tggtgtgcatgggcaaagaaaggaaaaaaaaatgctgctattttcataaaggctgaaaatgcaataattatgggaaagttgctaacaatgattttagatgcttgtcaaacctaaacaggaggtcaccagaaaaatgctctaaatctcttcactgtgacatccacatcttacactcatgcccttatttagcataatttcacctggagctctattgtcctgagatcctagaaaatgtagtgtctaggtttctcccttgtaatttaaacaatacttcagaagttagaagacatgagtggataacaggaaacctgttacaggatacaacttgattaatatagatataataaataatggtgcttcctaaccacagttaggataataaataatacatgttccagttaaataataaatgttgtagtctttattacttgaatttcttacaagacatttaaagttcatgaagacagatagtagatctgtgtattttaatcattttttaagcrtccagaacttcagttaatcaaatcagtaaatatttc

SEQ ID NO: 618619 - DNA, 515 bp, Homo sapiens
aactgaagttctggatgcttaaaaaatgattaaaatacacagatctactatctgtcttcatgaactttaaatgtcttgtaagaaattcaagtaataaagactacaacatttattatttaactggaacatgtattatttattatcctaactgwggttaggaagcaccattatttattatatctatattaatcaagttgtatcctgtaacaggtttcctgttatccactcatgtcttctaacttctgaagtattgtttaaattacaagggagaaacctagacactacattttctaggatctcaggacaatagagctccaggtgaaattatgctaaataagggcatgagtgtaagatgtggatgtcacagtgaagagatttagagcatttttctggtgacctcctgtttaggtttgacaagcatctaaaatcattgttagcaactttcccataattattgcattctcagcctttatgaaaatagcagcttttttttcctttctttgcccatgcacacc

SEQ ID NO: 618620 - DNA, 539 bp, Homo sapiens
gatatattgcctatcactctgttgaggcagtgtgcagaaatgttgagaagaatcttctctatcagttttgattctacacggatgtaaacattatgtcttccatcaacggccgtcattaacgctggcctacagaagagtaaacaacacacgaccttcaaaaagattttcaaataaaagaaatgyttaaatgaaaaataattccaaaaagcacttggtttttaatgcaggattaattttaatgcttaaaacaactctaggatgttctgtgacatcctagaaggaaaaaaaggtttttttttccccaagagcttcaaatgataaattactacattttatttattctatatccatttttaaatttcagatactaatataaaaatatattaaactgttttataaattgtttttagaaatgaaaataaaaataataatcacatatttcacaatcacaatttcaagttacttttttcaactgaattctttcctatcagaaataaactgttttgcatatcaataaaactggattaacaattttcagt

SEQ ID NO: 618621 - DNA, 539 bp, Homo sapiens
gatatattgcctatcactctgttgaggcagtgtgcagaaatgttgagaagaatcttctctatcagttttgattctacacggatgtaaacattatgtcttccatcaacggccgtcattaacgctggcctacagaagagtaaacaacacacgaccttcaaaaagattttcaaataaaagaaatgtttaaatgaaaaataattccaaaaagcacttggtttttaatgcaggattaattttaatgcttaaaacaactctaggatgttctgtgacatcctagaaggaaaaaaaggtttttttttccccaagagcttcaaatgataaattactacattttatttattctatatccatttttaaatttcagatactaatataaaaatatattaaactgttttataaattrtttttagaaatgaaaataaaaataataatcacatatttcacaatcacaatttcaagttacttttttcaactgaattctttcctatcagaaataaactgttttgcatatcaataaaactggattaacaattttcagt

SEQ ID NO: 618622 - DNA, 515 bp, Homo sapiens
aactgaagttctggatgcttaaaaaatgattaaaatacacagatctactatctgtcttcatgaactttaaatgtcttgtaagaaattcaagtaataaagactacaacatttattatttaactggaacatgtattatttattatcctaactgtggttaggaagcaccattatttattatatctatattaatcaagttgtatcctgtaacaggtttcctgttatccactcatgtcttctaacttctgaagtattgtttaaattacaagggagaaacctagacactacattttctaggatctcaggacaatagagctccaggtraaattatgctaaataagggcatgagtgtaagatgtggatgtcacagtgaagagatttagagcatttttctggtgacctcctgtttaggtttgacaagcatctaaaatcattgttagcaactttcccataattattgcattctcagcctttatgaaaatagcagcttttttttcctttctttgcccatgcacacc

SEQ ID NO: 618623 - DNA, 515 bp, Homo sapiens
aactgaagttctggatgcttaaaaaatgattaaaatacacagatctactatctgtcttcatgaactttaaatgtcttgtaagaaattcaagtaataaagactacaacatttattatttaactggaacatgtattatttattatcctaactgtggttaggaagcaccattatttattatatctatattaatcaagttgtatcctgtaacaggtttcctgttatccactcatgtcttctaacttctgaagtattgtttaaattacaagggagaaacctagacactacattttctaggatctcaggacaatagagctccaggtgaaattatgctaaataagggcatgagtgtwagatgtggatgtcacagtgaagagatttagagcatttttctggtgacctcctgtttaggtttgacaagcatctaaaatcattgttagcaactttcccataattattgcattctcagcctttatgaaaatagcagcttttttttcctttctttgcccatgcacacc

SEQ ID NO: 618624 - DNA, 536 bp, Homo sapiens
aatctgtttatatgccacttataaaatcatacttaatgtacgattaggcataaatttacttgcatttttaaattttgtaaaatgttaayggaaagtgttcttgaaaaacatttctgagaattccaaaaaatgaacaaattttaatacataagggacaatatctttctagtgaattgattatcagagtgtaatgtggtatgttctgattatgttacataatattctgattagcagaaaattttgaataagtgaatttagcaaaatgtttagaggtcaagaaaactgttttagactgactatgttttctgacccaaatgtaagaaagaacccaataaaaagaggcagccagataatgctgttgtttgcaaacttaaacagaagcttgcatgtaatttatgactcaaagaaaaataaaaatagaagttatactttatttagaacttaatgacagtgaaaaattgcacataaaaaggaagactgttgaatacagcaaaagctggaattatataagaaatataaacataaacacacaaaat

SEQ ID NO: 618625 - DNA, 385 bp, Homo sapiens
aatagaagttatactttatttagaacttaatgacagtgaaaaattgcacataaaaaggaagactgttgaatacagcaaaagctggaattatrtaagaaatataaacataaacacacaaaataagtgtaaattataatgaagtaaaaatatatcaaagagaaagaaggaagcagtacaataaaaaataaagttgattctttaaaaaccatagttaaatagacaaatttccagccagattgtttaccaagtaaagagaaaaagaaggagatagatcaaaagacacaagatgatgatgaaaagagggtcagcacttataaacatagtagaaatttaagccataatgagcacaagaaagcattatcaacttacttttgaatatataaaa

SEQ ID NO: 618626 - DNA, 385 bp, Homo sapiens
aatagaagttatactttatttagaacttaatgacagtgaaaaattgcacataaaaaggaagactgttgaatacagcaaaagctggaattatataagaaatataaacataaacacacaaaataagtgtaaattataatgaagtaaaaatatatcaaagagaaagaaggaagcagtacaataaaaaataaagttgattctttaaaaaccatasttaaatagacaaatttccagccagattgtttaccaagtaaagagaaaaagaaggagatagatcaaaagacacaagatgatgatgaaaagagggtcagcacttataaacatagtagaaatttaagccataatgagcacaagaaagcattatcaacttacttttgaatatataaaa

SEQ ID NO: 618627 - DNA, 472 bp, Homo sapiens
ggtgacagaacaagagtccatctcaaaaaaaaaaaaaaaaaaagaaaagaaaagaaaagaaaatgtttacagatgaagatctgggcaccaggtatgctcattattactgrggagtaactgcatctgtgctgtgctcgctcaatggacagaactaggagatgtttatgtatgtgtactatcccacccatatacacatgcctatatttctgtatccatttatctatattaaaaatcctcagtttataacgatacctctggttcgttttaaccttcccttgtttataatttctttctccaacagtgagaaatccagctttccttatctgcaatctatgtactcatttgttcattctagtatgtacataaggttattgctaagccattcgcctttgagaaacatatttctaactagattgcagcatttatgtacagtcctttctgtcattagccttatagaatccagtcaatatac

SEQ ID NO: 618628 - DNA, 472 bp, Homo sapiens
ggtgacagaacaagagtccatctcaaaaaaaaaaaaaaaaaaagaaaagaaaagaaaagaaaatgtttacagatgaagatctgggcaccaggtatgctcattattactgaggagtaactgcatctgtgctgtgctcgctcaatggacagaactaggagatgtttatgtatgtgtactatcccacccatatacacatgcctatatttctgtatccatttatctatattaaaaatcctcagtttataacratacctctggttcgttttaaccttcccttgtttataatttctttctccaacagtgagaaatccagctttccttatctgcaatctatgtactcatttgttcattctagtatgtacataaggttattgctaagccattcgcctttgagaaacatatttctaactagattgcagcatttatgtacagtcctttctgtcattagccttatagaatccagtcaatatac

SEQ ID NO: 618629 - DNA, 472 bp, Homo sapiens
ggtgacagaacaagagtccatctcaaaaaaaaaaaaaaaaaaagaaaagaaaagaaaagaaaatgtttacagatgaagatctgggcaccaggtatgctcattattactgaggagtaactgcatctgtgctgtgctcgctcaatggacagaactaggagatgtttatgtatgtgtactatcccacccatatacacatgcctatatttctgtatccatttatctatattaaaaatcctcagtttataacgatacctctggttcgttttaaccttcccttgtttataatttctttctccaacagtgagaaatccagctttccttatctrcaatctatgtactcatttgttcattctagtatgtacataaggttattgctaagccattcgcctttgagaaacatatttctaactagattgcagcatttatgtacagtcctttctgtcattagccttatagaatccagtcaatatac

SEQ ID NO: 618630 - DNA, 472 bp, Homo sapiens
ggtgacagaacaagagtccatctcaaaaaaaaaaaaaaaaaaagaaaagaaaagaaaagaaaatgtttacagatgaagatctgggcaccaggtatgctcattattactgaggagtaactgcatctgtgctgtgctcgctcaatggacagaactaggagatgtttatgtatgtgtactatcccacccatatacacatgcctatatttctgtatccatttatctatattaaaaatcctcagtttataacgatacctctggttcgttttaaccttcccttgtttataatttctttctccaacagtgagaaatccagctttccttatctgcaatctatgtactcatttgttcattctagtatgtacataaggttattgctaagccattcscctttgagaaacatatttctaactagattgcagcatttatgtacagtcctttctgtcattagccttatagaatccagtcaatatac

SEQ ID NO: 618631 - DNA, 556 bp, Homo sapiens
tgtacagctgcatagtacatagtgttccactatgtgaatgcaccataacttagtgaatcattctcctatatattttgcaattataaacaatactgcaatgaataaccttstgatatgtattttcatattgttggaggtgtagcttcagggtagattcctagaagtgggattgctaggttgaaagctaagtacatatgtaattttgttagatattgccaaatatcccttcaaaagggttgtagcaatttgcattcctaccaccaatgtataagagggcacattacctcacagttgcgccaacagaatgtgatttttttttttaattttgccaatctgataggtgagaaatggtatctccatgtagttttaattcgaatttctctaataagttatatttgatagccatttttatatctttttttgaaaattgactgttcatctctttttcacattttcccttttgccaggctagagtgcagtggcatgaatacagctcactgcagcctcgacctcctgggctcaaacaatcctcctgcctcagcctcctacgtagctg

SEQ ID NO: 618632 - DNA, 556 bp, Homo sapiens
tgtacagctgcatagtacatagtgttccactatgtgaatgcaccataacttagtgaatcattctcctatatattttgcaattataaacaatactgcaatgaataaccttctgatatgtattttcatattgttggagrtgtagcttcagggtagattcctagaagtgggattgctaggttgaaagctaagtacatatgtaattttgttagatattgccaaatatcccttcaaaagggttgtagcaatttgcattcctaccaccaatgtataagagggcacattacctcacagttgcgccaacagaatgtgatttttttttttaattttgccaatctgataggtgagaaatggtatctccatgtagttttaattcgaatttctctaataagttatatttgatagccatttttatatctttttttgaaaattgactgttcatctctttttcacattttcccttttgccaggctagagtgcagtggcatgaatacagctcactgcagcctcgacctcctgggctcaaacaatcctcctgcctcagcctcctacgtagctg

SEQ ID NO: 618633 - DNA, 561 bp, Homo sapiens
accatttgaaactgtttatcaatccctcttttctgaaacattccgcttttttgactctgtgagaccaccatattggaattcttttgtacttaagacagatatgtattggattattccttcaatcactcacataacaaacactcaacattacgtgctgggcattatgctaggccctgggaattcaaaacaataatagagagctttaaggagcttaatttctgagaggaaaaacaaactgacaattrtaaaaagtgacaggaggccaggagccttggctcacgcctgtaatcccaggacttcagcggctgaggcaggtggatcacctgaggtcaggagttcaagactagcctaggcaacatggtaaaatcccataaaaatacgaaaattagccaggtgtggtggcacgcacctgtaatcccagctactcaggaggctgaggcatgagaatcgcttgaacccaggaggcagaagttacagtgagctgagatcacaccactgcactccagtctgggtgactctgtctcaaaaaaaaaaaaaaaaaaaaaaaagtgataggagcta

SEQ ID NO: 618634 - DNA, 561 bp, Homo sapiens
accatttgaaactgtttatcaatccctcttttctgaaacattccgcttttttgactctgtgagaccaccatattggaattcttttgtacttaagacagatatgtattggattattccttcaatcactcacataacaaacactcaacattacgtgctgggcattatgctaggccctgggaattcaaaacaataatagagagctttaaggagcttaatttctgagaggaaaaacaaactgacaattgtaaaaagtgacaggaggccaggagccttggctcacgcctgtaatcccaggacttcagcggctgaggcaggtggatcacctgaggtcaggagttcaagactagcctaggcaacatggtaaaatcccataaaaatacgaaaattagccaggtrtggtggcacgcacctgtaatcccagctactcaggaggctgaggcatgagaatcgcttgaacccaggaggcagaagttacagtgagctgagatcacaccactgcactccagtctgggtgactctgtctcaaaaaaaaaaaaaaaaaaaaaaaagtgataggagcta

SEQ ID NO: 618635 - DNA, 503 bp, Homo sapiens
aatttgtaccgtaagtaaattacattctgtatgacagaaagcaaattayaatattagaacaacattatggaaaattggcataacattgtacaatcatccattactttattatttatcattttgcaaatttttattatattagtaaaaaagtctaactgtacttaatagctaatacatatattatttgatatttttaaagaccattattaaaataataataatttgggggtgagaaggcctattgaaaaatgaccaacgtggaaatcataaataagtttgatgcaacaaatatttgtgagtcttatagttaaaaatgtaaaaattcattataaacaaagcctaaagaccataatatgcattgggaaatatttgcaacatttacttcaaaggtggatgtccttaagagaatttttacaaattaataaacattaaaaaggtgagaagtgcaatagctatgagagacaatttacaaacacataataaatatgaaaactgtttaatct

SEQ ID NO: 618636 - DNA, 561 bp, Homo sapiens
accatttgaaactgtttatcaatccctcttttctgaaacattccgcttttttgactctgtgagaccaccatattggaattcttttgtacttaagacagatatgtattggattattccttcaatcactcacataacaaacactcaacattacgtgctgggcattatgctaggccctgggaattcaaaacaataatagagagctttaaggagcttaatttctgagaggaaaaacaaactgacaattgtaaaaagtgacaggaggccaggagccttggctcacgcctgtaatcccaggacttcagcggctgaggcaggtggatcacctgaggtcaggagttcaagactagcctaggcaacatggtaaaatcccataaaaatacgaaaattagccaggtgtggtggcacgcacctgtaatcccagctactcaggaggctgaggcatgagaatcgcttgaacccaggaggcagaagttrcagtgagctgagatcacaccactgcactccagtctgggtgactctgtctcaaaaaaaaaaaaaaaaaaaaaaaagtgataggagcta

SEQ ID NO: 618637 - DNA, 503 bp, Homo sapiens
aatttgtaccgtaagtaaattacattctgtatgacagaaagcaaattacaatattagaacaacattatggaaaattggcataacattgtacaatcatccattactttattatttatcattttgcaamtttttattatattagtaaaaaagtctaactgtacttaatagctaatacatatattatttgatatttttaaagaccattattaaaataataataatttgggggtgagaaggcctattgaaaaatgaccaacgtggaaatcataaataagtttgatgcaacaaatatttgtgagtcttatagttaaaaatgtaaaaattcattataaacaaagcctaaagaccataatatgcattgggaaatatttgcaacatttacttcaaaggtggatgtccttaagagaatttttacaaattaataaacattaaaaaggtgagaagtgcaatagctatgagagacaatttacaaacacataataaatatgaaaactgtttaatct

SEQ ID NO: 618638 - DNA, 551 bp, Homo sapiens
atcgcttgaacccaggaggtggaggttgcagtgagccaagatcgggccactgcactccagcctggacaacagagcgagactctgtctcaaaaaaattctcaaaaaaaactcataatgttttaagaaagtttacaaactcatgttgrgttgcatttaaagccatcctggaccacatgcagccccacaggctgtgggttgaacaagcttggtctaaacaaatacccttgtaagtgtggaactgttaccctaccctccttaccccccccccaaaaaaaaaaaaacttgactagaaagtggccctattaattcaaaaaatagtaaatttttaaaaagtgtttataccaaaggctactgctactaaatactccaatttataggagttgtgagtatgtgagtaggaggatggaaactggcaagggcagggggaaacaaaatacgtatgatagccaaattatacagacagaaaagttatggacaactgattaatttcaataattctaggatatgttttaggtgtactcagagggttaaaggtcattaagataccagat

SEQ ID NO: 618639 - DNA, 551 bp, Homo sapiens
atcgcttgaacccaggaggtggaggttgcagtgagccaagatcgggccactgcactccagcctggacaacagagcgagactctgtctcaaaaaaattctcaaaaaaaactcataatgttttaagaaagtttacaaactcatgttgagttgcatttaaagccatcctggaccacatgcagccccacaggctgtgggttgaacaagcttggtctaaacaaatacccttgtaagtgtrgaactgttaccctaccctccttaccccccccccaaaaaaaaaaaaacttgactagaaagtggccctattaattcaaaaaatagtaaatttttaaaaagtgtttataccaaaggctactgctactaaatactccaatttataggagttgtgagtatgtgagtaggaggatggaaactggcaagggcagggggaaacaaaatacgtatgatagccaaattatacagacagaaaagttatggacaactgattaatttcaataattctaggatatgttttaggtgtactcagagggttaaaggtcattaagataccagat

SEQ ID NO: 618640 - DNA, 551 bp, Homo sapiens
atcgcttgaacccaggaggtggaggttgcagtgagccaagatcgggccactgcactccagcctggacaacagagcgagactctgtctcaaaaaaattctcaaaaaaaactcataatgttttaagaaagtttacaaactcatgttgagttgcatttaaagccatcctggaccacatgcagccccacaggctgtgggttgaacaagcttggtctaaacaaatacccttgtaagtgtggaactgttaccctaccctccttaccccccccccaaaaaaaaaaaaacttgactagaaagtggccctattaattcaaaaaatagtaaatttttaaaaagtgtttataccaaaggctactgctactaaatactccaatttataggagttgtgagtatgtgagtaggaggatggaaactggcaagggcagggggaaacaaaataygtatgatagccaaattatacagacagaaaagttatggacaactgattaatttcaataattctaggatatgttttaggtgtactcagagggttaaaggtcattaagataccagat

SEQ ID NO: 618641 - DNA, 568 bp, Homo sapiens
atcatccattactttattatttatcattttgcaaatttttattatattagtaaaaaagtctaactgtacttaatagctaatacatatattatttgatatttttaaagaccattattaaaataataataatttgggggtgagaaggcctattgaaaaatgaccaacgtggaaatcataaataagtttgatgcaacaaatatttgtgagtcttatagttaaaaatgtaaaaattcattataaacaaagcctaaagaccataatatgcattgggaaatatttgcaacatttacttcaaaggtggatgtccttaagagaatttttacaaattaataaacattaaaaaggtgagaagtgcaatagctatgagagacaatttacaaacacataataaatatgaaaactgtttaatctgtaagtacatcaataagaattttattattgtagttattttatctattaaattaggaaaggtcaatacaattggtaatcttccaagtaaatataggagagaaggtctttctcatacayttataagaatattattttgttagaatgcaattaaataaac

SEQ ID NO: 618642 - DNA, 599 bp, Homo sapiens
aataacctggtaaataaacacaaatgacaccaattctgtcatcattacatcacaaccatagaatatagatgagttcaaggatcaaaaataaaaaagtaaaaaacatctagaggcaaaagatttgaaaatcatgtatctaaatttgaaaatcatgtctagtacccagaatgtataaagaactcttacaactctacaacacaaagacaacacaatttaaagtgggcaaaggacttaaacagacatttctccaaagaatatatacaaatggccaacaagcacatgaaaaaaggctcaatgtcattagttactggggaaatgcaaatcaaaacaaaaagataccactttacacccactagaatgactataataaaaagtttttaatggaaaacagtgttggcaaaaatgtggagaaattgggacacttgtktattgctaataggaatataaaatggtacagtcactgaggaaaacagattggcagttcctcattaagttaaagacagaattaccatatatgatccagcaattccacaccgagctatatacctaaaagaataaaaacaaatgttcaccccaaaaaattgtacatcagtgttcat

SEQ ID NO: 618643 - DNA, 475 bp, Homo sapiens
aaaacagtgttggcaaaaatgtggagaaattgggacacttgtttattgctaataggaatataaaatggtacagtcactgaggaaaacagattggcagttcctcattaagttaaagacagaattaccatatatgatccagcaattccacaccgagctatatacctaaaagaataaaaacaaatgttcaccccmaaaaattgtacatcagtgttcataacagcactatttacaatagccagaaaaagcagaaacaacccaaaagttcatcaactgatgaacagataaacaaaatgtgatatatccacacaatgaaaattattcagccataaaaaagaaggaagcagtgatctatgctataccatagatgaaccacaaaaatattatggtaaatgaaaacatgtgacaaaaggccacatactgaatgacttcatttatatgaaatatccacaaaaggcaaatccatagaaacaaaaag

SEQ ID NO: 618644 - DNA, 475 bp, Homo sapiens
aaaacagtgttggcaaaaatgtggagaaattgggacacttgtttattgctaataggaatataaaatggtacagtcactgaggaaaacagattggcagttcctcattaagttaaagacagaattaccatatatgatccagcaattccacaccgagctatatacctaaaagaataaaaacaaatgttcaccccaaaaaattgtacatcagtgttcataacagcactatttacaatagccagaaaaagcagaaacaacccaaaagttcatcaactgatgaacagataaacaaaatgtgatatatccacacaatgaaaattattsagccataaaaaagaaggaagcagtgatctatgctataccatagatgaaccacaaaaatattatggtaaatgaaaacatgtgacaaaaggccacatactgaatgacttcatttatatgaaatatccacaaaaggcaaatccatagaaacaaaaag

SEQ ID NO: 618645 - DNA, 421 bp, Homo sapiens
ctatttgtgccccatgaccgttctttctggttacagttcagaaaagtaggaatggatgtgtaactcaaggagaagcatayaatacatgaagctttttctcaaaattttgatttagaaaatgaggtattttagtatgttaattataggcatctcaactgagaagtctaatagcattgggccagaattgtcgcagcagtccaaagccatggataaacttaagttaaagggagcaaatactaacagccttccaaattaatctgtattggagaagatgataaacagatgaatgggaactagaaaccatgcagacttggaactagatataaaacaaacagctatctaatgatttcttatttactctgagcccaagatatttttgtatccttttagttaaacctctgttttactaaggaaatttaaa

SEQ ID NO: 618646 - DNA, 421 bp, Homo sapiens
ctatttgtgccccatgaccgttctttctggttacagttcagaaaagtaggaatggatgtgtaactcaaggagaagcatacaatayatgaagctttttctcaaaattttgatttagaaaatgaggtattttagtatgttaattataggcatctcaactgagaagtctaatagcattgggccagaattgtcgcagcagtccaaagccatggataaacttaagttaaagggagcaaatactaacagccttccaaattaatctgtattggagaagatgataaacagatgaatgggaactagaaaccatgcagacttggaactagatataaaacaaacagctatctaatgatttcttatttactctgagcccaagatatttttgtatccttttagttaaacctctgttttactaaggaaatttaaa

SEQ ID NO: 618647 - DNA, 417 bp, Homo sapiens
ttgctctgtggccaaggctagagtgcagtggcacgatcttgactcactgcaacctccacctcccggattcaaatgattctcccacctcagcctccccagtagctgggactacaggcacgtgccaccatactttgctaatttttgtatgttaagtagagatggggtttcaccatgttggccaggctggtctcaaacttctgacctcaagtgatccacctgcctcagcctcccaaagtgctggcatcacaggcataagccaccgcgcctgacctgatcactccctcttatgtgccttccatgtatctactaaacatgtctatcatagcacctgttaacactttgtttcatttgkttttttctttgcatgtggaggacagggacagcatgcttagtgtccttatcactagcagacatgaa

SEQ ID NO: 618648 - DNA, 584 bp, Homo sapiens
atccactgtcatggtattctatactgcattgcttctgattaaggtacacttctcgcaaaagaaatgtggcaatgggcctgtggtcgaagaattcactgatcttaccatgttcaccaccatcctgaagctgctggcttaataagacartggaatagctttctgaagaccgagttacagcaccagctagagggcaaggttctccaggtttctatgctctgaatcaatgtttaatatgtggtgctatttctctgacagccatcattcacaggttcagaaatcaaggggtggaaaaggcctggcaccattcattattatctctagtgacccactggcaaaatttttgtgtcctcttcctaggactttgtattctgctggcctagaggtcatagttccacagggtctaccaggtgctacaacaaaaatttcattgaactagaagttaaaactgccacctggccattttgggctcctcatgcttctgagtcaacaggcaaataagagagttatggtgttggctgggtaattgatcttgggctattaaggtgcaattgggttactactctaaaatggaggtaaggaagagt

SEQ ID NO: 618649 - DNA, 597 bp, Homo sapiens
aaaaaaatacttctagaggccaaccagtcaaactctttgtctccaaagaagagaacacaaatactctttttctgggtgggtgaaaaaaaaattacagttctttttctcctttgacactattacacctttttacataaagacaggagaagaaaaaaggaaaactgagtttattgtaaagaaatcaagagatgttatgycaagaaaacagacagccttcgtgaaatgtaacacatctctgcctttacttctttttcattgacttggattaaacaggtctgtatcacacagcaaacagtatatttgcttcaggaagatgtttagcctgtcaggtgagtagcagtacaagtcctgtgctattaaccaataatgaatgtagtgtgtttggggatggggagttggggtgtgctagtatagttgtgacaagttactgtttcaatttattagaatagaatttctcagaaagtagagatttattctgttatattccatcccatataaaacattcaccttcctgggatattcaatcccactacctgggatatgtgataccctggaaaagtagtctttctggccactggcataagagaaagcaaagca

SEQ ID NO: 618650 - DNA, 406 bp, Homo sapiens
atttctatttttattctactgtggtccaagagtatgactggtatagtttcggcttttaattatatgtctattaggtccaattggtcaagtgtcaaatttaagtccagaacttccttattagttttctgcctcaatgacctgtctaaggctgtcagtggggtgttgaagtcccgcattattattgtgtggctgtctaaatcttttcacatttctagaagtacttgctttatgaatctgggtgctccaatgctgggtgcatgtatgcttaggatagttaagtcttcttttgaattgaatcctttatcattatgtaatgcccttctttgtccttttttaacttttgttggtttggtttaaagtctgttttatctgatataasaatagagacccctactcattttttgtg

SEQ ID NO: 618651 - DNA, 534 bp, Homo sapiens
ttccttaagtgagtttttcaattccagaagctctgattgatttgtttttaagatgttcatcttttctttcattttctgaattgctttaggagtttctttgagtttattttcaatcttatcttggawatcattgagctttcttgcaatccatgcattgaattccttatctgtcatttctgagttttcattttgtttagggacaattgctggagagctagggtgatcctttggtggtgtcattacattcaggtttttcatggtgccagaattcttgccctgtttttttttttttttttttttttttttttaatttagagatgctggcacctctaataattttcatgtgggtaatattgattatttttctttctttccttcaatattcttcttttatctcccactgcacccccccaccccaacacacacacacacacacacacacacacacacagtgtgactacagagaatgctgggtaaggtcttttggctctgcttctatagccctaagaacttttgtcagcaggttttttattg

SEQ ID NO: 618652 - DNA, 639 bp, Homo sapiens
catgtatacatatgtaacaaacctgcacgtgtgcacatgtaccctaaaacttaaagtataataataataaaataaaaaagtgaatagacaaaaaaagaatgctgatatcatctttaatttcttcttttcctttataaaccagtcctaatcttttgacatatagactaagttgctgtttcaatccacagaaatatagsgtgctgctgcctcttcacattgctgtgagagaaaataaaaaagactaagtgatattttctatccccaaggagcttactgtccaattgtagaaatacaattaacaaatagaaaattagactctcttaagataaatttagtataatgtttccagagaaggataaatatccatatggattggaggagttagaagcttcagagagactggaggacttgtgttaggtcttcagaaataaagatgattcaattaccaaaacagagaaagaagtagggctttgcaggcaaaaatagcaacataaacagttatagggtgtgaaaatgagtgtgatgtgttctgggaattgtgtgacaacatacatggtacagtggagtatatatgtaaaagagtagaaaataaagttgtgcaaagaggttggaattatggaaagttatgaatgccaggct

SEQ ID NO: 618653 - DNA, 541 bp, Homo sapiens
agatattatatggcagaaaccctgtggtatagattrcaacatggttaaactcaacttattgcaacttcatagcctttagaaaaaaacaaagcaacacaaatgatatcaaaaataaggttgaaaaataaattaacttggaagaatatttgcaacacatattataaacaaagagttaatttcctggtacagaaagatttaaaataaattttcctccataattcgtttctatttttaattgatgcataatacttgtacatattaatggagtacagataatattttgatacatatatacaatgtaatgatcaaattagaataattggaatatccattacctcaaacatttatcaattctttgtgttgagataattcagaatcttctggattttttttttttttttttgagaaagggtctcactctctcacccaggctagagtacagtggcaaaatcatggcttactgcagcctcaacctcccaggctcaagcagtacttctgcctcagcctcccaaatagctggaaccataggcatgtgccacca

SEQ ID NO: 618654 - DNA, 473 bp, Homo sapiens
aggatgtctactttcaccacttttattccacgtggtattggaagtactagttggagccatcagacaagaaaagaaataaagagcattcaagttggaaaggaagaagtcaagttatccttttwtttagataatataatcttatattttggaaaacctaaagactccagcaaaaaactattagaagagagaaagaaacacagtaaagtttcagcacacaaaattaacatacataaatcagaagcatgtctataggtcaacagtgaacaatttgaaaaagaaatcaagaaaaataactaatgggtacttggcttaatacttgagtgataaaatagtttttacaacaaatccccatattacaagtttacctatgtaataaatctgcacttgtactcctgaacttaaaatagaaattaaaaaagaaagtaatcccatttacaattgctacaaataagataaaatacctagaaagtaaa

SEQ ID NO: 618655 - DNA, 432 bp, Homo sapiens
accctgggtaacatggtgaaacaccatctcaaaaaaaaaaaaaaaaaaaaaaacccaaaaattatccaggcgtgatggcgtgcacctgtagtcccaactactcagaagactgaagcgggagcatcactggagcccaggaggttgaggctgcagtgagccatgactgcaccactgcactccagcctgggtgacasagtgagactctgtctcaaaaaaaaaaaaaaaaaaaccatatatatatatatatatatatatatatatatatgtcacttaatagtttttgggagttattcttttttgcattaagcacatgtcctgtcattcctagtcttctataagtcatcgttacaaagaacactgcatttcacccactgaattttatgcaactatgaaaacaaatgcacttgtttctcagtgagttatattacgtag

SEQ ID NO: 618656 - DNA, 432 bp, Homo sapiens
accctgggtaacatggtgaaacaccatctcaaaaaaaaaaaaaaaaaaaaaaacccaaaaattatccaggcgtgatggcgtgcacctgtagtcccaactactcagaagactgaagcgggagcatcactggagcccaggaggttgaggctgcagtgagccatgactgcaccactgcactccagcctgggtgacacagtgagactctgtctcaaaaaaaaaaaaaaaaaaaccmtatatatatatatatatatatatatatatatatgtcacttaatagtttttgggagttattcttttttgcattaagcacatgtcctgtcattcctagtcttctataagtcatcgttacaaagaacactgcatttcacccactgaattttatgcaactatgaaaacaaatgcacttgtttctcagtgagttatattacgtag

SEQ ID NO: 618657 - DNA, 432 bp, Homo sapiens
accctgggtaacatggtgaaacaccatctcaaaaaaaaaaaaaaaaaaaaaaacccaaaaattatccaggcgtgatggcgtgcacctgtagtcccaactactcagaagactgaagcgggagcatcactggagcccaggaggttgaggctgcagtgagccatgactgcaccactgcactccagcctgggtgacacagtgagactctgtctcaaaaaaaaaaaaaaaaaaaccatatatatatatatatatatatatatatatrtatgtcacttaatagtttttgggagttattcttttttgcattaagcacatgtcctgtcattcctagtcttctataagtcatcgttacaaagaacactgcatttcacccactgaattttatgcaactatgaaaacaaatgcacttgtttctcagtgagttatattacgtag

SEQ ID NO: 618658 - DNA, 590 bp, Homo sapiens
cattgtggttttcatttgtatttttctgatggctaatgatgttgagcatattttcatgtgcttattggccwgttttatattttgtttggatacatgtttattcaaatcctttgcctatttttaactgtatttttttattgttgaattgtaaaagttctttacatattctagattcttatcagacatataatttataaatattttctaccattctatgggttgtctgtttgctttcttgatagtgtccctgaaacacaaaagttgaatttttgatgacgttcagtttattctttggttgcttgggcttcaggtgccatatctaagaaatcattggccaaactaaggtcacaaaaattatgtctttgaggatgttgccttctaagagttttatagttttagctattacagttaggtctttgaccaattttatgttaacttttgtatttagtgagagtcagagggtccagatggatacttttgcatgtggatatccacttatctcaccacacttgtggaaagattattctttccccattgaatatcttggaaagaagaaacatttttaagacaatcttgaccaaacagtctgg

SEQ ID NO: 618659 - DNA, 590 bp, Homo sapiens
cattgtggttttcatttgtatttttctgatggctaatgatgttgagcatattttcatgtgcttattggcctgttttatattttgtttggatacatgtttattcaaatcctttgcctatttttaactgtatttttttattgttgaattgtaaaagttctttacatattctagattcttatcagacatataatttataaatattttctaccattctatgggttgtctgtttgctttcttgatagtgtccctgaaacacaaaagttgaatttttgatgacgttcagtttattctttggttgcttgggcttcaggtgccatatctaagaaatcattggccaaactaaggtcacaaaaattatgyctttgaggatgttgccttctaagagttttatagttttagctattacagttaggtctttgaccaattttatgttaacttttgtatttagtgagagtcagagggtccagatggatacttttgcatgtggatatccacttatctcaccacacttgtggaaagattattctttccccattgaatatcttggaaagaagaaacatttttaagacaatcttgaccaaacagtctgg

SEQ ID NO: 618660 - DNA, 646 bp, Homo sapiens
gtgaatgtgaagtagtatctcattgtggttttcatttgtatttttctgatggctaatgatgttgagcatattttcatgtgcttattggcctgttttatattttgtttggatacatgtttattcaaatcctttgcctatttttaactgtatttttttattgttgaattgtaaaagttctttacatattctagattcttatcagacatataatttataaatattttctaccattctatgggttgtctgtttgctttcttgatagtgtccctgaaacacaaaagttgaatttttgatgacgttcagtttattctttggttgcttgggcttcaggtgccatatctaagaaatcattggccaaactaaggtcacaaaaattatgtctttgaggatgttgccttctaagagttttatagttttagctattacagttaggtctttgaccaattttatgttaacttttgtatttagtgagagtcagagggtccagatggatacttttgcatgtggatatccacttatctcaccacacttgtggaaagattattctttccccattgaatatcttggaaagaagaaacatttttaagacaatcttgaccaaacagtctggccctgattaaaaawaataataataaaacagccacca

SEQ ID NO: 618661 - DNA, 421 bp, Homo sapiens
tggttttataaggttggctacagggaaatttcccatcattttgaaaattaaagctctgttgtaatctcagtcttctttaagtaactgtctccataccccagaacttagtataataaaaaagaataattttataaaaagaacatatggaagattaaatgaaaatagtcaataaaattattaaaaagaaaagcagtgatattttactaaagagtaatcccctagagccactgtagttacaataatrtagtattggcataaaataccaatggactagaatagagagccaataaatatatcccaatggctatgggaagttaacgtatggcaaaggtaatatttcaatttcagggaaaaaaaattgccatctccaatggaaaggtttcacctgagactggggaccatccttgactttctgcttgga

SEQ ID NO: 618662 - DNA, 564 bp, Homo sapiens
taggaaacttgcctatggtcatgcagctggtaatggtcagaattcaaatttatggttgtttcactacaccacactgccactcaatgtctgaagatggcttccaaaaatgtttgtgcaatagacatttctctgaactaattgtaccgtgccctgaggcgacggatttgcagaacagctctcttgaatagtaagtgctagtatttttgtttaaaaaattccctgtcattastttatagcctcaccttgtctatattatatgggattctttgcttgcctaacttatattatcactcccctgggagggactgagacttcttttccatttcatacagagtttaagaagctgtcaacacttagtaaataatcagtatttaagccagcacagtgatccctacaaattatgaccctcaggctctgaagatgaagaaaatgttgagttgtgcaattttccactcttcaaataatcttaatagtgtggatcatgttagtcctagtttaatattataatccaaacaacatttgactctgaatgcagagcgaggcttgggaatcacccagaccagt

SEQ ID NO: 618663 - DNA, 579 bp, Homo sapiens
gttttgttttgaaatgtatctgtattacataaacacagtaattatggcctttgacttgtccttgtatgaatggaagtaccctaaaatcttacataatttgaatcctgcagtttatggaaggcaaaggcaataaggcactttatcacagcaaataaaatgcctcacaaaggagactattgcctattcacatgtggacaggtctcatcttcctatggagaaatttaccaggatcaggaatttcaggaatgactaactggcttctaacgtcctgagtgtccataaatgagaataatgcactctcccccacccctcaaattcatcttttcttccctgccagcctacttcctgctttttctgctctctttcccatgtccttactttattcttttcatgctcacaggggctcatgtttacttgctaagcttcggccttttccacattcctcctttgataggygaacatcccagcagctcccctgggtcattcccaggtgagtccaccagacttccacagcttcaccccgtgccctgtgtcatcatgactaaagctgatctgatctcagaagtctgagagccccaa

SEQ ID NO: 618664 - DNA, 184 bp, Homo sapiens
ttgggtgtggcctggggggtcctgtgtamctctacatcagatatttgtcaacctcagcaccattgacattttggcccagataattctttgttgttggccgtctgtcccaagcactgtaggatgtttagcagcaactctggccagtagtacctcccagttgtaacaaccaaaaatgtctcccgat

SEQ ID NO: 618665 - DNA, 692 bp, Homo sapiens
gggacaaatcaagactcattcctcaggttgaagatgagtcaatcttctctgaagcagtggccacttagaagaggctgaatatttgaacaaaactggatttctgttagaaatgaggaagggagggctggtagggaatgtgggatagacaaaaacaagctaacaaacaaacaaaacaaaaaacaaagtaacagacctgctgcaggtaacaaccaattttttttgtagttctgaaactttgtctttttctttctcctgacccgtgatatccaactggtggccgagcttgtctatttgatctccatggtttcttctctctcgttgccctcatccacctgagtcgccccctctgcttcatgctgacattacttctcagccattcttccctaacggcctcctgctgagaccygtctttctgtcgtgccttcttccccctccaatgcatctcacacatcttggtgagtgcaatctttccacagcgtacatctactggtaataatgttacagcccctgctcaactctactgcctataaaactaagtccaaattcattactcacacaaataaggtcagtctcagcatctctttatttatctgtcttagccacaaatctcttcctttacttatatagctccaacctattatttgagacatcttagataataatagccaacatttattgagatgttgtgtgtc

SEQ ID NO: 618666 - DNA, 555 bp, Homo sapiens
aaagccaaccttgaagtccacgtagttgccttgctttggggaaaaagaattatcaaaattatgatcctggaagaaaaattaaataactcaatttaagcactgtgaaaatagaacttgaaaaaaatgtagacctgcccttgtcggtgctcaggaaaagaaatagaagagcccatcactgcttcttaggtgggctgcccagcatggttcttggggtgaccaaggagtgacaagccacagggctacasaacaggtacaagcctgagtggggcctgctcctcttaccctctccttttcacctcagaatcctccttcttgcctaaggccagagagtccagtgggtgatgaggagagagcctgggctgaaccacatgggccacattgctgtgcccccagacatcattagccattccataaagacatcattagtcatagcagataggccaaacccaccactactgttggaaaccaactccacagacatattttcaagagtcttcagcaatgtcattctcatacctaagaaacagtgactcctctctaggtcaagccagtggc

SEQ ID NO: 618667 - DNA, 558 bp, Homo sapiens
aaccaactccacagacatattttcaagagtcttcagcaatgtcattctcatacctaagaaacagtgactcctctctaggtcaagccagtggcctgctccmgggcactcactgtggatccctcctctgggcccagcccctgcctaggaggccctttcttctccattccaccttcaaaggccttttccattccctacagctcaggtccagtcactggtgtttctcccactctctggcttctctgaaatgcccagcaagcacctggccagcacagttctggaactcttcacacctgtgacctgcatctccttgtagagcacgagttgttccggcccaatgcctatcagttatttttccaacactgggctgcaaatgtggcaggcccttaaaaaaatatgtgtagactaaaagataagattcagtgggtaatgaaataacccagtgatgcccaaagaaggtttggggctaaaatcaagttcatgtaatgctgagcgttcagaaaatcgtttttcgtgtttctagtggaaatagcttatggaatgcttttatcacttaaattt

SEQ ID NO: 618668 - DNA, 558 bp, Homo sapiens
aaccaactccacagacatattttcaagagtcttcagcaatgtcattctcatacctaagaaacagtgactcctctctaggtcaagccagtggcctgctccagggcactcactgtggatccctcctctgggcccagcccctgcctaggaggccctttcttctccattccacyttcaaaggccttttccattccctacagctcaggtccagtcactggtgtttctcccactctctggcttctctgaaatgcccagcaagcacctggccagcacagttctggaactcttcacacctgtgacctgcatctccttgtagagcacgagttgttccggcccaatgcctatcagttatttttccaacactgggctgcaaatgtggcaggcccttaaaaaaatatgtgtagactaaaagataagattcagtgggtaatgaaataacccagtgatgcccaaagaaggtttggggctaaaatcaagttcatgtaatgctgagcgttcagaaaatcgtttttcgtgtttctagtggaaatagcttatggaatgcttttatcacttaaattt

SEQ ID NO: 618669 - DNA, 508 bp, Homo sapiens
caggaatatgatagctataaagatctttgcttctcttaaaaaattctttcaagtcatctgaagatcaaataataagatgaaaagaataaaggacattgagaggaaagatgggttgggatatcctacatttgctctaatgaacccttaatattttaatggtgatttggaaaatgttgtcttaactttacctaaakgtattcttcgtaatttggaaactcagttccatgtgaatttcctactgtaataggtgcccttactgttctaggtgctagagaatcagtaacaagttgcaactcaagaagacccagtcttgtagggggtcaaacacaaaaccaaaccattatattacagcatgataactgctatggtatagaaaaaaagggtgacttacatcctacaaagtcctttccactgatgaacacagggtggattgtaggaggcaagagtgggaatggggagaccagcctgggcatgccatggtccctgtgaacaatgatgctggtctaca

SEQ ID NO: 618670 - DNA, 610 bp, Homo sapiens
gaatgtatccagtaaatttaataatgttattgctataaataatgttttgattagagaatgcatttagtggaaacagaaaacgcaatcaagatagctaatggccccacaatctcctcgtccttttaataataaaactgctgtcaatgcacacacatacacagagtcacacagctagagactacattttccagcttcccttgcagcaaggcaaggtgctgtgacgaaggtctggccaatggcctgtgagcagtagtgacttcagaaacccctgggtcatgccccttacaaaggagactactcagcctcccgtcttctttcccccttcctaggggctggcgtgcaaacrtggttctttttgaaccacccaccctcaaacatgtcatggagagcaacaatcctggaaatggtagacccacaaccaaaacaaccctggagctgtgggtgacatcacggagcagagcagcctgtatgctctgtacttctcacctctgacctgttacatgaaagacagaatgaactatctggtttgagctactgaattttagggtgcctttgttacagaagcttagcctgtatcctaatacatggattaacctcttaagaggtagct

SEQ ID NO: 618671 - DNA, 586 bp, Homo sapiens
agtagtgacttcagaaacccctgggtcatgccccttacaaaggagactactcagcctcccgtcttctttcccccttcctaggggctggcgtgcaaacgtggttctttttgaaccacccaccctcaaacatgtcatggagagcaacaatcctggaaatggtagacccacaaccaaaacaaccctggagctstgggtgacatcacggagcagagcagcctgtatgctctgtacttctcacctctgacctgttacatgaaagacagaatgaactatctggtttgagctactgaattttagggtgcctttgttacagaagcttagcctgtatcctaatacatggattaacctcttaagaggtagctttaactctaggtagctccaactctaggtagctcctagagttgtccctgcagaatcaacatatacaaaaagtcagtctttcttataagcagattttacatcctgagaatactgtgtattttttatccacatttggttgaaaaagaaatccatgtataagtggacccatgcagttcaaactcatgttgttcaagggtctactgtatttctttcttttttttcttat

SEQ ID NO: 618672 - DNA, 534 bp, Homo sapiens
tgctgtctcttccaactgagtacatgctagctcctttaatttcatgattagtgtcatttcatcattgggaagaccaagctttttcctgttcagtgacataaagctaatataaaaccaagygtgtggttcctggaaatattcacaaaatttttttttcaaattgacatagttcaggagttgggcaataaatttccttcctaatgagacaccacaaagaaagcaaacatctgatgttgtgcccaaagagagtccgttgttgcagatttatgggcaatctgtgcaaatactgtcctttcctttcgatgagtttttaattttggtttgatagtctccaggtgtctatatttgcccgtgatattagatgcataaaactgtagtaatagacatgtatttttcttttttttccttctggaaatgtacctgtcccctgggcattcacagcagagtcttacacagacttgattcatatgtcagctgtgtttacatatccatacatatatgacaccaaataaagacagtcctctatccacgcac

SEQ ID NO: 618673 - DNA, 525 bp, Homo sapiens
gtagcatatcaaagcaggaaagagcctgctaccctcaggcttattccctatccatgtgggcggataacaccaatacccatgaaagaaggagaggaacgtactgctctggaacagaacagtgcatgctctgtatgatgcagagtacaaggtattcagagaatgggactctgtgaaggttggggtcctcaggaaaggcttcgcaaaggatatcaacctgaaccaacrtacatggccacatggtgctgctttcccctgcagacaacccagacttggaggttgagaagtggcagagcagttggacagaatccaactcatttatgatcatgaccaagagggtatttataaacagccaaataagacagaatagtaaggatgttaaaatatgccatgttctggttaattattatttccttgtaataataagatcagaaaggaattcagggactaaaatattgacataagtcataaataacctgaagtttgagttatttatttctatgctaccattgctgtaaggtaattaag

SEQ ID NO: 618674 - DNA, 561 bp, Homo sapiens
tacctgctcaggccagaggaaggaagatgctactcctccttcagatcatcagtgacaatgtatcagtgagctactcaacagatccccctgcccyacaagcacctgcagagctgttgtgttttccatatacattacatacaaacggtacatgggcagttcattcccattgctccaaccctgattttgtgctctaaacaatatttctcagcaccctcaaagacccggtttgtcccaaattcccatgatggcacagagctgcagaaaggacagtggccttagaaaagtgttacaggttggtgcagaagtatttgctataaaattgcaaaagctgcagttactttttcaccaacctaatatttcaagcattaagggaacatggagaacagccaggtttggctctatttttttgttaatttttacttatattttacttatattttcttatatacttataagtaaatataagacttacttatatttacttatattacttatatacttaaattataatatacttatgatttttacttatattttacttatatgtgcccaaaagaaata

SEQ ID NO: 618675 - DNA, 525 bp, Homo sapiens
gtagcatatcaaagcaggaaagagcctgctaccctcaggcttattccctatccatgtgggcggataacaccaatacccatgaaagaaggagaggaacgtactgctctggaacagaacagtgcatgctctgtatgatgcagagtacaaggtattcagagaatgggactctgtgaaggttggggtcctcaggaaaggcttcgcaaaggatatcaacctgaaccaacgtacatggccacatggtgctgctttcccctgcagacaacccagacttggaggttgagaagtggcagagcagytggacagaatccaactcatttatgatcatgaccaagagggtatttataaacagccaaataagacagaatagtaaggatgttaaaatatgccatgttctggttaattattatttccttgtaataataagatcagaaaggaattcagggactaaaatattgacataagtcataaataacctgaagtttgagttatttatttctatgctaccattgctgtaaggtaattaag

SEQ ID NO: 618676 - DNA, 406 bp, Homo sapiens
attatgttgcccaggccagtctcaagctcctaggctcaagggatcctcccacctcagcctcccaaaatgcagggattgcaggtataagccaccrtgcccagctttatccaactctataagtgagaaaattgaatcccagagaggttaactgctttgtgcaaaccttctcccacccagtcagtctttctcctctccatgctgtcccttgcatttcaatttcttattccagttcccatgggcaggagcagggcctatcctggagaaaaactctttgtcccagggattccagagaagaactaaggaagactggcagtcacagcaaacagagtgccagccatgtcctttcattaaaaaatgagttagacatgtgcctattgaattcgtaagaacttagagacaaagaaca

SEQ ID NO: 618677 - DNA, 654 bp, Homo sapiens
ttggagataaccacatgcctatggtaagagcactgtgacattacgtgaagtacttgaaccctggagcagagaaacctgggtgtaaatccccctcctactatttccaacctgaaagaccttgagcaagcccccttcacatcctgggtctcaatttctttattggatttgtttgataatgtatgtgtgtcaagcatttggtatgtgggaaatattagtaaatgatagcaattattattattattactggctgatagtgsgatgcacaagctattctactttctttttctacccatgtctcttctagttaaacagaagttttaaaaaattgtctgggccgggtaaggtggttcacgcctataatcccagcactttgggaggctgaagggggtggatcacctaaagccaggagttcaagaccagcctgaccaacatggagaaaccccatctctactaaaaatacaaaacattagccgggcgtggttgtgcatgcctgtaatcccagctactcaggaggctgagacaggataattgcttgaacctgggaggtgaaggttgctgtgagccaaggtcacgccattgtactgggcaacaagagtgaaactccgttctcaaaaaaattgtctggaacatgttcaatatttattgtcaaattgc

SEQ ID NO: 618678 - DNA, 627 bp, Homo sapiens
gaattcattgttctatagattgtttttaatattacctgtagtacaagtcagccagctttaaattctctcagcttttcttatctgaaaacatctttattttccctacatttttaagggtatttttgctggctatataattctaggttgacatttattttctttcagctctgtaaagatgtcatkacattttcttcagacttcagatatcattacattttcttcagacttccaaaagtaagccatcactctgatcttttttcctctgaaggtaatgtgccttttttctctaactccttttaagattctctctttgtccttggttttcagaaattaactctgcctaaatgtaatttttatatttatgtcttctatttgagactcatattcttgaatttattatttaatgtcttccaccagtttttggaaattctcaagcattatttcttcaaatattacttctgtcctattctctgcctcctctccttctggaactcttagttaacaaatgttagacctaccacttactatcttatccttttttcctcaattttatataccattttctgtgtatgtgtgtcaatctggatactttctactgacctacgttctatttcattgtgtcctgcc

SEQ ID NO: 618679 - DNA, 550 bp, Homo sapiens
tcaatgaaaaacacacacatttgacttattagaatatactttaacttagtactcttgccacttcaaaaaaatgagaactttacaattaatctccatttagccctctcctgtctttcatgctattgatgtcagacatttaacttccgcatatattttaagcaataccgtgtattatcatcagtcttgtcttaaatagtcaatatccacttatatttactcatatatttacccatcctggtattctttattccttcctgcatgtctgcttccctcggaattcattgttctatagattgtttttaatattacctgtagtacaagtcagccagctttaaattctctcagcttttcttatctgaaaacatctttattttccctacatttttaagggtatttttgctggctatataattctaggttgacatttattttctttcagctctgtaaagatgtcatgacattttcttcagacttcagatrtcattacattttcttcagacttccaaaagtaagccatcactctgatcttttttcctctgaaggtaatgtg

SEQ ID NO: 618680 - DNA, 582 bp, Homo sapiens
taacattttaaaatcatttcttataattttttattgagtaatagacattgtgaatcaaaaaaaatgtggagctctggatgatgttatctctctcccaaatggttaagatttttcttctttttctttttggtaagttaacagatcactttattctattgaaagttaattttaagactttcttagagttcatctctttcagtttttccctcycttacagagcatggtccctctgagatcttaacagagaatctgaggcattaaccaaacctctcccaatttgaaagaacttaaattccaatttctagctcctcagcaatggtaagctttgggatctctactcagaagttcagcctcccaactgctgctttctgcttggctctttggaatcactctgtacgtggaaatctcaggagacagccaatgacctaagaggcattttagagcttctctcattgcagctaagtcttttccagaattttgttcctcaatcctttcctgctctggcagactcagacttcatccattgtctccttggcccagtcagattacagctttctgcttggcgaaggcctagtgcttatt

SEQ ID NO: 618681 - DNA, 691 bp, Homo sapiens
ttgagaattagaaataagtaaagagatataaacaaagatatggaagacattttaagtcatgggaaaataacatgtataattctgtattaataaatttgaaaaktttgataaaatagatggttttctaagaaaacataaattttcaaaattatcaaaaaataaatggtaaatctgagcagactactagccctgcaagaaattcaaaaagtaggctaataattgaaaacataatttagaaagatcctgggcctacttggttttacaggctctatcttttctttgaatttttaagaaactatcacttctattttatatagttcaataagtctgtaaaaaatagtaagtttcccaattcaattcattaagcctagaacactcttgatacagtgccaagaaaataaaaaatttgcatgaatataaatacaaagtaaagttacaaatcaagtcaagtagtgttttgaaataataataacaccataaccaaccatgatttggaatgcaagcatggttcaataccaggaaagctattaatgtgatttatcacatcagtagatcaaagaaggcattacaataagaagagaatagttagaggctaacagtcagatttaaaagccagggcccctgggttagaaacctggcttttccacttccactgtgacttttatcaagcaatctaaggtctgtgcccaat

SEQ ID NO: 618682 - DNA, 526 bp, Homo sapiens
tgtctctgggaccatgagtataataaacttcattttttttccagagcctttcctctgtctccttttgtggccacatgtgacacccacataaaataatactacaaaatatgagaatactaacattacatactttgtggggttattgtgaraattaaataaactaacacatgtaaaagatgtttacatcaatgcctggtgtatagtaaatccataaaactaatacttgctagatataataaaacctaaatcatcatctctataaatgccaatgataaactttaccatccttctctgttagaaactcttggtaaaccaggaatagttcaacaccatgaaaattgtctatcccgaactaataactaacatcactcctctgagacaataaagggacacccactaaagccaggagtaggatcccaatggccactatcacccccttggcctccaccagataagttcccaagacaacctgaccacagtgagaacgaaatggctctctaactgcaattttattttatttgtaatc

SEQ ID NO: 618683 - DNA, 582 bp, Homo sapiens
acagaaccccacctccactccaccttccaggacccggcaaccaccacctttttctggaattcctgcagcagcgggtttcctgactcctgccccacctccttcagtctgttcgctacccagcagccagagtgatcacagccgtcctgggctcagaactctccattcacctcccatcacactcacagtaaaagcccaagtccctgcagtggcctaggagaaccgttcttccctgagtctaacctgaccatcacctggccggccctactacctgtctcacctggtcctcgaatactttccccttttctgaccatgttgtttaaaagctcaaacctcaccctacacataatcaatcccctctcccccttcctgatttattgtttttcatctttygtgtccatctgactgatttgtttatttatcttctgtcttctgccaggggcaatgtcagctctgtgaaggccaggattttgtcctgttctccctgccaccatctgggagtctagaacagtgcctagcatgtgaaggggttctataaatatttattggcagaatgaatgaattataagttctttcaaactaagg

SEQ ID NO: 618684 - DNA, 543 bp, Homo sapiens
tctatatgccagcaccagcagtagtccagagctcctgttcctaattccagggagagaaactctaatcacctggcttgggattgatggccatcctgatataattttcgatggcaatgggggtgaggtatcttacaggtctgcagttccttatccgaaatgcttgggtacaaatgtgttttgtttttcacagcttttcatattctataacrtcaatgtggttcatatactgtatattatataacatcaccactgggtctgaggtcacattctaaaattaaagacatgaacatttctgcaggaaatctatgaatattcataataaatgagacaaataaaaattataaacatcttcagatcaggctaccacaggctttgctgtcaaataaactcagatcaggttggaatttgccccaaatgagttagaaaatcttttggttttcaagagttgtttggattcctgattgcgaatgtgtagggtaaccatgaaatttatcatccaaacttcacttctgaaagtaaagggggtgctattaagaattacat

SEQ ID NO: 618685 - DNA, 553 bp, Homo sapiens
aatgaatgaacatgccaagtgcccagattgtggtctctaaatactgccttgctaaaagaaaacaggacttgttggagcaatagctgattccaggactgcagcaggaaatgcacaagataagcctggaccatcttgttctatcagaagcaaggaagctatcaaagactattgggatcttgtcaaagaactcaagagccaacatgaagatatgcccactggccaaacayggaacaatttgagtaccaataaggataatagatgtaataaattaaaacacataaaatatacttaaattcatgaattatgatgcaaaaataataaatggaaagaaaaaagatacaaggaagaaacctaaagatgaaaaaagacttaatggacatatcaatgcatgcccttatttgaatcctaattcaaacaaaaaaaaactttaaaaagatcacatttataacatttatgagaaaagttacattttaagcacttgatatttcattatattacaaaattatttttcataatcttcagtgtgatgatagtattatggttatgctttctc

SEQ ID NO: 618686 - DNA, 653 bp, Homo sapiens
acagttttggcctctggggaacaagttgcacagccacgggcctcctttcttttctcctaaaaggcttcgggtggtgcaggctaatctgcagtgttgaagtcgttcctgtgtttctttctttgtgacctgggttgctggataacactgcagttaagaatgtgggccctggggccaggctgcctgactttgggttctggctttgggatctcagacaagtcactgagatcggctctgcctcagtggactcatctgtagggtggggatactaaagttcctacctcctggggtgagtgtgagaacaaatcaacacacagaaatraatttgttgtgaaaataaatcaatccacataaaagcgctgagaaagtgataaatgttccggacaagtcagcaatttgctatggaagcagaagacacagccatcggctcccaggcggccagtgactctcaggcctccccataatgtatccctctcttctctcctcccctttgcagccccctaacccttctattgtcattctcaccttcttccctggtctactattttcttttactttccgatcattcacttctcttcaacaacccaaaaaagagcatacactctaatcgcgtagcttgctttttaaaataatttctgttgaacataacctgagag

SEQ ID NO: 618687 - DNA, 592 bp, Homo sapiens
gtactacctgggaaaagcattgtttgttcatagcaaatatgtaaccacaaaacacattaaaatgcagraaaatcatctgaccaaacaaaataacgataaatcagcttgaaacttgttgccatcacaggatattaaatacgctcatctaggaaagaagatgcattagtcaccgaccgaactgtgcacataattaaaggggtggccacactatgatatataggttggatcttctaattacttagctgtagcaattaggattttctttgtattacacttcttcaggccaaagatgccttctatcgctcgggccagatttaggagagcaaattctggcttccatcccattccccattgccatcccccagctgaagctgttctaaactggagatcttaaaggcaagtccaatgctgtgaggaggagatgagaggagagtcactgtgatgaccgcacttgatgtctcctggaaagaccactttgcttggggtctcttctccatttcaggaggcctgtagccttggagacgtggagttctgttttcatcgaatacagtagctcccagacattactagagaaagatcagaaggggcagga

SEQ ID NO: 618688 - DNA, 592 bp, Homo sapiens
gtactacctgggaaaagcattgtttgttcatagcaaatatgtaaccacaaaacacattaaaatgcaggaaaatcatctgaccaaacaaaataacgataaatcagcttgaaacttgttgccatcacaggatattaaatacgctcatctaggaaagaagatgcattagtcaccgaccgaactgtgcacataattaaaggggtggccacactatgatwtataggttggatcttctaattacttagctgtagcaattaggattttctttgtattacacttcttcaggccaaagatgccttctatcgctcgggccagatttaggagagcaaattctggcttccatcccattccccattgccatcccccagctgaagctgttctaaactggagatcttaaaggcaagtccaatgctgtgaggaggagatgagaggagagtcactgtgatgaccgcacttgatgtctcctggaaagaccactttgcttggggtctcttctccatttcaggaggcctgtagccttggagacgtggagttctgttttcatcgaatacagtagctcccagacattactagagaaagatcagaaggggcagga

SEQ ID NO: 618689 - DNA, 592 bp, Homo sapiens
gtactacctgggaaaagcattgtttgttcatagcaaatatgtaaccacaaaacacattaaaatgcaggaaaatcatctgaccaaacaaaataacgataaatcagcttgaaacttgttgccatcacaggatattaaatacgctcatctaggaaagaagatgcattagtcaccgaccgaactgtgcacataattaaaggggtggccacactatgatatataggttggatcttctaattacttagctgtarcaattaggattttctttgtattacacttcttcaggccaaagatgccttctatcgctcgggccagatttaggagagcaaattctggcttccatcccattccccattgccatcccccagctgaagctgttctaaactggagatcttaaaggcaagtccaatgctgtgaggaggagatgagaggagagtcactgtgatgaccgcacttgatgtctcctggaaagaccactttgcttggggtctcttctccatttcaggaggcctgtagccttggagacgtggagttctgttttcatcgaatacagtagctcccagacattactagagaaagatcagaaggggcagga

SEQ ID NO: 618690 - DNA, 561 bp, Homo sapiens
tgcaaacaacaggtagggtacctgccataagatgctttggcttaagaaggaagggaattttygggacaacttcagagtctactttgagttctttgatcgtccctctttctagccagatgaatttatctgtctgctctcccatctgttagtaccaagttgcccagtccctaacatgacatcctgcatattatagccttagtgttcatgtcccccacagttcacatactgaaatcctcaccctcaaggtgatggcattaggaggtgagacctttgggatgggattaggtcatgagggtggggctctcatgaatgggattagtgtccttatcaaagaggcctgagagacccctcactccttctaccacgtgagcacgcagcaaaaaggtgcaggctgtgagccagaccctcaccagacaccagatacaaagtctgctggcaccttgaccttgaacttcccacgtccagagctgtgagaagtaaatgactgtttataagccacccagtctatggtactttgctatagcagcccgaacatattgccctaccagggagcacgctggg

SEQ ID NO: 618691 - DNA, 481 bp, Homo sapiens
gtgcaggctgtgagccagaccctcaccagacaccagatacaaagtctgctggcaccttgaccttgaacttcccacgtccagagctgtgagaagtaaatgactgtttataagccacccagtctatggtaytttgctatagcagcccgaacatattgccctaccagggagcacgctgggataatccggggacttccacaaaggatcgtcacccctctcctgatgacccacgcctttccctgacttccaggctccatccagaatcctgcctgctttactgcccagcagatgcccgtagatttcttaattctgctgctgccaaactggcacctgttgtctacaaacctttctccgtcccactctgggcatcatgttcagagtcctttcctgccagtataggtggagttttctggaagctgctgctgtgatggagtttgggctgcaagatgtttataggggatccacacatgtggaatgaaggaag

SEQ ID NO: 618692 - DNA, 481 bp, Homo sapiens
gtgcaggctgtgagccagaccctcaccagacaccagatacaaagtctgctggcaccttgaccttgaacttcccacgtccagagctgtgagaagtaaatgactgtttataagccacccagtctatggtactttgctatagcagcccgaacatattgccctaccagggagcacgctgggataatccggggacttccacaaaggatcgtcacccctctcctgatgacccacgcctttccctgacttccaggctccatccagaatcctgcctgctttactgcccagcagatgcccgtagatttcttaattctgctgctgccaaactggcacctgttgtctrcaaacctttctccgtcccactctgggcatcatgttcagagtcctttcctgccagtataggtggagttttctggaagctgctgctgtgatggagtttgggctgcaagatgtttataggggatccacacatgtggaatgaaggaag

SEQ ID NO: 618693 - DNA, 604 bp, Homo sapiens
gagaattcttccttcagtcttctggctctggttgcctccaggccttccttggcttgtgactgcatcactccaatctctgcctctgtctttactttgctttccttctgtgtctgtgtcttctctttttctgtctcctgcaagaacacttgtcatgagatttagggtccgcccatgtaatacaagatgatctcatcttaatatctttaccttaactatatctgcaaagatcctttttccaaataagctcacattcataggttcctggggtcaggatgtggacctatcttttggaggggcataattcaaccctccataggtgcctagtaatcttgttgctattcttgaggcctttgttctcattttcttyaccaggttcagagtcggttttagccctcacacttggtttaacatctatctaggatgctattttgcataaaaggagaacagcagataaaatgatgtggctttagagatgagattcagtaccctctttagttagatgcaaaaataagccagaaaaatctacttgcttgcccaaagtcacagtttagacacagagcggagactcaaattcaggagacctttccaccaccccatgttttgg

SEQ ID NO: 618694 - DNA, 386 bp, Homo sapiens
ttacaaggtggcagagagagaagagaaagcaaaggggaagagcaccctataaaactatcagattagctgggcatggtggctcaygcctgtaatcctagcactttaggaggccgagacaggtggattgcctgagttcaggagtttgagaccagtctgatcaacatggcaaaatactatctctactaaaaatacaaaaattagccaggcgtgatggcgggtgcctgtaattccagctactagggaggctgaggcaggagaattgcttgaacctgggaggcagaagttgcagtgagctgagatggtgcactgcactccagcctgggcaacagagtaagactctgtctcaaaaaaaaaaaaaccacacacactagcaaacaaacaaaacc

SEQ ID NO: 618695 - DNA, 577 bp, Homo sapiens
gcagcccaagacaggatcagtacaggtctctgaaacccaacaactcaaagttggctaaccacagctcccatcccccaggaagtcaggatgtaagacgtttcctaaagagccaaaaattaaggggatgccatcctccctgatccaagaaggctgtgttgagcaagggtatctgccatgcactgtagtttttctctgcattatacatcacatgttcctggtctcctcctgccacacacatgtcaggtcacaggtcacaccagataaaataaagagcagtatcaggaacaccacacaatctgcttgggtcttggattggagctttcaggaaacccacagcgacctgtctctaggtgagccctggcragtaatcagcatgttgcctcttaaaactcgttcaattagcagatgggcctttgcctaaagtgaccattagtaagaaggacaggcgttgttttatcaaattgtcttcctgggatctgttgtatttagtgccatgcaatcacccagattttctcttactacaaaaaaaaaaatctcgtaagcaaaataagggtgaagtacgcctcctccccgccca

SEQ ID NO: 618696 - DNA, 433 bp, Homo sapiens
agaattcagcatccaggcaaaatctaactcctgactttattctgcagctgacaacagtgtatcttgtttaaagagaaatactcgattcctttcattgwcttaattcataggtggtttaaatggctagagaaaaagcctaagtctcctgagcttgaataaaaaataaaatgaaccatttacttaatgccccatttgaagccatgggccctttggagagtttggccagaccatttgtaagattggagatggtatttgcatacattcccacacctgggagtgaatctgtgtaatagacacttggatatataccagtgagaaatacaagttgggagtgtctaccagggaggagatctcagcccatactaaattctaattcaggtcaggaaaacagagttccctagcaagattccttttatatccaaatttaagattc

SEQ ID NO: 618697 - DNA, 503 bp, Homo sapiens
aaatggaaactgaaccccctaccaggatattagaaattatgcagaaacaggttatagttttctgactttattaagatagatttctttgtgtgacctgagaggcaaataccattgacacaagttgctaaatgcttayggattaggataatgacacgaaatagcttgagctctgctatttttgcaatagacaaatttaggtataaagcatattacttatctttgcctgatgtttatatttctcataaacttttcagtcaatctaattttttaaatcaaaatataaccaaagccctagaggttgctcaggttaaaaatatattttaactatgactatcataggaacactagtgaccaaaaatgtattttaccaatgactcccagaaatctaagctttcagaattttcagaaccaccagaatagaaacagactttggtggaccccggatttttatttttgtttttgttttaacaaaccccacctctttctccagcatcttatcagta

SEQ ID NO: 618698 - DNA, 603 bp, Homo sapiens
cagtaaactccagcagggctatgtggccacatctccttttattttttttttcaatcagaggcattcagatgacaatgtagttatctttcagaaaaatgattatgccatttggacataatccagcaattccaagtggcctgtactgtaagttggcccacttagaaaaagtattatagatccattttatgtgggttaccctatgtcataaaattttacctgtaataaaaatgcaatcataacagactcagattatttccctggaaaacaaaatgtgtaggcataaagtaataaggcagggttttgcatatagtgccttaaatcrtattttttgtcacatctgatagtatctcttcccttgaaaagctagtggacatttcttgtgggaagcctaaaaggaatatattctttgttaaccgtgttatttccaagatggctcactcccatagtttttggcaggaggcctcaggtcctcactgcatggccctctccattgggctgcttgagtgtcttcctgtcatgactgccatcttcccccagcatgagtcagcaaagggagagcacagtggaagccacaatgtcattcataacctagcttcaaaaggc

SEQ ID NO: 618699 - DNA, 501 bp, Homo sapiens
atgcagggacaactcctaacctctatatttgtcctagattcagaagctccaggcctgtgttaacatctccttctggactaagaggaccagtggaatgcatttcacctgatttgtgggggaagggcccagctcatgacctttgtyatcttcagatgatgctagcattggctgcaaggagaaggatagagaacaaagatcatagctgtgctttacgccttgggtcccatctcttccatttagccaggaacagtccgggtctatgtcccttgacccagtgtaattattaacattgttcccttttactctcaaaagtgtcttattttgaatgacaaattatatgattgtctcatagcctttttacaactctggaccatttatcattgctttataatgtgtaaatgttataaaagctatctacagactggatctaaactgatgcagggtgtcagctgcacgggtgaaactgaccattagaaacaattagatgatatgctaaggaat

SEQ ID NO: 618700 - DNA, 501 bp, Homo sapiens
atgcagggacaactcctaacctctatatttgtcctagattcagaagctccaggcctgtgttaacatctccttctggactaagaggaccagtggaatgcatttcacctgatttgtgggggaagggcccagctcatgacctttgttatcttcagatgatgctagcattggctgcaaggagaaggatagagaacaaagatcatagctgtgcyttacgccttgggtcccatctcttccatttagccaggaacagtccgggtctatgtcccttgacccagtgtaattattaacattgttcccttttactctcaaaagtgtcttattttgaatgacaaattatatgattgtctcatagcctttttacaactctggaccatttatcattgctttataatgtgtaaatgttataaaagctatctacagactggatctaaactgatgcagggtgtcagctgcacgggtgaaactgaccattagaaacaattagatgatatgctaaggaat

SEQ ID NO: 618701 - DNA, 501 bp, Homo sapiens
atgcagggacaactcctaacctctatatttgtcctagattcagaagctccaggcctgtgttaacatctccttctggactaagaggaccagtggaatgcatttcacctgatttgtgggggaagggcccagctcatgacctttgttatcttcagatgatgctagcattggctgcaaggagaaggatagagaacaaagatcatagctgtgctttacgccttgggtcccatctcttccatttagccaggaacagtccgggtctatgtcccttgacccagtgtaattattaacattgttcccttttactctcaaaagtgtcttattttgaatgayaaattatatgattgtctcatagcctttttacaactctggaccatttatcattgctttataatgtgtaaatgttataaaagctatctacagactggatctaaactgatgcagggtgtcagctgcacgggtgaaactgaccattagaaacaattagatgatatgctaaggaat

SEQ ID NO: 618702 - DNA, 625 bp, Homo sapiens
gctagcattggctgcaaggagaaggatagagaacaaagatcatagctgtgctttacgccttgggtcccatctcttccatttagccaggaacagtccgggtctatgtcccttgacccagtgtaattattaacattgttcccttttactctcaaaagtgtcttattttgaatgacaaattatatgattgtctcatagcctttttacaactctggaccatttatcattgctttataatgtgtaaatgttataaaagctatctacagactggatctaractgatgcagggtgtcagctgcacgggtgaaactgaccattagaaacaattagatgatatgctaaggaatgttattctccaaacatttccgtggtatttaacattctttggcatttccgtgaccttttatgaggtgcaacacaagtggaaagattcatttatgtcatgatcatcaccttgtatctgagagaaaatgagagacccaaagcaggtgtcctgggctgagttgaatattgcatttcagaacccattgaccggatgctaatttctgtcatttgcatgggggcccccatactatcattcctatcacagtatccatgtcagctcaattttcacagcagctgtagctga

SEQ ID NO: 618703 - DNA, 625 bp, Homo sapiens
gctagcattggctgcaaggagaaggatagagaacaaagatcatagctgtgctttacgccttgggtcccatctcttccatttagccaggaacagtccgggtctatgtcccttgacccagtgtaattattaacattgttcccttttactctcaaaagtgtcttattttgaatgacaaattatatgattgtctcatagcctttttacaactctggaccatttatcattgctttataatgtgtaaatgttataaaagctatctacagactggatctaaactgatgcagggtgtcagctgcacgggtgaaactgaccattagaaacaattagatgatatgctaaggaatgttattctccaaacatttccgtggtatttaacattctttggcatttcmgtgaccttttatgaggtgcaacacaagtggaaagattcatttatgtcatgatcatcaccttgtatctgagagaaaatgagagacccaaagcaggtgtcctgggctgagttgaatattgcatttcagaacccattgaccggatgctaatttctgtcatttgcatgggggcccccatactatcattcctatcacagtatccatgtcagctcaattttcacagcagctgtagctga

SEQ ID NO: 618704 - DNA, 590 bp, Homo sapiens
aatttttttcttacagctttggatcaaaattacctttccattgttttggttttcaaataatcattcttaagagctrtataacattcaatgatgttaatttaccataatttgtttaactgttcccatactgctaatcatttgaattattttcatagacataaattatgactatgtcatttacattttttaatccatttatattcctagctttctttgcttttggaatgaagcattcagtaaggttaccgtctactctgtgaagtaacatttccttcaatttgtctaaaatgtaactggatcctgtttcaaagggctccttccttctagctttcctcttctctggaggcctctgataaagactatgagcaaaggaaggagaataaagaaaatttctttgcctcttccaagagttgggagtagaatttcttatgccttctatgtgtgcagggcaggaccttaccacagaccaacattgctgggcctgaccccatttgcctctgtgtgcaagggagccagtcactgcctgacccagccatgctgcatcatgtggccccatccctggctgaggctgatcaacccagagaggtggc

SEQ ID NO: 618705 - DNA, 590 bp, Homo sapiens
aatttttttcttacagctttggatcaaaattacctttccattgttttggttttcaaataatcattcttaagagctatataacattcaatgatgttaatttaccataatttgtttaactgttcccatactgctaatcatttgaattattttcatagacataaattatgactatgtcatttacattttttaatccatttatattcctagctttctttgcttttggaatgaagcattcagtaaggttaccrtctactctgtgaagtaacatttccttcaatttgtctaaaatgtaactggatcctgtttcaaagggctccttccttctagctttcctcttctctggaggcctctgataaagactatgagcaaaggaaggagaataaagaaaatttctttgcctcttccaagagttgggagtagaatttcttatgccttctatgtgtgcagggcaggaccttaccacagaccaacattgctgggcctgaccccatttgcctctgtgtgcaagggagccagtcactgcctgacccagccatgctgcatcatgtggccccatccctggctgaggctgatcaacccagagaggtggc

SEQ ID NO: 618706 - DNA, 523 bp, Homo sapiens
gtatctgcaaatgtgtcctaactgaaaagcaaatcaaacctccaccacccattctcatacatctttgtgttaaatatgttatagttttctcaagtcagatttttgcaaaattcttgctgcttttcatatgtggatcttgtcgatcatttgtcccttttagagagcagtcagcctcacatgaggagtacttgtcattcarcaaggaattaggagatgcctggtgtttgaagggtcacttggcctgtggctccttgaggccaacgcctagcccagtgctcctccaaaccctgtccttcaagtggctgcgacagttgcccatttccaagaggcctttccccttatgaaaggatccagcatcctcactcagattaaatacgatttctattggttgtgtttcctaaataaattgctggtaaattacatcatcaaatgcaattggctttaatgtcatcttaaaactttaaagattttgtaatgtcattggcttttcatcttttctgagcctttctagttacataatgat

SEQ ID NO: 618707 - DNA, 610 bp, Homo sapiens
ctagagatgaacactttctttattctgtgctatcccagttcatgagtatattttctcccttgggcagaaaattaaagtgctcacaagacttatttttaaaggcatttttttctcttcagtgtatgggaattaaataaatgcctttgattctggctttgccatggatgcttttcttgagccgaatataagcctaattctgtgttttaagttctacctgattctttttgcagtatactaatgcatttcctgaagagtaaaattgagcagtggaggatgggaccattcattcattcaatacgtgtttattgaggacgtacaggacacagcctttgcaccaaggacactcacagacaggtaaacaagtcattaaaatgctttgcgatgagagctgcagccgaggaaagcaccgtaagtgagtagtgaagatggagcagctgattcagccttgatggggcagtacgaaatttgtgggagaggcyggacgcggtggctcacgcctgtaatcccagcagtttgggaggccaaggcgggtggatcacgtgaggtcaggagttcgagacaagcctggccaacatgcgaaaccctatctctactaaaaatacaaaaatga

SEQ ID NO: 618708 - DNA, 542 bp, Homo sapiens
taaaaataaataaataaaatggaatgaaataaaatacatatctgcagattcttcgccaatgctgaaagataagaggtttagattttttacaactaatccaaatctaactgtaaaataaaattgagatgatttttgtttttgtgattgtcattaaacttayccattccaactcctaatcatttaaatcctgcctctacctctttgccataattgccactgccctagttcagaactgtttcttgcctagattcctgcatcagtaggttaactggtctatctgtcagtagcctcactcatctacagtctgtcctccccaatttcatcatttggaaaatccctttaaaatccttccagaggggtccttctctatcaaataagtgttaagagttggtcacactctacaatttgcctacctattttccatttccctccatccctactaatagacctcttaatttgtgtagggtggcaatgtgtccagttgaaaataatttatttccccagaccactgtgaccagttctggccaatgagatgtaagtag

SEQ ID NO: 618709 - DNA, 542 bp, Homo sapiens
taaaaataaataaataaaatggaatgaaataaaatacatatctgcagattcttcgccaatgctgaaagataagaggtttagattttttacaactaatccaaatctaactgtaaaataaaattgagatgatttttgtttttgtgattgtcattaaacttatccattccaactcctaatcatttaaatcctgcctctacctctttgccataattgccactgccctagttcagaactgtttcttgcctagattcctgcatcagtaggttaactggtctatctgtcagtagcctcactcatctacagtctgtcctccccaatttcatcatttggaaaatccctttaaaatccttccagaggggtccttctctatcaaataagtgttaagagttggtcacactctacaatttgcctacctattttccatttycctccatccctactaatagacctcttaatttgtgtagggtggcaatgtgtccagttgaaaataatttatttccccagaccactgtgaccagttctggccaatgagatgtaagtag

SEQ ID NO: 618710 - DNA, 542 bp, Homo sapiens
taaaaataaataaataaaatggaatgaaataaaatacatatctgcagattcttcgccaatgctgaaagataagaggtttagattttttacaactaatccaaatctaactgtaaaataaaattgagatgatttttgtttttgtgattgtcattaaacttatccattccaactcctaatcatttaaatcctgcctctacctctttgccataattgccactgccctagttcagaactgtttcttgcctagattcctgcatcagtaggttaactggtctatctgtcagtagcctcactcatctacagtctgtcctccccaatttcatcatttggaaaatccctttaaaatccttccagaggggtccttctctatcaaataagtgttaagagttggtcacactctacaatttgcctacctattttccatttccctccatccytactaatagacctcttaatttgtgtagggtggcaatgtgtccagttgaaaataatttatttccccagaccactgtgaccagttctggccaatgagatgtaagtag

SEQ ID NO: 618711 - DNA, 527 bp, Homo sapiens
aaaaagttaggcaacaacagtctctggaaagttaaagaggaatctcagatagcagaaagccagaaagggaatctccaaattgtttgtataaactctgcccaaatcttggttaacacttgagccatagctatgtgaggcagactctgagaagctcaactaccaatacaagaagtgaactgagatttgagttgctatcaaacacacagagtttttactttgagtctagtcatattaattgctttgtaaacaaacccaaacaatccacactctttgaaagaccaatgataaaacccagagattccataacataatattcacaatgcccaggataaaatccawtattatttgactgcaaagattcaggtatatgtgacccattctctagggaaagaaaatcaacagagaccattactggctgttgaaattatcaggcaaactgtataaaggagcagctataaaaatgttcaatgctgtaaaagaaaatatgctcagaatggacaaagggagagaaaatttcagcagaagaa

SEQ ID NO: 618712 - DNA, 534 bp, Homo sapiens
tcttcagcattaggtagaggcatattgttatacataaagaaaggccggagaaaaacaccaagaactttctggggtaacttctctacaggaggttgctgtgtccccctagmcagctctatcaacaggtgaggactgggaatctagtggtgaattgatgtgactgggttggggcagaaatgccatggggcctgatgcagcacagctgtacgtcatggaaaatgatccctgagacagtcagcaactggatgtagaatgaatctgtttaagtaatgagtgttcgctttaggagagcaggatgcaggacaatagccaggagagagcaaaacctgtttgaaagagttgagggatttgtgatgtcctgcctgacacaccagcacccctgatgatgctgtcaatggctttctctcaattagtccccctggacaggtggaagccgaggtaagttgggtaattgatgtcttcatgcttccacaaagggcctactttgggaagatggaatatgttaatgcaggtccctgcatgaagcagggaatt

SEQ ID NO: 618713 - DNA, 587 bp, Homo sapiens
aataagaataaaggaaagaaaagagacataaagcttaagtactgtgttttgaaattaaagtgcacctaaaggaagggttaaaataggcaatttagagtaaataattgaagcaatactgttattgtgaggactggcatgtgtgtatatatatatatatatatatatatatttacacacatgaatgatggctatgaggaggaagagagagaaaagagacaytcaggtaaattcttcattatagtgtataatattttcccataaatcatagaattgaagtatttaagcagaacgaataaaggttatgcaggtaattatacagaaccagcaaatggagataacattaaaattgtagtagattgtttgctttcagcaatgttattgctaacaaaataatataaacatgtgtttcttaatcagtttatttagtaatttattttagctagtgaagtggctacatacttcttatcagagattgtgtcagaaaattactttgaaatacaaaatactattacacaagttgagagagatctttagttatttaatatagggtaaagtgacactgtgtaaaagaaatctttcctttaaaa

SEQ ID NO: 618714 - DNA, 583 bp, Homo sapiens
cctgaaacaggcactgtaaaaacactgggtggcagtccctctctcttccagccaccgataccagaatggactgttatcaggagcactccagctatgaagcacacattctttccctgcatttgctggctgcgctggaactgtgaattccacaggagatcaggcagttcagtgtagacagggcagtgcagaacagcagaaataacaagttttcctaaaagcacgtgtcaccaaacaaaaccatgagatttcstaggtcagctaaagcacgaaaactggaagtgaaaaatgccctgttcagtgatccagtcaatgggattaaatcataaaactcccaacagttgttttcagcagtctcacccgtgattttatgagtacaaaggcctatgtcgggatcccatattttttcccttcttccacgtctagttctgcgcactgttatcatttacgtaagtttcctgtaatcaaagcatctgtaagctttagcatgtagagtgtcttgccatattctgtttcttttctttttctctccaagcatcccagccctcccggcatccccccattcaaggcatgagtctgtgttatg

SEQ ID NO: 618715 - DNA, 598 bp, Homo sapiens
atacaggcataccttggagttattgcagatttggttccagactactgtaataaagtgaatttcacaataaaccaagtcacataaattttttggttttccaatgcatataaaagttatgtttacactaaaggcaattaagtgtcccatatgtttatgtcttttaaaagtaaatatctaaattaaaaaaatactttattgataaaaatgctaatgattattttagcctttagtgagtcgtaacatttcctggtggggtccttccttccaagttaatggctgttaacttatgttggtggctgctgaagtttggmgtgtctttggcaatttcttaaaaataagacaacagtgatgtttgatgcgtcaatttacttttcctttctgaaatatttctgtgtagcaagggatgctgtttgatagtattttacccacagtagaactttcaaaatgggagtcagtcctctcaaacctatgcctgctttatgaagaaagcttatggaatattctaaatcttttgttgtcattgcaacaatgtttacagtatctgcaacaagagtagattccatttcaagaaactactttctttgttcatcaacaagaa

SEQ ID NO: 618716 - DNA, 561 bp, Homo sapiens
ttatttaatgacaacattctgatcaggttttcttttcttttttatactcctttaatttttgcagttttctttagattgtgccacctcctggtctagctgtttctttgtgaatttygtaataggctctctgtttgaattctatggtgttattccaaacattgctgccttctttttgaagtatgtggctcacatttcacacagatcctttatgatgatttccttgcatagtgggaagtttttgacgtgaaggtttactggagtcccttggctttcaagttggctcagagcagatggtactgctagagagagcaacaacacagctttgggcttgaaaatgttagtgtacacacgatgctttttcccctcaggactggtatgattgatgggactttggaactaaaaactgagaaaagtagatccttcacaattggctatttgctagcaaaaaaaaaaaaaaaaaaaaaaaattctcgaagaggaataggacatagttcattgtttcagtgtcaactatcagtccgctgccatctagagtggcttgcctctaaaaatagctttaaa

SEQ ID NO: 618717 - DNA, 561 bp, Homo sapiens
ttatttaatgacaacattctgatcaggttttcttttcttttttatactcctttaatttttgcagttttctttagattgtgccacctcctggtctagctgtttctttgtgaatttcgtaataggctctctgtttgaattctatggtgttattccaaacattgctgccttctttttgaagtatgtggctcacatttcacacagatcctttaygatgatttccttgcatagtgggaagtttttgacgtgaaggtttactggagtcccttggctttcaagttggctcagagcagatggtactgctagagagagcaacaacacagctttgggcttgaaaatgttagtgtacacacgatgctttttcccctcaggactggtatgattgatgggactttggaactaaaaactgagaaaagtagatccttcacaattggctatttgctagcaaaaaaaaaaaaaaaaaaaaaaaattctcgaagaggaataggacatagttcattgtttcagtgtcaactatcagtccgctgccatctagagtggcttgcctctaaaaatagctttaaa

SEQ ID NO: 618718 - DNA, 634 bp, Homo sapiens
tttactgcccactcacctgtcacccacccacctttgttaaactccatggcatgcaggatgcactgcttagaaaactcctactcatgttcaaagacccctttgtgaggcctttactttacacctccttcaggaagcagagttagctgccagctcctccttggtcaccagtcatctctcctggaaaccttgatcctcctccaggaccactgcaggcctagctggcattactcacaaccctttctgccctcaggagatttataacctacaagtacatacagcaaagaaaacatagtgacaggcccaggaaagcaggttagaggcaggtgagcaagagaatttacattgtgytgtgaccatagatgttattattactccatctttgttgatgaggctcagggagaggaggtgaactgcctgaggctacaccaccaataaggacaaagtcacgatttgaactcaattcctctgcctcctttactaagagatactaactcagaaatgctctgaacagtcagccaagcaatgtcttcagacagtttatattttacttcaactctcacctcaaggagccaaaataagatcatctccctagagagcattgcagagaaaattctcaaagagcttgagggaaatg

SEQ ID NO: 618719 - DNA, 197 bp, Homo sapiens
gaattcctataactcaacaacaaaaaactygattgaacaatgaacaaataacttaaatagacatttatccaaaaaaggcatacatgtgaaacgatgcttaacatcactaatcattagagaactgcaaatcaaaagcacagtgagatatcacctgacacccatgaggatggccactatcaaagcaacaaaaagtgaca

SEQ ID NO: 618720 - DNA, 197 bp, Homo sapiens
gaattcctataactcaacaacaaaaaactcgattgaacaatgaacaaataacttaaayagacatttatccaaaaaaggcatacatgtgaaacgatgcttaacatcactaatcattagagaactgcaaatcaaaagcacagtgagatatcacctgacacccatgaggatggccactatcaaagcaacaaaaagtgaca

SEQ ID NO: 618721 - DNA, 197 bp, Homo sapiens
gaattcctataactcaacaacaaaaaactcgattgaacaatgaacaaataacttaaatagacatttatccaaaaaaggcatacatgtgaaacgatgcttaacatcactaatcattagagaaytgcaaatcaaaagcacagtgagatatcacctgacacccatgaggatggccactatcaaagcaacaaaaagtgaca

SEQ ID NO: 618722 - DNA, 610 bp, Homo sapiens
gcactgttgcagatgaggcaggggcacttccacttgggacccattatacatgtgatgaaagaggctgctccaactgggcgtggtggctcacccctgcaatgcaagyactttggtagggagaggcaggcagatcacctgaggtcaggagtttgagatcaggctgaccaacatggagaaatcccaactctactaaaaatacaaaattagctgggcatggtggtgcatgcctgtaatcccagctactccaatggctgaggcaggagaactgcttgaacccaggaggcggaggttgcagtgagccaagatcacgccattgcactccagcatggacgacaagagtgaaactcggttgtaagcaaacaaacaaacaagaaaactaaaaatagaatcaccattcaacccagaattcccactactagatagatgcctaaaggaaaataaatcattccaccaaaaagacacctgcatttgtatgcttatcacagcactattcacaagagtaaagacatgaaaccaacctaggtgcccatcagtggtgtactggataaagaaaatgtggtacatacacaccatggaatactacacagccataaaaagaatgaaaacacag

SEQ ID NO: 618723 - DNA, 610 bp, Homo sapiens
gcactgttgcagatgaggcaggggcacttccacttgggacccattatacatgtgatgaaagaggctgctccaactgggcgtggtggctcacccctgcaatgcaagcactttggtagggagaggcaggcagatcacctgaggtcaggagtttgagatcaggctgaccaacatggagaaatcccaactctactaaaaatacaaaattagctgggcatggtggtgcatgcctgtaatcccagctactccaatggctgaggcaggagaactgcttgaacccaggaggcggaggttgcagtgagccaagatcacgccattgcactccagcatggacgacaagagtgaaactcggttgtaagcaaacaaacaaacaagaaaactaaaaatagaatcaccattcaacccagaawtcccactactagatagatgcctaaaggaaaataaatcattccaccaaaaagacacctgcatttgtatgcttatcacagcactattcacaagagtaaagacatgaaaccaacctaggtgcccatcagtggtgtactggataaagaaaatgtggtacatacacaccatggaatactacacagccataaaaagaatgaaaacacag

SEQ ID NO: 618724 - DNA, 641 bp, Homo sapiens
taccagtgaagtggcttcacttgtgcaagttagagttagatcctgatattatttaaaacttcgatatcttgttcatcgtgaatttttgcacaaatttttagttttttaaatgttgccataatatatttattggatttccagtttctgatctggcatgtaagatgcttggaggtcatcactcccatccacaaaacataaaaaaaaaamcagttaaactgaaaatcaataactcttcctagatttatgagagaagtgaggtcacaggcaaactgctgccctttaaattgaagacagacaggaagatgcagagaatcaaaacaaggagcagaaactgactagcagaaaccattggcagaataggaaaagctgcactgcaatcaagagttgctggaagcacagtatggccaggcttgagagttaaaaatgccaggatagtccagcctttgttggctttagtcccaagagtcctaccaggttctcaaagtaaagatcagagaaaattctccttgtgctttatgtaggatgagaggaaaagtagacattatgaaatatgctcagagcattctcttcttcttaagggatgccctcgaaagaacctatttcaccagagccttcccaacagggattttaccagaacctag

SEQ ID NO: 618725 - DNA, 641 bp, Homo sapiens
taccagtgaagtggcttcacttgtgcaagttagagttagatcctgatattatttaaaacttcgatatcttgttcatcgtgaatttttgcacaaatttttagttttttaaatgttgccataatatatttattggatttccagtttctgatctggcatgtaagatgcttggaggtcatcactcccatccacaaaacataaaaaaaaaaccagttaaactgaaaatcaataactcttcctagatttatgagagaagtgaggtcacaggcaaactgctgccctttaaattgaagacagacaggaagatgcagagaatcaaaacaaggagcagaaactgactagcagaaaccattggyagaataggaaaagctgcactgcaatcaagagttgctggaagcacagtatggccaggcttgagagttaaaaatgccaggatagtccagcctttgttggctttagtcccaagagtcctaccaggttctcaaagtaaagatcagagaaaattctccttgtgctttatgtaggatgagaggaaaagtagacattatgaaatatgctcagagcattctcttcttcttaagggatgccctcgaaagaacctatttcaccagagccttcccaacagggattttaccagaacctag

SEQ ID NO: 618726 - DNA, 449 bp, Homo sapiens
tggctaacatctgtaatcccagcactttgggaggcagaagtgggtggatcacctgaggtcaggagtttgagatcagcctggccaacatggtaaaaccccatytctactaaaaatcaaaaattagccgggcatgatggcaggcacttgtaatcccaaacccaggaggcagaggttgcagtgactggagatcatgccattgcactccagcttgggtgacaagagcgaaactcagtctcaaaaaaaaaaaaatacaaatattagctaggcatggtggcacatgcctataatcccagctactcgggaggctaaggcacaagaatcacgtgaacctgggaggtggaggttgcagtgagccaagatgttgccactgcactccagcctgggcgacagagggagactctttcaaaaacaaacaaacaaacaaacaaacaaaacccattagcataggg

SEQ ID NO: 618727 - DNA, 572 bp, Homo sapiens
tcagcaacaggggtgggtggagttgtgcaccctgccatcagggtttctcctggggcaacgggaggctgcagctgctggctcagttcagtcagaagcaagactgctgaagctggtgccaagccttgtctggcaaggcagggtggagtcatcttactgctcccaggctccacatctgcagcctctactggggctgtgacattggtgctggtttgttctggggtccaaagtttatagaggttcccatgaacttgagagttgcctttacaaaaactccaggtggctagctgtctgccacagtttagaatcaaggttagggagcatatgcaggggggaagtaccagagggattctcccattcccaggcttgcatggggccctctggagggtgtgaattccctggggtgctctcactcactctttccagtgctggrgagcttctcctggttctacattgatcccagatggcagctgcccagcttcagtcctctctgccctcttcgtccccttgctgccttggtggatcccaatgtggtttgttcaatgttcagcttgtagggtcagtattcactagca

SEQ ID NO: 618728 - DNA, 408 bp, Homo sapiens
gatggattgagcccagatggtggaggctgcagtgagtcatgatcatgccactgcactccagccccagcagcggagtgagaccctgtcaaaaaaaaaagaaagaaagaaaatagaagccaagaatggagacccaaatgactgttcagagtttcttcggtctgtggtaatttttttactgtttcacagcctttctcaaaaacaaaaacaaaaaacaggttttaagtgacctaataggtattctgtgtctctgcttctctttcagtgggttgtcttctggcctcagagtatcccttatcagaaccttgggcccctgggccccttcactcagtacttggtggaccaccatcacaccctcctktgcaatgggtaaggagagctgcacaagtggactgtggacactggagctct

SEQ ID NO: 618729 - DNA, 377 bp, Homo sapiens
actgtactgggctaacatatccctatttgtctatgtctatacatataaacttacccatccattaataacagtgcatagtattctgttacatagatgtgccttaacgtatttaaaaaatctttcttctgatggacttttaagtstctacttttttactattacaagcaatatggcagtgaacattaatttcttgcatttgtcccactttggtatttgttcccttagaaaaaaattccaagatctggaatttgaagattaaagaatgaatacttttggctgggtgtggtggctcacacctgtaattccagcactttgagaggctgaggctggtggatcacctgaagttaggagtgcgataccagcctggccaacatggt

SEQ ID NO: 618730 - DNA, 377 bp, Homo sapiens
actgtactgggctaacatatccctatttgtctatgtctatacatataaacttacccatccattaataacagtgcatagtattctgttacatagatgtgccttaacgtatttaaaaaatctttcttctgatggacttttaagtctctacttttttactattacaagcaatatggcagtgaacattaatttcttgcatttgtcccactttggtatttgttcccttagaaaaaaattccaagatctggaatttgaagattaaagaatgaatacttttggctgggygtggtggctcacacctgtaattccagcactttgagaggctgaggctggtggatcacctgaagttaggagtgcgataccagcctggccaacatggt

SEQ ID NO: 618731 - DNA, 594 bp, Homo sapiens
tgagtgatttgcccaggtcacagctggtaggtagccacgctaggatttatatctggtctatttgcaaaacatttgctctgaaaccataccagtgctttttactccatccgctcatcagaatcacatgagaaacagtcttataatactgtgccctagacagtagccagactagttctcagggaatagtttaccatccaaaatacatttgttagaaaacaagaaagatgaaaaataaaygaaccatccaagataagccagagaaaagcagcaaaataaacccaatgaaagtagtggaaggtataatttaaaaaatatatatatagaagacaataactcccatgaaactgtaagattaacatctcgtgtttaaattttgttttttctgttttaggcataaaggcatcacaagtggtcgggctcagctactctggttcctacagactttcttctttgggatagcgtctctcaccatcttgattgcttacaaacggaagcgccaaaaacaaacttgaagttgtctgaaagcttgctctacacttttacattcatcctcacccttttttttgtggggtagaggaggtgcagtaatttact

SEQ ID NO: 618732 - DNA, 509 bp, Homo sapiens
taaaagtgggcatcttgttttgttttagttccactcagtataatgttatatatagttttgtcatatatggccttgattgtgttgaagtatgttccttctatgyctaattcattgagagtttttgtcatgaagggatgttgaattttttcaaatgacttttctgtgtttattgagaggattatatggttgttgtccttcattttgttgatatgacattcattgatttgggtatattgaaccacccttgtatcactgggatgaatctcgcttgattatagtgatttacctttttaatgtgttgttggatttagtttgctagtgttttgttgaatatttctgagtctgtgttcatcagggatattggcatatagtttgttgttgctaatgtttctgtgtccttatctggttttggtttgagggtaattgcagaataagttaggaagaattgcctattcttcaattttttggaatatcttgagaataattggtatggttcttctttaaatgtt

SEQ ID NO: 618733 - DNA, 525 bp, Homo sapiens
tcttctgcctttcacctcctgctgttcagcctgattcctaacaggccacagaccagtaggggtctatggcccgagggttggggacccctggtctacaagactttacattatctgtccaacattccccatgtccttcctaacttcatcccctgatatctgcccccmacaacttcaatccaaccacatttgccttcttgcttttctttcaatcataggtacaccccagcctcagggcctctgcactcattccttttgcttagaaatcttgtccttcgaatctgtgctgggcttactccttcctgtcctttaggtcttcagggtaccttctcaagcctacctcagtcacctcatataaaattttagctccttaccccatattaatttttgctatgaaatgatacattaattaacaacatcctattaatgaagcagactacaatatttattgcattttaatttactacctaatttacttactgattactcttattgttacactctgctaaaatgtaagcctcacaaata

SEQ ID NO: 618734 - DNA, 525 bp, Homo sapiens
tcttctgcctttcacctcctgctgttcagcctgattcctaacaggccacagaccagtaggggtctatggcccgagggttggggacccctggtctacaagactttacattatctgtccaacattccccatgtccttcctaacttcatcccctgatatctgcccccaacaacttcaatccaaccacatttgccttcttgcttttctttcaatcataggtacaccccagcctcagggcctctgcactcrttccttttgcttagaaatcttgtccttcgaatctgtgctgggcttactccttcctgtcctttaggtcttcagggtaccttctcaagcctacctcagtcacctcatataaaattttagctccttaccccatattaatttttgctatgaaatgatacattaattaacaacatcctattaatgaagcagactacaatatttattgcattttaatttactacctaatttacttactgattactcttattgttacactctgctaaaatgtaagcctcacaaata

SEQ ID NO: 618735 - DNA, 432 bp, Homo sapiens
tcttagctatatgctaggagctatttacctaagtacctagcacatagctaggacatctgtctatatctatttatgtatctatcatctgtctatctattgttattcatatttatatttatatctacaaatrtaagtagacaatgatagacagatataagtaaataacgtgcctagatataagtaaaaagagtgcctacctctttactagccaagcatgcaataagagagtgttaatattaatgataatgaacactttacattggtacatctaagacttaagtatctggagtttcctctactatatttgacttgtctctttttgccactgtctttaccattcagatcttagtcataaatcattgcagtcatttctccttatggataagttatctttaatgtattctctaataggtgaagcatttattttttatt

SEQ ID NO: 618736 - DNA, 563 bp, Homo sapiens
tatttaccacattcagccactgggcttttgatttttcatctttttcaaactgatgacttgaacatataagcaattttttctttttaatattcatatttttattgcattttaagttagaagtgtattctgttaatatgttcgtttgtaagaaaaaatcctttaaatgtcrtgaaggtataaaattgaaagatagtttgtggaataacagttattaggaggtaaatttcttcatttcaacacaatttccctgtttctaacatttttcagtgaaatataataatatgcccaaaccatcttttaaaatatgtacttaagacttgacatttatgatcagttaacctcaaattgctataaaatagcgacaatattatctctttttacaattggccaactagattaccaccagagggtatttatttgtcacagcaacctgcattacaatgtaacgttatagcacactatgttacttatattgaattcttttaattttccctaaatgagattacctaataagttccatttttttacattaagaatcctttcaaaatgaccattttatgaat

SEQ ID NO: 618737 - DNA, 669 bp, Homo sapiens
cattttgtcctgaagattaattcaaaattagagtttgcctaatgaaaacttttccatttaattttgcagatctattttatgcagaaatttatatcaattaaaagtacatatcacatgatttagccagggatggcatgcatgctagcaacctattaaaagatgaagaattgttaagattcatttcacttttgctgtctttgttgrtagttttagtcttttactccaaaattttaatcatatactgattcaaattctatgttgatttgtaattttagaataatgcaggaactttttttaaattttgttaaaatgtacttattttgaatgtttcctaattagtgaattacctgctcattagtgaacaactaggaggtattttaatagcagttagtttaatgagaatggtgaaaaccaaatacattctccaaaaaatcttggcaaggagaataatgcataataagtaacagtcacaatgtctatgatctctttttgtttaacctttataaaacctgtgtagttttgctacctgatgagtgaaatatttggtggtagcctgagtactgtcatcctttatctagttgttattctacttaatacgtctaattattgtgcttagaattacttattttttcttaatataaatgtttgttggatttcaaatgaaggtga

SEQ ID NO: 618738 - DNA, 669 bp, Homo sapiens
cattttgtcctgaagattaattcaaaattagagtttgcctaatgaaaacttttccatttaattttgcagatctattttatgcagaaatttatatcaattaaaagtacatatcacatgatttagccagggatggcatgcatgctagcaacctattaaaagatgaagaattgttaagattcatttcacttttgctgtctttgttgatagttttagtcttttactccaaaattttaatcatatactgattcaaattctatgttgatttgtaattttagaataatgcaggaactttttttaaattttgttaaaatgtacttattttgaatgtttcctaattagtgaattacctgctcattagtgaacaactaggaggtattttaatagcagttagtttaatgagaatggtgaaaaccaaatacattctccaaaaaatcttggcaaggagaataatgcataataagtaacagtcacaatgtctatgatctctttttgtttaacctttataaaacctgtrtagttttgctacctgatgagtgaaatatttggtggtagcctgagtactgtcatcctttatctagttgttattctacttaatacgtctaattattgtgcttagaattacttattttttcttaatataaatgtttgttggatttcaaatgaaggtga

SEQ ID NO: 618739 - DNA, 578 bp, Homo sapiens
cacatggtggcagacaagataaaagattttgtgcagggaaactcccctttataaaaccatcagatcttgggagacttattcactatgacaagaatagcatgggaaagatccacccctgtgattcaattatcttctaccagatccctcccacaacacctggcaattacagcagctccaattcaagatgagatttgggtggggacatggccaaaccatatcaggacatgaaaagacacttctcaaaagattaaaaaatggtcaataaatataggaaaagatattccacatcatttatcatcagggaatagcaaattaaaaccatagtgagataccacctcacatctgttagaatggctgttatcaggaagacaaaagataacaagagttagagaggatgtggaaaaaaagggaacctttgtacattgttggkgggaatgtaaattaataaggccattatggaatgtagtatgcagtttactcagaaaactgaaaatggacctttcatatgatccaaaaatcccactactgtgtatatatatccaaggaaaatgaaatcaattttcaaagagatatatgca

SEQ ID NO: 618740 - DNA, 516 bp, Homo sapiens
tgcatatgctgtatcaatggcactgctcatgtaaatttcaacttatttgggaagaagaattcttagatataaattttgaattgtttctgaaattttatatgtgaattttttgagaaacaaactgcagcttaataatttgcttttccactgagttaatgattcagttaatattgcgtttcagttttaatttagcatcatctataccatttaaggagatcttggttgtaatctcccatataacaactaggttattttatacaagttaaytaagcttaatgagacccaatggtacaacagggataaaaccgcctatgtcataggactgctctgtgaattaaatgtaattgtgtgagtatgtatttgccttagagaagactgtctgataaaataaaggcattcgataaagttatttcactgccttattcactgtagttatttctgaatgaattctgaaggatttcaaaagtcagattcccatatgtatgtttatttatattcatatgtttgttaataaac

SEQ ID NO: 618741 - DNA, 592 bp, Homo sapiens
catggcagcttgatcatatctcaggcttatgccccgtcttctggaccagggacaaaataagttcccctgggacttggactgtcttctgctcccagtgatccttgcacctccccacaccccaaggctggttcgggcacatccagtgcccaggagcttttcaaatggaaatgctgattgtttgaattgaagggtttaagctggagccacagagagagggctctgggacacgatggagcctttatcaggtgggaagcagcattcagaggggctgagacccttctaacttggtggcakctgagaggacaatgtgaggtcacatctcaccaagggggcatttcatatgtctccccttctccaagggtaaagacatatgacatatgaacatatgacagccaccagtgggacaggctgaggacacctacttcctaagaggtcacacctgctggatgaagtcaggtctgtaaaactctggactctgcaaacaaggttttgggtccccatttacaagccagttgacataatcttggaggtccagttacccctgctgtcaaatggggataacaaacatgtctctccccaaaggggctgtgag

SEQ ID NO: 618742 - DNA, 584 bp, Homo sapiens
aattatattttttcttcaaagattgattttgagagtatttcctgttcacttgttctttgaaaatggcttaaaatgtaaagagtgcagcactctgttattttaattttaatcacttaagaaccaccataatttcattgatagatcaaggtatattattaataatctacacataaagaggttacctatctcacctggaactgaaaaatgaaaccataaaaaaattcttaaaaattctatgataatatatagattatatttctttcatacctagtcaatgttgtacattttttactaaagagattccctagggatattaatatattgcaaaatatgtgaaaattagaaaaggataggcatttgtattgtgtacagccaaaataaagaaggttgacatattttaacttaccttsaaaaaactctgtaaaaattacattgcttttgtgtgttttcctaataacccaacatctctattttagtaatttaagagaaaatctgtttataagtatgttaatcatatattttttaatatttattatgtatgttgataatcaaaaacatatattttacaaaaagtataaaagtga

SEQ ID NO: 618743 - DNA, 579 bp, Homo sapiens
acatcacacaccagggcctgtcgggggttggggggctgggggagggatagcattaggagaaatgcctaatgtaaatgatgaattatggatgcagcaaactaacatggcacatgtrtgcctacggatcaaacctgcacattgtgcacatgtaccctagaacttaaagtataaaaaagaaatccaaaattaaataacataatccatcacatcagctggctaatgaagaaaaattacatgatcatattaatagatgcagaaaaagcatttgacaaaatccaacatctattaaggataaaactctcagttagctaggaatagagagaaatttcctcaatttgagaaagaatatccatgaaaaaaaaatgccaggcatgcaaaggaaattattgcctacaataggaaaaatatcagtcaactgaaactgatccagaaatgatacatgagatagaattagtacccacaaagaattattttaactgtattacacacattcaagaagctaaaggaaagactgagcatattaagcatagacatacaaaaaaatgtaaaaagaacctaattgaagttcttgttatgaaa

SEQ ID NO: 618744 - DNA, 598 bp, Homo sapiens
ggagtcactatattcacagctcattttaggattttccacactgcctgtcagaaagttctatctgctgctggattcttakccttccagttgtgatgtggatgagttccattcttatcttaacaatactgttcctaagattccatttcctctcaagagcagacaggcttgtgcttaaaggggcctttttactgataggcaggacccgctccttggcctgccgtgcttggctactgagtgtctctggggtttgatgagatgctgatgactgggtgttgcggtgtcgagtcctgcagtgcatcagcccaagacagctggcacctctgacccctagctgccccaggatggtcaccccacctccatgctgtggccctgttgggctggttttctgatattattagtaatctacatcctgctctgcttctaggaccacaggaggcctggaaatgtctgcagagctcttaatagcacagcaggttgctgcaatgaggagctaaatgtctcggtctccattcattgtgcccaaactgccagatgatccaaaatggagctcatctcctagggtcctgagggttttgtctgcagggttagaaaacatact

SEQ ID NO: 618745 - DNA, 598 bp, Homo sapiens
ggagtcactatattcacagctcattttaggattttccacactgcctgtcagaaagttctatctgctgctggattcttagccttccagttgtgatgtggatgakttccattcttatcttaacaatactgttcctaagattccatttcctctcaagagcagacaggcttgtgcttaaaggggcctttttactgataggcaggacccgctccttggcctgccgtgcttggctactgagtgtctctggggtttgatgagatgctgatgactgggtgttgcggtgtcgagtcctgcagtgcatcagcccaagacagctggcacctctgacccctagctgccccaggatggtcaccccacctccatgctgtggccctgttgggctggttttctgatattattagtaatctacatcctgctctgcttctaggaccacaggaggcctggaaatgtctgcagagctcttaatagcacagcaggttgctgcaatgaggagctaaatgtctcggtctccattcattgtgcccaaactgccagatgatccaaaatggagctcatctcctagggtcctgagggttttgtctgcagggttagaaaacatact

SEQ ID NO: 618746 - DNA, 598 bp, Homo sapiens
ggagtcactatattcacagctcattttaggattttccacactgcctgtcagaaagttctatctgctgctggattcttagccttccagttgtgatgtggatgagttccattcttatcttaacaatactgttcctaagattccatttcctctcaagagcagacaggcttgtgcttaaaggggcctttttactgataggcaggacccgctccttggcctgccgtgcttggctactgagtgtctctggggtttgatgagatgctgatgactgggtgttgcggtgtcgagtcctgcagtgcatcagcccaagacagctggcacctctgacccctagcygccccaggatggtcaccccacctccatgctgtggccctgttgggctggttttctgatattattagtaatctacatcctgctctgcttctaggaccacaggaggcctggaaatgtctgcagagctcttaatagcacagcaggttgctgcaatgaggagctaaatgtctcggtctccattcattgtgcccaaactgccagatgatccaaaatggagctcatctcctagggtcctgagggttttgtctgcagggttagaaaacatact

SEQ ID NO: 618747 - DNA, 583 bp, Homo sapiens
tactccagaataaacgttccatggatacttgatgaataaaggaatcatctccaaggtggcatgcaaaggcctcttgtggtttagacttagactaagactcagagaaataattttagcatagatattttaacgtaaatatttttaacaaagaggcagctatactcacccagagctcagattctggagccgggatgcctggattcaaatatttcacatactggctatagaatcttggcagcctgtcaatgccttagtgtcctcatccataaaatgaagaaaataatagtacctacttcatagaactcagatcattaaatacrtctatacatgaaagtaaactgtaagtgtttgatgtactttgagaatcaataaatatttgctattaccattagcatggatatatttaagacgtaaaaaattcaaacatttaacatatttaatattcaattttagttatttctatatactcatgattgataaatataacaactgatatatactatattactatatgatacatatgatgtatatataattgttacatgtccattttagggtatacatgttaaaagaatgggaattc

SEQ ID NO: 618748 - DNA, 650 bp, Homo sapiens
ttccctaatatttactacaggactaatgatttcggttaagaatcaatgagtagattttccactctaagttatgaagacctcagaatttgaaaatgacattcaacgtgatttatgaatttcaccagagttctgtttcaatcttcacaattatcttaaatgattaaatagtattttcccatcttaaaaaagctgtgcctaacatttaatcaaattgtagtatgactaattcattgttaaatcatcattaatgacacttgaacaacctataacaaaataaagtatggagccaatcttcagagtgttcttggcctcagtctcaagccatgtcagcctctaggagaattcctgaaacagcaagaactttcccagagcrtggcatgatataaatctgatctttagaagagatggaacattccaaagttgaaatattttgagtagtaaatgctttgatataattataagtttcagtgatttcaaacatcaagacttaatagatgctttcttttcctgttaaatttttttctttattatcttctaaaattttccatccctgcctatctcctagaaatgcaggaagagtccatgagataatatttataatgtttttaagctccctggaagacaggtgttgaatatccagaggtattggc

SEQ ID NO: 618749 - DNA, 608 bp, Homo sapiens
gacaggcaataggttaatccttttttcttcttttagcagagagaggaacttgattttcctttccttgtaaataaaaacacacaaccccgtttcttttttttgcatatttagtaccattggataaggacacatctatgccccccaaattgtccacgtaagcccttacccgcttaaatattctgtgcttctcctataagtggattaatatttttaaatcccagaagttctagtaatgatcagcaaaatcagtaaatcctcactagtatgagtgtaataaatactaaaataggtcactctcayccaagatttaagaaatgttaccttttatcttaaaaagtaatgcccattgagcctaattttttaacacaaaaaactgataatcattgagtctacttttttctcaaatgtattttactgtttaagaaatatatcttaatttttttcatttgattttattttaaaacttctaagatctaaagaaaaacaataacaacaacttactaggatctctgtttgtatatgataagaatgagagatttttccttttaaaaggcaagtcttatcagctagcactagagcagtagtgagaggggtctgaattgtcttct

SEQ ID NO: 618750 - DNA, 563 bp, Homo sapiens
agatcttcttccaacaataacttccagatcctccctgaaatttttatatagtccagtgagtctgtcctacttcctgttgtcccagtgagaaaacaggagagcttagtagtctccctgtgactgtcactgaaacacagatgttctggtctttctagtggtatcttcatttttgtctactaaaataaaaaagtccttcaatgacagggtctccactaccatggctagctgacttatggtttctccagtctggtttccctgtgctactttcacctgccttagttgcatgctcataccattttctccctggcagacctgagggccaagagagttgagtctgcagggtttccagcctaggtgactgtattagtccattttcatactgctttaaagacgtactcaggactgggtaatttataaagaaaagaggtttaattgagtcacagttcagcggggctggggaggcctcaggcaacttacaacgatggtggaagaggaagagacacttctcatgtggcagcaggcaagagagaatraagagcaaggaggaaagagccccttataaa

SEQ ID NO: 618751 - DNA, 468 bp, Homo sapiens
catagcaaatatttcttgactcaatggatgttactaataattagaagaaaacatttattatatatctcctatgcatctgacaatttatactcacatagacaatgaagagatcattactgtcctccaaaattgatgctctccttcccacagggcaaggttgttgctagaaggcagctgcccaattagggattaratctcccagtctcacctgcaactaggctgagccacatggctgttccttgtcaatgggatgtgactagaagtaatgtgtatcagttctataccaatacatttaaggagtatgccttattcttactctctctttccacttctcttgaagggacataaaccacgagatcatagaggacagcagagctaccagatagaaggagcctgggtctctacctcaccaagtggagggaagccaggagcactgttcaggacacactggcctgttcaaggagcaag

SEQ ID NO: 618752 - DNA, 558 bp, Homo sapiens
cttcatgaagttctcatgctgtgtttttcagctccatcaggtcatttatgttcttctctaaactggttattctagttagcagttcctgtaaccttttatcatggttcttagcttccttacattgggttagaacatgctccttctgctcagaggagtttgttattacccaccttctgaagcctacttctgtcaattcatcaaactcattctccatacagttttgttcccttgctggcgaggagttgtgatcctttgcrggagaagaggcattctggtttttcaaattttcagcatttttgtgctggtttttcctcatcttcatgaatttatctacctttgatctttgatgttggtgacctttggatggtggtgacctttggatggtgtttttgcatgggcttcctttttgttgatgttgatgttattgctttctgtttgttagtttgccttctaacagtcaggcgcctcttctgcaggtttgctggagtttgctgtaggtccattccagagcctgtttgcctgggtatccccagcagaggctgcagaacaacaaagatt

SEQ ID NO: 618753 - DNA, 463 bp, Homo sapiens
aggattggaaacagaaggagcagcatgtggacagaaatgtaggcacaagaaggcatcactcactgaagagactgaargtggttcactgtgcctcaagactggtggagtgtgtttccggaaagataatgatgaaagagctggacagataaacaggggccaaatgtaataggagtctggattttattctgaatatggtaggggctattgtagcatcttatatagggaagtgaaatgagtacattcacatttaaggaatatcaacctgaaaaaagagtggagacattgttgggggagagtgaggtagactagaggcagggagaatatttaaataattgaggtaagaaatgatgaacaccagtataaggtgatgtctttaaggaatggagaagggaatgaactgagaaatattttggaagtagaatcaacagaactcactgactgactggatatggaggtgagaaag

SEQ ID NO: 618754 - DNA, 514 bp, Homo sapiens
acacattaaaaaatcattcatcatgacaagtagaattatcccagagatgtaaggaagcttcaacataagcaaattaaataatgtgaggcattatagtaacaaaattaaggaaaaaatatatgatcatttcaattggcactgaaaatatatttgataaaattcaatattccctgttagttaaaaaacccttataaaactgagtatagtggaaacatacctcaacataatataagcaatatatgaaagacccacagctagcatcatactgaatggggaaaaacagaaaattttccccctaatatctggaatacaacaatgatgtccactgtcaccactgttattcaatgtagtactggaagttctacccagagcaatcagtccaaagaaacaaataaaagacatatgaattgaaaacgaaaaattccaattgccctctttggagatgatatattatattttgaaaaaaacttaaaacttcaccaaaaaaactaytaaaactgatacatttagtaac

SEQ ID NO: 618755 - DNA, 481 bp, Homo sapiens
tggtcaaatacttgtaatgtgtgtcaaagccagatccccataacagaagcagactttgtaaaaaataaatctaggaatgcaccactttggggacttgyacagaaaaattaaccaaaggagacaatttcactgttaatgcatgtcctttctggtcatgatattggcatatctttgctgagtttcctgtagaacacccagtcatctccttgaagccacatcccttaagaaacacagggcggaaggtactgaccttatccctgctttcctctatgggaaggtcctgagaggcatgtaggaaggtgtgattgtctggataatgcaattggttctgttgagaggggtcgtcttgtacttttagcaagaagctgctcatcccattctcaaagggtactgctagagtatcaggcacaccttgggcatccctgaaacaaatctgtagcccaaaactcaaggcaggactggctaaagaattgtcagggta

SEQ ID NO: 618756 - DNA, 481 bp, Homo sapiens
tggtcaaatacttgtaatgtgtgtcaaagccagatccccataacagaagcagactttgtaaaaaataaatctaggaatgcaccactttggggacttgtacagaaaaattaaccaaaggagacaatttcactgttaatgcatgtcctttctggtcatgatattggcatatctttgctgagtttcctgtagaacacccagtcatctccttgaagccacatcccttaagaaacacagggcggaargtactgaccttatccctgctttcctctatgggaaggtcctgagaggcatgtaggaaggtgtgattgtctggataatgcaattggttctgttgagaggggtcgtcttgtacttttagcaagaagctgctcatcccattctcaaagggtactgctagagtatcaggcacaccttgggcatccctgaaacaaatctgtagcccaaaactcaaggcaggactggctaaagaattgtcagggta

SEQ ID NO: 618757 - DNA, 490 bp, Homo sapiens
tatgaaaaatgacaatcagtaatattcctccagctggcagaktgtatgaactccacttgtgatttcaaaatcatgctgcagagctgtagctgggttttctgatggtttctccacggattatcttcctcaaatacaatgttaaaaataataacttgtcactgtggccctcagtttggttgtgtttattataaagaagattgaacatatgaactgccaattgatgatggcccatgttcctggtctgtttaagtaacatcaagtcatctttgaatttaagaaatggtagcattctcttatttgattgctattagccctgaaatggaactgtccagaatagtatttgtgaaatggcagagttcccggacccccctcacaggacgtgagacaggggtgtggctagtctatctggccacctagtgagcactcaaaccccttacaggagggggagcatgcagatgggcaggtgcaggagccggggcaagtgcttttg

SEQ ID NO: 618758 - DNA, 574 bp, Homo sapiens
tcatctacaaactatgaagggttgaaaggtggaaaatatctctgggatcatagaaaattgctaaaattccaaatttacctagaatcaaattttaagagcctttaaattaaattactataatggtatcagaactacagatgtggaagtctgtctctttaaaaggtggaatgcaatctgcatgtctgaaattgatttgatggccttggcgcttttcttaactgtatcgttttgtagaattggaagttttgtaagaactggattcttgccaaatattgcatggcatgaaaatgaaaacgtgtttcccttcccatgttttccccatgcatttgtgttgtcatttcaggggccatctctaatgayaagttcttaaacctagaatccaatcatacagaatacacaagagaagacaggaattgggcatgaatacattcaggtcaccatagacaggaatccttctggattctaaatgttttatgggaaagttcccttcctctgatctattctttaaaaatatcatgcctatttagtaattctctgatttgtaaaaacaacatattcttattttggagaaata

SEQ ID NO: 618759 - DNA, 574 bp, Homo sapiens
tcatctacaaactatgaagggttgaaaggtggaaaatatctctgggatcatagaaaattgctaaaattccaaatttacctagaatcaaattttaagagcctttaaattaaattactataatggtatcagaactacagatgtggaagtctgtctctttaaaaggtggaatgcaatctgcatgtctgaaattgatttgatggccttggcgcttttcttaactgtatcgttttgtagaattggaagttttgtaagaactggattcttgccaaatattgcatggcatgaaaatgaaaacgtgtttcccttcccatgttttccccatgcatttgtgttgtcatttcaggggccatctctaatgacaagttcttaaacctagaatccartcatacagaatacacaagagaagacaggaattgggcatgaatacattcaggtcaccatagacaggaatccttctggattctaaatgttttatgggaaagttcccttcctctgatctattctttaaaaatatcatgcctatttagtaattctctgatttgtaaaaacaacatattcttattttggagaaata

SEQ ID NO: 618760 - DNA, 611 bp, Homo sapiens
tctcatgctggtacattctaatctgtgtgggcagatgttccttcaatcttggaagttgctgccctttggataaggtatttgcttttatcttctttgattcccttgggagtttgatagaggaatatggtgggttcagtcgattgactttgtctctggaagatctcagggggccaaagattagtttagtactccaggcctgcttgcagtaactctggggggctaatgccaggcccctagctttgttagtttagccccttcatgctgggaacctgctgcaatggagaggwtaaggattttactgagcatcatttgtaaaatagatttaggaatactatatttaaaatacataaaatataatcattaaggcatagctgattttcatatgttcattttgtccatttgttttcccctatgcaatgcataacttaccagtaaaatgtattttctttacaaagtgttaaaaagataaagaaataaaaaactatttattgctactgagatgctaaataatgtaacattctaaatatgttattaaaatgcattaatggaaataatatatatgaatatatttctcctgacattcaatataaggaatattaggtaaaattata

SEQ ID NO: 618761 - DNA, 619 bp, Homo sapiens
tgtatcctgttttgttgttgtggttgttgttgttattgttgttgttttagaatacatttaaaaaaagaatggttttatttacttgagtatttattttgtgtttgcatttatgctaagtatgtggcatcattttctcatttaatctttactacatcattttcattttcttggcaatgtatctgagattgacattcctatcagattgatgagcttattatttkgagttattcaatcagggatgtttggagttattcgcttttaagtttaagaatggcttaaggatatgacttcgtttagaagttatggaacttatatttctagatcttatgtaaactgaatcacagctctaaccgatttttatttgtgaactcttttctatgcatgagatgtcccagggaaggctcaatcagagagaacaagaagaacatttaaccccagttagatttcgtgtacaaagactatgatttcagaggaagtttaaagttagatgactgataagttgttttgattgttaaagtttaggtaaaagataatcagaatatctgaattgcagtaaaatcaaaatactgctggaagcaaacgtatactagtttaagatacaaagtgcaataaatatatc

SEQ ID NO: 618762 - DNA, 619 bp, Homo sapiens
tgtatcctgttttgttgttgtggttgttgttgttattgttgttgttttagaatacatttaaaaaaagaatggttttatttacttgagtatttattttgtgtttgcatttatgctaagtatgtggcatcattttctcatttaatctttactacatcattttcattttcttggcaatgtatctgagattgacattcctatcagattgatgagcttattattttgagttaytcaatcagggatgtttggagttattcgcttttaagtttaagaatggcttaaggatatgacttcgtttagaagttatggaacttatatttctagatcttatgtaaactgaatcacagctctaaccgatttttatttgtgaactcttttctatgcatgagatgtcccagggaaggctcaatcagagagaacaagaagaacatttaaccccagttagatttcgtgtacaaagactatgatttcagaggaagtttaaagttagatgactgataagttgttttgattgttaaagtttaggtaaaagataatcagaatatctgaattgcagtaaaatcaaaatactgctggaagcaaacgtatactagtttaagatacaaagtgcaataaatatatc

SEQ ID NO: 618763 - DNA, 594 bp, Homo sapiens
agagaaaaaaaaatgacttacccagcctacctaactaatgggatggttgagggtagaacataacttttataacttcaatttttaccactcccattattctactctttgcacattaattctaatttttaagataatgccttcattgggctgacaattttattttttaatttaattgaggacagctctgtaataaatttataattaataatttttaatgctagtgaagacttttttwaatttttttaattttattttattgtggttagaatgcttaacgtgagacctatcctcttaaccaatttttaagtgtataatctttgactatagacataatgttgtttggcagatctctagggcttttttacctggcttgactgaaactttctgccatacaacattgtattatatattgcagaattttcttaaagatgttaaggcagatattgttcaaggatgggcatggtaataggtatagggaccccagcaaagtggtcttaaaggagcagagagagattggactcaattctgacttccaccatgacaagtggagacttataccaaaaagcagggtggggttcagtgaatggaaaatta

SEQ ID NO: 618764 - DNA, 596 bp, Homo sapiens
cttaaagatgttaaggcagatattgttcaaggatgggcatggtaataggtatagggaccccagcaaagtggtcttaaaggagcagagagagattggactcaattctgacttccaccatgacaagtggagacttataccaaaaagcagggtggggttcagtgaatggaaaattactaagaggaaacatacagaaaaacgaggtttctagctacatcaacttgatggaattattgctgaatggagtccagtgtcataagatattgaagcttttttcctaagctgacttaacaggaatcttgctcaaactggattcaacaaggacagaaagagaagcccaaggttagacctagccaagcataagattcaaaagagtccaaataaagttttggtcaaaggagagagttttagtcagtatatattatatatgtagcacatttttttattcatgtacttgttgatggacatttaggttgtttccacatcttggatattgtaaatagagtcgcaatgagcataagagtactagtatatgattgtatctgagastgtaattttgattcttttggataaatgccaagaattttgattactgaatc

SEQ ID NO: 618765 - DNA, 588 bp, Homo sapiens
aacaaaactcatcatatttcattacagcatgtggaaattgtgaagtatctttttcttatatatgttaattactcagtaaaaaattagagtatcgctgaaatctgtataccaaagttgaaaaagacaaagaaaacttatagaatgtatgggaggtggtgaaaagataattaaaagattcaaaatcaaaatttatataacagaatttgtattttaagaaaaatgtaaagtgttacaaaaagtatgtctccttctctggyagtaattatcctattgctataatataataaataggttttgagtaactgttttgtggccgatttaagcagcaatccacgtaaacagacacctggatttccttcagtaagggagcaggaaatgacaattacattcttcagcaaaaacattttatctttgtttacagacattttgtgtgtgtgtgtgtgtgaatgtttctcacaaattgcaaaggccccccaccagtcttaacaaagaatttatttgaccattaactatatttcatgcgtaacatatattttatgacatgaattatattttgaatttagatttttacattttgttaattactac

SEQ ID NO: 618766 - DNA, 588 bp, Homo sapiens
aacaaaactcatcatatttcattacagcatgtggaaattgtgaagtatctttttcttatatatgttaattactcagtaaaaaattagagtatcgctgaaatctgtataccaaagttgaaaaagacaaagaaaacttatagaatgtatgggaggtggtgaaaagataattaaaagattcaaaatcaaaatttatataacagaatttgtattttaagaaaaatgtaaagtgttacaaaaagtatgtctccttctctggcagtaattatcctattgctataatataataaataggttttgagtaactgttttgtggccgatttaagcagcaatccaygtaaacagacacctggatttccttcagtaagggagcaggaaatgacaattacattcttcagcaaaaacattttatctttgtttacagacattttgtgtgtgtgtgtgtgtgaatgtttctcacaaattgcaaaggccccccaccagtcttaacaaagaatttatttgaccattaactatatttcatgcgtaacatatattttatgacatgaattatattttgaatttagatttttacattttgttaattactac

SEQ ID NO: 618767 - DNA, 469 bp, Homo sapiens
aattatattgtctactggttagggactgggcttttactctatccattagccaaatagtgagctttgtaaccaataggtaattttcaaccctcaaactttttctaccctcgctcatttttgagtctctgaggtgtgttatttccatctttgcatcyatatgtacctcttgtttagtttccacttatgaatgagaacatggaatattttattttctgagttcacttaggataatgacctctagttccatccaagttgctgtaaaggacataattttattctttttaatggctgcacagtttgtcatgatgtatacaccacattttccttattcagtcaactgctgttggacacttaggttgattccattactttcctattatgagtagtattgtgttgaacatacaaatgcagatgcctttttcctacagtgatttctttacctttgtgtagatactcagggatgagattg

SEQ ID NO: 618768 - DNA, 579 bp, Homo sapiens
tgaaaactgagtctcacagaggtgaagtagcatcagtcagagacactttcaacttgggggccttgattctgttcatcacaatctattggttcattgataaacataagacacagaattaatgtgagccatttggttcttctgtgaaagcaaaataaaatattactkcaatgtttatcaagggaaaagtcaaaatggagtttgtggtgaaaggatttaacctttttgataaaacatgtttcgccttttcaggtctagggaaagaaatccagtaaatttagaaaacgcaattttcaaattttaaataaataagatgcctgtaaaatgtaatacaaccttacaggcatatggccagatatattaaaatgttcttagagctttgtcaggaaatatttaagtgtttcgtcatgaagattttagacatattgattatttgcccagacactgattatacagatgaatggaaatatatccagaattctaaaatcttccatgatctgtggaatactgactacttaatcaattcggaatttatttaaactgttacttcttaaacgttttaaaaagccagaacaacactaa

SEQ ID NO: 618769 - DNA, 579 bp, Homo sapiens
tgaaaactgagtctcacagaggtgaagtagcatcagtcagagacactttcaacttgggggccttgattctgttcatcacaatctattggttcattgataaacataagacacagaattaatgtgagccatttggttcttctgtgaaagcaaaataaaatattacttcaatgtttatcaagggaaaagtcaaaatggagtttgtggtgaaaggatttaacctttttgataaaacatgtttcgccttttcaggtctagggaaagaaatccagtaaatttagaaaacgcaattttcaaattttaaataaataagatgcctgtaaaatgtaatacaaccttacaggcatatggccagatatattaaaatgttcttagagctttgtcaggaaatatttaagtgtttcgtcatgaagattttagacatattgattatttgcccagacamtgattatacagatgaatggaaatatatccagaattctaaaatcttccatgatctgtggaatactgactacttaatcaattcggaatttatttaaactgttacttcttaaacgttttaaaaagccagaacaacactaa

SEQ ID NO: 618770 - DNA, 647 bp, Homo sapiens
gctgtgggtgtttataaacaagaatgatcataattaatttaggcaggatcaggaaaagcttttaggaaatgggtttgaaagaacctaagggggctggataagattttgacagatgggtagagaagtggaagacgcattgtaggtggcagaaataaaatgagtaacattctttgtctttctgggcataagctctgatggcatacaactgtttgataggctaatagatgggtgccccttggcggtggcaggcagcgctgtttatgtatttatttcacaaggttgtctttcccttcttatactcagacctatgccagagattatgatttgttggtcttggggaaataaagacagatatcattgtttttggttttaaaatttcttaggtggttatagtgtgtggccgggattgacagatgctacagctgcatctctagataaacacagtaaattaatttaattttgtttaaatcagtaaatagttaacttagtgtctgctacatgctgggggagttttaggctatagaaggtggracatctaatatcttttaaaactcctgcgaacttataggtactgtgacagatactttcacctaaattatttcaggaattaatgatctagcaggagagacaatttaatacaaagttga

SEQ ID NO: 618771 - DNA, 536 bp, Homo sapiens
attttacctataatgtttttgaggcagtgagataattaggggtgaggggagagaaaggaacaataaaaggaaagaagaaagaagagaatagggagggaggaagaactgagtactaattaaataaaacaaaaaaattctgaagaatgaataatgcatatctggtggaacataatttataaagtaatgattaacagaacaataggacaaaggattgtttatcattaaaatgtactgtaaattaacctttacaaatacatttccactatgtacttttcgactgatttatagtatcctgtcttcaataatttgaaaagtgctaaaactcttyatttgaaatgtaagtaaactgatctaaattatgattttatccatattttctataatataggtaaatgttttaaagtctctgtagtctgatgaatgaaattttgatgtaatagcattgtactgatttagtctctccgtaaatttggactgaacatttaaccatactgtgacaaaattatttttttctgtaaatgacagaaggtggttag

SEQ ID NO: 618772 - DNA, 615 bp, Homo sapiens
gattatcaaaattcttgtctgagagtgtcacagccaagaggagcttaagaagccatgatgaccaaaagtaatttggtattcagatgaaatcctggaacaaaaaagaacattatgaacaaaatctgaatagaatatggatgtatttaatactaatgtataaatattgcctaattaattgtaacaaatttaccacactaatgtaagatgttaaaacaggaaaaacctgcattkatgggggtaatggcaactctgtactctcttcacaatttttctgtaaatctaaaatggctctaaaattaacagtttattttgaaaaagagagaacaggtaaacttataaagacaggaacaaaactaaaattaatacagactgttcattagacagtaggaaaaaatgcttgaagagctgaaagaagaaaaccataaacttaaaattttatattcatcaaaaatggactccagatccttcctattacatatagaaacacgacataaatgttaactatcagtcttcctatcagcattgtactgatgaactaactcatcaaacaaaaagaaatatgagctattaggttgggaaagtgtgatagattgaatttcagcccaaattctttct

SEQ ID NO: 618773 - DNA, 551 bp, Homo sapiens
gattcatagctttggccacgtgctgtttgtaaacaagacacaaatagagacttcgcacatacttagataattggacttgtttacctttgcacctctactttcaccatgagaacttgcccaagttattctgaagaatgaatgtgggacatatggagcttcactgcatagccagccaactgtagacataaaatgtaactcaggaagacacaaacaaacaaacaaacaaaacacaaaccaaacaaacaaaaatcccaccaaacctaaatctctgattttcaaattcacaatmtgaataattattagaacagtgagtttaaagtcaactttctacatagtattattgtggtaatacgtactaatacagaaagagtaaatttttattctaagatgatataatttcatgtagaaaattcaaaataatctacagaccattataattcaaaaatggattaaagaagttgggtggatccaaggttaatgtagaaaatttatttgtgtttgtatatgccaacaataaacaattataaataataatttaaaatatgattaat

SEQ ID NO: 618774 - DNA, 536 bp, Homo sapiens
agaattgataaacttgatttcagtaaaattaaaaatctttgctctgtgaaagatagtgtcaagagaatgaaaagataatgtatagactgggagaaaagatttgcaaaagacatatctgataaaggactgttaagatatacaaaaagctctgaaactcaacaataataacatttttaaaatgggccaaagacaaacagatacctcaccaaagaagatatacagatggcaaataagcatataaaagatgcttcacattatatgtaagcaaggaaatgcaaattataacaacagtaggatgccaccacagacctattaagatggccaaaatccagaacactgacaacaccaactgctggcaacgatgtggagcaacaagaactctcaatagttggtgagaatgcaaaatggtgagctactttggaagacagtttagcagtttcttccaaaactaaacatactcttatcatagatctaaaaatcacactgcttgatatttacccaaagaaaytgaaaaattatgtccacacgaaaacttg

SEQ ID NO: 618775 - DNA, 587 bp, Homo sapiens
ccagaacagaataatgggttgtagagggaggtattgaggataggagagtatatgggtttggcaccacagggtggataggcaaaacaatttggttgataaggcgcagatcctgaactaacctgtaggtcttgtctggttttaggacaggtaaaatggggaaattgtaaggggagtttayaggctttaaaaggccatgctgtaacaggcgagtgataacaggctctaatccttttaaagtgtgctgtgggatgggatattggcattgagcagggtaagagtgattaggttttaatgggatggtaaggggtgcatgatgagtcactaaggagggagtagaggtgtcttatacttgtgggttaaggtggggagatacaaggggaggatgtgaaggaggctttgaactgggggaaaaggtggcaatgaggtgtggctgtagcccaggagtagtcagggaagcagataatttagttaaagtgtctcggcctaataagggaactgggcaggtggggataattaaaaaagagtgcaaaaagagtgtcttctaagttggcaccagagttggggagttttaagaggtttagaagcct

SEQ ID NO: 618776 - DNA, 602 bp, Homo sapiens
ttattctctgccaggcttaaaaatcttcagggtgaagcttttttctttttcttgctgttcattgaaaattccttctggagcagatgtgcctctccccgtcttctgtaatttctgtgtttttattaagttcagcagttttttgtttgtttgcttgtttgtggccttactttctaactactcgtgacatagtcaattctgaagttagtttctgtatatacaaaggctcttatcatgtcacgaataaaaaaaaatcttggtaatctggatggcacataccttatgccctgagtattataagtcactgttgtgttttatattgtagtctatgtttgcttacgccatatcagcctgagtttaagaatttggatgaatgggacaataataacccttattttttactattttatataattgtatttacttcarggactctggtccctgcaaagtggcctcccttaacccaatgatttatagaagtccgtaagtggcatcccataatggctcttgagtaagtcctgtcattatatggcaggcatcatttcttctctctggtgttggcttcctgaaggagcattacgcatcctcatttgcagcaacactcc

SEQ ID NO: 618777 - DNA, 627 bp, Homo sapiens
cgcacactcacagaaaggctatgctgttcttctgttgtacataaacaatttacagaattgtttatgtaaaacgactttagacaagtccactctgtgatcatggtggattaagctaaaaccattctataaatattacacagaagtgacaaaatattctttgttctagctaatatgaatgcctgctggatttttcttttttttttttttctttttttaaccarttatagctttagtcttacttcattcctccaatcttctcaataagaattattaaaatacccagtcatggaactgacaactgggtaaaagtaaggttaaaaaaattatgagcaatcatttgatatatgacccgagagattaaaataaagcaataatactatactattaccattattattattattattacaaacaaaataataaaatcagagctagtattcattcattgagtgcttggtctggatgttggcagaccatgtgacagacaatttacctacgttactctttaatgtacacgatttataaaataagtatagttatctcattttacagattagaaaaagtgaggtttgtgaaatgaagtagctagctcaagatctctctgctaaaattaaattttgaaaccaa

SEQ ID NO: 618778 - DNA, 545 bp, Homo sapiens
ccatgtgccaagcaatgggtcatggaacaactatgcttaattctacgtgatgatgaagtaattaaaaaaggattttgaaataaatgttatttcatagtattattcataagattatctacatttggagaaaactgtagcaggattackttttatagttaaagattaactttatattattaaaatatatcatctaaaaataaaccatgttattgatacatatatcatctatgctcatttaagaaattttatgcttttcaaactgactttgagagtgatgaagttaaataccagattaagtatttgaggaagaaaggtatataagtacagtatttgaataaagttagggttagaattataatctgtttataaattccaatgttattttccagggccttaatatttacaaaaactatatattggcaaaaaacttaagtacatggaatgtaatttttaacttatatttggaaataagttagcattaattaaactgatacctttgaggttaaaatatgctcgctttgtttcataaaagcataatacttata

SEQ ID NO: 618779 - DNA, 586 bp, Homo sapiens
acacgaatatctagacacactgataaaatttcaaagctccaaagataaaaagtcctaaaaagcgggggccaggtgcggtggctcacgcctgtaatcctatcactttgggaggccgaggcaggtggatcacctgaggtcaggagttccacaccatcctggctaacatggtgaaaccccatttctactaaaaatacaaaaaattagccgggcgtsgtggtgggctctgtggtcccagctactccggaggctgaggcaggagaatgacgtgaacccgggaggcggagcttgcagtgagccgagatccgccattgcactccagcctcggcgacagagactctgtatcaaaaaaaaaaaaaaaaaaaaaaaaagtcctaaaaatcttccaggtatagaagtcgttctcttataagaagactcgtgggcaacactggatactacgagtgagtagagaagtatcttcaaagtttaatgagaaaaaaaacttaaccctaaatttctaaggcttgccagactaacgttcaagcgtgtcagggtgaggtaaatcaactttggcccattctctgtgaaagaatatattgaacaaaat

SEQ ID NO: 618780 - DNA, 586 bp, Homo sapiens
acacgaatatctagacacactgataaaatttcaaagctccaaagataaaaagtcctaaaaagcgggggccaggtgcggtggctcacgcctgtaatcctatcactttgggaggccgaggcaggtggatcacctgaggtcaggagttccacaccatcctggctaacatggtgaaaccccatttctactaaaaatacaaaaaattagccgggcgtggtggtgggctytgtggtcccagctactccggaggctgaggcaggagaatgacgtgaacccgggaggcggagcttgcagtgagccgagatccgccattgcactccagcctcggcgacagagactctgtatcaaaaaaaaaaaaaaaaaaaaaaaaagtcctaaaaatcttccaggtatagaagtcgttctcttataagaagactcgtgggcaacactggatactacgagtgagtagagaagtatcttcaaagtttaatgagaaaaaaaacttaaccctaaatttctaaggcttgccagactaacgttcaagcgtgtcagggtgaggtaaatcaactttggcccattctctgtgaaagaatatattgaacaaaat

SEQ ID NO: 618781 - DNA, 459 bp, Homo sapiens
ttacatagtagcatttatgctaattaactacttaaaatgtatcattaaacttttaaagaaagacagccaaagttatttcttcaataattgattgacataagactttcaaaaattagaactttaaatgactctagacaatgaaatttattttaacaatattgaatatattgaattttttcaagtatgatcctacttgtattaattattgttaaaatgcacagaaaatataaacttttaaaaaatttaataatttttatttgaaaagagttttgttatataagctaaataataaaaagttgaaagtgttaagyaaggtgtaacacactccatctaattaaataccaacctaaactgactttctactttataaaatgtttaattctaaattaattagattacttttaaaaacctccctccaaatatatctgtaaatatttggagtatgtataatttatgccc

SEQ ID NO: 618782 - DNA, 537 bp, Homo sapiens
atagtatagacaaacataaatacatgtataagacttttaacagaagacaattataatgtgaaaaagagaagaatatttttccttaaatattttcctagattatacttttttaaggtgttaaggtagtctgaataaatacaggtaagtgtcacacaatraaattttacaaaaattaagctttacttataaaagtgttccctgtatttgtctttaagccagaaaaaagactgtaacatataaataatataaaatttgttaacagtaatttgagaacaaagaataaggcaaaaacatacatttaaataataataaaagacaatatatttttatattaatcatggagaaaaaagcaaaggctatcacactttaatatttaagaattacttctcaaaatgagtaaactggcctcttcaatcaatatgatcagtaaaagattgtaattaaaagcaatctttctacagagtgataaagtgagtgtgacttttttaaaaagagtaacatttgataaagtagcatagtttggatataaatgatggt

SEQ ID NO: 618783 - DNA, 267 bp, Homo sapiens
ttgttagtgatttgtatccttgtcaaatgaaaaaaaatcttttttaaaatgatgtgaatgagccatgaacttttaccgtgtagccataaagactgttagaaagtattaagtaagattaattttctgaagattccagtttcataatttaactaagccatcaaggttaatcaacattttttgagattcatggaggaaaatatgccaatttagcatcttcytttttttctgggattgtgcaatatagaacagtatgatttgacagaaaaa

SEQ ID NO: 618784 - DNA, 552 bp, Homo sapiens
aaaccacaaactgtgtctcccactactcactacttttgcaggatttgacggggtgggctgtggtaataatgggcagtgacatttttgtgtgggataatgttaaagcattatagtcgtaaagcttcctgcttttaataaactgcatgaaaccactctagcgaaatagacactatgtaggaatgacatgcattgtttgtatcaaacaatgaaatacttttatgtattcagagtttgatatatacctataagtagataatatgctatcagattccttgctgagtcaatgcacaacttcctcccacttcttttgaggtgagagaaaaccattgcctgggatccatataaggaggaaggaaaatgaaggtatagtatttcctagtgtgagttrttagttactaatttgcatcccctgtctgagaacagggggctgatactaatgaagcaagacaggcaagaggcatagagcaacaaaaggaatttcctggctcataaacataacgtggtctattccttcttttgtaatctatactaataattaaaatattatggaaa

SEQ ID NO: 618785 - DNA, 560 bp, Homo sapiens
aagaatgtagatcaggacctgcactagagtgtggacaagaggaggacagaagaaacatgtaaaaccacaaactgtgtctcccactactcactacttttgcaggatttgacggggtgggctgtggtaataatgggcagtgacatttttgtgtgggataatgttaaagcattatagtcgtaaagcttcctgcttttaataaactgcatgaaaccactctagcgaaatagacactatgtaggaatgacatgcattgtttgtatcaaacaatgaaatacttttatgtattcagagtttgatatatacctataagtagataatatgctatcagattccttgctgagtcaatgcacaacttcctcccacttcttttgaggtgagagaaaaccattgcctgggatccatataaggaggaaggaaaatgaaggtatagtatttcctagtgtgagttgttagttactaatttgcatcccctgtctgagaacagggggctgatactaatgaagcaaracaggcaagaggcatagagcaacaaaaggaatttcctggctcataaacataac

SEQ ID NO: 618786 - DNA, 512 bp, Homo sapiens
ttttttctatgcccactgatgccaccataattcaagccaccatcagctctctctggactacatacagtatagtcctccaatatttcacagtacgcattcttgcccctgtaccatccgttctacacaaaaccacaatattaggttttaaaatgtaaattctatcttatcacttcttttctttaaaatcttttcatactttgcatcttycctggtcgcatggcctatagggccctataagatctggcttctgcacagcatctgaacccatctctttccacctctccttttccaggatccccacaagccccagtcttctctctgttcctgaacacagatcttcacatgccaacagatattttacatgtaaaagattttttattgccaaaaatgagacattgtttaatttttaatttttcttttcagtgttattctggattttaaaaaaaatattagtgaatttattttacagtcctcagccccataacatttctggaaacactaatgtcatttta

SEQ ID NO: 618787 - DNA, 512 bp, Homo sapiens
ttttttctatgcccactgatgccaccataattcaagccaccatcagctctctctggactacatacagtatagtcctccaatatttcacagtacgcattcttgcccctgtaccatccgttctacacaaaaccacaatattaggttttaaaatgtaaattctatcttatcacttcttttctttaaaatcttttcatactttgcatcttccctggtcgcatggcctatagggccctataagatctggcttctgcacagcatctgaacccatctctttccacctctccttttccaggatccccacaagccccagtcttctctctgttcctgaacacagatcttcacatgccaacagatattttacatgtaaaagattttttattgccaaaaatgagacattgtttaatttttaatttttcttttcagtgttattctggatttwaaaaaaaatattagtgaatttattttacagtcctcagccccataacatttctggaaacactaatgtcatttta

SEQ ID NO: 618788 - DNA, 588 bp, Homo sapiens
ggggtcattggagtggttgttccaagtcctgtgatggcggctgggaaaggcgaataaggacctgtcagggtgcagtgataacagggcagcaatgtgaaggaacgggcgaagaagtgagaagatgcartgagcagcgatgccctggtgagaatgaacccaaattatcccaaaagaaacatttcataacgtgaaaaaaaaaagatttaaaaatattgtcattggttaagggtcatattcctcaactaaagaactactaatgataggtggcaatttacttgtttctgtactatgtggggcatcccctgtttatgtgtcatagaatcgttccatgtgaaatatttgtttgtggagattacaaaacaagttgccttaggatatatatactggaaatgtaaagacataagaaatgaatgagaagataaagaagtgtcgctgacattcagatgcttttaagttctgttgctaattactctgaccttgatgtgtgaccttgattatctacatttacttgcgtttgccccatttttcattggcaaaggaaattcctatgaggaatgcattttaaaatgaaagtataaagtcttaatt

SEQ ID NO: 618789 - DNA, 588 bp, Homo sapiens
ggggtcattggagtggttgttccaagtcctgtgatggcggctgggaaaggcgaataaggacctgtcagggtgcagtgataacagggcagcaatgtgaaggaacgggcgaagaagtgagaagatgcaatgagcagcgatgccctggtgagaatgaacccaaattatcccaaaagaaacatttcataacgtgaaaaaaaaaagatttaaaaatattgtcattggttaagggtcatattcctcaactaaagaactactaatgataggtggcaatttacttgtttctgtactatgtggggcatcccctgtttatgtgtcatagaatcgttccatgtgaaatatttgtttgtggagattacaaaacaagttgccttaggatatatatactggaaatgtaaagacataagaaatgaatgagaagataaagaagtgtcgctgacattcagatgcttttaagttctgttgctaattactctgaccttgatrtgtgaccttgattatctacatttacttgcgtttgccccatttttcattggcaaaggaaattcctatgaggaatgcattttaaaatgaaagtataaagtcttaatt

SEQ ID NO: 618790 - DNA, 540 bp, Homo sapiens
aggatatttctttgctggtagatagattaaataaaagtattaaaagtgtcatcattgatgacaaaaaatrtatttcttttgttttcataaaaaataattgtagaaataagaaaacattttttaaaaataatgctagttgggctatagaatagctacagggaagataataagtggtccaatttttaaattggtcagactcaccagataatggtttcatttatctcaatctcattgtgtatcctcaggctttgaaggttaaaatggtaggatggtaatagctcccctaattttattaattgctacaatgtcatacataatattttttaggtttttagtttgattttcaccccaatattcccctggttaataatattcagaaagcaagtgttactgctggactgtcctaagtttacattctagcttcgtaggaaccactttgccctgctcccaggagaagggcttgctacttctataactccaattctaggatcattactctttagtcattaactgctaagttggaacctaccatttacaagt

SEQ ID NO: 618791 - DNA, 540 bp, Homo sapiens
aggatatttctttgctggtagatagattaaataaaagtattaaaagtgtcatcattgatgacaaaaaatgtatttcttttgttttcataaaaaataattgtagaaataagaaaacattttttaaaaataatgctagttgggctatagaatagctacagggaagataataagtggtccaatttttaaattggtcagactcaccagataatggtttcatttatctcaatctcattgtgtatcctcaggctttgaaggttaaaatggtaggatggtaatagctcccctaattttattaattgctacaatgtcatacataatattttttaggtttttagtttgattttcaccccaatattcccctggttaataatattcagaaagcawgtgttactgctggactgtcctaagtttacattctagcttcgtaggaaccactttgccctgctcccaggagaagggcttgctacttctataactccaattctaggatcattactctttagtcattaactgctaagttggaacctaccatttacaagt

SEQ ID NO: 618792 - DNA, 522 bp, Homo sapiens
tcagccatatcataaatgtatacaatattagcaacttagaccagaaatgtaggaattattgtgatgtttatctataaatattcatactaaaggagggcagccgtagtgttggtaatgcaaaatttgtcttgaacactgtaatacacttgtattaggatttggtgccctataatatagcgaatgtgatccccatccccaccctgcttacgaaaaatgtgattctggaagtgacggttccttatttgtataaggttgctctccaacaggattatgcctcctctggagaccaggagagtcttcctttggtctctaagtaattgtcttttaacttagcttcagtaggaaagaagaacaaagcttgcctactttgcactcctatcttcttttgagtgcctccctcattgtccaaagcagtgcttcccaaacttcagtgtacataggaatcatccagagagcttgttaaaacacagattcctgagccagaycccaccagccattctgactcagtaggtcttgaatgag

SEQ ID NO: 618793 - DNA, 602 bp, Homo sapiens
ttgtataaggttgctctccaacaggattatgcctcctctggagaccaggagagtcttcctttggtctctaagtaattgtcttttaacttagcttcagtaggaaagaagaacaaagcttgcctactttgcactcctatcttcttttgagtgcctccctcattgtccaaagcagtgcttcccaaacttcagtgtacataggaatcatccagagagcttgttaaaacacagattcctgagccagaccccmccagccattctgactcagtaggtcttgaatgagcctgagaatctgcatttttatgaaggtctcaggtgatgctgaagatgctggtctgcaaatcatcctttcagttgcactaacttatagtaaaaataataatgataaggtgataaaattaacaaagaagtggaatacagtcctctacctctgttccactggagaaagttgaaatatcacctcaacaaaattgcaaaattttatttttttcatcctttttcataaacgatgagggattctttctggaattggttgataatgaaaacacaattcattttgaatgcctctagccaactcatgtttcagccaaaataagatctcttta

SEQ ID NO: 618794 - DNA, 408 bp, Homo sapiens
actggaaactttgaaacctgctgcagtaatccagacgagagatgatggtgtcttttattaaggttagtaatcacatttggctggttataatgtcatttttctgaggcagggaaggcagggccatgaggaataatttgggacagatgargttttgggttgtcaaaggttgtttctattaaatctggagaatgtaattggatatgggagtcggaaactcagattctaatttctggacaggaaataattttggaagtcatcaacacaaagaacaggagattaggaagtaaaaaatggttgtgtatttatccctttctaaattttgataatgaatgagagcagaagaatagggtagtagttaggaggatgtgtaaggccaaaaaagggttttgtattattttgttttgtttt

SEQ ID NO: 618795 - DNA, 616 bp, Homo sapiens
atattctttttaatctaattagacagtgttgcctggcctcccagtttctgtccttgcctctgcagtctattcttgatgcagtaggcgggaagatcttgaggaagcatcaagccatgtcactccttttctcaaagccctccaatggcacccatttcacagggtagaagagtcctgctgtggcttacaaacctatactcaatttgacatcttctctgatgtcatccataactcctcttcacttcctcactctgtcccagcagcagttaccaccttgctttcctcaagcactaatgcaggctgcagcttctgagctttgcatttgctctttccctgcctagaatactccccactccccatcaggtagcttgcagtgctttgcatctttttgtaatgtcttctctgtctattctgtttcaaattgtattcagaacactcctttccaaaatagggaaaacaaacactgataacaaatgaatcttgttgtggyggctcacgcctggaatcccagcactttgggaggccgaggcgggtggatcacctgaggtcaagagttagagaccagcctgactaacagggtgaaaccccgtttctactaaaaatacgaaaattagctggg

SEQ ID NO: 618796 - DNA, 561 bp, Homo sapiens
caaatttttccaattccatctatcgcaattccttaaatccaaaacctacaagatatttcaatgtcatgatttaaaggtgctgcaggtcaatataccgaagttgatttttcattttcctaaccacttcttcttcttccttgtagttttttctgtgaaattttgtaataaaatatttccaaaaatcttcaattttccagattttaagatttgygaataacgcacattcctaattgatcttccagtcccaaatgttaggcaagatggaaatatctgtgatatggttttgctgtgtccccaccaaaatctcatcttgaattctaactcccataattctcacatgttgtgggagagccccggtgggagataattgaactatggggtcagattcccccatactattcttgcgatagtgaataagtcttattaaatctgacggttttataaaggggagtttccctgcacaaattctcttctcttgtctgctgccatgtgagacatgcctttcaccttccaccatgattgtgagacctccccagccacatggaactgtaagtccattaa

SEQ ID NO: 618797 - DNA, 581 bp, Homo sapiens
ttacctgctcccagatgataagactgtgagcaaatacacatggtacttaccaagagtaacaacttactcaccaagaattgttttgacagcctcacttctcagcaacaaccaattccaaagttacagcttcagtagaaactgtcaattccaattcctttcctattctgtaagctccaccttaaaaccacccagttcatggcctaaaacttaaaaaatatgctccccctgacttttatcttttgagcttttgctaagactmtctcaaaacagagtttttccttattgcaaaaggcttaataaacttagcttgtctcaatcccacgtttttctggtagtccttggggactttaagtcaacaacagaattcataagccaatcagaagctgtagaacctgtgctttaaacggctaaagctctgggactaatgtaaaaggtatttatttgaaggcagaaatgcctctttgcacattatgtttgccatctgagaacatctttttcttgcaatgtatttattactgggctgacgactaataaccacgtacttgttcaagcagttttggagagaatatgaggaatctgtt

SEQ ID NO: 618798 - DNA, 551 bp, Homo sapiens
acactgtttgctcttgtattatcatctcacattaatgttgtacatttaccataattagtgaaccaacatgtaaacatcattactgactaaagtccataatgtactcagatgtccttagtttttatcgactctctttctttcactttacaattttgtccaggatgaatgtgttctgtgtccctttgatatacattcatcaatgtggttagtytgttttgagcgcttccttacatgactatatatgtgatccaagtttctttcctatatagttttccttctccttaaacaatttcttctaatacttacagcaaacctaggtttgctagtgattaattcctttagtttttatttgtctgagaaactctttattttctccttcacttttgaaggataaatgttacaggttacagaattctataattgtgttgcttttcttcaatactgtaaatactacattccactttctttctttttttttttccatggtttccagtaagtatactggatttctgcaattgtttctctgtaggaaagatgtttccccctgccct

SEQ ID NO: 618799 - DNA, 551 bp, Homo sapiens
acactgtttgctcttgtattatcatctcacattaatgttgtacatttaccataattagtgaaccaacatgtaaacatcattactgactaaagtccataatgtactcagatgtccttagtttttatcgactctctttctttcactttacaattttgtccaggatgaatgtgttctgtgtccctttgatatacattcatcaatgtggttagtctgttttgagcgcttccttacatgactatatatgtgatccaagtttctttcctatatagttttccttctccttaaacaatttcttctaatacttacagcaaacctaggtttgctagtgattaattccttyagtttttatttgtctgagaaactctttattttctccttcacttttgaaggataaatgttacaggttacagaattctataattgtgttgcttttcttcaatactgtaaatactacattccactttctttctttttttttttccatggtttccagtaagtatactggatttctgcaattgtttctctgtaggaaagatgtttccccctgccct

SEQ ID NO: 618800 - DNA, 518 bp, Homo sapiens
atgtaagacctgcttagataacttggacaggtctgaagaggagaacattagtggaggttattgtgaagtaagagccaaagtgtcaaaaacccaaacaagtacattgtgaataatcataagtgaatcttttctctcagaaggtagggccagtatgtttttcagaatgaagttcagtgcttcctggaggcataaaatattacctgaagttacatatctaagaatagaccagaaagcaatttttttctgtgataattacagcaattgaagcaatactaatatattttgttccagaagtcaaagtaactttyttagcaatcagaaaaatccagaaaacaatgtttttatatatatatatatatattttttttttttttttgagacggagtctcgctctgtcccccaggctggagtgcagtggcacaatctcagctcactgcaagctccacctcccaggttcacgccatttcccgcctcagcctcctgagtagctgggactataggcgcctgccaccatgccc

SEQ ID NO: 618801 - DNA, 518 bp, Homo sapiens
atgtaagacctgcttagataacttggacaggtctgaagaggagaacattagtggaggttattgtgaagtaagagccaaagtgtcaaaaacccaaacaagtacattgtgaataatcataagtgaatcttttctctcagaaggtagggccagtatgtttttcagaatgaagttcagtgcttcctggaggcataaaatattacctgaagttacatatctaagaatagaccagaaagcaatttttttctgtgataattacagcaattgaagcaatactaatatattttgttccagaagtcaaagtaactttcttagcaatcagaaaaatccagaaaacaatgtttttatatatatatatatatattttttttttttttttgagacggagtctcgctctgtcccccaggctggagtgcagtggcacaatctcagctcactgcaagctccacctcccaggttcacgccatttccygcctcagcctcctgagtagctgggactataggcgcctgccaccatgccc

SEQ ID NO: 618802 - DNA, 609 bp, Homo sapiens
gtgcaggtcacagggtatacgatggcttagtttgggctcggaggcctgacattcaggaccaatgcacaatctggaaaacttgtttgggaatactttctcagtrgtaaaaaaatgaaattccagttatacctttattagattttctcacaactaactttccaactgaaaaatataaacaaaatcaggttgatagtagaaaaaataactaagggtaagtaacatttttaattaaacaaccctaaatgaatttaatttacctagtccatctatcttctataggtaatattccattttttaaaggagattcctgaaccactttcagagatatttgagatattgggaggaaggtaataatgatagattattagaaacatatcaatgtagcaaatttttaaatgagagtctgtggcattactcatttatcagaaactttttaagctgtagtccctgaactaggaatttagaagatagagttaagataaacaaatatatcccctgatttcaaggaaattcatcctaaccattaaatgtatgtgtgtgtgtatctatacatatatgtgtgtgtgtgtatatatatgtgtatgtgtatatatatatatgcacatgcac

SEQ ID NO: 618803 - DNA, 588 bp, Homo sapiens
ctatttttataccagtaccatgctgttttggtgactatggtgttatagtatatttaaagtttggtaatgtgatgcctccagatttgttctttttgcttagtcttgctttgtctatgtgggctcttttktggtttcatatgaattttagaattgttttttctagttctgtgaagaatgatggtggtattatgatgggaattacattgaatttgttgatttcttttggcagtatagccattttcacaacatagattctacccatccatgagcataggatgtggttccatttgtttgtgtcatctgagatttctttcagcagcattttgcagttttctttatagggttttttcacgtccttgattaggtatattcctaaggtttgttttttgtttatttgtttgtttgtttgttttggcagctattatgaaaggaattgaattcttgatttgattccaagcttggtcactgttggtgtatagtagagttactgatttgtgtacattaattttgcgtcctgaaactttgctggattcacttgccagttctaggaactttttggatgagtctttagggttttctaggtataca

SEQ ID NO: 618804 - DNA, 524 bp, Homo sapiens
ttcttctatatcttttcatcgcttggcagctttctgttcataactgacaagtcttccattatatcattatactataatcatttatctgttcacctattgaaggacatcgttgtttcttttaaattttgagaatgatgaaaaagccactatcaacatttatatgaaagtttttttctatagatagaagtcttcaactcatttaagtaaataccaaaggacattactgctggatcatagagtttagatttgtaagaaactttcaaactgtcgtccaaagtgagtataccgttgggtttttcaaccaaaaatgaatgagagtgttgtgctccacatcctcatcagcatttagcgtcgtaagtgttttttatttttgccattgtaatagtagtaacactgtgtcattgttgtttttatttcaattgtctaatgacatacaatgttaaacatctttttgtatgtttattttcacaagaccagatgagtttgttggtcaattctaccwaacattgaaggaagaaatgata

SEQ ID NO: 618805 - DNA, 602 bp, Homo sapiens
tgtttctggctgtgttattctgaaagacctgtcttcaagttctgatattctttcttctgcttgatctagtctattattgaaacttttgcaagtattttgtttttcattcaatgacttcttcagctccagaatttctattcggttcttttaaaaaaataatgtctagctctttggtaaatttttctttcatatgctaaattatttttattgttttcttgtattaatttgtatctcactgagcttccttaatgtcattattttgaattctttatttaggattttataaatttattttttattgaaatctattgctggagtattactgtattcctttggaggtgtyatattaccttgctttttatgctttctgtgtctttacattgatatctgcacatctggtataatggtggcttgtttcaattttttggatttgcttttgtatggaaggactgaagaagtatctatcatgctaggtaggacactttggctttgatactgggtgcatgcagtagtatactctccatgtaattcattttgctgtacacagcatcagtgctgtttgtgatttcctcagtagattaggttattgcatccttctcatt

SEQ ID NO: 618806 - DNA, 374 bp, Homo sapiens
acactacatgttgttacatacattcatttatataattctcattttaaaaaatcttagctgatattgttggctactgctyacatttcatcctccgtggcctttacttcaactgaatttcagttttatgccaacaatcagcccactgtccttcacatggccgtgcatttgcttcatgaagctactcaggggaatgccaatattcagactgagaatgcttaagaggtgggcatgggactcaaatcttgttaatgaattaggagtgatgatgtttagatgtgatgcctaaaatcatggcagctatctgtgacaagggagcctagcctaaggatataaccaatgatggctcagcaggatatagccaatgatggctcagc

SEQ ID NO: 618807 - DNA, 567 bp, Homo sapiens
actgcaacctccatctcctgggttcaagtgattcttctgcctcagcctcccaagtagctgggactataggcacaygccactgtgcctggctaatttttgtatttctagtagagatggggtttcaccatattggccaggctggtctcgaactcctgacctcgtgatccacctgcctcggcctcctaaagtgctgggattacaggcgtgagccactgtgcctggcttaaatctgaaacttttctaaacatgaaatctactttaaaaatactgtgcatcatcatcatcatccacttgctgtggtctaaaaatactcagatgtatctaccttctttcccccaaatcgatgcctttgttgttgctttcaatgtacgttattttgaatgctttgtatactgtagagtgctccacaaagtcaggaagctctttttcttgtatggctcactgccctcttcaggtgtcacgctggatgttctcaagttatctctggtcttgtcaggctttactcctccttcctgtcctgaggcacaggcttgcactccctctttctctacctctgtgtttgctcac

SEQ ID NO: 618808 - DNA, 608 bp, Homo sapiens
acttgtgtcctgagatagtttgcatgattggcaagaaagaccctggtcagccaccttccagatggtcactgtaaatggcagctacccggacatactgagaactgagaaccctcctctggtggccggcctttgtatggtccatcagcatatcacacactctataccaatttgatttctgggtttacaggagatgttgggactatggcgcaaggcttttctaccacaactctacatggcatgctcagrcccgttttaatatatgcagtggcaactgagtatctgccttaaagctgtgcaggtgtttctatgtacagccctagcagggaattatggctgtaagaatacctgggttcctacagtagcccagaatttcagtgcctcttacaaagccattctggtgacttatgcaggatccaaagggtgatatgggattttgcacatagaagggaactggctgagaaggagaggagtgggagggagattttctgttgttacatccttctgtaactttttaaattatatgaatatattcaaaaatgaatggctaaaatttgaaaataggcacttcacatatggagctctggagaacttggtttggtgtcaaagag

SEQ ID NO: 618809 - DNA, 612 bp, Homo sapiens
cttgccattgcaaacactgtgagacagtcgaaaaactgtgagttccctaagagtgagagggggaaaagttggcctctgaacttacttccccaatggagaacctgaaattccagatcatggggaaagatttaaccttacttagagctgaaattgatttagggagcccagcaaaatatagcagtagaagaagcggtgggaagatcagcagtaggcactcctgatctccagcttgagccaagggaagcccttcctggccttacctctttgcagaccttccccagcaccagcctggagcccagtagcccccactagatggctagatccagaggacaataacagttgctgcagtctggctcttaggaagccctgtccctagaggaagggggagagcaccacatcaagggatcaccccatgggacaaaataawctgaaaagcagccgttgagtttcagatcattccactgaaagtctactcaattgaaacggaaccagaaaactaattatgataatatgacaaaacaaggttctgtaacacccccagaagatcacattagctctccagcaatgaacccaaaccaagaagaaatttccaaattgccaggaaaagaattc

SEQ ID NO: 618810 - DNA, 606 bp, Homo sapiens
acaaacgctgatgggcagagtgtgcacagcaggaatgtactggtgccagacctctccagagggtttgctttatccgcctccagccacagtgggacccccaccygccacccatctgcgggaccctgagaacgctctgggaggcagctggattctgatggacagaaactagggaaagtgaagtttttttgtctttggcataaatggcctattatggaaagcccagacgtgcccgggctctgtctttgcgccggacatgtgcccttgctggagtccctcaagcaactccttttattgcccagagtttcatatgagtaatagaagctgtttttgcagacagctgctttgagggttacacatactgttttaaagttggttaggatttagagtggtatgactgatatttttactaatgttagaatttaattgaaaatacttagtttattggcactagttaatccaagttattttttcctagttaaggaacatgccaaaaggtgtaatttgatcatttttatatgaaccaaaatagattttggcttcaggatgggaggagggacaaagattttattccctttcaaaattggcctgacactttaactagcaaag

SEQ ID NO: 618811 - DNA, 678 bp, Homo sapiens
ggattccacctccctaggcacatttctgcacgttcctctgcagccttgccccctcccaggctcatgatggtgggccctgccgcttttcctgcccttccccacttcgggagtctgcctgtttttcctcattatctytgcctttttccaaccccctaatgcaatctcctccagaaggtagaaccctgggaggaagagagccaggaagggaagagtctatgggtacaaagagttcgtgcacatggaacacacggtaccacatcactaagaaaattaaccttccgtgtctggatgaggaaagtcaggtgcagagaaggtaagtgacttatagaaagccagacgacagataaaccacaggcttcagtataaaggaagccttctgaatgcaggtcacatgtcctttataaagaggaaaactgaactaaggtgctttcaagtgttgaatcccatgtgttttccaggatggaaagttaaagtctactctgtggaacagaaacaggaattatcttctttccaagggtggcttgacccatcggtgacacacttctgcaatctagttcctaggccatagaagtccagtcactgatgccaagagccagtgcgagacctcccattctcagcacttattacccctatgcaccacagtggtcggccaaacttctagggtgtctgtggacaaca

SEQ ID NO: 618812 - DNA, 678 bp, Homo sapiens
ggattccacctccctaggcacatttctgcacgttcctctgcagccttgccccctcccaggctcatgatggtgggccctgccgcttttcctgcccttccccacttcgggagtctgcctgtttttcctcattatctctgcctttttccaaccccctaatgcaatctcctccagaaggtagaaccctgggaggaagagagccaggaagggaagagtctatggrtacaaagagttcgtgcacatggaacacacggtaccacatcactaagaaaattaaccttccgtgtctggatgaggaaagtcaggtgcagagaaggtaagtgacttatagaaagccagacgacagataaaccacaggcttcagtataaaggaagccttctgaatgcaggtcacatgtcctttataaagaggaaaactgaactaaggtgctttcaagtgttgaatcccatgtgttttccaggatggaaagttaaagtctactctgtggaacagaaacaggaattatcttctttccaagggtggcttgacccatcggtgacacacttctgcaatctagttcctaggccatagaagtccagtcactgatgccaagagccagtgcgagacctcccattctcagcacttattacccctatgcaccacagtggtcggccaaacttctagggtgtctgtggacaaca

SEQ ID NO: 618813 - DNA, 678 bp, Homo sapiens
ggattccacctccctaggcacatttctgcacgttcctctgcagccttgccccctcccaggctcatgatggtgggccctgccgcttttcctgcccttccccacttcgggagtctgcctgtttttcctcattatctctgcctttttccaaccccctaatgcaatctcctccagaaggtagaaccctgggaggaagagagccaggaagggaagagtctatgggtacaaagagttcgtgcacatggaacacacggtaccacatcactaagaaaattaaccttccgtgtctggatgaggaaagtcaggtgcagagaaggtaagtgacttatagaaagccagacgacagataaaccacaggcttcagtataaaggaagccttctgaatgcaggtcacatgtcctttataaagaggaaaactgaactaaggtgctttcaagtgttgaatcccatgtgttttccaggatggaaagttaaagtctactctrtggaacagaaacaggaattatcttctttccaagggtggcttgacccatcggtgacacacttctgcaatctagttcctaggccatagaagtccagtcactgatgccaagagccagtgcgagacctcccattctcagcacttattacccctatgcaccacagtggtcggccaaacttctagggtgtctgtggacaaca

SEQ ID NO: 618814 - DNA, 363 bp, Homo sapiens
agatgggagataggtggatagatagatgataggtgatgggtaaatagataagtagatgatgcataaatgatckatgataagtagataatatagatgtcaatacataatcacatacacacgtagtgtaggttttagtgtttttttctttcgtatttaactggaattttataccatatttttttctgtgacttgctgttttactcaatgacagctgcgattcacctatgttgatgtgtgccctcatgtttccttcacctccactgctgtgtaggactccctgtgtgactgccctgtagcttatttaggcatggtatgcactgagatgtggtcagagtttggggccactgggtttcctgcaagctc

SEQ ID NO: 618815 - DNA, 363 bp, Homo sapiens
agatgggagataggtggatagatagatgataggtgatgggtaaatagataagtagatgatgcataaatgatctatgataagtagataatatagatgtcaatacataatcacatacacacgtagtgtaggttttagtgtttttttctttcgtatttaacyggaattttataccatatttttttctgtgacttgctgttttactcaatgacagctgcgattcacctatgttgatgtgtgccctcatgtttccttcacctccactgctgtgtaggactccctgtgtgactgccctgtagcttatttaggcatggtatgcactgagatgtggtcagagtttggggccactgggtttcctgcaagctc

SEQ ID NO: 618816 - DNA, 605 bp, Homo sapiens
acctttgtgattctattattccaaataagccaaatatgtctctttttgactacagaggacctaacatcaaaaaattaatggggttaaagggaccaaattcaatttgatttctgaaagagtttgtcaaacacttgatatcacaaagtaggatcacaggtcattgtaaaataattcattcatttagccaaagtaataactcaaaattttcaaaagaaaaaaacctttattctttgagggaagagacttaatttcctaaacaataagccctagtaaagacagcataagatgacttaaatctgtctctcaacatttataagcaaatcaactaaattttaatcatcttgaccataagatataactttcacaaaactttttgtaactttgcataatattttaatttaaaagtagtttaatgcttcagaaaaaccttgttaacttgacctaggggcccagatactggtcatgcatcagtgcrcctttgatattaatgtttaatttacaaagaaattctgaactaattttatcttttaaaattggcccttacagcctcatgtgcacacctacttcctcagtagttccctaagcatatgaggggtttaatagct

SEQ ID NO: 618817 - DNA, 515 bp, Homo sapiens
ttagagaaaccactttgtgaggtgtgttttttcttgcagagttaaatctttcttttcattcagcagtttagaaacactatttttgtacaatcaacgaaggratatttgggagttcattaaggcctatggtgaacaagaaaatatattcagaaaaaaaaaaaaaacagaaagaagccttctgagaaactgctttgtgaggtgtgcattcatctcaaagtgttaaaacctttcttttgattcggagtttggaaaagctgttattgttgattcagcgaatgaatattttggagctcattgaggacaatggtgaaaaagggaatatcccaggatacaaactagaaagaagctatctgggaaaccactttgtgatgtgtgcattcatctcacagagttaaacttttctttcattcagctgtttggaaacactgtttttgtagaatctgtgaatggatatttgggagcacattgaggcctatggtgaaaaagaaattatcttcagataaaaactagaaaga

SEQ ID NO: 618818 - DNA, 515 bp, Homo sapiens
ttagagaaaccactttgtgaggtgtgttttttcttgcagagttaaatctttcttttcattcagcagtttagaaacactatttttgtacaatcaacgaagggatatttgggagttcattaaggcctatggtgaacaagaaaatatattcagaaaaaaaaaaaaaacagaaagaagccttctgagaaactgctttgtgaggtgtgcattcatctcaaagtgttaaaacctttcttttgattcggagtttggaaaagctgttattgtygattcagcgaatgaatattttggagctcattgaggacaatggtgaaaaagggaatatcccaggatacaaactagaaagaagctatctgggaaaccactttgtgatgtgtgcattcatctcacagagttaaacttttctttcattcagctgtttggaaacactgtttttgtagaatctgtgaatggatatttgggagcacattgaggcctatggtgaaaaagaaattatcttcagataaaaactagaaaga

SEQ ID NO: 618819 - DNA, 488 bp, Homo sapiens
aatcattgtttttttttccattctgtgaatggacatttgggaggtcaacgaggccaatggagaaaaatgaatatcccaggataaaaactagaaggaagctatctgagactgctttttgatgtgtgcattcatttggaagatttaaacctttcttttcactcttcagtttgtaaaactgcttttatagaatctgcaaagggatatttgggagtgcattgagccctatggtaaaaaagaaaatatcttcacgtaaaaagtaaaaggaagttttcctagaaactttttgtgaagtgtgtattcatctcacagagttaaaayttccttttaattcagcagtttggaaacactgtttttgaccattctacaaatggacatttgtgaactcattctggacaatggtgaaaaagtgaatatcccaggataaaaactagaatgatgctatctgagaaactgctttgtgatttgtgtattcaactcacagagttaaa

SEQ ID NO: 618820 - DNA, 493 bp, Homo sapiens
gtgagcagaggagaaagagtgattagcagtgcaaaatgagttaatgtgtaaaactttgcttctccaagctttgttcctcaatagaagatactttttgtcctcatgttccctatttgggacactaagaagaggccactttgcaatccaatgatttggaccacaacwacaatgaataaagtcagcatctcacaaaggttggaaagatagaggtcttaaaggggaatgttcctgagcttctctttgagcagactcagaagtaactgcaggctgacgggcaaactggtcagaggagggaacatgttggttcagagtaaacttatagggtggcatagaggagacaccttgtgctgagactgaatgggagtcaaaactagatgacaaaaaccaaggtgaagtcaagcagacataatagacatctacagaactctccaccccaaatcaacagaatatacattcttctcagcaccacaccaaacctattacaaaactgatc

SEQ ID NO: 618821 - DNA, 502 bp, Homo sapiens
tcttgtgatttgctttagccaatagaatgtggcaggcgtgacactttgccaggtataggtctagattttactgagcccgctgcttctactttcaccttctttgaaaccagcaaccatgtaaagaagtctgatcttcctcctagaaacagaggctctggaggatgagagaccatgaagggcaacagagaaagacccggccaacccaggtaagatgccagacatgtgagtaaaaaaatcttggatcctccagttttagtcaaacaatcctagtaagcacgacttgaagcagagacaagctacccmtatttagccttactgaaattgcagaattgtgagcaaattaatggtgattgttgttagctcttaagttttaggcatgatattcttatatggacgtgatctgaactctacccctctgtgaaatcctatggcattttatttctcacttttttgtggtatatcacttcctacactgtgtagaataaaatatctctcagactaa

SEQ ID NO: 618822 - DNA, 502 bp, Homo sapiens
tcttgtgatttgctttagccaatagaatgtggcaggcgtgacactttgccaggtataggtctagattttactgagcccgctgcttctactttcaccttctttgaaaccagcaaccatgtaaagaagtctgatcttcctcctagaaacagaggctctggaggatgagagaccatgaagggcaacagagaaagacccggccaacccaggtaagatgccagacatgtgagtaaaaaaatcttggatcctccagttttagtcaaacaatcctagtaagcacgacttgaagcagagacaagctacccatatttagccttactgaaattgcagaattktgagcaaattaatggtgattgttgttagctcttaagttttaggcatgatattcttatatggacgtgatctgaactctacccctctgtgaaatcctatggcattttatttctcacttttttgtggtatatcacttcctacactgtgtagaataaaatatctctcagactaa

SEQ ID NO: 618823 - DNA, 502 bp, Homo sapiens
tcttgtgatttgctttagccaatagaatgtggcaggcgtgacactttgccaggtataggtctagattttactgagcccgctgcttctactttcaccttctttgaaaccagcaaccatgtaaagaagtctgatcttcctcctagaaacagaggctctggaggatgagagaccatgaagggcaacagagaaagacccggccaacccaggtaagatgccagacatgtgagtaaaaaaatcttggatcctccagttttagtcaaacaatcctagtaagcacgacttgaagcagagacaagctacccatatttagccttactgaaattgcagaattgtgagcaaattaatggtgattgttgttagctcttaagttttaggcatgatattctyatatggacgtgatctgaactctacccctctgtgaaatcctatggcattttatttctcacttttttgtggtatatcacttcctacactgtgtagaataaaatatctctcagactaa

SEQ ID NO: 618824 - DNA, 585 bp, Homo sapiens
caattgaagaatttatttatgatgaagtgccaaagacagtactttataaaataacctttgctcaacagacattcgaagaatttcgaactgaccaattgtataatcttggacaagttacttaactactaaggtttctaccttccttctttgttaaataaagttaatagcagtgcctaacttgaacttttgttagaagcatggttgttacatcataagcatttaataaatatttgataatatctgctcattattattattggtggtggtgrtgtagttattagtcttatcatgtgtagctaattgctacaaatgtcattttttctttcttcctggataatgtaagttgaatttggaaataaagcagtgatgtgttcacttcaggtaatggaccattattagtcttaggcaggaataataatcttgtttctcactcttgcttaatttcccaatatcccttgcagcaagggcagccaaaggatctaagttaggcaaataagatttacacagaaattttctgatggtgtttctgagaaggtacttaattaccttgtaaaagaagacagatgtgcctggcatagtccctta

SEQ ID NO: 618825 - DNA, 607 bp, Homo sapiens
ttttctgatggtgtttctgagaaggtacttaattaccttgtaaaagaagacagatgtgcctggcatagtcccttacctcttctatttgccttccttgaatgtgaatcagatgcagcagccatcttttgacaagtcatgaggataaaagccaacacactcaccatggcaagcaaagaaaccgaaaaagcctgcgtgtccgatgacataactgagcagtgaggcagagttcaggtacatcctatgtctgctaagggatacataatggcatcatttaaaatactttggatgcttctaataacttattcttcatgatttttcagataaataattttgttttcagtgtataattataatagcatgtagtaaatgggaaatagtcatagaaatgattttaaagggaaaagtgagttacatctagtatgtcttccagatgaatttagatgattgtcttgtaaaactggctgaatacaaactcttagaaattttaagatgggctggatattgtctacttactataggacatacaagagtcatttaatttaaacaattacacattattataaagaattatttttwaacttatagggcaatggttctcaactgattg

SEQ ID NO: 618826 - DNA, 607 bp, Homo sapiens
ttttctgatggtgtttctgagaaggtacttaattaccttgtaaaagaagacagatgtgcctggcatagtcccttacctcttctatttgccttccttgaatgtgaatcagatgcagcagccatcttttgacaagtcatgaggataaaagccaacacactcaccatggcaagcaaagaaaccgaaaaagcctgcgtgtccgatgacataactgagcagtgaggcagagttcaggtacatcctatgtctgctaagggatacataatggcatcatttaaaatactttggatgcttctaataacttattcttcatgatttttcagataaataattttgttttcagtgtataattataatagcatgtagtaaatgggaaatagtcatagaaatgattttaaagggaaaagtgagttacatctagtatgtcttccagatgaatttagatgattgtcttgtaaaactggctgaatacaaactcttagaaattttaagatgggctggatattgtctacttactataggacatacaagagtcatttaatttaaacaattacacattattataaagaattatttttaaacttatwgggcaatggttctcaactgattg

SEQ ID NO: 618827 - DNA, 382 bp, Homo sapiens
gtagtcatctgtttttaattttattacaatttcatgagatgctatcatactcattaagtgaagaatgttgactgctgttccaggaagatatttatttactcttatgtgtaacaatacaacaatcctagagatgttataatagatgtaagagttgatgctacaaattttggggtctaacccagtgcttctgaaacttgaatatgcaaacataccaaacacggaatcttgctaaattcagattctgtttcagtaggtctggaaaggratttagattctgcatttctaaccaactcccaagtggagtcaatgctgctgactgatgcatgccactttgagtcagaaggtacagaggaattgtgcctgggctgactcacagacaagt

SEQ ID NO: 618828 - DNA, 382 bp, Homo sapiens
gtagtcatctgtttttaattttattacaatttcatgagatgctatcatactcattaagtgaagaatgttgactgctgttccaggaagatatttatttactcttatgtgtaacaatacaacaatcctagagatgttataatagatgtaagagttgatgctacaaattttggggtctaacccagtgcttctgaaacttgaatatgcaaacataccaaacacggaatcttgctaaattcagattctgtttcagtaggtctggaaaggaatttagattctgcatttctaaccaactcccaagtgragtcaatgctgctgactgatgcatgccactttgagtcagaaggtacagaggaattgtgcctgggctgactcacagacaagt

SEQ ID NO: 618829 - DNA, 486 bp, Homo sapiens
ttattattactacatccagatgaggaaactgaggacctttttgttaaaggaagcacagcctgccattagcagagctggggtgagatcatgtgaaaatccatcagtttattattaaaacccagtataatgtgagtctgtcctcattgtgatgagaccagagcccagcatcctatcaacctgacccaaaagtgagaatttggttggtgggtaagaattttagggcaattatttcatagaaaaaccatagccatacacttctacagaaatagcaaactcttctgccggaacatctccctatactagatgctttgatctggcatttctcatcyttatcacttccttaactcagttgctttcaatttctttttgagataagtgactttggtagttggacaatggtagatggtaagaaaatcaggaattaactaaataagtccagaaactgcagtcctcaaaatctatacacacatatacatattaattaaa

SEQ ID NO: 618830 - DNA, 576 bp, Homo sapiens
ttacagagagcagcacttcaatggatatttggtgattgactgactgaatgaataaatacatgaatgatcacaaaggacacagtctggcaacttgtaaacttccacttgcttaagactgttcaatccattcctacttgtcccagattctctatagctctccaccaaatccaccacttgatatatcagaggatcagaaaaactttacttcttccctctgagcagtgaatacaagaggcagcatgtagcaaaacactcatgatacccatgggtctattggactcttttttggccactaactcacttaatttggtgtagtttagcacattacaagattgttcaagagtactataaatgatgtcagacaccatcagaaaccacttcagaaaatcattgcctgtagctggatcaaacggtgaacacctggaaactagcaatgctaggaaaacagaataaatcatgttttctactctacctcttagagatttacacctttttgccctaaaggatgtccatatttttaaaacktttaggctactataatatgtgtataagtcatttgtacaataataaaacatt

SEQ ID NO: 618831 - DNA, 342 bp, Homo sapiens
aattcctaggtattttattttatttgtagctattgtaaatgggataactttcttgatttttttcatgttgttccctgttagcatatagaaatgctattgatttttgtatcctgcaatttttctgagttttactgaatttactatttatcagttcrgatagtttttttggtggagtctttaggtttttccaaatataagatcatatcatctgcaaacagagttaatttgacttcttcctttccagtttggatgccctttatttctttttgttgtctgattgctctagccaggaattccagtactgtgttgaataacagtggtgaaagtgggcatccttgttgt

SEQ ID NO: 618832 - DNA, 380 bp, Homo sapiens
agtagtcaactactgaatctcactgctttggaagagacctccagtggtaaacttgaacattttcaaaattttcctgtttatggcataatttttttttcagctttattgacaacagtggcrgtgtcagagacagcctgataaaagacaatgaggggaggctcagccataataacgtaggtggtggaactcagatgcctctatctttgtatccttgttcttattgtggctatcggtccccacaatacttctagtctcagtcaggaccgatattcctgcctattgcactgcctgattctttgatgttttccagacacattttgctcaatatagctgggttttatcatgaggagtcctttagaaaatccccaaagggggtcaga

SEQ ID NO: 618833 - DNA, 600 bp, Homo sapiens
ggatgaaagcttgagcaatctggggaaagtacatccagtctaatagcactgtctaataacaaagcccttgtcctgagtagcctttaggaaagcagctgggtcagtctctgagccttgactacccccttagtaagacacataattgcaatactgtcatgcaccacataacaacattttagtcactgatagactacatatatgatgktcccataagattataatatagtcccataagattataacaccatgtgtttactgtaccttttctatgtttagatacacaaatacttaccattgtgttacagttgcctccagtatgcagtacagtcccatgctgtacagatttgtagcctaggagaaataggctgtaccatctagcctacgtgtgtagttggctataaaattaggtttggaaaagtgcactctatgatgttggcacatgacaaaattccgtaacaatgcatttcttagaatgcatgcctttcattaagcgatgcatgactgtgctaacttttcatgcagaaacagcctccaaactagtaaaaggctgtctttagggtgtttgaagtatttgtgtttttgctgtatcgaagcattaaa

SEQ ID NO: 618834 - DNA, 608 bp, Homo sapiens
ggctttagttactacagccaattggtaactaaggaaatactctattcttccctactgatttttccaggtgatttaaaccaaggataaaagccctcaagaatttgtttttaaagtaatatctctagctgtctagggagaaaggaaataaaatgaaagtcactcctctctttacataaaaaacctttccctgaagaaaagtagtgtggtggtcagtggtgttaagaaaaggtaaaaatggacaagtatttttaaaatgacggtataactagggtactgctaatatttagaaagacagacaaytataacagttgagctgcagagaaaatggctcaatgttctattttcagcttttcaacaggtcagagtcatctaatgagggccgtggcagggtggcaggcacacttccagccgaactggttgtacaagcttcttgtactaaaagcagtctagaagaaccttcctagcatcgaagcagcagggagaagagcctgtaggacccatttttctaaacactgtgctcttctttttccttttaattttcaacttggtgtccattaggagatttacctggctgcatcattcagacggtagttattgagtttccgctt

SEQ ID NO: 618835 - DNA, 608 bp, Homo sapiens
ggctttagttactacagccaattggtaactaaggaaatactctattcttccctactgatttttccaggtgatttaaaccaaggataaaagccctcaagaatttgtttttaaagtaatatctctagctgtctagggagaaaggaaataaaatgaaagtcactcctctctttacataaaaaacctttccctgaagaaaagtagtgtggtggtcagtggtgttaagaaaaggtaaaaatggacaagtatttttaaaatgacggtataactagggtactgctaatatttagaaagacagacaattataacagttgagctgcagagaaaatggctcaatgttctattttcagcttttcaacaggtcagagtcatctaatgagggccgtggcagggtggcaggcacacttccagccraactggttgtacaagcttcttgtactaaaagcagtctagaagaaccttcctagcatcgaagcagcagggagaagagcctgtaggacccatttttctaaacactgtgctcttctttttccttttaattttcaacttggtgtccattaggagatttacctggctgcatcattcagacggtagttattgagtttccgctt

SEQ ID NO: 618836 - DNA, 608 bp, Homo sapiens
ggctttagttactacagccaattggtaactaaggaaatactctattcttccctactgatttttccaggtgatttaaaccaaggataaaagccctcaagaatttgtttttaaagtaatatctctagctgtctagggagaaaggaaataaaatgaaagtcactcctctctttacataaaaaacctttccctgaagaaaagtagtgtggtggtcagtggtgttaagaaaaggtaaaaatggacaagtatttttaaaatgacggtataactagggtactgctaatatttagaaagacagacaattataacagttgagctgcagagaaaatggctcaatgttctattttcagcttttcaacaggtcagagtcatctaatgagggccgtggcagggtggcaggcacacttccagccgaactggttgtacaagcttcttgtactaaaagcagtctagaagaaccttcctrgcatcgaagcagcagggagaagagcctgtaggacccatttttctaaacactgtgctcttctttttccttttaattttcaacttggtgtccattaggagatttacctggctgcatcattcagacggtagttattgagtttccgctt

SEQ ID NO: 618837 - DNA, 608 bp, Homo sapiens
ggctttagttactacagccaattggtaactaaggaaatactctattcttccctactgatttttccaggtgatttaaaccaaggataaaagccctcaagaatttgtttttaaagtaatatctctagctgtctagggagaaaggaaataaaatgaaagtcactcctctctttacataaaaaacctttccctgaagaaaagtagtgtggtggtcagtggtgttaagaaaaggtaaaaatggacaagtatttttaaaatgacggtataactagggtactgctaatatttagaaagacagacaattataacagttgagctgcagagaaaatggctcaatgttctattttcagcttttcaacaggtcagagtcatctaatgagggccgtggcagggtggcaggcacacttccagccgaactggttgtacaagcttcttgtactaaaagcagtctagaagaaccttcctagcatcgaagcagcagggagaagagcctgtaggacccatttttctaaacactgtgctcttcttwttccttttaattttcaacttggtgtccattaggagatttacctggctgcatcattcagacggtagttattgagtttccgctt

SEQ ID NO: 618838 - DNA, 573 bp, Homo sapiens
ctagctctttttttgttttttgcttggacacaacctcttggctactcaaatagtgaaactatactcaactaagaaaagttatagaggtaatattggcacatattattgcatatctgactacctagaaatttcatgtgtaaatttagattttatgtcacatgttaattaggatgtctgagatttgattaaagcatcaaatttagctaaaattgattttacctcttttggagctggagattttacaaaactttaaaaatagacttcaaatttattgctttgctgtttttctttttcttcttgtttgtttcagtcaaagacaatgtgagtaaatgaatgtgaagttgtggagatggaattaagacagttaggaagtggaagggtgactctaacggcaatcttcatgctgtagttttatagattttcttgacttttctcccattattctagtgtataaagagtatatggaagaaacagtggggacrttaaagtttaaatggactcagatagatgtacatctcatgttgtattttgaaaaatagtgaccaaggtatgtgtgctgaaaggcatagccgg

SEQ ID NO: 618839 - DNA, 566 bp, Homo sapiens
atttttatttgcactttaaacagtgaaatggagtggtgaactgtgaggtgtaatgtttttgtttgacaaatgcaaattttatttcatacatgaaatattttatggaattttaaatatagtatctttaaaattaaaatatctttaattttaaaagatatctttaaagttaaaaaaatttttaaaagttaaaactaaatagcccactccagaaaatagtgattattacagaaaataatcttatatagaggcagaggctgttaaaaaatgatctaactggtgtccagttcacaagagaagccactgcctggtagtttcgtttaatactttggtggtcagacttctacctaatggagagtgtggctcttacataattggctgcagttttttttctattttctgcccttcttctcttagatatttttatactgcgtcacgagataaagagaaatgcattatattttcaaggtcttttatttaatcccacttctgagtgaatgaaaattgctgcagaaygcccatgacagcaatttacatcttttccaagtttattattcacttaattatgg

SEQ ID NO: 618840 - DNA, 532 bp, Homo sapiens
ttcagttttcctgcctctgctggagttgtcagggttggagccaggagggctttactttttccttttcttctaccaggttagcccggttggtttatgacatctcctcattttcaactctcctcatctcttttcatgtggctttgttggggttggatggctgaggttggctggactgatggttacaaaagaatatgtgagagtattgagggagtgactaaatccctcagggataagagagggaacaggaccttccagaaggttgtgctcttattgtctcagactttgtatatacatgtttatttctgtaaattgctttctccatttggacaaactacaataaccagagtaaaaagctaccaggaatgagttctgttcaaaattacagagatggacattggagtctcagtgagtttgcttgagagttctcggaataatatgaaaatagctttaaaagggacaacaggagagtatgcagagtggagctgcttcttttttttttgatgcygaaattggtttagatagaatgaaactg

SEQ ID NO: 618841 - DNA, 426 bp, Homo sapiens
tatcacaggggacttgtcaaatgcagattgttggactccacctcagacctgaattgaacattctgtgggtggggcccagcaagctgtgttttaacgggccttccgggtgactcttatgtacatgcaagtttgaaaaccatggccccttgagaaattctagaatggggtctgggaattatgacttaggggagcacacaggggctctggtagcctgtggtttggctccaaacatacaaggggacgactctgtcagtgtctgagtggagtttccaagaagagtctaaagaaataagcagctgtttactctggagatcaagtggctcagagaatcrggaacatgtaatttaagaccagaaagagcagtttgtgtggagctatgtcctaaagaccaaattagggctaatgaatatattgaagaagattaat

SEQ ID NO: 618842 - DNA, 547 bp, Homo sapiens
ttcttagtactacccatcatatctagtcctattaaagtcatactgttgcagcccaaggggaccctacttaagagcagtatgtgacttttcctgggcaataaaactttgcttcattttcatgcataacgtgttcctaaaaagctgtatgtatggagagaagttttgtatcaaatcatgttttctcatttaatcctattataatttcaagatggcagagcctctgaaaagyctttgatttcaacatttaatagatccaattgagtacattaacccttgctttaagaagtttttgatctttatcaacatcttgtctttttatgtcaattttttctggcttacacccatcttggaaaggttaattaaacggattttgcaaattggatgggcatagcgagctgtgtttccttatggaaacattcgaattccctgtggctcacaggacattgttcttgctcctgttgcctctgttgcgtctttgcaagcaagcccagaggtaagggctcaaaattctatactccaagtagacatctgcctaaagcacagacat

SEQ ID NO: 618843 - DNA, 547 bp, Homo sapiens
ttcttagtactacccatcatatctagtcctattaaagtcatactgttgcagcccaaggggaccctacttaagagcagtatgtgacttttcctgggcaataaaactttgcttcattttcatgcataacgtgttcctaaaaagctgtatgtatggagagaagttttgtatcaaatcatgttttctcatttaatcctattataatttcaagatggcagagcctctgaaaagcctttgatttcaacatttaatagatccaattgagtacattaacccttgctttaagaagtttttgatctttatcaacatcttgtctttttatgtcaattttttctggcttacacccatcttggaaaggttaattaaayggattttgcaaattggatgggcatagcgagctgtgtttccttatggaaacattcgaattccctgtggctcacaggacattgttcttgctcctgttgcctctgttgcgtctttgcaagcaagcccagaggtaagggctcaaaattctatactccaagtagacatctgcctaaagcacagacat

SEQ ID NO: 618844 - DNA, 547 bp, Homo sapiens
ttcttagtactacccatcatatctagtcctattaaagtcatactgttgcagcccaaggggaccctacttaagagcagtatgtgacttttcctgggcaataaaactttgcttcattttcatgcataacgtgttcctaaaaagctgtatgtatggagagaagttttgtatcaaatcatgttttctcatttaatcctattataatttcaagatggcagagcctctgaaaagcctttgatttcaacatttaatagatccaattgagtacattaacccttgctttaagaagtttttgatctttatcaacatcttgtctttttatgtcaattttttctggcttacacccatcttggaaaggttaattaaacggattttgcaaattggatgggcatagcgagctgtgtttccttatggaaacattcgaattcyctgtggctcacaggacattgttcttgctcctgttgcctctgttgcgtctttgcaagcaagcccagaggtaagggctcaaaattctatactccaagtagacatctgcctaaagcacagacat

SEQ ID NO: 618845 - DNA, 639 bp, Homo sapiens
accaagtatctttaaattaaggtgtgtacatttttttagatgtaatgctcttgcatacttaatcgaccacagaatagtttaaacataatgagacaaccaggtgggaagagctccctggcagaacctccagcgacctgcgcactgggaggaatgtgtactggggcggagctgtgggaagttctcgccctttgcagtgggcaggagcctggcctctctctcctgttctggggtgtggtacctgggatttaatctgcaaggcrggaagtgcactagcaggactctgatgactctggttttgcagagagtcctgttttcccttttttcctttttgcctgataaatcccatttttctcacccttcgagttatttgcaaggctaatttttcatggtcatgtgacaaggaccatctttagctgaactaaggaaaagtcctgcaacaataacttttctatgtactgagaaaccaaaaaatttgtatgacttgctttattgtcacacaataaattattagctttattttggtggtctgaactgaatctgcactatttctgaagtatgcctgtatctgtgttttttcgcagccttccaggtggcattaaataggcctattttacaaaaaagccctcccttccaccctca

SEQ ID NO: 618846 - DNA, 568 bp, Homo sapiens
agaaaacaccaggacaagatggattcactggggaattctaccaaatatttaagtaagaaatcataccaattctatacaatccttttcagaagataaaaccccagaaaaaaacttcctaattcattctrtgagggtagcattactctaatatcaaaacaagacaaagacattacgagaaagctacgaaacaatatatctcataaatacagatggaaaaatctttgacaaaatgttagcaaatcctcagatgctcaagacccttatataaaatggtgtaatatttacatataacctacacacttcctcttgtatatttaaaataatctctagattacttataatacctaatacaatgaaaatgctatgcaaatagttattatactgtagtgctttttaaatttgtattattttttattttgtactttttaaaaaaaattatttttgatctgcttgtttgattttttgttctgttgtttgaaatcacagatggaaacctgaggatatagagggctgactgtatgtgagcactccccaaaatgaaatactaagatatgaatttaacaaaata

SEQ ID NO: 618847 - DNA, 568 bp, Homo sapiens
agaaaacaccaggacaagatggattcactggggaattctaccaaatatttaagtaagaaatcataccaattctatacaatccttttcagaagataaaaccccagaaaaaaacttcctaattcattctatgagggtagcattactctaatatcaaaacaagacaaagacrttacgagaaagctacgaaacaatatatctcataaatacagatggaaaaatctttgacaaaatgttagcaaatcctcagatgctcaagacccttatataaaatggtgtaatatttacatataacctacacacttcctcttgtatatttaaaataatctctagattacttataatacctaatacaatgaaaatgctatgcaaatagttattatactgtagtgctttttaaatttgtattattttttattttgtactttttaaaaaaaattatttttgatctgcttgtttgattttttgttctgttgtttgaaatcacagatggaaacctgaggatatagagggctgactgtatgtgagcactccccaaaatgaaatactaagatatgaatttaacaaaata

SEQ ID NO: 618848 - DNA, 594 bp, Homo sapiens
caactacactgacttgatcaaayttacaaattatataaatgtattaaattatcacatgtaccttgaagctatgtatatttattatgtatcaataagaaattgtttccgaaaaagtgccccccaattgtttttatgggaactttcctcttctttgggaccagcccctgagagttaatatagatcaagttggaatacatttgttttgtttatattttaagcttataagtgagaaaggccatttctttctctctctctctaagaggtagatatgagctgaacataacagccgtacaattttaagcttccaggatgaaattttccttctccaagggatgaggtttttagtgctgaacccctgttagcctcaatagggaaggcaccgggatcaagatgccaaagaagagaccgagagtcagcaaaggagatggagttttattaggggcttccatacaggggagagagtccagtggccgtgggctgaatgggataactgctttatgtgcagaaacagtccagtggcagtgggctggacaagatatctgccttacatacagtccagtggcattgggctgggcaggaaaaccataaccactt

SEQ ID NO: 618849 - DNA, 478 bp, Homo sapiens
gggagggctacctcaagtctagccacttagtgcctattatgtgtacacatctatgactaaaattctgtctttgggcttcacagattatataaagtagcaaggagttttctcttttcagtaacttagtttatgagggggcctggatgctggttgtatggaaagagtctttacaaaatttccatttarggaagtagttggtgacgtttctgtgtattcacactgatactgcatattcatgaatcactgcttgtcaacacctccaggttaggttagatgagctccgtggtgcctctgacttggaaattctgggttttatgtggcttatcagccatttttcctgtctgcgcttacattgagccattttctaccaggagccttctggttgccaagggtcaagcttattgtattagcttggttctgtttgactgattccacattactaggaaggcttctataaatacaaccaagagggagagtt

SEQ ID NO: 618850 - DNA, 600 bp, Homo sapiens
tgcaccaataacaatcaagctgagaaacaaatcaggaagtcaatcccatttacaatagctacaaaaaatatatatacctaggcatacacttaatcaagggggtgaaggatctacacaaggaacactacaaaacactgataaaataaattttagataacmcaaaaaaatgaaccaacatttcacactcatagattggaagaatcaatattattaaaatgatcatactgcccgaggcaatttccagattcaatgcaatccctatcaaaataccagtgtcacttatttatttatttttgttttgttttgttttgggggaacaagtggtttctggttacatggataaggcctttagtggtaatttccaatattttggtgcacccatcacctgagcagtgtacacggtacctaatgtgtagtattttatccctcacccctctcctacccttccctctaattcgccaaagttcattatatcattcttatgcctttgtgtcctcatagcttagctcccaattataagtgagaacatatgatatttggtcttttttacctgagttacttcatttagaataatggtcttcaactccatccaggttgctg

SEQ ID NO: 618851 - DNA, 585 bp, Homo sapiens
ctcattgatttgcatttccctgataattagagatgtttagcattttttcatatgtttcttggctatttgtatatcttcttttgagaattgtctattcatgtcctttgcccactttttgatgggattatttgtgtttttcttgctgatttgtttgagttccttgtagagtctggacaytagtcttttatcagatgcatagtttgcaaatgttttctcccactctgtgggctgtctgtttactctgctgattatttctttctctgtgcagaagctttttagtttaattaggtgccatctatttatttttgtttttgttgtatttgcttttgggttcttggtcatgaactcttggcataagccaatgtctagaggagtttttccaatgttatcttttagaatttttatagtttcagatcttaaagtttttcatccatcttgagttgacatttgtatagggtgagagatgaggatccagtttcattcttttctctttttttgagatggtatttcgcccttgttgcccaggctggagtgcaatggcatgatctctgctcactgcaagctccatttctgagttccagcaat

SEQ ID NO: 618852 - DNA, 603 bp, Homo sapiens
ttgtagaatttgcagtaacattcaaaggatctgtgatttttttctgttttcttggtatgttcctactgtggttcttggacaaaagttcatactgtgagtctccacatgctgttctgttcatccaagtcagagctgcatattagccctgtctcttatctgctgtcttaacacaccctctcaccagtgtcattattcatagttagaaaaaaacatcctaaaattcatatggaacttaaagagagcctgagcarccaaagaaatcttaaacaaaaagaatgaagtggaaggcatcactttacttgtcttcaaattatcatccaaggctatagtacccaaaacaacaaagtactggcataaaaacagacacataaatcaatggaacagattagagaacccagaaataaagccacaaatatacagccaactgatatttgataaaatcaacaaaaatatacactgaagagaggacactttattcaataaatagtgcttggaaaaattggatagccacatgcagaagaatgacattggacctgtatctctctatatatacaaaaattaactcaagatgaattaaagacttatatttaagacatgaaacta

SEQ ID NO: 618853 - DNA, 668 bp, Homo sapiens
tccttttgaaatgtaatcattgaaacagatagcatccttgtctctcagtctgtatggtagagtaggagctaatttcaataagagataactagcaaacacagatggccaaatcacattccccagccttctccctgaagtcctctagtaatgtcccattagctcattccagcatttaaaaatcttgctgacttttgtttcagtagagttgggttcagtctttcttccctattgcattagtcttaaagaaagtctttcttgactgttttggtttgagctggtttgatgtaatttttcttttacattgccattactcttagtttaggacatctttgatgcatactctaagaagtgagtgtcagcacccatttacttcccttggatctgtggcccttagatccctgaataaattattgaaaacatagtttgattggctcaaaaaaagagcgaacgttttttaaagttatggaaaccacctttgcaaaatttaaaactgaggaaattatgacagtgaaagagatcagacctaacatattctatcttgcttctaacctttaagctctcctttttcattcctgggcgtaggtcaaactaaccttgggaaggtattcattatgtgtggtgattacatyatgattacataataattataaatgtttatggggtacatg

SEQ ID NO: 618854 - DNA, 378 bp, Homo sapiens
gtgtaatgatcaaatcagggtaattgggatatcyaatactttaaacattaatcatttgtttgtgttgggaacattccaaatgcattccttcagttattttaaaatacattatgcattattgttaactataatcattcctattgtgctacagaacactagttctcactcctactatctaactgtaatttttgtacacattagccaacctctctttatcctcgcctccccactgcacttctcagcctctggtaaccatcattctattctcacctccatgagatcaagttttttagctcccacatgttagtgagaacatgagatatttgtctttctatgtctggcttattttacaatgaaacatccttcagttccatccat

SEQ ID NO: 618855 - DNA, 378 bp, Homo sapiens
gtgtaatgatcaaatcagggtaattgggatatctaayactttaaacattaatcatttgtttgtgttgggaacattccaaatgcattccttcagttattttaaaatacattatgcattattgttaactataatcattcctattgtgctacagaacactagttctcactcctactatctaactgtaatttttgtacacattagccaacctctctttatcctcgcctccccactgcacttctcagcctctggtaaccatcattctattctcacctccatgagatcaagttttttagctcccacatgttagtgagaacatgagatatttgtctttctatgtctggcttattttacaatgaaacatccttcagttccatccat

SEQ ID NO: 618856 - DNA, 378 bp, Homo sapiens
gtgtaatgatcaaatcagggtaattgggatatctaatactttaaacattaatcatttgtttgtgttgggaacattccaaatgcattccttcagttattttaaaatacattatgcattattgttaactataaycattcctattgtgctacagaacactagttctcactcctactatctaactgtaatttttgtacacattagccaacctctctttatcctcgcctccccactgcacttctcagcctctggtaaccatcattctattctcacctccatgagatcaagttttttagctcccacatgttagtgagaacatgagatatttgtctttctatgtctggcttattttacaatgaaacatccttcagttccatccat

SEQ ID NO: 618857 - DNA, 651 bp, Homo sapiens
gttggacttaaggagaaggtagggagataggggtaggaagtttattcaaaaggataacagcagaacttcccaaacctagaagaagttatcagtattccagtacaaggaagttgattggacaccaatcagactacacccaaagaagactatttcaaggcctttaattattaatcttctaaaggtcaaagttaaagaaaggatcgttgattttttaacaagagtaaaaaaacaaataacatataatggagctccaatatgtctaacagcaaacttttcagtgggaattttcaggctgtgaaagagtggcatgacatatttaatatgctgaaggaaaaaccttaccctaaaatagcctatttaatcaaaatatacttcaaacatgaaggagaaataaagatttgcccaarcaaaagctgagggattttattaataccacacatgtcctacaagaaatgctaaatggagttattcagtctgaaaaaagggatgttaatgagcaataagaaatcatctgaaaatacaaaattcactgttaactgtaaacacagaaaaacaaagaatgttataacattgaaattgtggtatgtaaactgctcatatgttatgcagaaagactaaaagatgaaccaatcaaaaaaataactacaacaa

SEQ ID NO: 618858 - DNA, 412 bp, Homo sapiens
actgaacccaccttatgcgacaatcaaacccctaagggcatcaaagaagatacaagcaagcgaaacaaacaaatgtccaaaggacagcaacttcgagagttgaaggagcatcagcctatacagatgtaaaagaatcagtgcaagaactctggcaactcaaaaggcaagagtgtctccttacctctaaatgaccacacaagttccccaacaatttttyttaatcaggctgaaatagctaaaatgacagaaatagaattcagaagatagaaaggaatgaagatcatcaacaattaagagaaagttgaaatccaatccatggattctaaagaatacaataaatgatacagaagatgaaagatgaaatggtcattttcagaaaaaaacaaactgaactgacaaagatgaaaaactt

SEQ ID NO: 618859 - DNA, 638 bp, Homo sapiens
taaagtcaatcagaaatgacaaacgggatgttaccacttaccccataacaacaaaaaaactctcagagactactacaaatacctctatacacacaaatgaaaaaatgtaggataaatggatagattcctggacacatacaacctcccaagagtaaaccaggaataaattgaatccctgaacaaatcataagttcaaaatttgaatttgaatcagtaataaaaagcctactatccaaaaaagcccagaaccagatgaactcacagttgaattcaaccacttgtataaagaagagcargtattattcctatggaagctattccaaacattgaggagagggagtcctccctaagtcattctatgaggccaccatcatcctgataccaaaaccctggcagagacacaataacaacaacaataacaggtcaggccagtacccttgatgaacatagatgcaaaaatcttcagtaaaatattagcaaaccaaattgagcagcacatcaaaaagctaatccaccatgaccaagtaggctttatatctgggatgcaaggttgtttcaacacatgcaaatgaacaaatgtgattcattacataaacagaattgaaaacaaaaaccacatgattattttgttacatgca

SEQ ID NO: 618860 - DNA, 638 bp, Homo sapiens
taaagtcaatcagaaatgacaaacgggatgttaccacttaccccataacaacaaaaaaactctcagagactactacaaatacctctatacacacaaatgaaaaaatgtaggataaatggatagattcctggacacatacaacctcccaagagtaaaccaggaataaattgaatccctgaacaaatcataagttcaaaatttgaatttgaatcagtaataaaaagcctactatccaaaaaagcccagaaccagatgaactcacagttgaattcaaccacttgtataaagaagagcaagtattattcctatggaagctattccaaacattgaggagagggagtcctccctaagtcattctatgaggccacyatcatcctgataccaaaaccctggcagagacacaataacaacaacaataacaggtcaggccagtacccttgatgaacatagatgcaaaaatcttcagtaaaatattagcaaaccaaattgagcagcacatcaaaaagctaatccaccatgaccaagtaggctttatatctgggatgcaaggttgtttcaacacatgcaaatgaacaaatgtgattcattacataaacagaattgaaaacaaaaaccacatgattattttgttacatgca

SEQ ID NO: 618861 - DNA, 583 bp, Homo sapiens
aaatattttacgtatgagctaacataatcccctccaccttccttcacaatgacctaaaattttatgtcaaaagcacatgttgaagcagaggatccacataataagaacaaggcttaaattaagaagactaaatctatcttgggaaaggaagaagcaactggggatgatggcctagtgcctatcacttctttttgtatttttatttttataaagatggggtctcactttgttacccaggctggtttccaactcctggcctcaagtggtcctcccacctcagccacccaaagtactgggattacagrcatgaaccaccatgcccagccccaattatcacttcttaagccagacaaaacattgagctagtcatggagcagcttcctactcaaatttttttaaaattttttttattatacttgaagttttagggtacatgtgcccaacgtgcaggtttgttatatatgtatacatgtgccatgttggtgtgctgcacccattaactcgtcatttagcattaggtatatctcctaatgctatccctcgccactccctccacctcacaacaggccccagtgtgtgatgt

SEQ ID NO: 618862 - DNA, 511 bp, Homo sapiens
ttgttcttgatttaacagctgctggattctatttaaagctttgttgctatgtacctgttagaaaagattcacatctgctgtcaggcagacattgagtgcccacatccctcaattgtgttctttcttggcaacaaaagcatcctcagtaaagatgcaggcatatcattagttcttcatgaaacaggttgacactggctgggcttccctcaatctaccctaccacatatagctttgcatggcttccatgaaaagaaaagcagtaggttacaatctaacatggagatattttcctaagtaacttatataactttgtctgtgcttgaagaacaaattacccctgaagtcaacaatacaaagaaatcttttcagaaagggctgcaatggaattgatattaaagtttacatttacttatgaatataaagtaggaaaacacttaygcaaaggcatttagagtttaaagtaggatttcatccattctttgttttacatgtgagttcaggttgcaggact

SEQ ID NO: 618863 - DNA, 622 bp, Homo sapiens
acttatttacggaatttacaaagaccattaaataaagtctgtgactggaatgaaggcagttttaaatatctttaaacagggaaaattataattatatgttgcttgaagatattctttaaaatgaaattaatgttgaatttttaaactgtgtcttttaactttcttgttaggggtttatgagtataaattaatttattgaccartaaataattatttagaatttatgtagatatgctgctttatgctttcttgtaaggcaataatttgtaaaataagtaatatcacatttcatcagagaaacttctctggaatccttttatcacctgataacctttaatgaagcacaaattggcataactttttaaagatttttttgtttctagtgagtaattcaggtacaaataatgattgtcttaggatttgacagaattaatgggaacttagtacttttggagggcttctttgtttttacattgtcaactatgattacaaagtagtccattctcaaggtaaacaaaaatagtatgtaaagtaaatatgtagtttaaaaataagaaatgtataatcctactcctcagagatagctgttaatagattggtttatagttcttttctatttctt

SEQ ID NO: 618864 - DNA, 432 bp, Homo sapiens
tatctttctcgcatactggatgcttcctgccctcaaacatcagactccaagttcttcagcttttggactcttggacttacaccagtggtttrccaggggctctcaggccttccatgacagactgaagactgcactgtcggcttccctaattttgaggttttcagactcggactggcttccttgctctttagcttgtagatggtgtattgtgggacttcacctcatgattgtgtcaggcagtactgcttaataaattcccctttatattagttctgtctttctagataaccctgactaatacatgaagtaaggaaggagtccagtttcaattctctgcagatgggtagcctgttatcccagcaccatttattgaataggaagtcctttcctcattgcttgtttttgtcagctttgtcaaagattagattattg

SEQ ID NO: 618865 - DNA, 432 bp, Homo sapiens
tatctttctcgcatactggatgcttcctgccctcaaacatcagactccaagttcttcagcttttggactcttggacttacaccagtggtttaccaggggctctcaggccttccatgacmgactgaagactgcactgtcggcttccctaattttgaggttttcagactcggactggcttccttgctctttagcttgtagatggtgtattgtgggacttcacctcatgattgtgtcaggcagtactgcttaataaattcccctttatattagttctgtctttctagataaccctgactaatacatgaagtaaggaaggagtccagtttcaattctctgcagatgggtagcctgttatcccagcaccatttattgaataggaagtcctttcctcattgcttgtttttgtcagctttgtcaaagattagattattg

SEQ ID NO: 618866 - DNA, 540 bp, Homo sapiens
aaacactggttcaaactgctgaatcaaaagaaaggtttaattctgtgagatgaatgtgcaaatcaaaaagcactttctcagaaagcttccttcgactttttatctgaagatattttctttttcaccatagcctcaatgcacacccaaatatcccttcaaagactatacacagtgtttccaaactgctgaatgtgtagaaaggtttaactgtgggatgaatgcagacatcacaaagtggtttctcagatagcttccttaaatttttatcctgggatattcactttttctccattggcctcaatgagctcctaaatatccattcacatcatgaacaaaaacagtgtttccaaactgttgaatcaaaagtatgatttgacactgtgagatgagttcacacatcaccaagcagtttgtcagaaagcttctttctagtttttgtctgaagacattttctttttcaccataggcctcaatctactctgaaatatcccttaacagattytacaaaaacagtgtttccaaattgctgaatgagaaaaa

SEQ ID NO: 618867 - DNA, 548 bp, Homo sapiens
aatcaaaaagcactttctcagaaagcttccttcgactttttatctgaagatattttctttttcaccatagcctcaatgcacacccaaatatcccttcaaagactatacacagtgtttccaaactgctgaatgtgtagaaaggtttaactgtgggatgaatgcagacatcacaaagtggtttctcagatagcttccttaaatttttatcctgggatattcactttttctccattggcctcaatgagctcctaaatatccattcacatcatgaacaaaaacagtgtttccaaactgttgaatcaaaagtatgatttgacactgtgagatgagttcacacatcaccaagcagtttgtcagaaagcttctttctagtttttgtctgaagacattttctttttcaccataggcctcaatctactctgaaatatcccttaacagattctacaaaaacagtgtttccaaattgctgaatgagaaaaaaggattaactctgagagatgaaggcaygcaacacaaagtggtttctcagatagcatccttgcagtgtt

SEQ ID NO: 618868 - DNA, 603 bp, Homo sapiens
tgaatgcacacatcacaaagcggtttctcagatagcttccttggagtttttatcctgagatattccctttttctccattggcctcattgagctcccaaatatccattcacagcatgaagaaaaacagtggttcaaaactgttgaattaaaagaaaggattaattctgtgagatgaatggacacgttacaaggagttcctcagaaagcttcattctaatttttatctgaagatctttttcaccatagggctcaatgtgctcctaaatatcccttcrcagaatggacaaaaagagtgtttcaaaactattgaatcaaaagaaagaattaactctgtgagatgaatgcacacatcacaaattagtttctcaggatgcttctttcagtttttatatgaagatgtttactttttcaccataggactcaatgggttacaaaatatcccttagcagattctacaaaagcagtgtttccaaactgctgaatcaaaagaaaggattaactctgtgaaatgaatgcacacatcacaaagtggtttctgagatagcttccttgaagtttttatcctgggatattcactttttccccattggcttaaatgagttc

SEQ ID NO: 618869 - DNA, 537 bp, Homo sapiens
gatgaatgcacacttcacaatgtggtttcttagatggcttccatgaagtttttatcctgggatattcactttttatccattggtctcaatgagctccaaaatgtccattcgcagaatggacagaaacagtgtttccatattattgaatcaaaagacaggtttaactctgtgaggtgaatgtgcacatcacaaagaactttctcagaaagcttctctctagtttttatttgaagatacatgtttttcaccaaaggcctcaatgcactatgraatatcctttgcagattctacaaaaacagcatttccaaactgctggaacaaaagaaatgttgaattctgtgaggtgaatgcaaccatcacagagtactttctcagaaagcttctttctactttttatcttaaaatattttctttttcaccataggtctcaatgcattcccaaatatttcttcacagattctacagaaacagtgtttccaaactgctgaatgtaaagaaaggtttatctgtgcaagatgaatgcacacatccaaaagc

SEQ ID NO: 618870 - DNA, 314 bp, Homo sapiens
aaagcactttctcagaaagcttctttctgctgtttatcttaagatattttctttctactgtttatcttaagatattttctttttcaccaattcactcccaartatttctttgcagattgtacaaaaagagtgtttccaaactgctgaatgaaaagaaaggtttagctctgtgagatgaatgtgcacatcacaaagcagtttctcagaaagcttcttttcagtttttatatgaagatatttactttttcatcattggtccaatgggctcccaaatatcccttcatagattctacaaaaacagtctttccaaactg

SEQ ID NO: 618871 - DNA, 535 bp, Homo sapiens
aatgacttccaagtagtatagcaaaaaagctaattgggcattcctatatctactgttacagcctcccacttctttaccagtacaatctggatatctttagaacawacttatagcatatgcacttattcctcctaaataaaaaattctgatgactaaacaagagtggaacataattacaggagtaagtattgactgtggttattaatgacaaggattgtgagccagaaggcttggtttcaagtcctggttccacaattttctagctgtgagattgtggacaagatatgtaatcttactttgcctctgttttttcatttgtaaaatgaacatcataataattcaggccaagcagacctaatccaaagtccaaaattctacaaaatctgaaactttttgagcaccatataatgccacaagaggaaaatttcacacctgacctcatgtgactagttgcagtcaaaatgtaggtgcaaaacacatagtttattcagcatccccaagaggaaaataaaattactttcaggctatgtatata

SEQ ID NO: 618872 - DNA, 533 bp, Homo sapiens
aacaaatatttagttagattctactgtgtgccagcactgcactagacacctgattaaaaaaaaaaaaaacatttttttaaaaaaakcagtgaacaaggcatgacagacaaagaatctgcttgcatgaagcctagagagagtttggagcaataaacaaaacacataatatttaagttacaaactgaaatcattgttatgccagaaataaatggaaagcaggagagaaaataatggggatgagaggtggggaggttgagggaagtgttaggcaaattacataaggcatctctgaggaagtgacatttaagcaacacctgaaggaagaaaaggaaccagtcactcaaattgctggagctgcataatgcaggcagaaagaatagcagtgcagaggccctgctatggaaaagaacatgcatgagtcattgagcctgtagctagacactggtgagcaactggggcttggagggagaattacaggtctgaagatgcagggtttttctaatttgcatattctcagggtggaacagggcact

SEQ ID NO: 618873 - DNA, 533 bp, Homo sapiens
aacaaatatttagttagattctactgtgtgccagcactgcactagacacctgattaaaaaaaaaaaaaacatttttttaaaaaaatcagtgaacaaggcatgacagacaaagaatctgcttgcatgaagcctagagagagtttggagcaataaacaaaayacataatatttaagttacaaactgaaatcattgttatgccagaaataaatggaaagcaggagagaaaataatggggatgagaggtggggaggttgagggaagtgttaggcaaattacataaggcatctctgaggaagtgacatttaagcaacacctgaaggaagaaaaggaaccagtcactcaaattgctggagctgcataatgcaggcagaaagaatagcagtgcagaggccctgctatggaaaagaacatgcatgagtcattgagcctgtagctagacactggtgagcaactggggcttggagggagaattacaggtctgaagatgcagggtttttctaatttgcatattctcagggtggaacagggcact

SEQ ID NO: 618874 - DNA, 587 bp, Homo sapiens
cacctgttattttttgactttttaataatagccatcctgactagtataagatggtatctctttatttttttgatttgcacttctctaatgattagtgatactgagcttttcttcatatgcttgttggccacatgtatgtcttctttagaaaagtgtctgttcatgtcttttgcctactttttaaaggggttgtttttgtttcttgtatatttgctcaaagttccttgtaatttctggatattagacctttgtcasagcacaatttgtaaataaatactttctcccattctgtaggttgtgtttactctgttgatagtttcttttgctgtacagaagctcttaagtttaattagattccatttgtcaattcttgcttttattactattgcttttagggtctttttcatgaaatgtttgccaatttctatgtccacaatgatattgcctaagttgtcttccagggattttataattcagggttttacatttaagtctttaatccattgttacttgattatttttaatatggtgtaagaaaggggtccagtttcaatcatctgcataaggctagccagttatcccagcac

SEQ ID NO: 618875 - DNA, 621 bp, Homo sapiens
ccaggtatttaaggtacaaataaaatataaaaaataaaaaatttcactatacgaaacaaagaaaacagaaatttttctgttacagaagtagggaataggaactgggattattttctgttttagtttgaggtgtccctcatggtatgtcatcagaactctagagctccgtagacatgttaatagtataattagaaagggaatctcaggcggcatacaaacaagctacctcatctctccaaatctcagttcccacatctctaaaattgtagaattgagaggactaaatgtgacaaaacaaagaatgtacttaatccaatttccagcactgccctaattgaatgataataatttatytcataactagaatttaaatatcatgatgtttcaatttgtgaaagcatggcttggcctctatctctatctttgcatagaacttttaatattctttctatcagccctttaaccaatgtctactaaacatattgtaagtacagaccactatgccagagactagggatacaaagatgaaacagatcagttgtgttttcaaagagcttatggttgaccagagaaatgaagctcatagcatgttataataccagtgagagaaatagctaagaa

SEQ ID NO: 618876 - DNA, 541 bp, Homo sapiens
ttcttacagagtaagaggctaattctgacaaggttacatgctaagggatgatgaaatgaagaaytggaggataccttgagtggaaatgtttaaaaagagatgctttaataggaagaaagaatggagacccaaaagtacagagtattttcagggacctgcaattagttcagttggtttacagtttcaagttgcttaaagaaagtcaagattagagtgtagacttcagacagatttgtgaggtctgaaatactgagtgaacagaaatgtgctttatttaataggcaatggtgagccagtgaaagcttttgaatatgagagtggcatgctaactgctgtattttaggaagcctaacctaaaagcaccccatagtgtgtgttgcagagagaaaatattggaagcaagagactgatacagaacttactgaagtaatccataggaaaatggaggtgcatctctgacaatggagggaagagcttaatggtgattgaaaactgggaaggcagagcacttctttggaggttgtgttcccatagcatacac

SEQ ID NO: 618877 - DNA, 591 bp, Homo sapiens
gtttgtttaaaatgatggcacgtcctgaataagtctcgtgttgctgatcctgatgccaaaaacttagtgatatgtctcttctagtaaatggctgsctttccctcttatatttctttatgtttcttcccacttccaaaattttgatcaaatttaacttccttggaaaagatcaggtattcttcaaagaaagacgaagtgttacttgagaacccaagctgagacaaagcaatttgtttccaaagcaatcctgcctctcactgaagagtctaaaaaaccacagaatacaaagagacaaatagcgtatgcagaatcgtgatataagagttcactattcaactcagcactaaaaatatacaccaaactccaaaatgtcatctttgggacagtttatgtcccccatgtttagagcccaagctcccctcccttgcaatgtgatgaaatctttcccctgttcaatactcttgccactgtttccaggccactctcttctctggctcaatgtctgaggactcctaggaaacctcacttttttggtagctattctacacttccttgtttcaggcatcatttgggaatttctgttctgtaagc

SEQ ID NO: 618878 - DNA, 591 bp, Homo sapiens
gtttgtttaaaatgatggcacgtcctgaataagtctcgtgttgctgatcctgatgccaaaaacttagtgatatgtctcttctagtaaatggctggctttccctcttatmtttctttatgtttcttcccacttccaaaattttgatcaaatttaacttccttggaaaagatcaggtattcttcaaagaaagacgaagtgttacttgagaacccaagctgagacaaagcaatttgtttccaaagcaatcctgcctctcactgaagagtctaaaaaaccacagaatacaaagagacaaatagcgtatgcagaatcgtgatataagagttcactattcaactcagcactaaaaatatacaccaaactccaaaatgtcatctttgggacagtttatgtcccccatgtttagagcccaagctcccctcccttgcaatgtgatgaaatctttcccctgttcaatactcttgccactgtttccaggccactctcttctctggctcaatgtctgaggactcctaggaaacctcacttttttggtagctattctacacttccttgtttcaggcatcatttgggaatttctgttctgtaagc

SEQ ID NO: 618879 - DNA, 591 bp, Homo sapiens
gtttgtttaaaatgatggcacgtcctgaataagtctcgtgttgctgatcctgatgccaaaaacttagtgatatgtctcttctagtaaatggctggctttccctcttatatttctttatgtttcttcccacttccaaaatttkgatcaaatttaacttccttggaaaagatcaggtattcttcaaagaaagacgaagtgttacttgagaacccaagctgagacaaagcaatttgtttccaaagcaatcctgcctctcactgaagagtctaaaaaaccacagaatacaaagagacaaatagcgtatgcagaatcgtgatataagagttcactattcaactcagcactaaaaatatacaccaaactccaaaatgtcatctttgggacagtttatgtcccccatgtttagagcccaagctcccctcccttgcaatgtgatgaaatctttcccctgttcaatactcttgccactgtttccaggccactctcttctctggctcaatgtctgaggactcctaggaaacctcacttttttggtagctattctacacttccttgtttcaggcatcatttgggaatttctgttctgtaagc

SEQ ID NO: 618880 - DNA, 600 bp, Homo sapiens
tatgtgcaaacactatccttaaccatctgtggcaacaagagtgtttcactatcttagcttatttcttggagtgawtttttgagaaaattttttgggggggctacatcttctgcacccacttttaaaaatccactcatgtccatggtattcaaaatcttaaaagttacctctgggactttgtatgaaaacaggctcattggcttgaatcatttatgaaacaaataagctgactatatatgaaagaatactatttagagagctctcatcttaaacagctgttttattggaatacagcctcagaaactcccttggcaatatcaaaaagagcgtataaatcagatttacaacaaagtttatcccagcactttgggaggccgaggcaggtgaatcacaaggtcaggagttcgagaccagcctgggcaacatggtgaaacctcgtctctactaaaaaatacaaaaaattagctggacgtggtggcaggcacctgtaatgccagctactcaggaggctgagacaggagaattgcttaaacctgggaggtggaggttgcagtgagccaagatcacgccattgcacttcagcctgggtgacagtttgag

SEQ ID NO: 618881 - DNA, 600 bp, Homo sapiens
tatgtgcaaacactatccttaaccatctgtggcaacaagagtgtttcactatcttagcttatttcttggagtgaatttttgagaaaattttttgggggggctacatcttctgcacccacttttaaaaatccactcatgtccatggtattcaaaatcttaaaagttacctctgggactttgtatgaaaacaggctcattggcttgaatcayttatgaaacaaataagctgactatatatgaaagaatactatttagagagctctcatcttaaacagctgttttattggaatacagcctcagaaactcccttggcaatatcaaaaagagcgtataaatcagatttacaacaaagtttatcccagcactttgggaggccgaggcaggtgaatcacaaggtcaggagttcgagaccagcctgggcaacatggtgaaacctcgtctctactaaaaaatacaaaaaattagctggacgtggtggcaggcacctgtaatgccagctactcaggaggctgagacaggagaattgcttaaacctgggaggtggaggttgcagtgagccaagatcacgccattgcacttcagcctgggtgacagtttgag

SEQ ID NO: 618882 - DNA, 600 bp, Homo sapiens
tatgtgcaaacactatccttaaccatctgtggcaacaagagtgtttcactatcttagcttatttcttggagtgaatttttgagaaaattttttgggggggctacatcttctgcacccacttttaaaaatccactcatgtccatggtattcaaaatcttaaaagttacctctgggactttgtatgaaaacaggctcattggcttgaatcatttatgaaacaaataagctgactatatatgaaagaatactwtttagagagctctcatcttaaacagctgttttattggaatacagcctcagaaactcccttggcaatatcaaaaagagcgtataaatcagatttacaacaaagtttatcccagcactttgggaggccgaggcaggtgaatcacaaggtcaggagttcgagaccagcctgggcaacatggtgaaacctcgtctctactaaaaaatacaaaaaattagctggacgtggtggcaggcacctgtaatgccagctactcaggaggctgagacaggagaattgcttaaacctgggaggtggaggttgcagtgagccaagatcacgccattgcacttcagcctgggtgacagtttgag

SEQ ID NO: 618883 - DNA, 545 bp, Homo sapiens
ttggcaaatgaatttctcttcctctattaccaaatacttggggcaaggaagacatagaaacagaaaatcatccactggtgggactgggagtccttgcacccttaacttgttcctatccagyccacagtttgctcaaattatatccaaatagtaagaaggggtattctgaatatgtttgagtgatgtagctagttcataatgttttcaggtcaaattatcctgagaaacttgtacaataagtaaagaaaatgttacttgaacttagaaaaagttactcaaacaataaaaaaaccttatttaaacttagttgctgaaatacatacttactcttaactataggaagacatttaggtgttgtcctgaataggcaagctgtctcccaaaaggtgtccttagtgactttcattctttctgagaatctaaaaggtcaaagctagaattatctgaaccatctaactgcaatcatgaaattaacttgatatctataaaatcttgatacctattttattttattttattttgctttaagttctgagatatatgtg

SEQ ID NO: 618884 - DNA, 500 bp, Homo sapiens
tgcgtaggaacctaattttgataagcactattagcaaacacagatggcctcatcacattgaccaacctttccccaaacatcagtccatgcttttcctttagcacactccaacatttgcagagcctcttgctttttgtttcagtgaagttgaggctttctaacatactataaattgatatgtctacttattgattagaagacagaaattaatcactggatttcattatcacgctgacttttaggattaaaagcagcctgtggttacagatgcaacatctttacatttctaagaaaaacaggagagatttgtctttggctcctttggacctcactgattaatggaaaagagaggattgagtaggtttggatgatacagyacaactcagtttaaagttccagacaaagaaagcaacggttatttttcactccagagagtgaatcattctttggggccacaaaagagaagatttgaagaataagcagggacatctagaaggtgg

SEQ ID NO: 618885 - DNA, 500 bp, Homo sapiens
tgcgtaggaacctaattttgataagcactattagcaaacacagatggcctcatcacattgaccaacctttccccaaacatcagtccatgcttttcctttagcacactccaacatttgcagagcctcttgctttttgtttcagtgaagttgaggctttctaacatactataaattgatatgtctacttattgattagaagacagaaattaatcactggatttcattatcacgctgacttttaggattaaaagcagcctgtggttacagatgcaacatctttacatttctaagaaaaacaggagagatttgtctttggctcctttggacctcactgattaatggaaaagagaggattgagtaggtttggatgatacagtacaactcagtttaaagttccagrcaaagaaagcaacggttatttttcactccagagagtgaatcattctttggggccacaaaagagaagatttgaagaataagcagggacatctagaaggtgg

SEQ ID NO: 618886 - DNA, 482 bp, Homo sapiens
tcctcctgcccccaggcccagccactgaacacgctcctggaccttgacgtgctgggcttccatgttgtcctgtcttggctcagacaccacagaaggatcactccccttccagtgataatggagttcttcattactaaagtgtacagtcatgaaatccattactaaccctgagactctcaggcaagaggtgacaggtcagctaagtgggagaacagtagcaaagtctaatggaataagacggggaggcttccaatcagagaaggacagtaaacacagatacaagctgggtggcctccacacctgtattcagtcccccaaggtactgtggggaagaagacatctgcaactcagtaaaatcacatctaaatcctyaaaaaggattcttctcctctatacattagtcaaaaccctcatgggtactttatccagatatgaacataaaatagtattttctgcacatctaattagcaataattcaggac

SEQ ID NO: 618887 - DNA, 608 bp, Homo sapiens
tcacaatagttgaaaattggaagcarcttccatgaccaatgaataggaaaaaagtagagaaaatcgctggggtggggggactctacaataaaaatcataatgctttccaaatgttttagaaagaatgttgatgctacgggggaaatgagggagcttcctaatgaagcatattaaacttaatagatctcaaaggcgactcttgttttcacactcaaatatggctcttccttttcttctctcagtgaaaagcactgagttgggaaaagtccccatcttctcccagtttctcaagtcaaaaatctagaatttgttcttgattctttcctttctctctcactggacagccactgctacaatcagtcctgctggggctgctttcaaatgaatacctctgggccatccccttccctatcttcaccctcccccttcctcatcttcctctcctccctcttcctccctccttgtcccttatctactccctcccctccttgcccttctcttcatctcccttcccctattactccctcctctccctatctgctcctgtccctccccttcccaccccaccttacccggccatcacttcattctcactaggtctcctctct

SEQ ID NO: 618888 - DNA, 608 bp, Homo sapiens
tcacaatagttgaaaattggaagcaacttccatgaccaatgaataggaaaaaagtagagaaaatcgctggggtggggggactctacaataaaaatcataatgctttccaaatgttttagaaagaatgttgatgctacgggggaaatgagggagcttcctaatgaagcatattaaacttaatagatctcaaaggcgactcttgttttcacactcaaatatggctcttccttttcttctctcagtgaaaagcactgagttgggaaaagtccccatcttctcccagtttctcaagtcaaaaatctagaatttgttcttgattctttcctttctctctcactggacagccactgctacaatcagtcctgctggggctgctttcaaatgaatacctctgggccatccccttccctatcttcaccctcccccttcctcatcttcctctcctccctcttcctccctccttgtcccttatctactccctccyctccttgcccttctcttcatctcccttcccctattactccctcctctccctatctgctcctgtccctccccttcccaccccaccttacccggccatcacttcattctcactaggtctcctctct

SEQ ID NO: 618889 - DNA, 566 bp, Homo sapiens
tcttggcatggtatatctttttccatccttttacatctaacctatttgcatctttatatttaaactacatttcttggccaggtgttgtagctcacacctgtaatcccagcactttgggaggccaaggcaggtggatcacctgatttcaggagtttgagaccagcctggccaagatggtgaaactctgtctctactaaaaatgcaaaaattatctgggtgtggtggcaggggcctgtattcctagctatttgggaggctgaggcaggagaatcgcttgaacctgggaggcagaggttgcagtgagatcacgctgttccactccattgcactccagcctgggcaacaagaacaaaactccatctccaaaaataagtaaataaataaagtacatttcttgcaagcmaaatacaaccaactttaaaaaaaatccaatctgacaacctgtcttctaaatcaatttaaatgtaatgtaattcctaatatggttgagtctcttatcttgctattgttttctactcatcccatctgtcctttattctcttttacgtctttttctgtcttctttt

SEQ ID NO: 618890 - DNA, 550 bp, Homo sapiens
tttgtccagttttgtattcgtttctcttctgatttgtataaattcttcatattccataaacactactcctttttcataggtgttgcaaatcatcttctttccactaatggcttctattccctttttataaagtcttttgataaactaaaatgttaatattattgttgtaaaatgaaccaatgttttacttcatagttttgtgttttgggtatgaaatccttgtccactggaaggtataaactacttcttcatattttytgaattttaaagttttttattttttattttaactcattagaaattacgtttgtttttttgtgtccagtgacaggtaggggtccaattttatattttttctcatctgtaactaatgtcccagtaccattaatatttagagttgcccattctttcccaatggacctgaagcagaagatctcatgcactgggttcccttataattcggctatttctacattttgagctgtttgtctttcttatataactctgtagtcatgtaagtagtcttatgtatggagtctcccttctgatg

SEQ ID NO: 618891 - DNA, 550 bp, Homo sapiens
tttgtccagttttgtattcgtttctcttctgatttgtataaattcttcatattccataaacactactcctttttcataggtgttgcaaatcatcttctttccactaatggcttctattccctttttataaagtcttttgataaactaaaatgttaatattattgttgtaaaatgaaccaatgttttacttcatagttttgtgttttgggtatgaaatccttgtccactggaaggtataaactacttcttcatattttttgaattttaaagttttttattttttattttaactcattagaaattacrtttgtttttttgtgtccagtgacaggtaggggtccaattttatattttttctcatctgtaactaatgtcccagtaccattaatatttagagttgcccattctttcccaatggacctgaagcagaagatctcatgcactgggttcccttataattcggctatttctacattttgagctgtttgtctttcttatataactctgtagtcatgtaagtagtcttatgtatggagtctcccttctgatg

SEQ ID NO: 618892 - DNA, 569 bp, Homo sapiens
agacccccagcaacatttcgaatcagagtttcacatsaaatatgtaaaattgccaaacttgaactgaaaggcatcttaatttcatcattgaaatggtaacttttgcaataaatattttgaatattactgaaaaataagagaatgaaaggcggagggcatgtcatttttttatgtgtagcttgaacactgccatgatccacctcattgccataatatttttataatttaattttctcattaactctcattcactatgaaaaatatttgccatgttgcacaaggataaccaaaagatattcctcagagaaggcacacagataaatcagtaagcttggagctcatgtctgttatgtagatttggaattattccaaaggcttacatagtttgctatgttttgctgaaacaagaacttagactgtactctctccaccactcaagaatgcagtgtctgccgggcgcggtggcttctgcctgtaatcccagcactttgggtggccgaggacggaggatcatgaggtcaggagtttgagagcaggcagtttgagaccatctggccaacatggtagac

SEQ ID NO: 618893 - DNA, 569 bp, Homo sapiens
agacccccagcaacatttcgaatcagagtttcacatgaaatatgtaaaattgccaaacttgaactgaaaggcatcttaatttcatcattgaaatgstaacttttgcaataaatattttgaatattactgaaaaataagagaatgaaaggcggagggcatgtcatttttttatgtgtagcttgaacactgccatgatccacctcattgccataatatttttataatttaattttctcattaactctcattcactatgaaaaatatttgccatgttgcacaaggataaccaaaagatattcctcagagaaggcacacagataaatcagtaagcttggagctcatgtctgttatgtagatttggaattattccaaaggcttacatagtttgctatgttttgctgaaacaagaacttagactgtactctctccaccactcaagaatgcagtgtctgccgggcgcggtggcttctgcctgtaatcccagcactttgggtggccgaggacggaggatcatgaggtcaggagtttgagagcaggcagtttgagaccatctggccaacatggtagac

SEQ ID NO: 618894 - DNA, 566 bp, Homo sapiens
accctccacacacacatacacacacacacacacacacacacacacacacacatacggaggcaaggaggaggctactgtgtcttgggcacttgcctaggcattgcctgaaaattacagataattgtcactaaccaatctaattgcaactgttaaacgaaataaccctcaattcagagttatttcctattcaaatgcaatacagtttttstttctaatatattaggttgcacagaaacactaagattgtacttaaatatggactgaggaccattttaaacgttacagtaaagaagtgatcacaatttcatctggttatattaaaagtgttctggaatggtattgggaattgatttttttttttttgagatggggctctcactatgttgcccagggtggtctctatcttctgggatcaagtgatccttctgcctcagtttcccatgtggctggtactactggtgcatgccactgtgtctgtcacattttttaaaatcataaactgattctaaattataaataaatcaaaaggaaaggcagaggacttactatgctgctatcttgacaac

SEQ ID NO: 618895 - DNA, 372 bp, Homo sapiens
gtgggtaagaaatttaatgtagctgccgattctgtgcggttctggggaaataatagtttaaaatcttctaatttgactctaatttcacttctaactccaacctgtgctcctgaagcaagacgtttttggaccgtcagcaggcagatgaaggcctgagagtggtaggagagctattgtgggctttcctacctcagggctagaggagggcttggagaccggcaaaggaaaagatggaccatttcaagtctcagagcaaaaataytaagagacaaagatgggatggaaaataaaagtgacgtggtaatcgatagaggaaatttacacaaatctaaaaattctgaaaaagaaaaagaagcagagacaataaatatg

SEQ ID NO: 618896 - DNA, 552 bp, Homo sapiens
tgaagtgacgataagggagttatctggtgatgctggtgggaagatacagcggctgtgcgaggtgattatacaacatgacttacaggcgagtactcatgcgcaccctctgccccaacaacctgacagctcttcccctgccatcttccatggtccacacaaacatgcatgagtgtgtcctgggcagctgctccctcacctttgtgcatcacagcagggtcctcttgctctgggtccttatgacatgagctattctcagtgtctggtatgttcctgacactgtacaatggctccaatcagccctactgctgtgtggaacaaagagaaactatggttatatagtgtgtatttgcataaagaccgttttcaaagagcaagaakaatataaaagaaataaatttgtgcctgtatatagactccctaaagctgtctctggcctccagtttaaaaacatctagaatctagccaggcccttgcctttccttgaagcacacttatctgcctagagttaggtgtaaataattttcttctatttcccaccccacgattctgaag

SEQ ID NO: 618897 - DNA, 573 bp, Homo sapiens
gggaggttgcagtgagtagagatagtgccattgttctccagcctggtgacagagtgagactctatctggaaaagaaaaaaaaaaagaagaatagtggtgtacttaagagacaaagaatattgccattaaggatgtttttaagaagccaagtgcaagatcaaaaaagacaaaggagagcattacataatggtaaagagttcaattcaacaagaagatctaactatcctaaatatatgtgcacccaatacaggagcacccagattcataaagcaagttcttagagacttacaaagagacacggagtctcacacaataacagtgggagatttcaacactccactaacagttattagacagatcaccaaggcagaaaattaaaaaacatattcaggacctgaactcaayattagatcaaatgtatctgattgacttctacagaactctctactcaaaaacaacagaatatacattcttctcatcaccacatggcacatactctaaaatcagccacataattggacataaaacaacgcttagcaaatgtaaaagaaccgaattcttaccaaacacact

SEQ ID NO: 618898 - DNA, 559 bp, Homo sapiens
catgaagacagtgtaagaaataataaaatgaacactgatgtacacattacctgcctaagaataaaaaactacccgtatttttagagtccttaacactgtcctgttaatgagtcccatttcttatctttataattttgccaaaataaatgcattagtaaaggacattgagcattattgtttcacatatttttcagtttaaacaaatggaatcacactgaatatatttttctgaaattgctttttagttcaatatttaatttgtaaaattcattcttatgatatgtttgtctgtactttctgtgcattgatttagagtattccatcacaggataatactataatgagcattccattttattagattggggttatccatttttttctattacaaaactagatgtccttttcttgtatgagtctcctggacataaaaggtagattttctctaaggtataaacccaacattcaaataattgtgtcaaaagatttgtatactgttggttttactacrttaaaatgaactgttttccaatttatgctcccaagaaaagttaaaggt

SEQ ID NO: 618899 - DNA, 432 bp, Homo sapiens
ctgaatggcacgatttccctaaggcgctttgggaaaacttacctgattstcctcttagaagaaacaggtatcggccaactgggatagtggtggtgctccacgatgagactatcccaaatgctacatcaagttacactggaaacagctccagtgaaagactttagctccataaggagaacttattagtgggatacatagcatggttcttccctgggagtctctaacctggtcaccccattcgcacatttaaaattagtttactaaagactgcgggaataaaccttagaaaaccagtaggtgcaggagaggggctaaggaaagggagttagttaagggtaaaagaaacaatcatttggactctctcacacgcattctatttcctggttttatcttttttggtgatgaaatcaatgatagctgaataaggctcac

SEQ ID NO: 618900 - DNA, 432 bp, Homo sapiens
ctgaatggcacgatttccctaaggcgctttgggaaaacttacctgattctcctcttagaagaaacaggtatcggccmactgggatagtggtggtgctccacgatgagactatcccaaatgctacatcaagttacactggaaacagctccagtgaaagactttagctccataaggagaacttattagtgggatacatagcatggttcttccctgggagtctctaacctggtcaccccattcgcacatttaaaattagtttactaaagactgcgggaataaaccttagaaaaccagtaggtgcaggagaggggctaaggaaagggagttagttaagggtaaaagaaacaatcatttggactctctcacacgcattctatttcctggttttatcttttttggtgatgaaatcaatgatagctgaataaggctcac

SEQ ID NO: 618901 - DNA, 432 bp, Homo sapiens
acaacgcagctctctgaatggcacgatttccctaaggcgctttgggaaaacttacctgattctcctcttagaagaaacaggtatcggccaactgggatagtggtggtgctccacgatgagactatcccaaatgctacatcaagttacactggaaacagctccagtgaaagactttagctccataaggagaacttattagtgggatacatagcatggttcttccctgggagtctctaacctggtcaccccattcgcacatttaaaattaktttactaaagactgcgggaataaaccttagaaaaccagtaggtgcaggagaggggctaaggaaagggagttagttaagggtaaaagaaacaatcatttggactctctcacacgcattctatttcctggttttatcttttttggtgatgaaatcaatgatagct

SEQ ID NO: 618902 - DNA, 427 bp, Homo sapiens
ctgaatggcacgatttccctaaggcgctttgggaaaacttacctgattctcctcttagaagaaacaggtatcggccaactgggatagtggtggtgctccacgatgagactatcccaaatgctacatcaagttacactggaaacagctccagtgaaagactttagctccataaggagaacttattagtgggatacatagcatggttcttccctgggagtctctaacctggtcaccccattcgcacatttaaaattagtttactaaagactgcrggaataaaccttagaaaaccagtaggtgcaggagaggggctaaggaaagggagttagttaagggtaaaagaaacaatcatttggactctctcacacgcattctatttcctggttttatcttttttggtgatgaaatcaatgatagctgaataagg

SEQ ID NO: 618903 - DNA, 432 bp, Homo sapiens
ctgaatggcacgatttccctaaggcgctttgggaaaacttacctgattctcctcttagaagaaacaggtatcggccaactgggatagtggtggtgctccacgatgagactatcccaaatgctacatcaagttacactggaaacagctccagtgaaagactttagctccataaggagaacttattagtgggatacatagcatggttcttccctgggagtctctaacctggtcaccccattcgcacatttaaaattagtttactaaagactgcgggaataaacctyagaaaaccagtaggtgcaggagaggggctaaggaaagggagttagttaagggtaaaagaaacaatcatttggactctctcacacgcattctatttcctggttttatcttttttggtgatgaaatcaatgatagctgaataaggctcac

SEQ ID NO: 618904 - DNA, 432 bp, Homo sapiens
acaacgcagctctctgaatggcacgatttccctaaggcgctttgggaaaacttacctgattctcctcttagaagaaacaggtatcggccaactgggatagtggtggtgctccacgatgagactatcccaaatgctacatcaagttacactggaaacagctccagtgaaagactttagctccataaggagaacttattagtgggatacatagcatggttcttccctgggagtctctaacctggtcaccccattcgcacatttaaaattagtttactaaagactgcgggaataaaccttagaaaaccagtaggtgcaggagaggggctaaggaaagggagttagttaagggtaaaagaaacaatcatttggactctctcacacrcattctatttcctggttttatcttttttggtgatgaaatcaatgatagct

SEQ ID NO: 618905 - DNA, 592 bp, Homo sapiens
ctttttttctacaaaattatggtataaacttgctcaattttctatcttattgctaatacatcttacaggcacacagtttgtaaagtaaaccccttaagggctgagtgcgtagagtgtgctgcaaggtacaagaaataagctaaaartgagcatataaacctacatctggaccaacacggtactgaatgctggagtctgagcaaagaatgagtgatgaaaacagcaaagctggaaaaaaatgttactaataataatttctgaaaagtctattaatgaaaacttttccaaaatagcccaggaaaccaaaaagacaatgttctgtatggaaacactgtaggaagttacagttttgcattcataaagtaccgtggctcctgttttatgagacagtaaaagcttaccacaatctagaggtagtttttactctaagaaggatgattgtattactagactgtgccgtataatattatgcacgtggttcttgtactaaatgtagcccaaagagtctgctgcaatttcgaagaatccgaacaaaagcataaccgaagttcaggaatgaaagcaaggtacaactgccaagtttcgcatgcaa

SEQ ID NO: 618906 - DNA, 592 bp, Homo sapiens
ctttttttctacaaaattatggtataaacttgctcaattttctatcttattgctaatacatcttacaggcacacagtttgtaaagtaaaccccttaagggctgagtgcgtagagtgtgctgcaaggtacaagaaataagctaaaaatgagcatataaacctacatctggaccaacacggtactgaatgctggagtctgagcaaagaatgagtgatgaaaacagcaaagctggaaaaaaatgytactaataataatttctgaaaagtctattaatgaaaacttttccaaaatagcccaggaaaccaaaaagacaatgttctgtatggaaacactgtaggaagttacagttttgcattcataaagtaccgtggctcctgttttatgagacagtaaaagcttaccacaatctagaggtagtttttactctaagaaggatgattgtattactagactgtgccgtataatattatgcacgtggttcttgtactaaatgtagcccaaagagtctgctgcaatttcgaagaatccgaacaaaagcataaccgaagttcaggaatgaaagcaaggtacaactgccaagtttcgcatgcaa

SEQ ID NO: 618907 - DNA, 592 bp, Homo sapiens
ctttttttctacaaaattatggtataaacttgctcaattttctatcttattgctaatacatcttacaggcacacagtttgtaaagtaaaccccttaagggctgagtgcgtagagtgtgctgcaaggtacaagaaataagctaaaaatgagcatataaacctacatctggaccaacacggtactgaatgctggagtctgagcaaagaatgagtgatgaaaacagcaaagctggaaaaaaatgttactaataataatttctgaaaagtctattaatgaaaacttttycaaaatagcccaggaaaccaaaaagacaatgttctgtatggaaacactgtaggaagttacagttttgcattcataaagtaccgtggctcctgttttatgagacagtaaaagcttaccacaatctagaggtagtttttactctaagaaggatgattgtattactagactgtgccgtataatattatgcacgtggttcttgtactaaatgtagcccaaagagtctgctgcaatttcgaagaatccgaacaaaagcataaccgaagttcaggaatgaaagcaaggtacaactgccaagtttcgcatgcaa

SEQ ID NO: 618908 - DNA, 592 bp, Homo sapiens
ctttttttctacaaaattatggtataaacttgctcaattttctatcttattgctaatacatcttacaggcacacagtttgtaaagtaaaccccttaagggctgagtgcgtagagtgtgctgcaaggtacaagaaataagctaaaaatgagcatataaacctacatctggaccaacacggtactgaatgctggagtctgagcaaagaatgagtgatgaaaacagcaaagctggaaaaaaatgttactaataataatttctgaaaagtctattaatgaaaacttttccaaaatagcccaggaaaccaaaaagacaatgttctgtatggaaacactgtaggaagttacagttttgcattcataaagtaccgtggctcctgttttatgagacagtaaaagcttaccacaatctagaggtagtttttactctaagaaggatgattgtattactagactgtgccgtataatattatgcacgtggttcttgtactaaatgtagcccaaagagtctgctgcaatttygaagaatccgaacaaaagcataaccgaagttcaggaatgaaagcaaggtacaactgccaagtttcgcatgcaa

SEQ ID NO: 618909 - DNA, 617 bp, Homo sapiens
cctctaggtgccttcaagatttttctcattgtctgtggttttcagcaatttggataccttacatatcgtttttatgaatcttccacagagatcagtggacacatgtggcacaaagaacatgtgaattaagaatgcactcctgaataatatattttacrtatatgttattgagcatattcttaaatataaataatttcttgtgaatatattttgattaataaaaatatattaataaatgttaactcatgcatattcttcttactcaaaaatatgttcttatattaattactccctctctcttccttctagactcaaaggtaacatcaggggctagaacagagacacagaaatgttccttaaaatgtcaaaatgaaatattgtctattaaaacagaagaattaaaataaacaagagaagttaggtattggtcatttgatatctgtaacctgcagcttaaacaggaaactaggctggacccttttcttgattcagatgccaaaagctaaatgttcccttcctttctctctttgcagactagacatgacatttggtattcctaatatgcccacttggaggaaattgccagcttaggccaaccagggtgaaatgcatgcact

SEQ ID NO: 618910 - DNA, 536 bp, Homo sapiens
cagatgccaaaagctaaatgttcccttcctttctctctttgcagactagacatgacatttggtattcctaatatgcccacttggaggaaattgccagcttaggccaaccagggtgaaatgcatgcacttataaactcataagcccaataataattttcagaaggaggcactcattcacttcggcttataaacttgcaaatctgtagattcattagtctatcacttacatgggaaagacaaaatttatatttaattgttgagacttgacttcaaaattttcaagaatatcaacatttgtttttgttgtgcacctctctgtcaaaagrtaaatacgtagtacataatcattattatttattaataatatactctgcatggtcttacatttcacagttcatgcattgtttattcattaatataacctgttaacgttaatatgcaccacattaccgagagcccttgtcaactcctcagaagcaactaactcccaaggtaactatgacaacgaatctcttaatgcttaaagtgtaacaaaa

SEQ ID NO: 618911 - DNA, 536 bp, Homo sapiens
cagatgccaaaagctaaatgttcccttcctttctctctttgcagactagacatgacatttggtattcctaatatgcccacttggaggaaattgccagcttaggccaaccagggtgaaatgcatgcacttataaactcataagcccaataataattttcagaaggaggcactcattcacttcggcttataaacttgcaaatctgtagattcattagtctatcacttacatgggaaagacaaaatttatatttaattgttgagacttgacttcaaaattttcaagaatatcaacatttgtttttgttgtgcacctctctgtcaaaagataaatacgtagtacataatcattattatttattaataatatactctgcatggtcttacatttcacagttcatgcattgtttattcattaatataacctgttaacgttaatatgcaccacattaccgagagcccttgtcaactcctcagaagcaactaactcccaaggtaactatgacaacraatctcttaatgcttaaagtgtaacaaaa

SEQ ID NO: 618912 - DNA, 235 bp, Homo sapiens
catgtcataggaatgtgggggccaagaagagggattctagcttttgggtagatacaattgcagataataacaataacttacaaggtgcctaaaatatcaagttaccgttctaaatgtgttagatctattggttcatatagtgcttgcaaaagcccttgaagtatasttttattatacttaccattatataaatagagaaactaaggcagggagaggttatgttgttccaggttca

SEQ ID NO: 618913 - DNA, 235 bp, Homo sapiens
catgtcataggaatgtgggggccaagaagagggattctagcttttgggtagatacaattgcagataataacaataacttacaaggtgcctaaaatatcaagttaccgttctaaatgtgttagatctattggttcatatagtgcttgcaaaagcccttgaagtatagttttrttatacttaccattatataaatagagaaactaaggcagggagaggttatgttgttccaggttca

SEQ ID NO: 618914 - DNA, 570 bp, Homo sapiens
  misc_feature 1, 2, 3, 4, 5, 6, 7, 8, 9, 10, 11, 12, 13, 14: n = A,T,C or G
nnnnnnnnnnnnnncttgatctgtttgatgtctagtctaaagtttgataatggcaactgacccatttctaagagaaattaaaatggataacatgcatgtgatattctgtgaacagtgcatgacttcttttaatttatttaaggtaactatagatgtgtagttagggctttaaaccaaactggtacgatttattttctgctaaattacaaagttatttgattgaattgacaagtaacaatgctttgttttatttttaattcgttactgggcacagtcacatttggagaatgtaagattatatasaaaaccttgaaccacctttaaataactatatttttatttattaagccacaaacagtttagttatgttgttatgagcaaatatatttactattttttctctgcaataggaatagagatttcttttgctcttctatctcaactgaaaaggatatattttctggatcactgccattggctccttctatagtatttaaaaaatatatgcatatcatagtgttaggcttctataaatacactactaacttctcttcactataaatgaacttg

SEQ ID NO: 618915 - DNA, 570 bp, Homo sapiens
  misc_feature 1, 2, 3, 4, 5, 6, 7, 8, 9, 10, 11, 12, 13, 14: n = A,T,C or G
nnnnnnnnnnnnnncttgatctgtttgatgtctagtctaaagtttgataatggcaactgacccatttctaagagaaattaaaatggataacatgcatgtgatattctgtgaacagtgcatgacttcttttaatttatttaaggtaactatagatgtgtagttagggctttaaaccaaactggtacgatttattttctgctaaattacaaagttatttgattgaattgacaagtaacaatgctttgttttatttttaattcgttactgggcacagtcacatttggagaatgtaagattatatacraaaccttgaaccacctttaaataactatatttttatttattaagccacaaacagtttagttatgttgttatgagcaaatatatttactattttttctctgcaataggaatagagatttcttttgctcttctatctcaactgaaaaggatatattttctggatcactgccattggctccttctatagtatttaaaaaatatatgcatatcatagtgttaggcttctataaatacactactaacttctcttcactataaatgaacttg

SEQ ID NO: 618916 - DNA, 657 bp, Homo sapiens
tcttctgtgcagtacaatttttctgtaaaacaactgtacatgtatgtggactttgtttctagatgaccccttctcctctattattatctttgtctctgtgccaacaccaccatactgttttaataactaaacaccaagtatattaaatttgcatttatgtaaaaatttaataaaacttagagtaaatgatttcaaaattagtaaaaaaattagggacaaatttatttgatttcctgaaagaaaatgcaaaattacattttagagaattatttgaatataaataactaggtcaaaaaaacaaaaaattatttcatcttctaatataccagagcatcaaagttttgtctctaatgtaaatctaagttacacaaaacaatgcgttttctatgtgaatgcctcagtgaggtgccattttgagataagatcttgggcacaagttctctaaaataatttttgatatccataaaaataagtctttccactactttttcaagatcagcttagctatgtgtggtcccctgtattacacatactgcctacacaaagttttgctggcatctgattaagatgacatttaatatagagaacattttgataaatgttgacatatttacaacatcacatastcaaattcatgaaagcatctctcttcttttt

SEQ ID NO: 618917 - DNA, 537 bp, Homo sapiens
cctgaactaaaacactggggagcactggacagaaaagctaaggttgggaatgacatggccaaacaactgtcagcagactctggaagcattaagcagaacttgtctcccacctcagtggaaatggactcagcatcaactttggagcctgcaacaactgtctgctagggtccattctctcatgattgctaaaaccacaaaggacttgcaagataatccgggccaccatctttttaaattatcctatagtcaggaacttatttcctgctcagttctctgtcagtccmtctggtattgtctaaggagaaattctcaaagtggtattaatatgcttccgacaatctctaaacattagctgatttttctttttaataaagaaagaacaaatcttgggcacagagccttggcagacaacaaaaatctagctataagttaatcatattttttattatgctcacttttacatttacagttacctctttttttgttttttttttttttgtttttgagatggagtttcgctcttattgtgcaggctag

SEQ ID NO: 618918 - DNA, 537 bp, Homo sapiens
cctgaactaaaacactggggagcactggacagaaaagctaaggttgggaatgacatggccaaacaactgtcagcagactctggaagcattaagcagaacttgtctcccacctcagtggaaatggactcagcatcaactttggagcctgcaacaactgtctgctagggtccattctctcatgattgctaaaaccacaaaggacttgcaagataatccgggccaccatctttttaaattatcctatagtcaggaacttatttcctgctcagttctctgtcagtccatctggtattgtctaaggagaaattctcaaagtggtattaatatgcttccgacaatctctaaacattagctgatttttctttttaataaagaaagaacaaatcttgggcacagakccttggcagacaacaaaaatctagctataagttaatcatattttttattatgctcacttttacatttacagttacctctttttttgttttttttttttttgtttttgagatggagtttcgctcttattgtgcaggctag

SEQ ID NO: 618919 - DNA, 537 bp, Homo sapiens
cctgaactaaaacactggggagcactggacagaaaagctaaggttgggaatgacatggccaaacaactgtcagcagactctggaagcattaagcagaacttgtctcccacctcagtggaaatggactcagcatcaactttggagcctgcaacaactgtctgctagggtccattctctcatgattgctaaaaccacaaaggacttgcaagataatccgggccaccatctttttaaattatcctatagtcaggaacttatttcctgctcagttctctgtcagtccatctggtattgtctaaggagaaattctcaaagtggtattaatatgcttccgacaatctctaaacattagctgatttttctttttaataaagaaagaacaaatcttgggcacagagccttggcagacaacaaaaatctagctataagttaatcatattttttattatgctcacttttacatttacagttacctctttttttgttttttttttttttgtttttgagatggagtttcgctcttattgygcaggctag

SEQ ID NO: 618920 - DNA, 603 bp, Homo sapiens
gacacacttcttagttatatacctaggagtgaaattgccacttttctgtaccaatttacaccccaacatcagtttttgaaagttctcaaatttgtcctttttaatgtctgtattatgtcaaattcatcgtktgctgaattatattccattgtatggatatcttcatagttttctattgatgaaaattttgattgttttcaaccccccacatatttttttttgaaaaaacaatgcttccataaatatccttgtacatttatctctgagcacttatgtgattattccttaggatgaattcctaggagtgaaattctgagagtcaaagagtatatgtatttaaaatgttcatacttccaggtttcttaagttaattttattcaactctctgattctttcatctgtgtttgactctcatctttctggttgctgccttgaacacactccaggtaccaatcgtcccataaaatgtaggatccctgactgatctctatatgtcaggcaaccttgaatggattgagtgaggaagtggggtccagagatgccatagacctacagatggagatcacagttcacaaaatctcctccagggcctaagaagaagcc

SEQ ID NO: 618921 - DNA, 543 bp, Homo sapiens
gggctcatgttcttgatgagccatgctgttcttgagatccctctctcctcccacttgcaggctcaggcccctccgccaccctaccctagagtcaccatcccagctcccttgcaagtgactcgcctggaccagccagatatcagccaggagggcattaggacttccctcccctcagcagagagggggtgtaaatagtcttctgttgcttcctgtgtttgaggtccccctttaagcccagcctgagaatcttggagctgagcctgaagcaaggagtggggatgacagaccttacgccacagaacatcgggccacagaagcccaagatagagggaagccaagaccctacacacagcctgaaccaagtgtcagtctgaggggtcaggcaggaagatgagcaaagagatggagacamcaagatggatagatggattggctcaatcattcagtcattcaacccgtatgtggtttctgaggactgttatgagccaggtattccttcagattctagtgatacagagctcgacaagagagctcagacaccta

SEQ ID NO: 618922 - DNA, 587 bp, Homo sapiens
ccagtctagttatgaaacaaacayaggtaaccttgactctaggactttttatttcttttatagcccctatattaaacccctatcagctaggtccatgacctaagtgatcacacatttcatggtaagtttgttgaacacacccagcattctgggagaaaatggagaaaacagtccattattgttttagtcaagtcttacatttcagcccatctcagagcccataggacagttaaggtttgacaagaatagttgcttggccctgttccaacaggcctccctcccctggttccatgccctgcagccatccttcttcactcttggggctctcaccatgtaccttctctctttccctgaagagactcttcctcctgtaccttctctgctttcctctcatctccttgggctactactcactttatgtgtccagtttactgcctacgtccaggcaaccaggttctgattctggaccaatgctgagtgcagtgactcctgcctgtgaaaatcccagcactttgggaggctgaggcgggtgatcgatcacttgagatcaggaatttgagaccagcctaggcaacatggtgaaaccc

SEQ ID NO: 618923 - DNA, 652 bp, Homo sapiens
ggagtgaaacagtcaggtcctcatcttttctttgatctctaacttcgctatcagtatattgaagttttctattttttcatggttcagtcttggtaagttgtgtgtgtctacaaatttattaatttcttctagaatttccaatttgttgatgcaaagttgtttataatagtctctaattgttctttgtatttctgtggcctcagttatgtctccttttatatttctgatgttatctacttgggccctctctcttttttccttaatctagtcaaaggttagtcaattttgtttatcttttccaaaaaactgacttttcatttcactgttcttttgtactatttttagtttcaatttcatttatgtcagctgtgatctctactatatctttccttgtaataatcttaggtttggtttcttcttgcttttctactttcttcaggtgtatcattacctagtttatttgaaatcttcttttttgttataattgtttattamtataaatgtccctcttagtgctgcttttgctatatcccacagattttggtatgttgtatttccatttttaattttctttttaattttttcattgactcattggttgtttgggaacatattgtttaatttccatgtgtttatgggtttttctgaggtt

SEQ ID NO: 618924 - DNA, 612 bp, Homo sapiens
gagtttccttaaaattactattttgaattgttgattagagcactcacatattgtcttgttcgggtcagttattggtttcttgttttgtttggggagatcatggttgcctgtttactatttttttcttatggatgtgcatctatgtctttgcaccaaaggattagttattttttctagtcttctctctctggctgaaagasctgggaattcttccctgattgaaaggctctgtgctcagtgtggcattagtacatgaatgaatcccagtctttcccacccgttttgatgtggatatgttctcagtcatttagtttgtaggagtctttcaactacactctggctttctcttggagataactgatccatgtgtagatgtcaggaggcttctgttctgccatgttgctcatgccatcttcagaaatataccatttttatagtaggaaagtcgaatactgtaaaggtctcaattctcctcaactttatttataaatccaacataattagaataaaatcttagcagatttttaaagtcaaaattgacaattgatttttaaatctgtaaggttctaaaatagtttaaataatcaaattgaaagaagaagttcagagaat

SEQ ID NO: 618925 - DNA, 580 bp, Homo sapiens
aaagttacaaaaggataatgaaagataaatcttaaaatgtatttgtatgtrtgatcaaactgaataaaattaaattaattttatgtagcatttttaaaaagtcttaatatcaaaagtacactgatacaaaactacaatatgtcttctcttttcaacaagatttttatatattaagagatagtaagatatttttgtttaccttttgagcgaactgaaaagagagatagattctaatgttatcaagatattttcctgtgcttcatgttttctttattgggtctttgattatttaggaaaactaaatatttaagaagttaagagttttttttacaatcatgtagcttcctgtattagtttttaaagtcttttaatcatgactctggttaaattaataattattattttataatccataattttatttttgatcatgtgtttcaaaactattttgtgaaacttttcaaaatcaaaattaagtctttttaatttcaagcaaatttttggacattgcagaaagaaccctagaccaacagaaagctattaaactgattagtctcatttgctatgttaaaattatata

SEQ ID NO: 618926 - DNA, 580 bp, Homo sapiens
aaagttacaaaaggataatgaaagataaatcttaaaatgtatttgtatgtgtgatcaaactgaataaaattaaattaattttatgtagcatttttaaaaagtcttaatatcaaaagtacactgatacaaaactacaatatgtcttctcttttcaacaagatttttatatattaagagatagtaagatatttttgtttaccttttgagcgaactgaaaagagagakagattctaatgttatcaagatattttcctgtgcttcatgttttctttattgggtctttgattatttaggaaaactaaatatttaagaagttaagagttttttttacaatcatgtagcttcctgtattagtttttaaagtcttttaatcatgactctggttaaattaataattattattttataatccataattttatttttgatcatgtgtttcaaaactattttgtgaaacttttcaaaatcaaaattaagtctttttaatttcaagcaaatttttggacattgcagaaagaaccctagaccaacagaaagctattaaactgattagtctcatttgctatgttaaaattatata

SEQ ID NO: 618927 - DNA, 649 bp, Homo sapiens
gtctgttttgtcagtcttatgatccttattttaatgttaactttggtcagttgtgcctaaactccaaaagggagcaggtataataaggtatatctagcctccctcccactgtggctgggaattcagtttttctggtttctctgaggtctccttggacccagaaggtgtcccttcagyctgttagaggggcttaagattttatttttggtttacaagtgtaaaaatttcttgatgacataatattctataacatgtatgagtcattatttaccaaattattcttggaaaatacatatatgtgtgtgtgtgtgtgtgtacgcacaaacaaaaaacaaaaaataattatatttattatatctaaacaaaaactaattatatctatctgtctctaaatataattattttttgttttacacaattatgtggtagctatctccatgtgttatttttcttttgtctattgtgctattgtactagagaaaattacaaggagcaaaattaatatttctaaagttattaacattttcatgtctctttcaatccttgctgtttttgaaatgagaattcttcttccccaaggtggatcatagaaattagaaccaatttccctccaaaatcagccataagacatgaaaatattattgaaact

SEQ ID NO: 618928 - DNA, 410 bp, Homo sapiens
tgtcatcctcactgccacaacctcaaaatttatttttctcaactaacatccagcaataaaatacacagcagtccccatgtctctagacatggtaatttagtgatgagagtatgagcttcagatggacagatgaacctggatagaaatcacaaccgtgattgggcatrgtggctcacaactgtaatcccagcactttgggaggctgaggcagaaggatcacttgaacccaggagttcacaaccagcctaggcaacatagtgagattccagctttacaacattttttaaaaaaaattagctgggcatggtggtgtgcacctgtagtcccagctactcaagaggctgaagcgggaggattgcttgaactcaggagatcgaggttgcagcgagctatgaatgtaccactgcact

SEQ ID NO: 618929 - DNA, 411 bp, Homo sapiens
tgtcatcctcactgccacaacctcaaaatttatttttctcaactaacatccagcaataaaatacacagcagtccccatgtctctagacatggtaatttagtgatgagagtatgagcttcagatggacagatgaacctggatagaaatcacaaccgtgattgggcatagtggctcacamctgtaatcccagcactttgggaggctgaggcagaaggatcacttgaacccaggagttcacaaccagcctaggcaacatagtgagattccagctttacaacattttttaaaaaaaattagctgggcatggtggtgtgcacctgtagtcccagctactcaagaggctgaagcgggaggattgcttgaactcaggagatcgaggttgcagcgagctatgaatgtaccactgcactc

SEQ ID NO: 618930 - DNA, 434 bp, Homo sapiens
aaaaattagacagtgtggtggcacatgactgtagtcccagctacttgggaagctggggtargaggattgcttgaacccaggaggcagaggttgcaatgagctgagatcacaccgtggtactccagcctgggcaacaaagccaaaccctgtctcaaaccaaaccaaaccaaaccaaaccaaaccaaaccaaaccaaacaaacaaacaaaaaaaaacactgatcaaaagagtggaagtattttcctattgattttggctggagattagcaccagagttggtggtcttgagaaagtgccattcgtggtactaatgtttaccctgaaaatgaaaggtggggtgcagctgtccacgtgaacaaattgtctggaagaatgatagcaataagtggagcacaaaggcacctggaagaaacagttgagaagagggtcacacta

SEQ ID NO: 618931 - DNA, 422 bp, Homo sapiens
atagtgcaagcatggagatttattgcaaagggcaaagtacacactcaagagaggggaaagcaggcgaactcragaggagagagtggtgtactcaagagcgagtcgtgcaagggggtttgggggctactattgtggcaggacaggtctcactaaggccagcctccgtaacaactgttccagcactgactgactggttaagttaaatattaaaagctgatagagccagtgcccttctacaaaggctggaatgtaacagaagcccaccaagagttttgcctaggcctttcctgagccctgaagcatgatgagataacaaagaaattctcaatgggacctgtttaggattaaacaagttttactgggagtctgaagaaactccccaggcttccacaaacaagtttactgggggtctgaaggaattc

SEQ ID NO: 618932 - DNA, 421 bp, Homo sapiens
tagtgcaagcatggagatttattgcaaagggcaaagtacacactcaagagaggggaaagcaggcgaactcgagaggagagagtggtgtactcaagagcgagtcgtgcaagggggtttgggggctactattgtggcaggacaggtctcactaaggccagcctccgtaacaactgttccagcactgactgactggttaagttaaatattaaaagctgatagagccagtgcccttctacaaaggctggaatgtaacagaagcccaccaagagttttgcctaggcctttcctgagccctgaagcatgatgagataacaaagaaattctcaatgggacctgtttaggattaaacaagttttactgggagtytgaagaaactccccaggcttccacaaacaagtttactgggggtctgaaggaattc

SEQ ID NO: 618933 - DNA, 627 bp, Homo sapiens
aacccggtacctcagatggaaatgcagaaatcacccgtcttctgcgtcgctcacgctgggagctgtagaccggagctgttcctattcggccatcttctactgccaaaaatttacggttaatcttttttccagccttctcttaagggacctatggctttttatcacggtgagcactgggaaaaggaaataatcagactaattattcataagaggctaatggacactggcttggaactcatataattccctgaggcccaaaatgtcactgtggtccaccagtcagagtaggggtttatgagatcaggtgatcagtctcacagtggacccagtgagcccccaaatacatcctgtgattattttcctggttctagatgcataattgtaatagacctggcagaaccagataatagcacycccgcatttgttccttgacttgtgaaatgaaagccattatgatgagaaaggccaagtgtaagctattagaattgcctctacctaggaaaatagtaaaccaaaagcaatactgcattcctggagggattgcatacattatgccaccatcaagaacttgaaggatgcaagggtagtaattcccaccatgtccccatttagttcccctatttggcc

SEQ ID NO: 618934 - DNA, 592 bp, Homo sapiens
gaagtaataaatgaagatgaggtttatcctgaaaaaaagaatctataaaagctcaatttaggtttatagcatatctgaaatatttgcratgaaatacagcaggaagcaagactgtttcatcctagtaattgaagaaaatggaaagtcaaatagaataaaaagaataatagtttatttttcttaaatgctctaggaacaatagatttaattggatgacaaaacaacatgacatgagatgtttgtgagcattctgaaaaggacttctgagctttttcaaggtctttggaagtggttaccaccagttctctattagggcctaatttcacatgactgcataacaacatgtattagccatacagttatggtaaattttaaaactactgtctttcccttcccttattactggtgttccctaatattaatgttgttttcatcaataatgacataatgataagaataatttttaacttatagttggggtggaaaatgagcaataacagaaagatttttctggagataattaggcatgcattggaagagaggaaagggggaaggaagaaataatggaaaggaaaagaagggagaaggggat

SEQ ID NO: 618935 - DNA, 486 bp, Homo sapiens
aagcaacagcagttaaaaaagacaaagagggacattatataatgatraaaggccttgtccaacaggaaaatgtcacaatcctgaacatacatgtaccttacactggagctcccaaatttataaaacaattaataatagacctgagaaatgagatagacagcaacacaacaatagtgggggattcaatacccactgacagcactagacaggtcatgaagacagaaaattaacaaagaaacaatggatttaaactataccttggaacaaatggacttaacagatatacacagaacattctatccaacaaccacggaatatacattctattcaatatggcatggaactttctccaagacagatcatatgatagtccacaaaatgagtgtcaataaatttaagaaaattgaaattatatcaagcattctctcagactaaagtggaaatcatctccaaaaggaaccctcaaaatcatgcaaatacatggaa

SEQ ID NO: 618936 - DNA, 541 bp, Homo sapiens
catttttgtacaaattttacatttcaaagyatattttgcttaaggacataaaatcttattttttattgggattagccttttaaaactgtgtttgttatgctaaaaatgccttctcccagcttctcgttttccttctatgtaggcattagccaagacatgttttaatgtttaggtatttcagtgtgtttttttcttttgtagttttggtctttggtatgagactttaccatcctcaaatgaaataaactatcatttttctggcatatcttttttaatttaaatctttaatatgtacatatgcacacagaaacacatctgcacttacacacacatggaattatttggtgtaaattatgagatagaatgtaactttggtatttttaaaatataaactggctgtcatcttaacataatttcttaaatatttactaagtaattcttccattctgttttaaatatatgttcaaaacagattaaatgagatgctagttaatataaggaatataaatgacaaatatataaaatatacataagaaagata

SEQ ID NO: 618937 - DNA, 622 bp, Homo sapiens
ggtgtggtggctcacatctgtaattccagcactttgggaggccgaggcgagcagattgcctgagtcaggagattaagaccagtctgaccaaatggtgaaactccgtctctaataaaaatacaaaaaaattagctggatgtggtggcgtgcacctgtaatcccagctacttgggaggctgaggcaggcgaattgcttgaaccagggaggtggaggttgcagtgagccgatatcgtgccactgcactccagcctgggcacggagcragactccgtctaaaaaaaaaaagaaagaaaatttgaaaaacgaaaaatataaagcaaaagggcataacgggccgggcatggtggctcatgcctgtaatcccagcactttgggaggccaagacaggtagatcacttgagctcaggagttcaagaccagtctgaccaacatggagaaacttcgtctctaccaaaatacaaaaaaaaattagctaggcatggtggcacatgcctatagtcccagctactcgggatcaggaggctgaggtggcaggatcgcttgagcttgggaggcagaggttgcagtgagccgaaattgcaccactgcactccagcctgggctacaaagtgagaccctctc

SEQ ID NO: 618938 - DNA, 523 bp, Homo sapiens
gcgcctggcctggaatttcttaaagactcaattttaactcattagccctgttgggtcatttgaggccatggggcaagatcatactggggaggcaagctgctgtcattataaccatatgaatagcagaggggaggatgaagttatcagagaagagaaaatcattgaraactggagacaagccaattgggctccaccctgagagggaaatattctccaggaaaacctggataattaatggatctatgagtctttggttcttttctttttccttcagaagtctcctgaggaaagattttatcactcagatggttagcatgcaacacaatccctcaaactacctctagagaataattttaatgttatgattgtattgaatctatttatatccttctttctaaacaggttttgcagcagcttacaaaaaggaaatatgattttcttaatgtggatatggctatagaacataatataatgtgaccaaattcattatcaattttggtgctaaacctgatattaagaccca

SEQ ID NO: 618939 - DNA, 641 bp, Homo sapiens
taatttcagtgttcactcaggacttattcaggagcaagttatttaatttccatatacttatatagttttgagaaatcttgatactaatttctattttcattgcactgtggtatgagagtgtgcattcctggtatcccttgaataaactctgggtttgataaactctgagttggccatggtgtataattctttgcatatattgctatattttctttgttaatatgctgttaatgattttgttggtatctgtattcatgagagatgtgggtctgtttctttccattagcrctatctgtctggttttggtatttggtgttatatattttcaaataatctttctacattaattgatatgatcatgatttcagtttttctgaatttactgagatgtgctttatgactgagcatgtggccaatcttagaatatgttccatacgcagatgagaagaatgtgtgtatattctgtggttgttgggtagagtgttctgtacatgtctattaggtccagttggtcaagtgtggagtttaagtccagagtttcttcgttagttttctacctgagtgatctacctaatatggttagtgatgattatcttttcatttgcttattttccatctatctgttcatgttttttagtaaa

SEQ ID NO: 618940 - DNA, 589 bp, Homo sapiens
cttcccactaggcctcctctgatgctgccccattagggaggggaaggatgcctcattaccaagaggtggtggtggaagtccaggctccccatatggtctcactgacaccaagcaggaggagagaggattctttattttctggtaggtatgaaagtcttggtttcccactgggcattctctgataccacaccagtaggggtgttggatgcctccttacaaactggagaggttggaacactrggtgccttacttggactttgctggtgtgagtgtgagtggaaccacagttttctctggggtgttcttttgtcttgctaggctgctccttcatggtcctcagactcaggagaacaggcttctgtttgggttctttttgtctattaatattggtatttataagtagttgacttcttcacttctatgtttggaaaatatgaggcaaaaagaaaatccaaagagctaacaatccttggtttctaaggttcctactagtcttccttttctctgccctttggagtcattgaatgtttgctttgtatataatgttgagtgcttttatttgtattagcatacacaatataggaaagta

SEQ ID NO: 618941 - DNA, 585 bp, Homo sapiens
ggaggaaaccttctctttattgctgggcaggaataggagttatatcccccctctaagactccactgataccacagatggtacagcctcattatcacaaaatagtggtgaaaggccagacttcccactaggcctcctctgatgctgccccattagggaggggaaggatgcctcattaccaagaggtggtggtggaagtccaggctccccatatggtctcactgacaccaagcaggaggagagaggattctttattttctggtaggtatgaaagtcttggtttcccactgggcattctctgataccacaccagtaggggtgttggatgcctccttacaaactggagaggttggaacactaggtgccttacttggactttgctggtgtgartgtgagtggaaccacagttttctctggggtgttcttttgtcttgctaggctgctccttcatggtcctcagactcaggagaacaggcttctgtttgggttctttttgtctattaatattggtatttataagtagttgacttcttcacttctatgtttggaaaatatgaggcaaaaagaaaatccaaagagctaacaat

SEQ ID NO: 618942 - DNA, 629 bp, Homo sapiens
gtcaaaagggaagtgggcatatgtgaaaagagaccaaacccgaggggcgtcttggctctcaaaggaactgatcaattcccctgagaacaaatcctgtctcacaagagctaaaacttactcactacttcaagacaggcaccaagtcattcagagggctctgcccccttgcctccacttccctccaggccccatctcccaataccaccacactggggatcagtcttctacatgacatttggtggggacaaacaaccatatccacaccattgcacccatttctcttggttcacttcaaactgtatcctggagaccacacaataacaatatgttgagttattcctcatttctttgtattgtttcagattactccattgtgtaactgaatcaaagtttatcctaacaatcacatggcagtcatgagtkgtcattgcactctttttctgctacaaatagtaccagagtgaataaccttgcatctacacctgcatcttttcatacttttactatatttgggaaggataaccaaagcatatgtaatattgctatgtcttcatagccactcttttgaaagtcataactgaaatactgagaaagtctcagacttcagccttaatacatacactagttgc

SEQ ID NO: 618943 - DNA, 629 bp, Homo sapiens
gtcaaaagggaagtgggcatatgtgaaaagagaccaaacccgaggggcgtcttggctctcaaaggaactgatcaattcccctgagaacaaatcctgtctcacaagagctaaaacttactcactacttcaagacaggcaccaagtcattcagagggctctgcccccttgcctccacttccctccaggccccatctcccaataccaccacactggggatcagtcttctacatgacatttggtggggacaaacaaccatatccacaccattgcacccatttctcttggttcacttcaaactgtatcctggagaccacacaataacaatatgttgagttattcctcatttctttgtattgtttcagattactccattgtgtaactgaatcaaagtttatcctaacaatcacatggcagtcatgagttgtcattrcactctttttctgctacaaatagtaccagagtgaataaccttgcatctacacctgcatcttttcatacttttactatatttgggaaggataaccaaagcatatgtaatattgctatgtcttcatagccactcttttgaaagtcataactgaaatactgagaaagtctcagacttcagccttaatacatacactagttgc

SEQ ID NO: 618944 - DNA, 629 bp, Homo sapiens
gtcaaaagggaagtgggcatatgtgaaaagagaccaaacccgaggggcgtcttggctctcaaaggaactgatcaattcccctgagaacaaatcctgtctcacaagagctaaaacttactcactacttcaagacaggcaccaagtcattcagagggctctgcccccttgcctccacttccctccaggccccatctcccaataccaccacactggggatcagtcttctacatgacatttggtggggacaaacaaccatatccacaccattgcacccatttctcttggttcacttcaaactgtatcctggagaccacacaataacaatatgttgagttattcctcatttctttgtattgtttcagattactccattgtgtaactgaatcaaagtttatcctaacaatcacatggcagtcatgagttgtcattgcactctttttctgctacaaatagtaccagagtgaataaccttgcatctacacctgcatcttttcatacttttactatatttgggaaggataaccaaagcatatgtaatatygctatgtcttcatagccactcttttgaaagtcataactgaaatactgagaaagtctcagacttcagccttaatacatacactagttgc

SEQ ID NO: 618945 - DNA, 261 bp, Homo sapiens
cagtggttgatatactcacaaggttgtataccatcaccactatttaaattcagaacatttttaataccaccaaaagaaacctcctactctttagcagtccgccccccaccacgcctcccccatttccccatcctcccactttctggcaatcactaatctacttttttgtctctatgtatttacatataaaggacatttgtataaatggawttatatatggtttgtatctttatttgtacctatcacttagtgtaatgtttc

SEQ ID NO: 618946 - DNA, 572 bp, Homo sapiens
tattgaagcctgtgcgtgcatcacgaagttcttgttccatggattttagctccgtcaggtcatttaaggtcttctctacgttgtttattctagttagccattcacctaatcttttttcaaggtttttagcttctttgcaatgggttctaacatcctcctttagctcggagaagtttgttattaccgaccttctgaagcctacttctgtcaactcatcaaagtcatttcccatctagctttgttccattgctggtgaggagctgtgatcctttggaggagaagaggtgctctgatttttacaattttcagcttttcagctctggtttctccccatctttgtggttttatctacttttggtctttgatgatggtgacctacagatggggttttggtgtggatgtcctttttgttgatgttgatgctattcctttctgtttgttagttttccttctaacagtcaggtccctcagctgcaagtctgttggcatttgctggagttccactccagacctgtttgcctgggtatcaccagcrgaagctgcagaacagcaaatattgcagaacagcaaat

SEQ ID NO: 618947 - DNA, 372 bp, Homo sapiens
cacttaaatattcctttggcaacaaaaccaatgtgttctgaagctgaactcattctcttccccgccctgctcctccaaacaacctgcctcttgtctcttataaaaaggacagggggcccctctacaaggtggccccagcagggtctccctgcacattgtcctcccacagcattgcaccccacatccacacagtccagggtccaagcaactctgccctctaaactctctcccatgcttctttccctccrtatcctcctgctgcctcagcctaggccactcacctcaacttccctggtcaagattgagacccctgcacacactcctgtgatgccctgtgattaactcactcagagcccttcccacgctgaattc

SEQ ID NO: 618948 - DNA, 495 bp, Homo sapiens
ttctgaagctgaactcattctcttccccgccctgctcctccaaacaacctgcctcttgtctcttataaaaaggacagggggcccctctacaaggtggccccagcagggtctccctgcacattgtcctcccacagcattgcaccccacatccacacagtccagggtccaagcaactctgccctctaaactctctcccatgcttctttccctccgtatcctcctgctgcctcagcytaggccactcacctcaacttccctggtcaagattgagacccctgcacacactcctgtgatgccctgtgattaactcactcagagcccttcccacgctgaattctacttgccctttgctgacccatctctcaccccagaagataatctccaagaaagggccaggtctttgtcctcatccccatggctacagtttggtaggcactcaaaaagtatatgctgaataagtacatatttgtagcagcaacttgaaattctaatgat

SEQ ID NO: 618949 - DNA, 670 bp, Homo sapiens
gtcatataaaagatataaagtatgtgatactttgtgtctgacttcttacttgcacaatatttttgagattcacccacatggtaggatgcatcagtacttcattcatttttgtggcttgatagtattccaatacatgggtgtactaattagttcattcatctgttgatgtgcagttgggcagcattcacttttggcctattgtaaatagttctgcaattaacatacaggtacatgtatttatttaagaaccagtttcaattcttttgagcacataccttggagtggaataactagatcacatggtaatccatgtttaactttttgaggaattgctgactgttttctacagtggcttaaccattttacaatcccacaagtaaygtaaaagagttataattcctttacattcttgccaacacttgctatttaccattcttctttttatagccatcgtcctgagtgtaaagtgctacctcattctggttttggttagcatttgcctagttagtaactatgtcaaacgtattttcatgaacttgctggccatttgtatcttttttggagggattgctgttaagtcttttgcccatttttaaacagcattgtctttttgttgttgagtagtaagagttctttgtatattctgagtattagatccttattagatata

SEQ ID NO: 618950 - DNA, 590 bp, Homo sapiens
ttggtgatccgccctcctcggcttcccaaagtgctgggattacaggtgtgagccaccgcgcccggccttgcatctgtatttacaaagggtattgatctttactcttttatggtgttttgtaatcagggcaaagctttgtaatcagggtaaagctggctttatatattaagaaatgtttctttcctcttctagttttttaagtactatgagaaggattgattttaattcttttttaaatagttgtagaattcactaattgagccatctggtcttggacttctttttttgaaaaaaaaattttttttttgagacccagtcttgcactgtcgtccaggctggagtgcagtggcacagtctcggctcactgcagcctctgcctcccaggttcaagtgattcttatgcctcagcctcctgagtagctgggattacaggcattcgccaccacactggctaatttttgtatttttagtagagatggagttccgccatgttggctaggctgstctcaaactcctaacctcaagtgatctgcccacctcagcctcccaaagtgctgggattacaggcgtgagccaccgcgcctgacctt

SEQ ID NO: 618951 - DNA, 572 bp, Homo sapiens
ggtggtagttgcacaatctagtgactatgtgaaaaaacactgaatagaagaccttaaataggtgtattttacagtaagtgaattatacctctaaagagagcaaagagtcatagatgaaaaggaggaaatggaccagactgaggagagtacttgtattttgatatggattcgtctctccctgccccactcatgaactgtaactctagactttggaaataacacagcaggcaacaaagtggatttttgaaaggtagtgagaagacggtgagctgaattcagatgtcgggactggaggaagagcactgtagaaaggatgtcttaaatcctccacttgacagaagaaaagacccaggcccagtgtttctcaccccacccagcaacagaaggcacccagctgggctctttcctacatagattgaaatagagttcctatgaaaagatgacctgctyggtaatcaattgaggaccccactaacaataagcaaaaaggggaagagctctcctcctcctgagactctggggcctgagacttccctccttcactgagaggccttgtggaccaggtggcattg

SEQ ID NO: 618952 - DNA, 574 bp, Homo sapiens
cacagcttggaattggtagtgtcatcctggcttcattttacattctcaaaggctagatgttgggtttccagagtgctgtttcttctgcctgaaatacattttctctcctatttgcctggctcagttctgctyctctttccagtagtagcttcctctgactctaggtctccttcccactcgctgcctataacaagtttccagagcatcctgtgttttcccttttgtgtcacttcccgtatttttaattattagatgaaatttgggcacggcatatgtccttaatacatagagaaaagaagagaagacaaggagtcagggaagacaaaagaaagctacccttggatcgcttcttttaaacttagcaaggtagacaggttccttaacttctctgagcctcagtttcctcactttcaaagtgaaaatagtaatacctaataaggttgttgcgagattagaacctaataaggttgttgcgagattagaaataatatattaaaggcacctagcataatatctaacacatagtaggtactcagtgtaacataatttaaaatgtatatatactcttaaaagg

SEQ ID NO: 618953 - DNA, 574 bp, Homo sapiens
cacagcttggaattggtagtgtcatcctggcttcattttacattctcaaaggctagatgttgggtttccagagtgctgtttcttctgcctgaaatacattttctctcctatttgcctggctcagttctgcttctctttccagtagtagcttcctctgactctaggtctccttcccactcgctgcctataacaagtttccagagcatcctgtgttttcccttttgtgtcacttcccgtatttttaattattagatgaaatttgggcacggcatatgtccttaatacatagagaaaagaagagaagacaaggagtcagggaagayaaaagaaagctacccttggatcgcttcttttaaacttagcaaggtagacaggttccttaacttctctgagcctcagtttcctcactttcaaagtgaaaatagtaatacctaataaggttgttgcgagattagaacctaataaggttgttgcgagattagaaataatatattaaaggcacctagcataatatctaacacatagtaggtactcagtgtaacataatttaaaatgtatatatactcttaaaagg

SEQ ID NO: 618954 - DNA, 574 bp, Homo sapiens
cacagcttggaattggtagtgtcatcctggcttcattttacattctcaaaggctagatgttgggtttccagagtgctgtttcttctgcctgaaatacattttctctcctatttgcctggctcagttctgcttctctttccagtagtagcttcctctgactctaggtctccttcccactcgctgcctataacaagtttccagagcatcctgtgttttcccttttgtgtcacttcccgtatttttaattattagatgaaatttgggcacggcatatgtccttaatacatagagaaaagaagagaagacaaggagtcagggaagacaaaagaaagctacccttggatcgcttcttttaaacttagcaaggtagacaggttccttaacttctctgagcctcagtttcctcactttcaaagtgaaaatagtaatacctaataaggttgttgygagattagaacctaataaggttgttgcgagattagaaataatatattaaaggcacctagcataatatctaacacatagtaggtactcagtgtaacataatttaaaatgtatatatactcttaaaagg

SEQ ID NO: 618955 - DNA, 551 bp, Homo sapiens
cacgaaataagcattatgtttcaaagaccatgaaaaagttatttgtctctttttggtctcaactagcgagggaggtgagaccaaactgctcaaccgctggacaatctcagcaaacacacccactgttgagacttattgagtgactcaatgttggctagaattgtccatttagctggaggggaagagggagggaaggatggatggaggagtgaagtatggaagcaggsatcaggccacttcccgtacctctcccaaactccaaaggcaatgatcacattggagggtcagctaaacacaaagggaagtgaagaaagaagtttgaagattttcctgtttccaaaaatcacatactttcctcttttgagtattctatagaataactctctacatttcctagtttgtggaaattttctctacggcataactactctaaattgtgcaattttcctcatatcagacttatttttctctatacctggttccctagcaaacctgagctttatttatatatctgatatgcaccccatctccacagctggcattcaattgca

SEQ ID NO: 618956 - DNA, 434 bp, Homo sapiens
tctctagtttggagtgtgttgagtcatatcaatgggtcacatttgtcagttcattgggttggcagtgcctggccactagagacggtgccagagtcagcccccagtttaagagaactagacaaccacttgggctggcctcaggatctgtcaccagagggaagctacagaaccattgccaacaagggcaatcccagacaagcccccaaatttgtaactgcccaacaggttcaccttgcccactgcctagacagaaccaatgtatcaagagaagggaattgaaatagagaaagagtaattcatgcagagccagctgtgcagaagaccagagttttattattactcaaataagtctctamgagcattcagggatcagagtttttaagaaaaatttggtgggcgggtgggggggggcctttgagtggggagtgctgatt

SEQ ID NO: 618957 - DNA, 583 bp, Homo sapiens
acatctctattccccaacatgtaatgaaggagaggtcggggaagatacttttaggcactttgtattccagtgttcctcaaaggaaaatgggccagctttatgcatgtaattatttttttgaacactgttgccaccatgcctatgttgtccatttccatcattgtatgtacaggactagccttgtacatacatgtcaaaggggctagatttgactttggggtgctcatcttctaccactttctccctgtttcactgtctgcctccctcagagatataacttgtaccccttttctggtatcagcagtcatggtcctcatagaggtgttcactaacagtataatggcttctgttacccctgagcaaggggtcattttgatttgaataggggattcrtaccccaaaaaggagagtgggcttcttggcattataaaaggtgcctttcaagggctggagaaggctgccttgtgtatgagacactaagaaagggaaatatggcaagagtttcaaacaaaaatgacttttcctcactcattttgctgtctctaagtttattgtggactacttcttgcttgacaatttggtc

SEQ ID NO: 618958 - DNA, 590 bp, Homo sapiens
aaaggttaagagttcaaagctcttggtgcaatctctcattctgtcccttttcatttttaaggacctttctcttgcccatagcttccaaccatattttaatgaactttcctttgtgaagggtagctcttctttttgtccatcctaaaacctctgtaaaaacaccaacatagaagtcctcaccacctgagacccttaggtctcagaaagggccagtgggacagcttctttaggttggcataagttgccaagctcctgaccagtctgctcctctactccattttcttctttctttttatgaagttgcttatgtccctacttctttccaggttctgtggctcttattttcccatgctgactaatatctatggctattcatctaaattctttcaggtargagtgcttgtggggagtttccctgaagcctctgtacagacactaacataacagtcctgaatacccaagacccagcaggtaaaggaaggaaagagaaaaggaagtaagggtcgggtaaaggaaagtaggagagagcttctctccaaagggcaggagtttccaggctcctgatatatatttgtcatctgctccatatt

SEQ ID NO: 618959 - DNA, 604 bp, Homo sapiens
acaaaagaattaaatgtaccttctagaactgaaaaaaatctctgaaattacgaacttattgagcgagtttaacagttgatcgggcacaacaaaagacagaattagtgaagtgggaaagttaatttcaaagaaaaataatagggatggcctactggcaacaacasgaaagaatggagccttcagactccagaagagaagctagaaatggcaggcggtgccagtgcctagaaagatccatgctccacgctaactctgtcatgttctctgtggtggccatggtgtcatccaaagctattaaaataaactgtgccttgatatccctagattctgtgcctgaagtcccctaagcagtagtctaggctacctacaattgtaaattatctgtatgaattggaccagaggcgacaaagatgaagaaaagcagggaatcaaaagatcaatctttagaagaattctttctttttagccttgagaaatatcaggaaagagaaaactcaacatttacttgaaaaacaagaaagcatgtcctaatatattattgatttataatgcctctatttaacaggcattaaggttagaaagaaaacacttaccaaaattgcaa

SEQ ID NO: 618960 - DNA, 592 bp, Homo sapiens
gcttatttcacttaacaaaataatctccagttccatccatattgctgcaaatgacaagatttcattattttggtggctgaataatattccattatatatatactatatcgatatagtgtatatatactatatatactatataaatatactrtatatgtactatatatatacactatatatatgtactatatatagtatatatatagtactatatacatactatatatatactatatatatatatatacacgcaccacattttctttatttgaagatagagagtagtttggtggttatcagaggccaggaagggtagggaggtgggaaggatgaagacaggttgattaatgggtacaaatatacaggtaggtagaagaaataagacctactgttcaataaattaacagagtaactatagcaaacaacaatccattgttatttcaaaatagctagtaaagaataatttgaatattcccagcataaagaaatcataaatgttcaaggtgatggatatctcaattatcctgatttgactattgcacatcatatgaatgtatcaaaatatcatgtaccccaaaagtatgtatatcta

SEQ ID NO: 618961 - DNA, 454 bp, Homo sapiens
agtggcgtgtgcctataatcccagctactcaggaggctgaagcaggagaatcgcttgagcctgagaggcagaggttgcagcaagctgagctcatgccactgcactcccatctgggcgacggagtgataccctgtctcaaaaaaaaaaaaaaaaaaaaaaaaaaaaaaaacagagaaagagaaaaagacattttcacagtattagttgtaaattttaacacccccttaaactgataaaactagacaacagaagtacacaaaaaaatttgcaagcacatagaataaatgaaggttattaaccactttgactcatttgatattttaaagacactatacataataactgcagaatacacattcttttcaagtacatctataatcaccaagatagatgatatgctgggccataaaaaaaaattsaataaattgcccaggtgcagtggctcatgcctata

SEQ ID NO: 618962 - DNA, 390 bp, Homo sapiens
cacatgtttcagagagcacagggttggggataaggtcacagatcaacaggatcccaaggcagaagaatttttcttagtacagaacaaaatgaaaagtctcccatgtctacttctatccacacagacccggcaaccatccgatttctcaatttyttccccacccttcccgcctttctattccacaaaaccgccattgtcatcatggcccatccccaatgagccgctgggcacacctcccagacggggtcgtggccgggcagaggggctcctcacttcccagtaggggcggccgggcagaagcgcccctcacctcccggatggggcggctggccgggcggggggctgaccccccaccaccctcccggacggggcggctggccaggcagaggg

SEQ ID NO: 618963 - DNA, 390 bp, Homo sapiens
cacatgtttcagagagcacagggttggggataaggtcacagatcaacaggatcccaaggcagaagaatttttcttagtacagaacaaaatgaaaagtctcccatgtctacttctatccacacagacccggcaaccatccgatttctcaattttttccccacccttcccgcctttctattccacaaaaccgccattgtcatcatggcccatccccaatgagccgctgggcacacctcccagacggggtcgtggccgggcagaggggctcctcacttcccagtaggggcggccgggmagaagcgcccctcacctcccggatggggcggctggccgggcggggggctgaccccccaccaccctcccggacggggcggctggccaggcagaggg

SEQ ID NO: 618964 - DNA, 585 bp, Homo sapiens
gtgcagtggcaccatctcggctcactgcaacctccaactccctggttcaagcagttctctcacctcagcctcccgagtagctgggattacaggcatgtgctactacgcccaactaatttttgcatttttcatagagatggggtttcaccatgttggccaggatggtctcgatctcctgacatcgtgatctgcccacctgaaactcccaaagtgctgggattacaggtgtgagccaccacacccagccaagagatctgtttagtattcatttctatttgtattgcactgtggtctgagagggtgggtgatatgattttttaaaatttttttgaaaattgttttatgaccgagcatgtcttctattatagaacatgtgccatgtgcaaatgagaagaatgtatattccrttgttgttgggtggagtgttctgcagatatctgttaggtccatttggtcaagtgctgagttttagttcccaaatatctttggagttttctgcctcgatgatctaatactgtcagtgtggtgttgaagtttcccattattattgtgtgggtatctaaatctcttcatagttctctaata

SEQ ID NO: 618965 - DNA, 629 bp, Homo sapiens
caattaaaacacattttaaaatatttatttacttaaaaataataagcccattacattttaacataaatattcttgtggaaagtatattttccaaaaccagaacaattagttacaagagtgacattattttatattctcacaaatctattcaatatctgacttaattgaagacacgtggattcccatatcttttgcattctgtagaaatgtgtcattttggttggtttaagaatatgaagaaaatttgacctcatagagagaggtagctggaaaaaagaggtgtatttgaatatccttttcaggtaattgtagctgttctcatatactataacaaaattcaacaagtgatagtttcttaaaagttagttacaatgtggactattaaaccatgtgcatgaacttttcatgttgtaatgtatcaaattccaytggtcttgtacttggaatagaccttttacccatgcatgattttataacatcatgaattggtcatttggaaaatattacaaaaccagttatgagttataaagatgttccaaatgttgatgcatttcattataaaatatttttttaaatcacattcactggtatcaccacttatctagtcagaagtcttgaagttttgaaaa

SEQ ID NO: 618966 - DNA, 578 bp, Homo sapiens
ggaaaagtacacttttactaacaagatagtaactttgtcttcatgtttgcaactaaatatttcatttaacaagttattgaattgttgggaagtgccactgggtatgatttattttaataacttttcatccaatgggcattcagcaatatcaactgtacaaagctcttttaatctctgagctactgtgtgtatttttccagtcaatgcagcacaataacttaccctctaagatgcttttctaaatttaaaaatcagttttcaaaaaatgtttcaatgttattggaaaacagaataacatggctgggcccagtggctcatgcctgtaattccagcactttrggaggctgtggcaggagaatttcttgagtcaaggggtttgagagtagcccatctttacaaaaacaataaaaaaaaaattagccgggtgtggtggcgtgcatgtagttctagctacacaggacactgaggcaagaggacctcttgagcccagaagttggaggttatatagtgagctatgatcacaccactgcactccatcctgggcaacagagcaagaccctatttctcagaaaacgaaa

SEQ ID NO: 618967 - DNA, 578 bp, Homo sapiens
ggaaaagtacacttttactaacaagatagtaactttgtcttcatgtttgcaactaaatatttcatttaacaagttattgaattgttgggaagtgccactgggtatgatttattttaataacttttcatccaatgggcattcagcaatatcaactgtacaaagctcttttaatctctgagctactgtgtgtatttttccagtcaatgcagcacaataacttaccctctaagatgcttttctaaatttaaaaatcagttttcaaaaaatgtttcaatgttattggaaaacagaataacatggctgggcccagtggctcatgcctgtaattccagcactttaggaggctgtggcaggagaatttcttgagtcaaggggtttgagagtagcccatctttacaaaaacaataaaaaaaaaattagccgggtgtggtggcgtgcatgtagttctagctacacaggacactgaggcaagaggacctcttgagcccagaagttggaggttatatagtgagctatgatcacaccactgcactccaycctgggcaacagagcaagaccctatttctcagaaaacgaaa

SEQ ID NO: 618968 - DNA, 599 bp, Homo sapiens
tggctattgtgaataatgctgctattaacattgatgtacaagtatccttttgagtccccactgtcagttcttctggatatatacctaggagtgaaattgtgaatcatatggtaattttagatctagctttttgagaaaccaccactgttttccacagaggctgcagcattttacattcccaccagcaatgcaaagsgttccaatttctcttacccacgccagcacttgtcattacctgactttttttctcacatagttatcatttttttagtgataatacataacatctgttctctttacatttttacagaatacaatgtatcatcattacctatagttgccttgttccacaatagatctcttggaaattattcctcctatgtaactgtaattatgtattctttaatcaacacctcctcacccccacctcccaactaaagtcctcagcatctggtatccaccattctaccctctgcttctttgagatcaacttattttagattccacatatgagtaaaatcatgcagtatttgtctttctgtgcctggcttatttcacttcacgtactgtcctccatgttcatccacattgtcacaaat

SEQ ID NO: 618969 - DNA, 599 bp, Homo sapiens
tggctattgtgaataatgctgctattaacattgatgtacaagtatccttttgagtccccactgtcagttcttctggatatatacctaggagtgaaattgtgaatcatatggtaattttagatctagctttttgagaaaccaccactgttttccacagaggctgcagcattttacattcccaccagcaatgcaaagcgttccaatttctcttacccacgccagcacttgtcattacctgactttttttctyacatagttatcatttttttagtgataatacataacatctgttctctttacatttttacagaatacaatgtatcatcattacctatagttgccttgttccacaatagatctcttggaaattattcctcctatgtaactgtaattatgtattctttaatcaacacctcctcacccccacctcccaactaaagtcctcagcatctggtatccaccattctaccctctgcttctttgagatcaacttattttagattccacatatgagtaaaatcatgcagtatttgtctttctgtgcctggcttatttcacttcacgtactgtcctccatgttcatccacattgtcacaaat

SEQ ID NO: 618970 - DNA, 599 bp, Homo sapiens
tggctattgtgaataatgctgctattaacattgatgtacaagtatccttttgagtccccactgtcagttcttctggatatatacctaggagtgaaattgtgaatcatatggtaattttagatctagctttttgagaaaccaccactgttttccacagaggctgcagcattttacattcccaccagcaatgcaaagcgttccaatttctcttacccacgccagcacttgtcattacctgactttttttctcacatagttatcatttttttagtgataatacataacatctgttctctttacatttttacagaatacaatgtatcatcattacctatagttgccttgttccacaatagatctcttggaaattattcctcctatgtaactgtaattatgtattctttaatcaacacctcctcacccccacctcccaactaaagtcctcagcatctggtatccaccattctaccctctgcttctttgagatcaacttattttagattccacatatragtaaaatcatgcagtatttgtctttctgtgcctggcttatttcacttcacgtactgtcctccatgttcatccacattgtcacaaat

SEQ ID NO: 618971 - DNA, 483 bp, Homo sapiens
tatacatatgtaaaaaacctgcacgttgtgcacatgtattctaaaacttaaagtataataataataataataataataataataataataaaagaaatataataggaaaatttggggaataaggcagccacagtgaaccttgacaatctcacacatactccctgtaatctagaaggctaaatatgcttaggagggactacaggatagaagtgtggatagtaggaggattcctagctatccacacatttccagataagtgtgaaacctaggacacttataaaggaaacatcagaagccatgactgagagtaaaatcccagttagacttgtaaaagacctaaatttttaatgtgtttcccaaccaacacagagatgcactggcaaaaggtggaaggcttactggctcamgggaattaagcaaaacctctgatcaatcttcagctcaccattaagctatgttgactcaagtgcaacccccaggaga

SEQ ID NO: 618972 - DNA, 584 bp, Homo sapiens
gttggaaatgcagaaatcaccttccttctgtgttggtcttgctgggagctgcagactggagctgttcctatttggccatcttgccagggaattgcatttatgttcctttatgtwtaatatataaatgtgcatttatatattttggtcctgtatttttatgtgtatataacaggtgaaagccaaacataagattcagtcacagtcttcacacatattgtcaattatttatgagggtaggtcacagctaagagctttagaaaactgtattttcagaacatagagttttatagggaaggagaggaggggaaaagaggaggaggaagaaaaaaacaagaaaccatatagtctttttacctgctttttttctcagttttctcttcctgtctgcttctctccttcaaccttcatcttctcaattctttccccacagactcttatccagaaacatactctcatggtatttagtcattcttgcattaactatgtatgtgtggagcacctgcaaaatatgccaagtgtgaaatgggagttggaggaatccttgaattccttctctggccactactttatagcttggcataaca

SEQ ID NO: 618973 - DNA, 462 bp, Homo sapiens
gtctgcctaagcattccctcactgttgggcattggactgtttccaaattttgcttgtaatacatagcacagctataaacatttttatacaaatcggttatttatttcttttgaattacatccttgggctatattccaaaaagtagggtttcttggtcaaagtatatgatmatttttatggcttttatatttgttgccaaatttttttcagaacaatttcatcaggtttcagggcagcaatgtattagtatatctttttccctaatatctatagcaataaatgttgtcaattttattaatttaccctattttaattaatgcaagatcatgttgcatggttgttttaacttgaattctgttaactatgaaaataactcagcattttcaaatccttatgtttcctcttatcccccaaatttggttagtaacacaaccaaattcttatgtttcctcttatccccca

SEQ ID NO: 618974 - DNA, 687 bp, Homo sapiens
atggcagcactttcttaagtatgctctggagaatatcacttctacaggatattaacattatgtggaggaaaaaaaaataaaacattccatggtcaagtaagcttgagaaatgctgggatccacacatttactgaaacacttacctgtgcttttaatatattagtttacattcggaatctccaagaaggggatttagcatgcagaattttctgaatttttttgaccacagcatcttactttcagagaccatcttgagggattaatgttccactaacatgtttggatcacattgacttcgaatatgcactctggtttcggtgggtgatggcagtaaaggaaacgttaaaaaaaagaattacaatttggaggattcagagaacctggattgcctcagtaccctcattactactctgcttgygtgcatcttgttcccctcctatctgttcactcagttgccagaagaatcatttacaaacctagttcatatgatgtcagtcacttgctaaagatgctttaatgacttttcatttctcttagaataaaatgtaatctcttgaccatggcctgcagggctttacaatgaatgagctgacctctatccagatcttcatttttatcttctaccacattctctttttcttacctcactcagtcctcatgggcctggttatgtgctaagctagtacc

SEQ ID NO: 618975 - DNA, 550 bp, Homo sapiens
tccattttcattagtttcaaggaattttttatttctgctttaatttcattgttcgctcaagagttattcaggagcaagttgtttaatttccatgtttttgtgtagttctgagagatcttcttggtattaatttctatttttattgtactgcagttcaagagtatgcctggtattattttgatttttttaaatttattgagacttgctctatgactcagcatgtagtcaatcttagaatatgttccatgagcagatgagaaaaatgtatatgctgtggttgttgggtggaatgttctgyagatgtctattaggtccaattggtcaagaattgcatgtaagtctagactttccttgttagttagtttcctgcctcaatgatctaacactgtcagtggagtgttaaagtcccctgctattactgtgtggctgtctaagtcttttcataggtcaagaagaacttgttttataaatctgggtgggtgctccaatttggctgcatatatattaggatagttagggcttcttgttgaattgaatcctttatcattat

SEQ ID NO: 618976 - DNA, 623 bp, Homo sapiens
gggctctcaataacttttctataaaggacattttgggggccattagcgaagtttaagaaaggtttataaattagataaaatatattcatattattttccgatttcaataactgtactatggttataacaatgaaaatttcctcattttggtaactgtactttcataactgtccttgatcccaggaaaaatacactaaaatatttaggagttagaaaaaactttacagtttttgagatccctcatgtataactccttcatgatctaggagctccaacttgcctcttggatttctcagaactcatatcctacctgccacttccttttattagtattcaacaaccttggctttctttttgctcctcaaagattccaagcttgttctattttcaaacctttgtacttgctgttttctctgcttacagcattctcctcccagacctgtacatgctggcttcttgtcatcattgggccctaactcaaaagtgacactttaacacctcatctyacagcagcagttttttattattcagacaaaagtagttctccatacattatcaattacattaacctgttttcttatcttcatgtgacttatcactatcttaatatatgttgtttaagt

SEQ ID NO: 618977 - DNA, 586 bp, Homo sapiens
ttttttgtttgttttttgtttttttgagacagaatctctctctgttgccaggctggggtgcagtggcaccatctcggctcactgcaacctccaactccctggttcaagcagttctctcacctcagcctcccgagtagctgggattacaggcatgtgctactacgcccaactaatttttgcatttttcatagagatggggtttcaccatgttggccaggatggtctcgatctcctgacatcgtgwtctgcccacctgaaactcccaaagtgctgggattacaggtgtgagccaccacacccagccaagagatctgtttagtattcatttctatttgtattgcactgtggtctgagagggtgggtgatatgattttttaaaatttttttgaaaattgttttatgaccgagcatgtcttctattatagaacatgtgccatgtgcaaatgagaagaatgtatattccgttgttgttgggtggagtgttctgcagatatctgttaggtccatttggtcaagtgctgagttttagttcccaaatatctttggagttttctgcctcgatgatctaatactgtcagtgtggtgt

SEQ ID NO: 618978 - DNA, 570 bp, Homo sapiens
agctaaaatataaaaattcaccttcagggtcatgggtgtgaatgtcagattggctcctcaacctaggccccctctgcagcctctggagctctggaggcctttcttttgtacacaggtaagtcctcttggcctgaagctgtggctgtaccaccccgggaatgtgtctgtcacctagcaatgtggaggaagccagacttaccaggggccccaaccctccagacccaccctgggctgagccttggagaagcagagcggcatacccatgatggccaccaggggccactgctggggcacagagggagctgcagggtgtagcctctgcagggcccctccagcctggtagcagagaccagatcctggtcacccccaaggaaaccaaaccctgccctaacctcctcccctgtatgmcccaaatctatacctgtggggaagctgcctggagtcaagtgttcttccattcgcatctctgtgatctccagctagtccctacttcctggacctcagcctcccagctctccagagacacagcaggattaagtgactttcaaggactcttgtggtttggcgagt

SEQ ID NO: 618979 - DNA, 542 bp, Homo sapiens
gtttgcacaaaagtaaccatgtctgcaatttccgcagtagtttctggttttctctctgcccttcctctctggggaacccagctgtcaggcctggggtctatccgtcggaattaggtagaagaatctccaccaagattctgaatgtttccaacacatttcagcagcagttccctcaccacactagttattctctcgattctcttttcccaaaccctcaattcataagttgtaccagtttgtttgaagctcatgttaagcactttttcccactcttgggggrcccataagaattgtaacataaacaagaaccatcttttctctcccttgtgccacacccaccaaagcaaatggcctgggtcacgtcctgcacaccccaggaaattcatgtctgggagatgctgggggggagaggcgccagggaggcagagaacattattatgtctgattcatttacactgcaatctgtcagccaccatgctgtcaaggctgggctgaagccaagaaattgaatttagagggtgatttttcttagaacaggaagt

SEQ ID NO: 618980 - DNA, 544 bp, Homo sapiens
agaacagacttgtgcctgaagagtagatttgttctgaaggccagggacactttgcgtagccacttggcatcaggaagtcaagccctggttttctaatggacatccaatactggtggtatgcaacgagatgtaaggattttccaaaatgtggccttatgtagcacaccctccactgtgggggtttgcaaagatgaggccccatctccatcctgttgaatcagaagctctggggggtgacaccctggtatctgcctttttagcatactctgagagaaaagatgcttttatgggcttcagccaagtacaaaaccatagaaccagactgtcaaagctgggtaggggcttgggtatcctctactcccactcccatatttgtagatagggaaactgaggcccaaagaggggaagtaattcaccctagctcccacagctragtcatgtgtgcccccaagctagaactctaaaaattattattttttatagtgatgggctcttgctgtgttgcccaggctggtcttgaactcctgggctcgaggtatcctcc

SEQ ID NO: 618981 - DNA, 530 bp, Homo sapiens
tatgtttcccaagcatgtttcctacccctggtatgaagatgttggagtcactttatgatctaggttcaaacaacgttccagtttcatctcgacgctccccacagcagaccaatggcttactaaagattytttaggttacaactatcagaaaccaaacaagcatttctacacaaaaaaggcatttattaaaagaatattaacatatctcctggaatccaaggaagaggaaaactccccaggctctggaagatccaggaacttccacaaagggaagttccgttcctctgccatgaacatggctcagctcccagcaaccttagttctaaattccaaaatcataagaagaaaaatccaaatgacccagccaatattttctttcagactcaggcaaggctggtccctgccctgggctccacacttcagagggccctgggctccacacttcagagggccctgggctccacacttcagagggccctgggtatgacaaaactatgaaaaaaaaggtattaaaaaacagatgggtctct

SEQ ID NO: 618982 - DNA, 535 bp, Homo sapiens
ccatcttggccaggctggtcttgaactcctgaccttgtgatctgccctcctcagcctcccaaagtgttgggagtacaggcatgagccaccgtgcctggcagagatttataatttgttggaatttattttttgaaatttataatttgttgtttttctcattctaaataaatatttaatttggtacccaatactgtgtcagtmattttgtcttctttttcttaaagagagctctccaaattttataagctttaggccttacaatacctagatctactcctgggtggcctaaatcacccttctcttatcctgggatgttgaatgctggataatgtaatcattttctatgtgtataatttgatcaataactaagagtaatctttttagaatttatagtttcgaaatctttgctaaacctaaatcactataagtcattttaagagaatatgttgaacacatcagcaaattgacattcagatctttttccaagttggcatcatagagttctcaaatgcctctaaagctttctataaaacac

SEQ ID NO: 618983 - DNA, 637 bp, Homo sapiens
caaattcataaggcatgttcttagagacctataaagagacttagactcccacacaataacagttggaaacttcaacactccactgacagtattagacagatcagtgaggcagaaaattaacaaagatattcaggacctgaactcaacattggaccaaayggatctcacagacctctatagaactctccaccccaaaacaacagacaacatattcttctccttgtcacatggcacctactctaaaattgaccacaaaatcggacataaaatgaccctcagcaaatgcaaaagaactaaaatcatacaaaacacactcttggaccatagtgcaataaaaatagaaatcaagactaaaataatcactcaaaaccatgcaattacatggaaattaaaccacctcctcctgaatgacttttgggtaaataatgaaattaaggcagaagtcacgaagttctttgaaactaatgagaacaaagataaaaacagaagaatctctgggacacagctaaggctgtggttgagagggatatacatagcactaaatgcctacattagtaagttagatctcaaattaacaacttaacgtcataactgaaaaaaattagagaagcaagagcaaaccaaaaaccattcaaaa

SEQ ID NO: 618984 - DNA, 466 bp, Homo sapiens
attagtgggttgtaagactcctttatgtattctggatagagatttacataatatccagatttataggttgaaaatatgttcccctagactatgttccccaagactatggaccacattttgatttttgtaatgatrtctttcaaagactgaaaattttaaaattttgtcattattttcttcagtggtttatgttgtttatgttttttgtgtccgaatctaagaaattttgcccattccaaggttgcaaagattaagttttcttctagaagttttatagatttcattttttaaaaaaatttaagtgtaagatctgttttgtaattatttttgtatgtggtatgaggtaaaggtcacggttttccatattgatatttatctgtccaggtaccatttatcgaagactactgtttcctcattaaattgccttgaaactgtgccaaattcatttggctgtatatatatgggt

SEQ ID NO: 618985 - DNA, 468 bp, Homo sapiens
gttctagtaatcaggctctctgtgggttaatggatgttcactacattactcataaatggaaaaataacatgatgataacaaaggctaggcacagaccaatgatggcaatgcatcataaacaaaggattttgattaatttacttctatccatctaaaaacaaatgttgtcagtatccccatcttgttcctggactcctgaaaaggctctaaaccaacaagattctgagacgctgtagtcacagggtctatgaaatggctaaggatttatgagattcatttataggtaaaatttatgaaccattcaaatttaggcatgtcttagacacgtggttaataacaacgaaacaccttaaataacgttgtcgttttgaacggaagaaggaggaaaaccatgcctgtgtgtagtgttgtgggttttttgttgctgttcmcaatatgagcaggctgtttgacagagaaaaaagttct

SEQ ID NO: 618986 - DNA, 203 bp, Homo sapiens
ccagcctctctgagacacatactgtctgctgcccaacatgcacccactaacagcagccaggggctgtctctartagtcacctgtgctcttctgctccatgcacagttgtcctagagccacctctgtttatctccaaaccagtttatccagctgtattttttaatgtaatcatctcatgtaattataaatgactttaaaaatca

SEQ ID NO: 618987 - DNA, 590 bp, Homo sapiens
ttctgattcctcttccggccatatttattattgtttttccaataacaaatgaatacagtattgcaaacctcattggtagatcttcagaaaagctgtcatgtggtttgttgtgacatggatttcttctttagaccatgtgtgcagtataacctttgtgtatacaatcaacctataattcagtgagagaatagaactgtatccttacaaagcattttaaagggatttcagtgcttttagcaacccccattccactttaaaatcctcaggctgtgcttatggattccactgaggttttcttayttttgtttttgctttttttagacagtgtctaaactcaagtacagtggcataatctcacctcactgcaacctctgcctcctgggttcaagcaattctcctgcctcagcctctcaagtaactacgactacaggcatgcgccaccacgcctggctaattttggtatttttatagagacaaggtttcaccatgttggccagggtggtctcaaactcctgacctcaagtgatccacctgccttggcctcccaaagtgttaggagtacaggagtgagccacggtgcctggcccact

SEQ ID NO: 618988 - DNA, 605 bp, Homo sapiens
tcttttttattaaaattcagcccaaattgagaacaaattctgtcttttcttcctttccaactcatcaaagcccagttccycaaagcttaatgtcccacaagtagttgttaatgggcttcattgtttagttaattgtgcttattggaagtgcaggtgacttcatatttgcatggctaatgggccttctttaaagtgtgtggccattttagttggcttttaatggtctgtattgttttttcccaactttgagttgaattgataaacttactttctaagaaccatcaatgcctaagacaaaaagaccattttttactacataggggacatcatttatgtgagtttgaagacaaatgcttatttgtaagacaacatgatgtcaacagttaaccacctttcaaaattaattcaatacaataattattagacttaatatttgtttctctggaggtggttttgtaacaataaagaactattttaccctacctctttatcccttgcagaaatggctggttcactttttagccacaaaactcacatagttcccactcaaccaaagaactcatgaaagactactttcttccctctctggaaatgcatacttacta

SEQ ID NO: 618989 - DNA, 508 bp, Homo sapiens
tgaatttaaaaatggttgtgtggtcttacagaacaacttctaagttgcatttgcatttcttatggttcaaacaaacaaacaacaaacacgaatttttgttttaagcagttaaaggttaagcaaatacaaaagagcatttttgcacttctaggcacagtagctggaattttgaaaatcttcaccgttcctgttaaaayaagattgagaaacaggaaagaaactgcttcaagttgaaagtcaggatggcttaatggaaaacaatgggctttgtcaggataagagctgggcctgaattctgattcaagccacatgcgggagggataagcagccacttcaaagggttctttgagtgttaaacatggtacctacaatgccaagcaccatctctggcacagagagtgtaaggattgcagaattattgtcaacaagaagaaaagcctatactgcaaggaggaggaagctgtcagggagtcatattgcactgacaatttatgagtgtaaataatcg

SEQ ID NO: 618990 - DNA, 340 bp, Homo sapiens
gttacagttcttaaaggcagcgtgtctggagtttgttctttctgatgttcggatgtgttcggagtttcttccttctggtgggttcwtggtctcgctggctcaggagtgaagctgcagacctttgcagtgagtgttacagctcttaaggtggcgcatctgaagttgtttgttcctcccggtgggttcgtggtttcgatagccgcagatcttcacggtgagtgttacagctcataaaggcagtgtggacgcaaagagtgagcagtagtaagagttattgcaaagagagaaaaaactaagcttccacagcatgcaaagggattcaagtgggttgccactgcaa

SEQ ID NO: 618991 - DNA, 340 bp, Homo sapiens
gttacagttcttaaaggcagcgtgtctggagtttgttctttctgatgttcggatgtgttcggagtttcttccttctggtgggttcttggtctcgctggctcaggagtgaagctgcagacctttgcagtgagtgttacagctcttaaggtggcgcatctgaagttgtttgttcctcccggtgggttcgtggtttcgatagcygcagatcttcacggtgagtgttacagctcataaaggcagtgtggacgcaaagagtgagcagtagtaagagttattgcaaagagagaaaaaactaagcttccacagcatgcaaagggattcaagtgggttgccactgcaa

SEQ ID NO: 618992 - DNA, 340 bp, Homo sapiens
gttacagttcttaaaggcagcgtgtctggagtttgttctttctgatgttcggatgtgttcggagtttcttccttctggtgggttcttggtctcgctggctcaggagtgaagctgcagacctttgcagtgagtgttacagctcttaaggtggcgcatctgaagttgtttgttcctcccggtgggttcgtggtttcgatagccgcagatcttcacggtgagtgttacagctcataaaggcagtgtggacgcaaagartgagcagtagtaagagttattgcaaagagagaaaaaactaagcttccacagcatgcaaagggattcaagtgggttgccactgcaa

SEQ ID NO: 618993 - DNA, 487 bp, Homo sapiens
gtcaccaaaacagcatggtactggtataaaaatcggaatatagagcaatgaaacagaatggagaactcggagataaagccaatacttacagccaactggtctttgacaaagcaaacaaaaacataaagtgcaaaaaggacaccctgttcaacaaatggtgctgagataactggcaagccacatgtagaagaatgaaactgtatcttcatctctcaccctatacaaaattcaactcaaggtgaatcaaagacttacagacttgaaactatgaagattctagaagataacattggaaggaaccttctagacattggcttaggcaaagattttatgaccaagaatccaaaagcaaacacaacaaaaacacagatgaatagatgggatttaattaaactaaaaagctgcacagcaaaagaaatattcagyagaataaacagacaacccacagagtgggagaaaatgttcacaatctatacatccaacaaag

SEQ ID NO: 618994 - DNA, 530 bp, Homo sapiens
aagcccctgctggccggatcaagagcctatctttcagaaaaatcaagtgtctaggggctgccactcagagaaactctattttctggctctccatcagggttacagacacctctccccaaggattcatcaaccgccaaacaaagaggaaggcaggtcaatgacaccaaaatctgcagcttcagcagcttctgaagttcctgaccaaaaaaaaaaaaaaagagcgagagagagagaaagagagacagtgtgaaaaaaaaaaaatctyaaaggaactttaacaaaccatctcagaattcatagtttacattctggaaaggaggctttcagagtcctacagcatacaagcttctcgtgataaaataatgggctaccaagcaggcactggtctttattgttttattagctagtgcctagttatgtgtgcttaaaaaaaatcattttaacaaaagggtttcttcatgattttttttttttttgagctggagtttcgctcttgttgcccaggctggagtgcaatggcgcgatctcag

SEQ ID NO: 618995 - DNA, 530 bp, Homo sapiens
aagcccctgctggccggatcaagagcctatctttcagaaaaatcaagtgtctaggggctgccactcagagaaactctattttctggctctccatcagggttacagacacctctccccaaggattcatcaaccgccaaacaaagaggaaggcaggtcaatgacaccaaaatctgcagcttcagcagcttctgaagttcctgaccaaaaaaaaaaaaaaagagcgagagagagagaaagagagacagtgtgaaaaaaaaaaaatcttaaaggaactttaacaaaccatctcagaattcatagtttacattctggaaaggaggctttcagagtcctacarcatacaagcttctcgtgataaaataatgggctaccaagcaggcactggtctttattgttttattagctagtgcctagttatgtgtgcttaaaaaaaatcattttaacaaaagggtttcttcatgattttttttttttttgagctggagtttcgctcttgttgcccaggctggagtgcaatggcgcgatctcag

SEQ ID NO: 618996 - DNA, 524 bp, Homo sapiens
gaaggagggagagagaatgattgaaaaagtaattatacagtactatgcctamtacctgagtgagtggatcaatcaaaccccaaacctaagcatcaaacaatatacccatgtcacaaacttacacatgtaccccaaatctaaaataaaagttgaagttttttttaattactgaatttggaattagaagtcatggattcagctcctttttctatttattacatatgtgatttgggtgagttatttaacctctctgatcctagctatatcatctgtaaaaacaggaataatgcctgcattgccatgaaagttaaattagaaggctagaactcactagctgtattagtccattttcatggactaatgaagaaatatgaagaaacacctgagactggggaatctataaagaaaaagaagtttaactgactcacagttccacatggctggggaggcctcacaatcatggtggaaggcaaaggaggagcaaaggcacatcttacatggcagcaggcaagagaacgtgtgca

SEQ ID NO: 618997 - DNA, 524 bp, Homo sapiens
gaaggagggagagagaatgattgaaaaagtaattatacagtactatgcctactacctgagtgagtggatcaatcaaaccccaaacctmagcatcaaacaatatacccatgtcacaaacttacacatgtaccccaaatctaaaataaaagttgaagttttttttaattactgaatttggaattagaagtcatggattcagctcctttttctatttattacatatgtgatttgggtgagttatttaacctctctgatcctagctatatcatctgtaaaaacaggaataatgcctgcattgccatgaaagttaaattagaaggctagaactcactagctgtattagtccattttcatggactaatgaagaaatatgaagaaacacctgagactggggaatctataaagaaaaagaagtttaactgactcacagttccacatggctggggaggcctcacaatcatggtggaaggcaaaggaggagcaaaggcacatcttacatggcagcaggcaagagaacgtgtgca

SEQ ID NO: 618998 - DNA, 488 bp, Homo sapiens
gatacagcattggcatggatccaatagaaagaagggtggggccctttgctatgccaggctatatctcttcaattcactggacttcacctggcttcctcctttctgcaccatggcctgaaaattttccccagggggtaaactggagcaatcatagggctcaccagatttgttttccatttcccagggagcactgtctcatgctgcctgatgttcaatatcttgagaaacattattatctgtattttatttagctctttttagtttttttcaggtggaaagataagttagttccctgttactccatcttaggtaaaagcagaagttacaccatgtctgttacctgtttgaggtgggtgacgttatatgtcagttatggacttttattgatatacttagagaataacttaaagatgaagggacatcagaaataagcatttctggagcctttattttatgcyatattttttatgtacatgaatttatttcat

SEQ ID NO: 618999 - DNA, 449 bp, Homo sapiens
ggaaaagataattcccagttcagaaatatgacttgtagagtggcttccttccttatatgagagtttagttgatgaatgtgcaaatagaagactatgatttatccagatttgagtggattattttaggcacataagctcaattatgaaaaataaatattgcttgatatcaagaaaattccttgaagtaaatgtaatctttcttaatgaacactttcttcaaatggtcattttaatatggaattaacattatatactatgtgtactatctttgacttaaacatacaagaacaaagttgwattttttccccctgtggttaaagcaggcatttagagcaaaatgagaaagattatttatgtgactatgtcctctaaaaatactattgtttaggctaggtctttgggagttaaataaagcctgtgaaaaatatcaataaagcaagacagccagc

SEQ ID NO: 619000 - DNA, 657 bp, Homo sapiens
tatcatcttttccctgtgactactaaaatattgagtttctggtattagagagaggtaygcagggaaataccctcaatctaatgctaatgatcctgagaggggtgagccctggattgtgccacatttcaataggtcaactaatatttctctagagttatttgtacaaaggctgaagataactatctttcattgagtgttaactatgtgtcaaacagtacacataatgccatctaatttagtcatcaagaaaatagaagaggatggtaccagatttcggggttaaacgatgaagctaaaagactatatgaaacttagatgttagtaagaaagggaatgatatttgcactcaggtctttttgcatctaagggctatagttgttatatgatgttattttctttttaaagttggtacgtaacagaaggacacattttgagggtacgtgtgataatttgatacattcatataatcaaatcagggtatttgggatatccatcatcttaaatatttgtattttctttatgctaggaacattccaattattctcttttagagattttgaaatgtacaatagattaatattaactatactcaccctactgacgtgttgaacaccagctcttatttcttctatctaatttatatttgtacccattaac

SEQ ID NO: 619001 - DNA, 588 bp, Homo sapiens
atagataaatatggtgttgcaattatgtccagagttgtattatttcacaatttttttgtataaaaaattattttaggtaatgtgaaaaaaaaacycactttgtattgtggtagatgaatatttgtttttccttcaacggtaatcatcagaaatccaaagaagtgtggcttttcatactcacgaaatccaattttggatcttcatccgagttcaaccccacattcccccttaaatgagaaggcagaagaccctcaagcacccggtggcttcttgccaccattttgcaggtgacagtgttttgtttgagaatccactcagctttgaatctgccgcaagccctgggaagctgggctccaccacggagctctgagttatagtgatctctctcattttcatcaaatcatgacacctttcagcatgacatcaaacaacaaaggaggtttgaaatatttgaaatttaggggacagatgcagtggctcatgcctgtaatcccagtgttttgggaagtcaaggtgggagaattgctggaggccaggagatcaagaccagcctgggcagcataggaagatcctatctgatatggtttg

SEQ ID NO: 619002 - DNA, 477 bp, Homo sapiens
atctccccgatttgaaaatactccttataaaatgtatctcctctctgttcwaaaattctataaaatataattgaaaagcacgagggtctcatttaaaacttaaaactatgtaagtgcagaaccaaaaactatacaatgttattcaaattaatcctgcaactaaaatgaactctgccatattacatgtataagtgtgtaatagcaataattatgaatacttatgaactaaatctgagaggacttttttgtcactttctgatagtaactgactaagtgataaataaataaccaaataatcagcattatcatgtgatatggtttggctgtgtccccgcctaaatctcaccttgaattgtaataatccccatgtgtcaagggcagggccaggtggagataattgaatcatgggtgtggtttcccccagattgaatcatgggtgtggtatcccccatattgttctcatccctgtagtgaata

SEQ ID NO: 619003 - DNA, 604 bp, Homo sapiens
caacacacccaggaagatcaaagtgaaagacgaggtagaagctaatgtcagcccacagaagctggatgtgagcacagaggcaggcaggccaatcatgggtagaaggatagagctctctaggggagctaagttcagagcccagagatggcgaaacctgagagtgttttagaaccagaaaggcactgtgacatccctgaggtaatttagggtgctgtaagtagaagcggaaaggaataattagaggaactacattctattcaggtttgtaggaagaataggatggagagagtcagagacttatgaaggccctcatcttcatcacttctagggggctgatggcttcaaagggatggaatccaacatctgacaaatccgggtgtttatcttgctcctaggaagtaaggatggttctttattccttcaaacttaaggatattactttttctctccttaaaatcaaggaaattaattctacataaaaataattayatataatatgtgtataaataacatacatattcatatagattatatatatgtatacatatatgtatgaatttgagaaataaataaaggaaaatgaattaattcaaaagcaaagact

SEQ ID NO: 619004 - DNA, 547 bp, Homo sapiens
aaacaaaacaaaacaaaaaacaacaaaaaactccttattataagctgagatctgtccttccgtatccctaaaaattaactagaataattaaagtctttctcccttatgacaatgcctcgaatatttaaagacacctaatatatccctcccgagcctctcatctccagacacaacttctcccatttcctttaatgttcctcagagagtgtggtttcttctggtctggttgccctgctccaaaaaagcttccatttgtttttatcccctttaaagattcaagtgcagaattgaacataatattttaataatatttcactttatatattaagtcatttaaacttccattccttacacaatatcacattaactcccttaaatgggcaagggatgataggcaagagaaataacatgaagatactattatctacagctgtgttctcccacacagacataaatccatacacacgctttccttgcttcctaaaaggatcttgcctacactttcaaaatcaccctgygtgctgtccgtgagagtttcttcctaaag

SEQ ID NO: 619005 - DNA, 583 bp, Homo sapiens
tgtttcagaattgcagagtataataaaggcatgtcaagtgcatattgtgtccattttcaggtatattagataagctttacaccaagataaattagatatgcttattggtttaatttgtgctaatatatatttaattgaaaaatcaaaaaaawttttttaaattgactgaagttgtattccaaaacatgcaaaatttagtttaaaatagattggatacacttttaaattttaaacaaggtagagggtttagtgctttgcttttttaaaaagtaaatgaaggctgcagctttctgcagtagttgtcttgggaagtagtgtggacatcactcctaagagacgttaaggaagtttagctaacaggctttaaccctttctctccataccagcttttactcttttttttttttttttgagatggagtttagctcttgtcacgcaggctggagtgcaatggcaccatctcggctcatcgcaacctctgcctcctagttcaagcaattctcctgtagttcaagcaattctcctgcctcagcctcccgagtagctgggattacaggcatgcaccatcacatctggctaattt

SEQ ID NO: 619006 - DNA, 583 bp, Homo sapiens
tgtttcagaattgcagagtataataaaggcatgtcaagtgcatattgtgtccattttcaggtatattagataagctttacaccaagataaattagatatgcttattggtttaatttgtgctaatatatatttaattgaaaaatcaaaaaaatttttttaaattgactgaagttgtattccaaaacatgcaaaatttagtttaaaatagattggatacacttttaaattttaaacaaggtagagggtttagtgctttgcttttttaaaaagtaaatgaaggctgcagctttctgcagtagttgtcttgggaagtagtgtggacatcactcctaagagacgttaaggaagtttagctaacaggctttaaccctttctctccataccagcttttactcttttttttttttttttgagatggagtttagctcttgtcacscaggctggagtgcaatggcaccatctcggctcatcgcaacctctgcctcctagttcaagcaattctcctgtagttcaagcaattctcctgcctcagcctcccgagtagctgggattacaggcatgcaccatcacatctggctaattt

SEQ ID NO: 619007 - DNA, 527 bp, Homo sapiens
agctgggattacaggcatgcaccatcacatctggctaattttgtattttgagtagagacggggtttctccatgttggtagggctggtctctaactcctgacctcaggtgatccgcccgcctaggcctcccaaagtgctgggattacgagcrtgagccaccatgcccggccaccagcttttactttaatgccacagccttaaattttctttcaggagaaattattttatgtaaagttacaaaggaaaataatgcttaatatctgtaagcattcgtttggtaagtttgctgcctcctcagtaagttttgatgaaagtgaattttgatgaattactaccttagccgggtagtgacgttaacatgtggcttagctgtccattttctaagatatcaagaaaccagcaacaataagtaaaattgttaaattatgcaagaatcacatgttcctacctgtcatcatttagtcttggttctatttgcatgtgaatatcctttagaatatattactcccagttattccgctttactt

SEQ ID NO: 619008 - DNA, 599 bp, Homo sapiens
tgagactccgcctcaaaagaaaaaaaaaaaaaaaaagaacagcagaggacagtgatttctcataatcaaagctaaggtgaagaaatatttaaagaaaatgacaaatgtataatttcaaatttagattccagaagcttgccaaacatttgttaaattttcttacaaggaaaaaaaacatcattggtcagattcaagatttttttttctttaatgcacaaacatataagaaaaacatctcctttatcttaggactgaccaactgtgcctgctttctttattctcaacagtctatcacatactcgtactcgtggcaacaatactgtgttagattacgaatgcttgtcttggcaaaagagagacaaattcccatcttattactccaaagttctatgttagtagactataacagcaactcaaattctgggcattttagatgtacagaattagaaaaatgatcaagcaaagaagcaaatgttctatgaagaaatttytgagtatcagtttacactaaaaggccaaagtcttaatattaaacatatttcctttttcacctccccctccccccgctactgagcatatttatattgacaggtcacaga

SEQ ID NO: 619009 - DNA, 599 bp, Homo sapiens
tgagactccgcctcaaaagaaaaaaaaaaaaaaaaagaacagcagaggacagtgatttctcataatcaaagctaaggtgaagaaatatttaaagaaaatgacaaatgtataatttcaaatttagattccagaagcttgccaaacatttgttaaattttcttacaaggaaaaaaaacatcattggtcagattcaagatttttttttctttaatgcacaaacatataagaaaaacatctcctttatcttaggactgaccaactgtgcctgctttctttattctcaacagtctatcacatactcgtactcgtggcaacaatactgtgttagattacgaatgcttgtcttggcaaaagagagacaaattcccatcttattactccaaagttctatgttagtagactataacagcaactcaaattctgggcattttagatgtacagaattagaaaaatgatcaagcaaagaagcaaatgttctatgaagaaatttctgartatcagtttacactaaaaggccaaagtcttaatattaaacatatttcctttttcacctccccctccccccgctactgagcatatttatattgacaggtcacaga

SEQ ID NO: 619010 - DNA, 612 bp, Homo sapiens
tgtacaacaaattacactcttttacagaaaayaataaaatatccaagtctctcaccaaattttcaaaaaagaggaaaagtgtaagcttccagatgaaagtttctatagctttccccaaatttagtaccaccatgaaaaacaaattcttcactcattcaaggcatacgactagaaaactaatttccatggcatcaaattaatttcctcctttggagataaaaccatgagatcttttccaaagcattaaaatcgccaagaaaaaaaaaaaaagaaaaaaaagaccattaccagcattttaaaactgagtaagagaatgaagtaaacaaaaaagggaaagaaaaagcttcaaaagttcatttttctcctaatttcttgaactctctattccagaagtacctaatgtttttcttaaaagagaggctttcaatttttccctatgtctaaaggctgctttaagtagcctaagaccaaggacaggagagtgaaaatgaagagggttttggctctccaaggtgggggtggaattgcagctactgcttagggatattttccagtggtcatctcttcaaactccagtgagtctcacaaacagggtgcaccagccaatccaag

SEQ ID NO: 619011 - DNA, 612 bp, Homo sapiens
tgtacaacaaattacactcttttacagaaaacaataaaatatccaagtctctcaccaaattttcaaaaaagaggaaaagtgtaagcttccagatgaaagtttctatagctttccccaaatttagtaccaccatgaaaaasaaattcttcactcattcaaggcatacgactagaaaactaatttccatggcatcaaattaatttcctcctttggagataaaaccatgagatcttttccaaagcattaaaatcgccaagaaaaaaaaaaaaagaaaaaaaagaccattaccagcattttaaaactgagtaagagaatgaagtaaacaaaaaagggaaagaaaaagcttcaaaagttcatttttctcctaatttcttgaactctctattccagaagtacctaatgtttttcttaaaagagaggctttcaatttttccctatgtctaaaggctgctttaagtagcctaagaccaaggacaggagagtgaaaatgaagagggttttggctctccaaggtgggggtggaattgcagctactgcttagggatattttccagtggtcatctcttcaaactccagtgagtctcacaaacagggtgcaccagccaatccaag

SEQ ID NO: 619012 - DNA, 609 bp, Homo sapiens
gcataccaaattaattccccagctgttcacatgcatataagcagctgctgctgttactgcctaacacttatggcagtctggcagcacctctaatctctgccatagcagacaagccactcacctaaggcctctgctgtacttccaaagaaagaatttctcmagtagagactgagtggaactagactgccagctgtgagcctcagagctcctggctgcctgttgctgagtctattagctgctgagcctttctcaccaaaaaaaaaaaaaaaaaaaaaaaaatgagcttaataaaataaccctgcacagaaattttctgaaattaagataacattcaatggaaaacagaatttaatctacagaaatacacttcacagatgttttaggaacagaacctagagaaaatgaaagtcaaaatttaataaaagaatttgtcaggaacttcaaggtaaagactccatgtattttttggcaactataaaacactaagaaggctttttaaatattaaaaagccatttaaacacttcaaattaagattcctcaatatacttcagatttctgtactgagttaccctctcgagtgtttggaagtcttttcttcctcattaagc

SEQ ID NO: 619013 - DNA, 609 bp, Homo sapiens
gcataccaaattaattccccagctgttcacatgcatataagcagctgctgctgttactgcctaacacttatggcagtctggcagcacctctaatctctgccatagcagacaagccactcacctaaggcctctgctgtacttccaaagaaagaatttctccagtagagactgagtggaactagactgccagctgtgagcctcagagctcctggctgcctgttgctgagtctatyagctgctgagcctttctcaccaaaaaaaaaaaaaaaaaaaaaaaaatgagcttaataaaataaccctgcacagaaattttctgaaattaagataacattcaatggaaaacagaatttaatctacagaaatacacttcacagatgttttaggaacagaacctagagaaaatgaaagtcaaaatttaataaaagaatttgtcaggaacttcaaggtaaagactccatgtattttttggcaactataaaacactaagaaggctttttaaatattaaaaagccatttaaacacttcaaattaagattcctcaatatacttcagatttctgtactgagttaccctctcgagtgtttggaagtcttttcttcctcattaagc

SEQ ID NO: 619014 - DNA, 579 bp, Homo sapiens
cttttcaacacactgtacacctcatctatttatcttttccattgcctatcatcaatcatcaattctctatcatgaattcaattgtctttagggttacttacccaagattcttgctacttgttcaagtttgttctcatgggtaaggcttcccacatataatgattctgaggcaagtctctccactattttacaaaattcttaaatcttcttttttgaatacactctagtctgatggctaattcctctcaaacatgtttaccttttttcacctccccaaatatcattctgagtcagtcacaagtctgatataaagggagggtaaaagccaaaagggtgtgtaatttatcaaattgcttcttccaaattcatttctagtactgttaacaagctggctaatagtcaatattgtcagtgtcagagatttagcttaggtctctataaggatataaaagtcaagtaataattatcattccttttatgccaaaaacrtttgctaaatagattgtgttcttcttagcaatcacaatggtgcacaagatttatgaagagaaacaagattagaagaccagtgtcaaaaaa

SEQ ID NO: 619015 - DNA, 473 bp, Homo sapiens
ctatgtgtcagcactgtgcaaagtttaccaacattgtctcatgtaatactcaaagcaaacttatgataggcattatgccttttacagaggaggctttaaaagggtaaataagctccctaagaagacaatgagaaacagaccaaggattagaacccaagcagattccaaggtctgtgatcttcaacactacgcaacaatacctaccctccacrtggagacattatatttttttatagtaaagtttaaggacattactattaaaataagatgaaatatgtggaaaaaatatgaatttctttcttccacaatcattaatcatggcaaataatctcctaatgagccttacctttattgattcaattgataatatatactatatgaactgagatgacagattcaaaatctaatgtcagtagaacttataaatactaagaatagtaattttgagccatcacgctcaaagcattgtacac

SEQ ID NO: 619016 - DNA, 473 bp, Homo sapiens
ctatgtgtcagcactgtgcaaagtttaccaacattgtctcatgtaatactcaaagcaaacttatgataggcattatgccttttacagaggaggctttaaaagggtaaataagctccctaagaagacaatgagaaacagaccaaggattagaacccaagcagattccaaggtctgtgatcttcaacactacgcaacaatacctaccctccacgtggagacattatatttttttatagtaaagtttaaggacattactattaaaataagatgaaatatgtggaaaaaatatgaatttctttcttccacaatcattaatcatggcaaataatctcctaatgagccttacctttattgattcaattkataatatatactatatgaactgagatgacagattcaaaatctaatgtcagtagaacttataaatactaagaatagtaattttgagccatcacgctcaaagcattgtacac

SEQ ID NO: 619017 - DNA, 449 bp, Homo sapiens
cccaggaggtaaaggttgcagtgagccgagatcatgccactgcactccatgcactccagtctgggcaacaaagtgagactctgtctcagaaaaaaaaaaaaaaacaagaaagataaaagaaaactgttttttaacttaccatcaagrtaaatatcactccctaattcagcatcaacccaaaacatagaagccactgcacctgaaaatatataatattcatcaaataaaaatatttcttcacactgagaaacatgattctatccatgttttaatttgccctgataaaattaacaggtaaacacatatatcttcttatggaaattatagtgatagaagctttaactatttatagcaaaagggaattatagtgatagaaccttttactatttatacccattccatttccatctctcttgttatttcctttaaaaaagaccaattctaaccac

SEQ ID NO: 619018 - DNA, 449 bp, Homo sapiens
cccaggaggtaaaggttgcagtgagccgagatcatgccactgcactccatgcactccagtctgggcaacaaagtgagactctgtctcagaaaaaaaaaaaaaaacaagaaagataaaagaaaactgttttttaacttaccatcaagataaatatcactccctaattcagcatcaacccaaaacatagaagccactgcacstgaaaatatataatattcatcaaataaaaatatttcttcacactgagaaacatgattctatccatgttttaatttgccctgataaaattaacaggtaaacacatatatcttcttatggaaattatagtgatagaagctttaactatttatagcaaaagggaattatagtgatagaaccttttactatttatacccattccatttccatctctcttgttatttcctttaaaaaagaccaattctaaccac

SEQ ID NO: 619019 - DNA, 449 bp, Homo sapiens
cccaggaggtaaaggttgcagtgagccgagatcatgccactgcactccatgcactccagtctgggcaacaaagtgagactctgtctcagaaaaaaaaaaaaaaacaagaaagataaaagaaaactgttttttaacttaccatcaagataaatatcactccctaattcagcatcaacccaaaacatagaagccactgcacctgaaaatatataatattcatcaaataaaaatatttcttcacaytgagaaacatgattctatccatgttttaatttgccctgataaaattaacaggtaaacacatatatcttcttatggaaattatagtgatagaagctttaactatttatagcaaaagggaattatagtgatagaaccttttactatttatacccattccatttccatctctcttgttatttcctttaaaaaagaccaattctaaccac

SEQ ID NO: 619020 - DNA, 359 bp, Homo sapiens
taatggtttcctgatacctattgatttttttcccaaaaacttaatagttttccaatttgactcaaataggatttgtgagtaacaggggctgaatcaatgtcygttcttttcaaggaaattactttaccatgacaattatttaacttagaactggagcgtgtcagtctccaaaacgggaaacaactgaattgccaataagaattttgttcactttcttggctaaaacatgattttaattaatgaggggggaaattaaatctactgtatcactactccaaacaataagtcatttaaaaaagcatgaattttttcactcagtaaaatatctaacatacataaatcattttgtaatttttaaa

SEQ ID NO: 619021 - DNA, 359 bp, Homo sapiens
taatggtttcctgatacctattgatttttttcccaaaaacttaatagttttccaatttgactcaaataggatttgtgagtaacaggggctgaatcaatgtctgttcttttcaaggaaattactttaccatgacaattatttaacttagaactggagmgtgtcagtctccaaaacgggaaacaactgaattgccaataagaattttgttcactttcttggctaaaacatgattttaattaatgaggggggaaattaaatctactgtatcactactccaaacaataagtcatttaaaaaagcatgaattttttcactcagtaaaatatctaacatacataaatcattttgtaatttttaaa

SEQ ID NO: 619022 - DNA, 359 bp, Homo sapiens
taatggtttcctgatacctattgatttttttcccaaaaacttaatagttttccaatttgactcaaataggatttgtgagtaacaggggctgaatcaatgtctgttcttttcaaggaaattactttaccatgacaattatttaacttagaactggagcgtgtcagtctccaaaacgggaaacaactgaattgccaataagaattttgttcactttcttggctaaaacatgattttaattaatgagggggraaattaaatctactgtatcactactccaaacaataagtcatttaaaaaagcatgaattttttcactcagtaaaatatctaacatacataaatcattttgtaatttttaaa

SEQ ID NO: 619023 - DNA, 541 bp, Homo sapiens
actacagtttaatatttcagttgagaagttaagcacacttattttcacagataacttaaaatacatgaggataaagaccatatgtttacctttatttttaaaatattgagttttaactgcattgcagataataaacattaaacaaagttaactaataacagaagcattttcaagtatttttcatgagttgcaatagagtccatacaaaagtgcyttcctaattcctaaaaaaaacattttttcgccaggcatggtgcctcatgcctgtaatcccagcaactttgggaggccgaggcgggtggatcacaaggccaggagctcaagaccatcctggccaacatggcgaaaccctgtctctactaaaaatacaaaaattatctgggcatggtggcgcacgcctgtagtcccagctactcaggaggctgaggcaggagaatcactttaacccaggagacagaggtggcagtgagctgagattgcaccactgcactccagcctggcgacagagagagactccatctcaaaaaaaataaaataaaat

SEQ ID NO: 619024 - DNA, 541 bp, Homo sapiens
actacagtttaatatttcagttgagaagttaagcacacttattttcacagataacttaaaatacatgaggataaagaccatatgtttacctttatttttaaaatattgagttttaactgcattgcagataataaacattaaacaaagttaactaataacagaagcattttcaagtatttttcatgagttgcaatagagtccatacaaaagtgctttcctaattcctaaaaaaaacattttttsgccaggcatggtgcctcatgcctgtaatcccagcaactttgggaggccgaggcgggtggatcacaaggccaggagctcaagaccatcctggccaacatggcgaaaccctgtctctactaaaaatacaaaaattatctgggcatggtggcgcacgcctgtagtcccagctactcaggaggctgaggcaggagaatcactttaacccaggagacagaggtggcagtgagctgagattgcaccactgcactccagcctggcgacagagagagactccatctcaaaaaaaataaaataaaat

SEQ ID NO: 619025 - DNA, 541 bp, Homo sapiens
actacagtttaatatttcagttgagaagttaagcacacttattttcacagataacttaaaatacatgaggataaagaccatatgtttacctttatttttaaaatattgagttttaactgcattgcagataataaacattaaacaaagttaactaataacagaagcattttcaagtatttttcatgagttgcaatagagtccatacaaaagtgctttcctaattcctaaaaaaaacattttttcgccaggcatggtgcctcatgcctgtaatcccagcaactttgggaggccgaggcrggtggatcacaaggccaggagctcaagaccatcctggccaacatggcgaaaccctgtctctactaaaaatacaaaaattatctgggcatggtggcgcacgcctgtagtcccagctactcaggaggctgaggcaggagaatcactttaacccaggagacagaggtggcagtgagctgagattgcaccactgcactccagcctggcgacagagagagactccatctcaaaaaaaataaaataaaat

SEQ ID NO: 619026 - DNA, 541 bp, Homo sapiens
actacagtttaatatttcagttgagaagttaagcacacttattttcacagataacttaaaatacatgaggataaagaccatatgtttacctttatttttaaaatattgagttttaactgcattgcagataataaacattaaacaaagttaactaataacagaagcattttcaagtatttttcatgagttgcaatagagtccatacaaaagtgctttcctaattcctaaaaaaaacattttttcgccaggcatggtgcctcatgcctgtaatcccagcaactttgggaggccgaggcgggtggatcacaaggccaggagctcaagaccatcctggccaacatggygaaaccctgtctctactaaaaatacaaaaattatctgggcatggtggcgcacgcctgtagtcccagctactcaggaggctgaggcaggagaatcactttaacccaggagacagaggtggcagtgagctgagattgcaccactgcactccagcctggcgacagagagagactccatctcaaaaaaaataaaataaaat

SEQ ID NO: 619027 - DNA, 510 bp, Homo sapiens
atttaactgtaaggtttaaaaatatatttctcaaacttttccagtaagaaacttctagtgtaagtgcataaaccgcccttcacgaaactaccaagttcacaaacttgtggtttcgagtatccctgtacactctaaacgttcttagtttgagaaatagtcttggaggacagagattttattcttacttcctacgcagtggtttacaaacagacctcaaaaaaaaagtgtttaagataggagcgctccctgccarctggctggaggactctggctcgtggggaaggggaatctactgacgaaagccccacgtgtcgggcattttacagacgggacatcctttaatggcaacaggtaggtggttccggccctgtttcacaggtgacaggtatttctccattttcaggtgaggtagatgagcgtcaggaaggtaagataacttggtaagaggtcacagagacaattaggggggcgtgtcttagcgtcaaagccttgcttcaaaggctaactttc

SEQ ID NO: 619028 - DNA, 510 bp, Homo sapiens
atttaactgtaaggtttaaaaatatatttctcaaacttttccagtaagaaacttctagtgtaagtgcataaaccgcccttcacgaaactaccaagttcacaaacttgtggtttcgagtatccctgtacactctaaacgttcttagtttgagaaatagtcttggaggacagagattttattcttacttcctacgcagtggtttacaaacagacctcaaaaaaaaagtgtttaagataggagcgctccctgccagctggctggaggactytggctcgtggggaaggggaatctactgacgaaagccccacgtgtcgggcattttacagacgggacatcctttaatggcaacaggtaggtggttccggccctgtttcacaggtgacaggtatttctccattttcaggtgaggtagatgagcgtcaggaaggtaagataacttggtaagaggtcacagagacaattaggggggcgtgtcttagcgtcaaagccttgcttcaaaggctaactttc

SEQ ID NO: 619029 - DNA, 510 bp, Homo sapiens
atttaactgtaaggtttaaaaatatatttctcaaacttttccagtaagaaacttctagtgtaagtgcataaaccgcccttcacgaaactaccaagttcacaaacttgtggtttcgagtatccctgtacactctaaacgttcttagtttgagaaatagtcttggaggacagagattttattcttacttcctacgcagtggtttacaaacagacctcaaaaaaaaagtgtttaagataggagcgctccctgccagctggctggaggactctggctcgtggggaaggggaatctactgacgaaagccccacgtgtcgggcattttacagacgggacatcctttaatggcaacaggtaggtggttccggccctgtttcacaggtgacaggtatttctccattttcaggtgaggtagatgagcgtcaggaaggtaagataacttggtargaggtcacagagacaattaggggggcgtgtcttagcgtcaaagccttgcttcaaaggctaactttc

SEQ ID NO: 619030 - DNA, 629 bp, Homo sapiens
actcaccattaaaacaatcctggaccctcaaagggttaggtaccactgtgccaattaccacagtgctaatattcagaggaagatctgaagctgagaagcttaaacttttttcccaaggtcactaatacctggcctgggaaagacctaattaaggtgaaacttgagtctttgcattgtagtaggagtccgcctaggtgggagcagagcagagcagataagctcttaaactgtctggatttcagcagctcagctttctgacaataaccttgccatatgtcctttggcacaattccctactaattccctactactcccctttgcttggttcttctctcttgaatagttatgttaatcaccataagaaaaagaactgtagctatatccaaataagaagaaagctaaaaataataccaacttggttttgtttttcgtttttttctttctcatttttgcaacttcctgcaaaggaaacaacatactagtggccagcaatagctactggtttagaggaaaggaarctgagagtttcaaaattaacccagttcctcttatctagctgtggcaagtaaataaataaaatatttttaaatgtttaaagtttatcagtttatttaacatttttcattggg

SEQ ID NO: 619031 - DNA, 607 bp, Homo sapiens
tcattatctttggtggttaaaccattctattaataagtcttagcttacagttgagtcacttgtaagtcagcttgccatgaaattaaaaaaaaaaaaaaagaaaacaccattcaaagccctcaagctgacaagttgagtggtgcaccaatctctctaaaagaaactatattttagatactataggagtggtggaatgacaggagyggaggttgggcaaaatgaaaaaaaatgttttgcaatgatgtatggtgtaatagtttaggagagagtctaaataatttcttccattgtcattagaaatttttaactgacatttgtggctataagtttcactttctaatttttatagtgttagagaaggatattccaaaatccatagacacctgcttataattccttaaacgtaagtaaaaggcatgaaactaatgatccttctccattcttccttcccctttctattccctcgaagagtgtttaatcatacttaattgaaataccatggtactggcaaagccaggtctttctggcttctagaccagggtcttttgagtcctatagctctgtccttcagtcattgtcttagaccttttgtgctgctataacaaaa

SEQ ID NO: 619032 - DNA, 607 bp, Homo sapiens
tcattatctttggtggttaaaccattctattaataagtcttagcttacagttgagtcacttgtaagtcagcttgccatgaaattaaaaaaaaaaaaaaagaaaacaccattcaaagccctcaagctgacaagttgagtggtgcaccaatctctctaaaagaaactatattttagatactataggagtggtggaatgacaggagcggaggttgggcaaaatgaaaaaaaatgttttgcaatgatgtatggtgtaatagtttaggagagagtctaaataatttcttccattgtcattagaaatttttaactgacatttgtggctataagtttcactttctaatttttatagtgttagagaaggatattccaaaatccatagrcacctgcttataattccttaaacgtaagtaaaaggcatgaaactaatgatccttctccattcttccttcccctttctattccctcgaagagtgtttaatcatacttaattgaaataccatggtactggcaaagccaggtctttctggcttctagaccagggtcttttgagtcctatagctctgtccttcagtcattgtcttagaccttttgtgctgctataacaaaa

SEQ ID NO: 619033 - DNA, 607 bp, Homo sapiens
tcattatctttggtggttaaaccattctattaataagtcttagcttacagttgagtcacttgtaagtcagcttgccatgaaattaaaaaaaaaaaaaaagaaaacaccattcaaagccctcaagctgacaagttgagtggtgcaccaatctctctaaaagaaactatattttagatactataggagtggtggaatgacaggagcggaggttgggcaaaatgaaaaaaaatgttttgcaatgatgtatggtgtaatagtttaggagagagtctaaataatttcttccattgtcattagaaatttttaactgacatttgtggctataagtttcactttctaatttttatagtgttagagaaggatattccaaaatccatagacacctgcttataattccttaaacgtaagtaaaaggcatgaaacwaatgatccttctccattcttccttcccctttctattccctcgaagagtgtttaatcatacttaattgaaataccatggtactggcaaagccaggtctttctggcttctagaccagggtcttttgagtcctatagctctgtccttcagtcattgtcttagaccttttgtgctgctataacaaaa

SEQ ID NO: 619034 - DNA, 607 bp, Homo sapiens
tcattatctttggtggttaaaccattctattaataagtcttagcttacagttgagtcacttgtaagtcagcttgccatgaaattaaaaaaaaaaaaaaagaaaacaccattcaaagccctcaagctgacaagttgagtggtgcaccaatctctctaaaagaaactatattttagatactataggagtggtggaatgacaggagcggaggttgggcaaaatgaaaaaaaatgttttgcaatgatgtatggtgtaatagtttaggagagagtctaaataatttcttccattgtcattagaaatttttaactgacatttgtggctataagtttcactttctaatttttatagtgttagagaaggatattccaaaatccatagacacctgcttataattccttaaacgtaagtaaaaggcatgaaactaatgatccwtctccattcttccttcccctttctattccctcgaagagtgtttaatcatacttaattgaaataccatggtactggcaaagccaggtctttctggcttctagaccagggtcttttgagtcctatagctctgtccttcagtcattgtcttagaccttttgtgctgctataacaaaa

SEQ ID NO: 619035 - DNA, 465 bp, Homo sapiens
ctttgttctggagcttgctttcttcacttgacaatatgcactgatactctttccttctcactagaattagaaatacatcactcatcttttatttttttttttttttgagacgaagttttgctcatggtgtccaggctggagtacaatggtgcagtcttggctcactgcaacctctgcctccaaggttcaggcaattctcttgcctcagcctcccaagtagctgggattacaggcacccgccacaacgcctggctaatttttgtatttttagtacagatggggtttcaccacattggccaggctggtcttgaactcctgacatcagataatccacctgcctcggcctcccaaagtgctgggattacaggtgtgagccaccrtgccagaccatacatcattcattttttaaaccacttcatgttattccataatagagatgtaactatttcatcatatcttcaaaag

SEQ ID NO: 619036 - DNA, 465 bp, Homo sapiens
ctttgttctggagcttgctttcttcacttgacaatatgcactgatactctttccttctcactagaattagaaatacatcactcatcttttatttttttttttttttgagacgaagttttgctcatggtgtccaggctggagtacaatggtgcagtcttggctcactgcaacctctgcctccaaggttcaggcaattctcttgcctcagcctcccaagtagctgggattacaggcacccgccacaacgcctggctaatttttgtatttttagtacagatggggtttcaccacattggccaggctggtcttgaactcctgacatcagataatccacctgcctcggcctcccaaagtgctgggattacaggtgtgagccaccgtgccagaccatacatcaytcattttttaaaccacttcatgttattccataatagagatgtaactatttcatcatatcttcaaaag

SEQ ID NO: 619037 - DNA, 478 bp, Homo sapiens
agagaagagagcttgtgcagggaaactccccttttcaaaaccatcagatctcatgagacttattcactatcacaaaaacagcatgagaaaggcctgcccccatgattcaactacctcccactgggtccctcccacaatacatgggaatccaagatgagatttgggtggggacacagccaaaccataccattccaccccagcccytcccaaatctcatgttctcacattttaaaatgagtcatggcttcccaaccgtctcccaaagtcttaattcattttagtattaattcatttcagcgttaactcaaaagtccacagtccaaagtccaaagtctcatccgagacaaggcaagtcccttccacctacggggctgtaaaatcaaaagcgagttagttacttcctagatataatgggggtacagcatttggtaaatacagccatcccaaatgggagaaattggccaaaacaaaggggaaa

SEQ ID NO: 619038 - DNA, 478 bp, Homo sapiens
agagaagagagcttgtgcagggaaactccccttttcaaaaccatcagatctcatgagacttattcactatcacaaaaacagcatgagaaaggcctgcccccatgattcaactacctcccactgggtccctcccacaatacatgggaatccaagatgagatttgggtggggacacagccaaaccataccattccaccccagcccctcccaaatctcatgttctcacattttaaaatgagtcatggcttcccaaccgtctcccaaagtcttaattcattttagtattaattcatttcagcgttaactcaaaagtccacagtccaaagtccaaagtctcatccragacaaggcaagtcccttccacctacggggctgtaaaatcaaaagcgagttagttacttcctagatataatgggggtacagcatttggtaaatacagccatcccaaatgggagaaattggccaaaacaaaggggaaa

SEQ ID NO: 619039 - DNA, 478 bp, Homo sapiens
agagaagagagcttgtgcagggaaactccccttttcaaaaccatcagatctcatgagacttattcactatcacaaaaacagcatgagaaaggcctgcccccatgattcaactacctcccactgggtccctcccacaatacatgggaatccaagatgagatttgggtggggacacagccaaaccataccattccaccccagcccctcccaaatctcatgttctcacattttaaaatgagtcatggcttcccaaccgtctcccaaagtcttaattcattttagtattaattcatttcagcgttaactcaaaagtccacagtccaaagtccaaagtctcatccgagacaaggcaagtcccttccacctacgggsctgtaaaatcaaaagcgagttagttacttcctagatataatgggggtacagcatttggtaaatacagccatcccaaatgggagaaattggccaaaacaaaggggaaa

SEQ ID NO: 619040 - DNA, 608 bp, Homo sapiens
cagtcagctagagggatattcaaaatcgcatttcagatgaagtatgagcatgagcaatatattcacctggtgctcacaaatcccaaggaaagttaactagccacttggggatgtagttacagtttctctactgtagatgcactttgggaaaagggcaataagttggaaagagttctgccaggaatgagattagtttatacactggtttcaagccctagtttttcacatatgtgaaaaatgaaactagaaacatgtgctctgaggttgcacctgattcattccttgttttaagtcagacacctagagtggtgatcaggcctgttgctttataggaggattcactcaatctttccccagagggcttatcaaagtcctcatcaatattttccacaagaggacagtgatcccttttcccaggatcaggaaggatatatgtgacttttcccacttcttctatcccatgttagatccatcaacacatttcatcacttagttaactcaaacctgcctcartggagcacattttattgttacagcttccaaaaattctaaagagtaaatttcccttctattgtaccaaaagcctttaaaaaaatcagaacaagtct

SEQ ID NO: 619041 - DNA, 632 bp, Homo sapiens
ctttacccagaattaatcatacagaggcaaagagggtattttttaacagttttgttttgtctttctacataaaatatcagatacaagaaataaagaacagattgacaagagtcaatttacatctactaagtgctgcagaaagtggaaaaaaaatgaaaaaagaaaagatgaagtattacttgaagaaataatgagttttccagaactgaagaaatgagtaaatagacttgagtactgtgggcattcastagcataaatagggataaatctaggccaagaggcatcttaacaaaactgtagaatactgaagaagtgagggggggaaaaaggaaatttaaagctaacaggaagagagaaaaaaagagatgaccatgacaattatactgataactgactcatcagcagtaataataaatgccagaaaggaatgaacgaatattttgaaagtactgagggaaaattactgtcagtttagcaggttttatacaactaagctatttttcaggaaagaggctaaaatttaagcattttttttacatataaaaacaaaggaatttaccactcatatgcctttgctaatagatttattaaagaatgtatttcaggaaaacaacaaattaacataaaaggaa

SEQ ID NO: 619042 - DNA, 632 bp, Homo sapiens
ctttacccagaattaatcatacagaggcaaagagggtattttttaacagttttgttttgtctttctacataaaatatcagatacaagaaataaagaacagattgacaagagtcaatttacatctactaagtgctgcagaaagtggaaaaaaaatgaaaaaagaaaagatgaagtattacttgaagaaataatgagttttccagaactgaagaaatgagtaaatagacttgagtactgtgggcattcagtagcataaatagggataaatctaggccaagaggcatcttaacaaaactgtagaayactgaagaagtgagggggggaaaaaggaaatttaaagctaacaggaagagagaaaaaaagagatgaccatgacaattatactgataactgactcatcagcagtaataataaatgccagaaaggaatgaacgaatattttgaaagtactgagggaaaattactgtcagtttagcaggttttatacaactaagctatttttcaggaaagaggctaaaatttaagcattttttttacatataaaaacaaaggaatttaccactcatatgcctttgctaatagatttattaaagaatgtatttcaggaaaacaacaaattaacataaaaggaa

SEQ ID NO: 619043 - DNA, 521 bp, Homo sapiens
ggaatgaactgataccttcatttaggtaaagtacaacacaagtacaaattaggattagaataaaataaacattcagatcatcagtttagaaccaacaggcactaagctccagcttcctcggtttaaagttaaaataaattaaggttggtgaaagttctcaaccaaagtcacatagctagttaatggccaagccaaattagaacccaagtctcttgcatctcagtttctcattatttcccatacactatatggctttactaatcatctaaaaaaaagagctatgctttttctttgtaattttaccttttgtatattcccttttaatataaatacaaacatccagtttcactcaaaaccaactaaacattttctatgtgcaagatatyctgtaagacactaacaaggggctgtaaagttgacaaagatttgtcttctgccctcaaggaacatataatctaacaggaatctaacagtatgatcctatttgagcaaaatagatatccaagcttattctacataag

SEQ ID NO: 619044 - DNA, 644 bp, Homo sapiens
tcattgaaattctctcaactttcttgatggaggcagttgaacaaagtctttccacaaaaagagaatcatcaaatattagtgatggaaaggaacttgaaactcatctaattgaagctctcactacaaactctgctyaactactttcagtgatagggagctctccacatcacagtttagcctgctcatgtctgaagagctctgtttaaagagcacttcttcaggctgagctgtaatctgccaccctgtatcttcctcctgcctgctttagggagacttctgcagccatgccaacatttaaagaccaccattatactccactcctatgctttgtgagtttttaaggaaatatccccattctctccagtattttcttgttggatattattcccacaccattccacatgcctggtctctcagaaaatcaaccatatcaggaggagtatggagaacagcctacagaaagcagagtatttacaaaaacaagagatgataatgaagcaacaaagagaaatagagagacaaaaagagaaactgacacacttcaaggccaaatagtgagtgcacagtcctttatagctctgaagttccaagagaatagacaggatttgaagtagcatatttaagagcattgcttccttaaaaaa

SEQ ID NO: 619045 - DNA, 401 bp, Homo sapiens
tgaattttaatccattttgttcactactgtataaccaggacttggaacgatacagggtacatagtaggtgcttaataacatcagatggatgaatgaatgaattccaaatttgctgaacatcacaaagatctagccacacacaaaaatatttaacttaaacccttgatttaaattctgccatcctccattttctcatctgtaaaatggaataattagagtgtctaacacttaggactgttgtaaagattaaaagagaaaacaaatggaaaacacataagatagtgtcttacatattrattcattattttgattcgtttaggaaaagaatcaaggataataaaaataacacctaaaatttacatagaattttactctgtatgaatttatacaattgttttcat

SEQ ID NO: 619046 - DNA, 613 bp, Homo sapiens
tgttttcccattaggaaaaaaatagtcccctcttatcatgtcaccatgcatttgtaccttgcacaaaggcaccatcaaaagcagtgaatgggagctgaaataagcccagattccactctccaagttaaatgccctggcatgggattgttacctcacagaggaggcatcttttcctaatttgttcacccacagaggatgccttttgttaattcccataaggcaccttataaaccagctgcattcctattccttcatagttctctaccccttggactgtaggatacatggatattagcttcatattttgcactaatgttttcactcaaaaaaaaaaacagatataaaccaaatgaatacattagcaaaatgkaagatgtgggtcagatctattctggagatgaggatgatgctatcaaaacagaggccttcatgggtcttgggtgcaagttataatttattcttctaaaatgaccctgtttagactaaaggtcattccatgacaaaacactgtagaacaccagaaagttctaatttcacaagcctaattcataaagaccatagaaagggtgtagttaatgtcaacaacgtatattcctcaaaccaaacaacctca

SEQ ID NO: 619047 - DNA, 554 bp, Homo sapiens
gcttgttgctgcatatacatttttctcttcttacatgatttttaactttaatgaatcttacattttttatattgccttaaaaggacaagttagtaacaagctcaccacgctttcttctagtaaccatggttaaaaaccttcgggataagagcttttctcctcatcacaactaatatctaccccactgccacatctctacaaccagccccttggccactgttgacctcactttagcaaaaaatccaaatcatgcatacataatgtacttagtgtacctccatcactataaggctgaaacatgttgctcagtggttccttccaaagcattagttgtttcttcctttatgttacacaaaagtggaggttactaaatgctactgcaagttcagaaaatgtgcttgcccatgctattcacttaattaggtctgtcttctcctttcatctcaaatgtcctcatttgttatgatacatgcattcttttaataaatacgtctttggtgggcattttaygccaaacagtatgttaggtgctgggaatgcaagagggaataaag

SEQ ID NO: 619048 - DNA, 450 bp, Homo sapiens
gtgggtagacaggaggaaggccagagtttagctttctaaagtctctttcgyttcttgcttgtagtttatgggaagctgaattccctgcagagggtatgtagagagcacgaaggtagggactcagtgggcatatcaaggaatctgtcaaggtaagaaggggtagcctgaaccaactgccagtcaactgttgagtccttgaaaaaccactaggaaaacaaaaacaaaaacaaatgcaaacaaataaaacttgatcacccatagctaagttcttagatttaatgtggtaagagaaaatatcaatttgacagagtcttattactatctcaaaaggaaaaaattcatgggaaaatattttatttggacttaggaggagacatattatgatataatagttttgaattggtgaataaagtgaacaccctgacgtaagaatcttgaagcaaatcctga

SEQ ID NO: 619049 - DNA, 450 bp, Homo sapiens
gtgggtagacaggaggaaggccagagtttagctttctaaagtctctttcgtttcttgcttgtagtttatgggaagctgaattccctgcagagggtatgtagagagcacgaaggtagggactcagtgggcatatcaaggaatctgtcaaggtaagaaggggtagcctgaaccaactgccagtcaactgttgagtccttgaaaaaccactaggaaaacaaaaacaaaaacaaatgcaaacaaataaaacttgatcacccatagctaagttcttagatttaatgtggtaagagaaaatatcaatttgacagagtcttattactatctcaaaargaaaaaattcatgggaaaatattttatttggacttaggaggagacatattatgatataatagttttgaattggtgaataaagtgaacaccctgacgtaagaatcttgaagcaaatcctga

SEQ ID NO: 619050 - DNA, 577 bp, Homo sapiens
attcaaagatatttacggcatgaaattgagttctaaaactcttgtatctttaacaaccattttgtawttaaataactgttgacatttacaatcattgaagaactatttgaactctgtagagtatagatattgaagtacaaaattaattatgagataatatatggagcctgtcggctttattttttaataagtatgtatgtatgccaataaaggcatttttgtttccttatgtaaaatgtcctatcacccctcagctgattttgctatatccacaaacactacagttagcagttgagttttcttatttgctttttctttaaaaattatttataacttttggtttctgaaaaaattggtaataaaacaggcaacgtaggaaaaagaattatctggtggtagagcagacagaaaaataaacacttcagcatttatttttaatgacctagttaaccccactcactggatttatatagctgacagtttgacctcttttattgctgatatgaattgaaatttattccatgaactacacgattgatcattaagaaaataaagacatgaaaagtggcaagactta

SEQ ID NO: 619051 - DNA, 455 bp, Homo sapiens
tgggttcgatcgattctcctgcctcagcctcccgagtagctgggattacaggcacacatcaccamatccagctaatttttgtatttttagtagaaatggggtttcaccatgttggtcaggctggccttgaactcctgaccttaggtgatccacccgcctcaaactctcgaagttctgggattacaggtgtgagccaaggcacccggcccctagtccactcttggtgttttgtctttttttccattcttatcttaacctcctgagtcaacattctctttcttgtgtgtctcccgcatcttgctagccttattctatctccttttattgtacagttttttctattcattattctgaacaatactcacaagttccagaacaaaaaaaccagatgcaaaatctacctgggggcggggatggtgggagaagaatgaaacatgtaaatactgctatattaa

SEQ ID NO: 619052 - DNA, 456 bp, Homo sapiens
ccaggattttgtctgacgccagaagagaacacaaagaaaaacagattccgtctatgagtccgtgatccagttaggacagaagcgcycatgaaagaaaagggaagttgataaagagctatataccccttctcagtcacaccaaaacccttcccgtcacagctgctccggaagacagcttcttttggtgtctgcagcaatgaacagagtccacctggttatttgaaatacatgagcccaagcacacttgcgaagattccacagagcagtgtgtgttcctaaccactgatttctccaccttttacttgctcttcttacataagggaaaaacattatgggtttgctcagttttctgtcgaagttcgtattttcctcctggtactcataacctagaacatttggcccagcccagctgtttccaactcagcagaaaaatgttgacattgatttcctgaattc

SEQ ID NO: 619053 - DNA, 441 bp, Homo sapiens
ccaggattttgtctgacgccagaagagaacacaaagaaaaacagattccgtctatgagtccgtgatccagttaggacagaagcgcccatgaaagaaaagggaagttgataaagagctatataccccttctcagtcacaccaaaacccttcccgtyacagctgctccggaagacagcttcttttggtgtctgcagcaatgaacagagtccacctggttatttgaaatacatgagcccaagcacacttgcgaagattccacagagcagtgtgtgttcctaaccactgatttctccaccttttacttgctcttcttacataagggaaaaacattatgggtttgctcagttttctgtcgaagttcgtattttcctcctggtactcataacctagaacatttggcccagcccagctgtttccaactcagcagaaaaatgttgacat

SEQ ID NO: 619054 - DNA, 581 bp, Homo sapiens
gcaggtctttcccgtgctgttctcatgacagtgagtaagtctcatgagatctgatggttttaaaaagcaaagtttccctgcacaagctgtcttctctcgtctgccaccatgtgagatgggtctttcaccttctgccatgattgtgaggcctccccagccacatggaaccgtaagtccaataaacctctttyttttgtaaattgcccagtcttggatatgtctttatcagcagtgtgagaacggaccaatacaagctacttcctcatgggccctgctccttcctccctgataatttattctggccaggaccttgccctccatcattatacctggagagactgaagtcagaaagatggaggaagcttcgttatttatcctggcccatctcagataaagcagcatttgaggaccccgtgtgggttcagtggtgatcatagattgctttttaaaaaaattagtattttagtatcattttaacgatttatggaaatacagcaatcggttgttttgctccagagctgcagccactaggtcagaatcagagcctagttaatcatgaggccatggggcagtgacctgga

SEQ ID NO: 619055 - DNA, 635 bp, Homo sapiens
tattcccagttctccacaaacatcctgcatgggttacatttttattagatgtttgggcatcttcttttttggagttcctatgtctttgggtaatttttcatttgcattatatctgcctttttacaactggtttgtagggcttctttatacgttctagttgtgtgtctaaygttgattacaaatattgcaatagtcttctattttgtggtttttattttactctctcagtggtgtcctttgataaacagaagttcttaatttttaaatagtctggtttatccatctttttctatataattaataattttttgttccatttaagtaactctaaccccaaaggcgtaagatcctcttatgtttatgatctagaagcttttttgttctatctttaacgtgaggatacttggaacagacttttgtgtatgttaaggtaggggtctgattttcattttttccatacagatatcccacagacccagcaccatttattgagaagacaatctctttcccctgcacttcagtcattccattaaaaaaaactgactatcattttgaatggtgagtttgatgtgctaaattatttttgtaaaatacattaaagtacacatgtatttgtgaaaataaaacatgtttaa

SEQ ID NO: 619056 - DNA, 477 bp, Homo sapiens
tcaccttctgccatgattgtgaggcctccccagccacatggaaccgtaagtccaataaacctctttcttttgtaaattgcccagtcttggatatgtctttatcagcagtgtgagaacggaccaatacaagctacttcctcatgggccctgctccttcctccctgataatttattctggccaggaccttgccctccatcattatacctggagagactgaagtcagaaagatggaggaagcttcgttatttatcctggcccatctcagataaagcagcatttgaggaccccgtgtgggttcagtggtgatcatagattgctttttaaaaaaattagtattttagtatcattttaacgatttatggaaatacagcaatcggttgttttgctccagagctgcagccactaggtcagaatcagagcctagttaatcatgaggccatgggrcagtgacctggagcacccgcctatatggaatt

SEQ ID NO: 619057 - DNA, 649 bp, Homo sapiens
ttttactatattcaagtatattcattaacaatatatagtattgctttgtatgtttaaacgtatatgtaaacgacaccatactgtacacaaccttttgcaggatactttctttactcaaaattatgcttctcggttttatccatgttgctgtaggtaactttcatttattcatttttaaccacgatgtagtagtattcccttatatgagtgtaccacaattgaatcattcatttccttygttagaaaaaataaggaatgatgctctctttctcagtaatctgtaagggtttctttagtgttcatacacaggaccagaactgcagggtatgcaatttgattttactagttattgcctgcccagttgttttctaaaatggttgtaaatttacaatcccatcagaaatgtataaaatttccaatttctttgagtctcaaccaaactttgatattgttacatttataaattttttccacccaattggggtgaaatgacatctatattagccagaactcagaaaaccagacaccacacaaggtatttcaaacagagtgactttaatacaggaaattgcctacatagatgttggagagctgatagggccaaaagggaacacagaggtaactcagagataataactgcaggaagcag

SEQ ID NO: 619058 - DNA, 509 bp, Homo sapiens
ggggtgaaatgacatctatattagccagaactcagaaaaccagacaccacacaaggtatttcaaacagagtgactttaatacaggaaattgcctacatagatgttggagagctgatagggccaaaagggaacacagaggtaactcagagataataactgcaggaagcaggtaccaacctgagggctagaggaataaaagaagtttgggaaccaggacctaggagctcagagtatgggtcctgcggtcctgcagagctggtgctgagacctaggaatggtatgtggctgctattggtatatggaaggattgtggtgaggctgggtttgggartacatcaagaaagtaggggctggagccaactgctgctgctggagtgatgctggcaggaaaggaagaaacaggaaccaagtcccttctctcctcatcttgccttccaatcttcctcgagtgcctttcgttgtgggaacctaacaggaagccagctggtcctggagtctgggaagggttg

SEQ ID NO: 619059 - DNA, 587 bp, Homo sapiens
aattgcctacatagatgttggagagctgatagggccaaaagggaacacagaggtaactcagagataataactgcaggaagcaggtaccaacctgagggctagaggaataaaagaagtttgggaaccaggacctaggagctcagagtatgggtcctgcggtcctgcagagctggtgctgagacctaggaatggtatgtggctgctattggtatatggaaggattgtggtgaggctgggtttgggaatacatcaagaaagtaggggctggagccaactgctgctgctggagtgatgctggcaggaaaggaagaaacaggaaccaagtcccttctctcctcatcttgccttccaatcttcctcgagtgcctttcgttgkgggaacctaacaggaagccagctggtcctggagtctgggaagggttgtgttcagagtcctggcctcagcaagagcagaatacaaaagggtagatgtgagctgagagacattgggtaaataacctgcatagaattgcactgtgtgtatattgcatctcggttctttccatttttatgtgtagctattttaaatggtgcttcacaaacatcct

SEQ ID NO: 619060 - DNA, 490 bp, Homo sapiens
ccacgaggcagtagaaacctgggttcctgatgactgtggagctgccgaactaatctggacctccagattccatacctgcaagacacatgaacatctgtcttatgtaagccactattactttttttgtttgtttkttttttcctgtatggcagaacataatcttaaggaacacaaaggccaagggcatcttttccattcagggctgcagttctcaaacccagccgcacttcagaatgctcgggcctcccaaagaccaacacattgagacttgctggagggcgtggctgcacattggtcgtttgaagctccctaggtgattctagtgtgtaggaactgatctaggactgaaaaggatgtgaagagggcatgttcctaaagagagaagaaccaggagagtgagctgtgaaggcctgaggagggaatttgagttaaaaaacaggcgggcatcagcactgaatgcctcagttggaagctggggaggggggaagcc

SEQ ID NO: 619061 - DNA, 490 bp, Homo sapiens
ccacgaggcagtagaaacctgggttcctgatgactgtggagctgccgaactaatctggacctccagattccatacctgcaagacacatgaacatctgtcttatgtaagccactattactttttttgtttgtttgttttttcctgtatggcagaacataatcttaaggaacacaaaggccaagggcatcttttccattcagggctgcagttctcaaacccagccgcacttcagaatgctcgggcctcccaaagaccaacacattgagacttgctggagggcgtggctgcacattggtcgtttgaagctccctaggtgattctagtgtgtaggaactgatctaggactgaaaaggatgtgaagagggcatgttcctaaagagagaagaaccaggagagtgagctgtgaaggcctgaggagggaatttgagttaaaaaacaggcgggcatcagcactgaatgcctyagttggaagctggggaggggggaagcc

SEQ ID NO: 619062 - DNA, 668 bp, Homo sapiens
actgatagcattaaaaaaaattgaggcggttttcaaaaatcaggctattttactttatactctgagtcctggtttctcttgaaacattagaagatatagcaacatcagtctcacattcctagcttcccgcacatgcagcaatatggcaggccattcatgactgttccccttggacgggcatcctttccgttagcttttgctgtggtctcctccactcacgcagcatatgcctaggcatgtatgcccagcctgcttgacctgcttacttcacaggcctggatcctgcagagatgggttcatcacccctggtgcaatgtggatgagcactggctcaagattgggttgcttagcccttgtgtgacctctcagtgcctcaaattcytcttccataaaactggcattaagaatgggttgttacaaaaattgtgtctgttgcacctcttagctggtgccctgtggagttgtgcagactgcacggccacccatggtggcctcggctgggagaccaaccttggaaactggtggcagccaagggaaagccaaagtgcagagcagcagcaggcacagcacctgcctcatggcctcgccacctccctcaattacaagaggtcatgggagccatcgtagggcaaagggatgtcccaggtgacattcactatagatcacga

SEQ ID NO: 619063 - DNA, 668 bp, Homo sapiens
actgatagcattaaaaaaaattgaggcggttttcaaaaatcaggctattttactttatactctgagtcctggtttctcttgaaacattagaagatatagcaacatcagtctcacattcctagcttcccgcacatgcagcaatatggcaggccattcatgactgttccccttggacgggcatcctttccgttagcttttgctgtggtctcctccactcacgcagcatatgcctaggcatgtatgcccagcctgcttgacctgcttacttcacaggcctggatcctgcagagatgggttcatcacccctggtgcaatgtggatgagcactggctcaagattgggttgcttagcccttgtgtgacctctcagtgcctcaaattcctcttccataaaactggcattaagaatgggttgttacaaaaattgtgtctgtygcacctcttagctggtgccctgtggagttgtgcagactgcacggccacccatggtggcctcggctgggagaccaaccttggaaactggtggcagccaagggaaagccaaagtgcagagcagcagcaggcacagcacctgcctcatggcctcgccacctccctcaattacaagaggtcatgggagccatcgtagggcaaagggatgtcccaggtgacattcactatagatcacga

SEQ ID NO: 619064 - DNA, 668 bp, Homo sapiens
actgatagcattaaaaaaaattgaggcggttttcaaaaatcaggctattttactttatactctgagtcctggtttctcttgaaacattagaagatatagcaacatcagtctcacattcctagcttcccgcacatgcagcaatatggcaggccattcatgactgttccccttggacgggcatcctttccgttagcttttgctgtggtctcctccactcacgcagcatatgcctaggcatgtatgcccagcctgcttgacctgcttacttcacaggcctggatcctgcagagatgggttcatcacccctggtgcaatgtggatgagcactggctcaagattgggttgcttagcccttgtgtgacctctcagtgcctcaaattcctcttccataaaactggcattaagaatgggttgttacaaaaattgtgtctgttgcasctcttagctggtgccctgtggagttgtgcagactgcacggccacccatggtggcctcggctgggagaccaaccttggaaactggtggcagccaagggaaagccaaagtgcagagcagcagcaggcacagcacctgcctcatggcctcgccacctccctcaattacaagaggtcatgggagccatcgtagggcaaagggatgtcccaggtgacattcactatagatcacga

SEQ ID NO: 619065 - DNA, 668 bp, Homo sapiens
actgatagcattaaaaaaaattgaggcggttttcaaaaatcaggctattttactttatactctgagtcctggtttctcttgaaacattagaagatatagcaacatcagtctcacattcctagcttcccgcacatgcagcaatatggcaggccattcatgactgttccccttggacgggcatcctttccgttagcttttgctgtggtctcctccactcacgcagcatatgcctaggcatgtatgcccagcctgcttgacctgcttacttcacaggcctggatcctgcagagatgggttcatcacccctggtgcaatgtggatgagcactggctcaagattgggttgcttagcccttgtgtgacctctcagtgcctcaaattcctcttccataaaactggcattaagaatgggttgttacaaaaattgtgtctgttgcacctcttagctggtgccctgtggagttgtgcagactgcacggccacccatggtggcctcggctgggagaccaaccttggaaactggtggcagccaagggaaagccaaagtgcagagcagcagcaggcacagcacctgcctcatggyctcgccacctccctcaattacaagaggtcatgggagccatcgtagggcaaagggatgtcccaggtgacattcactatagatcacga

SEQ ID NO: 619066 - DNA, 552 bp, Homo sapiens
atcctgttatttttctgttttgcacatgacgaaacaggcacagagtggttaagtgacttccccgaggtttccccactaataaatgggagatgtgagattcaagcccaggccttgctcattctgcagcttgtgcctctgacactgygtcacctcaaatgctgtgttacctgcttccttttttttcacgttattgtcatcaaaccagacgatgttgactttgagtcagcttggttattaatttcctgttgttaacagaagctttagtgtctgaaatctctgctgcaccatctggaatttttaataaaaactcaaggaatttccaggggtttctgtgtattgcatatgtgtattagccagggaaaaatgctatttaaaaatagaaatgcctacagccacttttaaactccaggtgtggggcgaggaggtgcccaacagaaggaaggctgctcttttgtttaaaaaaaaaaacaaaaacactatagtcaggctttttggattattcaagggaaggctcactccctacctccacctcgaattgtctggaaaggggag

SEQ ID NO: 619067 - DNA, 553 bp, Homo sapiens
caaatctcagttgcaccgtgaatgtctcaggctaaagaacaggttttaactactgtggaggaagaccggcccctttaaggaagaagtgactgcaaccagggttgaagcaggttgtaaartgttgaaatctgctgagctccggaatggaaatttctttcaatgtagattaggccttgattcagggtacggagagagactggtacctgtggttcccttggcaactgctctctgattggaaggagcctaagtgcagagaagggagcagctggggggcccgtgtgactcatccaaaagtgggcaggaagcagttaaaaagcagccatccggtgaagctgtagagggacagggtttttgctttcttttaatcaacatgccaaggttttgggagggactgctgacaccagagatatcagagaagtagcatagaatggctggcttctgagaagcctcctggttaggaaggaagttgttctctttccactgcaagcttagaagccttccaagttctctccttctgcagcataaagagacaataactcagaggaaggtatcc

SEQ ID NO: 619068 - DNA, 620 bp, Homo sapiens
tccaagaactcatacaaggaaggatctcttagactgatttttcagatgaggaatgtgaggtacaagtttctcccccaagaawcctgtaacttagtgagtttggatcgttgtccccacccaaatctcatgttgaaatgtaacccccaatgctggaggtggggcctggtgggaggtgattggatcatggggaccgtttctaaaggtttagcaccattcccctaatgctgttctcatgacagggttctcacaagatctggttgtttaaaagtatgtatcacctcccccatctttctattcctcctgctctggtcatgtaagatgtgcctgctttcccctttaccttccaccatgattgaaaatttcctgcggcctccccatatcactatcagcaaacagcctggctgtgttgtgctcctgctctagggatctgtggaactttgagcttgagagtgatgatttagggtatctagtggaagaaatttctaagcagcaaagtgctcaagatgtggcctggctacttctaacagcctatgtccatatttgtgggcaaataagtgacatgaaactggaacttatatttaaaagggaagcagaacataaaatattggaaagtttgcagc

SEQ ID NO: 619069 - DNA, 637 bp, Homo sapiens
aaacaaacagcctgggcaacatagcaagaacccatctctgcaaaaaatttaaaaaattagccaggtatggtggcacatgcctgtagtcccagctactcataggctgaggtgggaggatccacttgagcccaggagttagagactgcagtgagctgtgatggtactactgcactccagcctgggcgagagagtggatccttgyctctaaaaaataaatttataaaatctgaggtagaaagggtcccatcactaacactccctaggggccatacagggaattcagtattggaaaggggttgaatgaggtgacttcgagggttcttttccaggccagggaggctgcaattctgatggctctgtaaatgcaaggttttgctgcaggaaattaaggcggaacaggcatagcgaggtgtaaggcacacgcaggagcacacagattgtgctaatatatgaacttttgaactttaaccttctctaacaaaagaacgtcatgccacattgaaaaaaaaaaggccttccactgctagaaatgaaaacattcatactttagtgtatcgtattttataggttcatgtagacacaggggccaaatgaaactgaaccaagatcttaggcattaagttacattttaatttta

SEQ ID NO: 619070 - DNA, 637 bp, Homo sapiens
aaacaaacagcctgggcaacatagcaagaacccatctctgcaaaaaatttaaaaaattagccaggtatggtggcacatgcctgtagtcccagctactcataggctgaggtgggaggatccacttgagcccaggagttagagactgcagtgagctgtgatggtactactgcactccagcctgggcgagagagtggatccttgcctctaaaaaataaatttataaaatctgaggtagaaagggtcccatcactaacactccctaggggccatacagggaattcagtattggaaargggttgaatgaggtgacttcgagggttcttttccaggccagggaggctgcaattctgatggctctgtaaatgcaaggttttgctgcaggaaattaaggcggaacaggcatagcgaggtgtaaggcacacgcaggagcacacagattgtgctaatatatgaacttttgaactttaaccttctctaacaaaagaacgtcatgccacattgaaaaaaaaaaggccttccactgctagaaatgaaaacattcatactttagtgtatcgtattttataggttcatgtagacacaggggccaaatgaaactgaaccaagatcttaggcattaagttacattttaatttta

SEQ ID NO: 619071 - DNA, 592 bp, Homo sapiens
aagttttgacttcctgggtagcacatgcaggcatatagtggccctgttactggaaagggaggggtcactgtcactggtggcagtccagggacagtgactctcaggctccagagagtgcatgcttcagttctctatgtcctggggacaggctgccttatgtgctgaactgcctgttcctccatgtatggagtactgyatgtgcttgggtacggggggtatggccgcatcactggttctagctagctttatgacactgcagccctctgagtgattgtagggtgatgtcagtgggatcccagggatgtggaagtgtagggatttttgcatcaggatgagatgcagtatgatgttggctctattatcaaaatgatgctgtgcagcagcagcttgaatcctagtgggtgggtgggacccagcatcaattccctctctgggaaaatgtagttgtgtgaactccaggaaactcaccatactaggcttagggcctgtgagggcctaggggctctcctgtagctaggattgcaggtatctgtggtgggaatgtggactgtgggggatctctggcttattgtttccccacaatggggaatct

SEQ ID NO: 619072 - DNA, 469 bp, Homo sapiens
tgctgtgtcccattcatggcataaagggcctcgggcatctaacttgctccacacaggcagccacctcttctcaggctgtgataagtgaagtcctcagccaatggagcagtgagagttaacttaggaagtccaatgaggcgctgaggactgtcctgatccctttcacatattagctcatttagccctcaacagctcaatgaaccatgagcgattatcatttctccccatcatataggcagacagcctcgggctcagcctcagcctcgggttcagcctygttacctgcagggtctgtgtaacctaccccagtgtaccagccacaagggtgggctggagccgagatctggtgatccagctaccacactcactccttctgctgcagacttggcaggtaacagttctcctttcactctcaggctcaaaaggtgaatgaaggtaaagccagtttaacagatacctgtttgggtcc

SEQ ID NO: 619073 - DNA, 588 bp, Homo sapiens
aatgtaaaaatgaaagaactaagagaaatacagatggatatttttataaaattggagaatagacttctcaagcatcacataaaattcagaaaccaagaaaataaatgaatagaattgatttaataatgtaaaacacttgtataagagaatatttcagtattagtaaacaaagttaaagaaaagtcacagaatgggaggacrtataagaaccacacctaacaggttaatagccataccctatataaaagctcttggaaaccaaaaggaagaagaccaaaaaatcccatagaaaaattcgtccaggatagaaacaggtaattcatggatgaaccataaatgactataaatatatgaatagatgctcaaagaaacacacaataaaataattaaacacttatttcacctaacagattactaaatattaagatgtttggtaaacccattgttgaggaggtatggggaaccaggcattcagacactgttggtagaagtataagtcagtgcagcctatttgaagaggaaaagacagtagtgtctaaaagacaaaaacaaaatgcacatacaccttgacccagcaattctgttatg

SEQ ID NO: 619074 - DNA, 350 bp, Homo sapiens
accttaaagcaattgtattttttagccttgttgcttttatacgctgtgttgatgtaacatttactttctcacagttatttgtaaggcaactttagcaatagaacatgtaaaaacataaagaatctttctgggagtcagcacacaatccrtctatgtcaggactatgtgcgactaaaggataccttgggaagaacattcagaggcatgcagttcttggttgcaacctcagaaagttaaagttgcacatcatacactttggtttcccatagaaatccgttatgaattgaccatttattaatctccccaactcttaatgtggctcttcactttatgaattatgatcacacggt

SEQ ID NO: 619075 - DNA, 545 bp, Homo sapiens
gtggaaggagtgtggatgcctgagtgactacatggaaagccacctgcctaagaggaacaagcccatcagattttgcttgaatgaaaataaaacttttattgtgctaagccattctggaatttgtttcagaatcaaacattacttaactcaccctacccaatatagtctctatcaagcttgtccatctcaccttattttgttgttgttgttctgttctgttttgttttaggcttttagcrgcctgaatccatggttttagtttctgtctctagtgatgagtggaaaagagggacgaggaaggggctttactgacccaaccagaaacagaaactaagaacctgatatggttaggctttgtgtcccgacccaaatctcatcttgcattgtaatctgcaggtgcttagggagtgacctggtgggaagcgttggagtaaggggatggtttcccccatgctgttctcgtgacagtgagtgagttctcacgagatctgctggtgttataaggcagttttccctgctcctgctagcttcctctttcctgccac

SEQ ID NO: 619076 - DNA, 602 bp, Homo sapiens
ctatcatgcttccccttgttttggatggctttaaagagctcatggacatttggggcatctggttaaggggaagttgaactggggatacatttcattttggtttaggggcttatatatgtagattgtggtcttttgagtacagctaagttactactagtcatccccatatgagagtactgcagggaatacttctaccacccaatgtagaaactcaccaacatcgtgacatgaaggagatataactgagtcccacactatctagcaggataaataaggtttgaaatgttctgagccatgcgcaggtaaattatttcaaacatcagatatataaaacygtcagtgaaaaatttgcttttcctaattgctgaacccaaatggaaagtctctcctgtcaggatttatgcttgataatgaagcatatacaatgataagtgcatcatgcattttgttcttttttaatgagaattgcacaaaatagaagtgatcaaaattcctgtagtttcagggctagttttagttttagtatcatggtgctgtaagtagggagaaaatacagttttaatagtccatatatgaaagagacttgaaagaggatttttgtc

SEQ ID NO: 619077 - DNA, 571 bp, Homo sapiens
tattgcctatgttgccaatagtagttgcgtagatgaaagaaacctctctaaactatcaattatgaaaccacattttcatccatcatgctagaggacatgtctgaattagccatctcttcatgctgtagaaaatactataaaattgttttacaaagaggtgttcaaaaagtatacagacatgaaattagaatgacagcgtcataaagtgacatcaggcagttaataaaagaatgttttttttagagcatatatgtttgtggtacttgtcagcttttcacaatttatgatttcttttctttttttttttttagatgggatttcactctgtcacccaggctggagtgcagtcgtacaatcttggttcactgcaacctccaccttcctggatcaagcaatcctcccacctcagcytcctgagtagctggaactacaggatgtgccaccatgcccagctaattttttgtatttatattttttttgtggaggcagcatttcgccatgttgccccggcagcacaatttttgatatattgtgattttctgttctttaaaaaaattcacattcctactca

SEQ ID NO: 619078 - DNA, 520 bp, Homo sapiens
cccaaagttagctagaaataataaagattagagtgggaataaatcaaatacagaattaaaagaaagaacagaaaaatcatcaaagctgaactgagttttcgaaaaaaataaacaaaatttgcaaacccttaactagacaaaatcagaagtgaaagagaaaacattacaatggatgcctgagaaataaaaaggatcatgagggacttttatgagcaattgcacaccaataaattggatagcctagcagaaatggatgtgctgcaataaatatgtaacctattaagacttaatcaagaggaaatagaaagcctgaagagaccaataagatataagaaaattaaatcagtaaacaacaaccttctaacaaagaamagctcaggacctgatggctttactgattaattctatcaaacagtcaaagaataattaatagcaatccttctcaaactcttccaaaaactagaagagaaaatactttcaaattcattttgtgaacccagcattaccctgacaccaaaat

SEQ ID NO: 619079 - DNA, 634 bp, Homo sapiens
actttttatggcaaaataccccatcctttgtgcattccttggtcctgcctccatctctttcttaaggagtctcttataaagtagctgtgtatttccttaatctcttatgcacaagaacaaaacaaaacaagaaacacaaaataaaattcttaaaaccttcctaggggagcataggttgtattcattctcccaccttgtttctccccagtaggggaatgttgattatctattctggaagccactggaagaaaagactcctagtttccgagtcaagaaaatctccaaatatctattaagtaactatattcaggtgaccctggggagatttaaagatggataagacataacttctgcctttaaggagcttagagactggggtgagaggagaagcaataggatactgattaatatttgtagtaaaagccagaacactcaacatgccatagcgaagtaaaaagtgaggggaggtcacaytgaaacagaagttaggaaagtctccatgcagagggtccccctgaaatgggcctggaggggtgcatttccctaagcagagagtgtattaatgaaagccaaggcacgacagcatgaaagcccaggctataaagaaataaaaccactttggggggccgaggcg

SEQ ID NO: 619080 - DNA, 634 bp, Homo sapiens
actttttatggcaaaataccccatcctttgtgcattccttggtcctgcctccatctctttcttaaggagtctcttataaagtagctgtgtatttccttaatctcttatgcacaagaacaaaacaaaacaagaaacacaaaataaaattcttaaaaccttcctaggggagcataggttgtattcattctcccaccttgtttctccccagtaggggaatgttgattatctattctggaagccactggaagaaaagactcctagtttccgagtcaagaaaatctccaaatatctattaagtaactatattcaggtgaccctggggagatttaaagatggataagacataacttctgcctttaaggagcttagagactggggtgagaggagaagcaataggatactgattaatatttgtagtaaaagccagaacactcaacatgccatagcgaagtaaaaagtgaggggaggtcacactgaaacagaagttaggaaagtctccatgcagagggtccccctgaaatgggcctggagggktgcatttccctaagcagagagtgtattaatgaaagccaaggcacgacagcatgaaagcccaggctataaagaaataaaaccactttggggggccgaggcg

SEQ ID NO: 619081 - DNA, 592 bp, Homo sapiens
aatagagagttaagtaccctctggaagtggagttttttcctacttgggaggctttagttctatgagtgtggaagtgttagaactcgtgacatgtttctacgctcccaaaaggcaaactctcggtttattttatggcccacactttgggccttttcccaaaaaatatgcatccaaagaagtcatcgtttttgtacagtagttccgattaatgccagatcaatctttccaaatgaatcaaggtgtttaattaacatcagacgtyttcaggtctattggttgtaaatgatgctgacagcaggaggggaagttagcattcattgagcacttattctatgccaggcactgtgccaagtcctagtgtgtgagctcattcaattcacaggaacccatgggacagggaattcagtcctcccattttatcttatttttttaattttttacattatgtgtacacatttgtggggtacatgtgaaattttgttacatgtatataatgtggagtgatcaagacagggtgtttagggtgtccatcgcccaagtataatatacttttgttaaactatagccaccctactctactgctatcaaatgc

SEQ ID NO: 619082 - DNA, 640 bp, Homo sapiens
ctatctaattgtacttggtatagactaatgtttcttcctactcagtagccttcctgcctgttctatttagcaggcctgcctttgcacaggagtccccaggaggccagacatcaggcctgtgtcagctgcactctctttgcatatcacactgtgtggctgggcactcacaaaggtcaataattttagactataataaaagtatttttaccaggccttagaacagaaactaatataatgtaacaaattttgacatcttaattttcttccattagataaaaccatgawgtaactaagcttaacatcattaatctcttccaagaagggtcaaaatgtatcagccatgcacatataagaatctacaccccagcctctgcttggatactcaagctcggtctacagtccggctgtttcatcataaaatgagtgagaaattcactgctaaatcgaaagttattttggggcaaacttccccagggaacaggcctctttgggtttgaaatatcaaacggtacaagtcgtctaataccaagtaaggcatggaggacacacgcctctccctgtaacctcgtcataatttgttttgcacgtaaggacaatccctaagttctttatatttattagatcgaatagccacaacact

SEQ ID NO: 619083 - DNA, 379 bp, Homo sapiens
gatccttatttatcacatgggaaaacagaagcacagagaagcaaatgaactacttttcttcttcaaattccaaactttattacatattgaatccagaggagaaactgagtgcagsagggggaggttggatggggaggagtcattttgccaggtgctccaaaccctccccattcgggagcctggccatgccctcctggctccatcaaagcacctgggctgttaaatggggcaggagagctgtgctgaggttggcaaggccctttcccaggacacaagaactggatttgtcacagtttggcttgggaatggtggtgatgagtaggagaggacctatcataaatcaaaaatataaaataataaaataaaactaatcacaaaa

SEQ ID NO: 619084 - DNA, 372 bp, Homo sapiens
cttttatacctatctatatagctatatcaatgtgtgtgtatatatagcaggcctttcgtattcatgagttccacatccattgattcaaccaactgcagatcaaaaattaaacaaaaataaaaataaaaaaagacaaactctaraaacaatatagtatgactatttacataatctttacattgtattaggtattataagtaatccagagataattttttttttttgagatggagtcttgcatcattgcccaggctagagtgcagtggcacaatcttggctcactgcagcctccgcctccaaggttaaagcgattctcctgcctctgccttctgagtagctgggattacaggcaagcaacaccacacctggctg

SEQ ID NO: 619085 - DNA, 557 bp, Homo sapiens
tatctatctatctatctatctatctatctatmtatatatatatatatcttctcttttaatcactacatatttaaaggcggtattctccctctactaccaaaaacaaaacaaaaaaacaaaaagaatcctgaggcacagagaaattacagctagaattttcatctttaactccaaagttcatatagtgctgtctttatcaataaaaaaaagcaacaaaaatgatttttaaaacagacgactatctaacaataattgcaaagtaagacaatgaaaacacagaggcatttagtggcctttacacagggttacataaaactggcccatcgatatcaacaggattgggcacactttgaccagtacaagccaaaagaaggtacgatcatctgtctaggagttgtaccaaaagctctgtccagcctatgaaggaggacataaaagattgagctttttcattcattctggaggacactgtctattaaagggaaatacccaggcaaatcgaaattccaatttttaaacactgtattatttaacattataataacatcatcaaaaat

SEQ ID NO: 619086 - DNA, 557 bp, Homo sapiens
tatctatctatctatctatctatctatctatctatatatatatatatcttctcttttaatcactacatatttaaaggcggtattctccctctactaccaaaaacaaaacaaaaaaacaaaaagaatcctgaggcacagagaaattacagctagaattttcatctttaactccaaagttcatatagtgctgtctttatcaataaaaaaaagcaacaaaaatgatttttaaaacagacgactatctaacaataattgcaaagtaagacaatgaaaacacagaggcatttagtggcctttacacagggttacataaaactggcccatcgatatcaacaggattgggcacactttgaycagtacaagccaaaagaaggtacgatcatctgtctaggagttgtaccaaaagctctgtccagcctatgaaggaggacataaaagattgagctttttcattcattctggaggacactgtctattaaagggaaatacccaggcaaatcgaaattccaatttttaaacactgtattatttaacattataataacatcatcaaaaat

SEQ ID NO: 619087 - DNA, 557 bp, Homo sapiens
tatctatctatctatctatctatctatctatctatatatatatatatcttctcttttaatcactacatatttaaaggcggtattctccctctactaccaaaaacaaaacaaaaaaacaaaaagaatcctgaggcacagagaaattacagctagaattttcatctttaactccaaagttcatatagtgctgtctttatcaataaaaaaaagcaacaaaaatgatttttaaaacagacgactatctaacaataattgcaaagtaagacaatgaaaacacagaggcatttagtggcctttacacagggttacataaaactggcccatcgatatcaacaggattgggcacactttgaccagtacaagccaaaagaagrtacgatcatctgtctaggagttgtaccaaaagctctgtccagcctatgaaggaggacataaaagattgagctttttcattcattctggaggacactgtctattaaagggaaatacccaggcaaatcgaaattccaatttttaaacactgtattatttaacattataataacatcatcaaaaat

SEQ ID NO: 619088 - DNA, 543 bp, Homo sapiens
accaaagctaaggaccctcacagagtccattgtatcctctgccacctacaccagaagaggcactggtatccacggctgagagacccatagacggttcaaatcacagractctgtgcagacaacccccagtaccagcccagagccgggtagactcgctgggtggttagacccagaaaagagacaacaattattgcaattcggctgacaggaagccatatccataggaaaaggaggagagtactacatcaagggaacattctgtgggggaaaaaacaaaacaaaacctgaacaacagccttcagccctagaacttccctctgacagagtctacccaaatgagaaggaaccagaaaaccaacccttgttatatgacaaaacaaagctcttgaacacccccaaaaatcacactagttcaccagcaatggatccaaaccaagatgaatttcctgatttacctgaaaaacaattcaggaggttagttattaagctaatcagggaggcaccagagaaaggcaaagcccaatgcaaggaaatccaaaaaat

SEQ ID NO: 619089 - DNA, 583 bp, Homo sapiens
gaatttcctagtgggcaaattgtgagggaggtatgtagcttttttaatctttgtagttatcttatttaggaataaaatgggaggcagctttgcctgagcaagttcccagcttgacatttccctttggcttagtgattttggggtcctgagattcatttgcctttcaaaaagtstatacaacagacatggtgaatgtaggctcagggtgggaagctaccagaagggaacctagagaagaaatgagaatgaagtcaaagtaggcttcccatagctatcaaaatgaacttagaagagcctgatggttgaagtggaagccacagaaggattttaaataggagactaatacagttaggaaaaacactctgcagggtggagaatagatttgaggggtcgagagtgtaggatgggaagagtgaatgaagagactgttgcaatcagtagtctaagtgggaggtagcgaggtccaggaagtgaggatggattgaagtgatccatctactttgcaagaaggcagagtgtgggagtactggggactgattcaatttgagaggactggaggtgtgaaaaggaagcttgaattaca

SEQ ID NO: 619090 - DNA, 580 bp, Homo sapiens
ctactttagtctttgtgcctcaaaaacatgtcatacatatatgaaaatacaaatgttttattaaccaagttacttaagagattttatttctgatatctctttgtaaaggatgcagttttttaaaagaaatgttcttgtagacttgtcacattattattattaataattttgtcttcactccttaaacttcacagttatctacacttgtttttcaaataaaccacttcatgagaaagctggtgaatacattttgctattatcagtgtgactgatgattatagttatctcttaatcatattgatcttagtcttgagtcatacttaytgggtggaaatcaatattaattgattggaactattaccagtgaaggtatcagattgatttagttgttcaaagttaattttatgaatgatctatgtttctggtaaatctattgttttttattattttaccaatacttataatagcaattacataacaatgtaggttagtttaaaagttatacatgttgtatgtcaacaaagaagtttgcattcagcaatgtaacatttttttaaagaagcccctatccacaaaagga

SEQ ID NO: 619091 - DNA, 499 bp, Homo sapiens
ctctggatcaagaaaagccaaatatatcctgatgtgggagactactgtgcattaacttctgatagagataacacataatccaaaggtagtggattttgagctatctcataaattgatagggttttaaactctttcatttagatagaggagttcattttttgcatagaaaggaaagagaactgaatatgttatttgtrgtagaggcttctaatgcttacctatatctgtagatggctatatgaacatgtttcttatcaagctgcatgatcatataaccatctacagataccaagtgaatgggacaaagtagcccttgtttatattcaccacttaaattttactattggtggcttccctggtaatgcccagatatacaattactgctgaaatggcaaagtcatgtcactctaactgtaagttgtttgtagaagtagcatgattaacagccttccattcctgagaaagaacattgagcacacttttcctatgaattagtgaa

SEQ ID NO: 619092 - DNA, 499 bp, Homo sapiens
ctctggatcaagaaaagccaaatatatcctgatgtgggagactactgtgcattaacttctgatagagataacacataatccaaaggtagtggattttgagctatctcataaattgatagggttttaaactctttcatttagatagaggagttcattttttgcatagaaaggaaagagaactgaatatgttatttgtggtagaggcttctaatgcttacctatatctgtagatggctatatgaacatgtttcttatcaagytgcatgatcatataaccatctacagataccaagtgaatgggacaaagtagcccttgtttatattcaccacttaaattttactattggtggcttccctggtaatgcccagatatacaattactgctgaaatggcaaagtcatgtcactctaactgtaagttgtttgtagaagtagcatgattaacagccttccattcctgagaaagaacattgagcacacttttcctatgaattagtgaa

SEQ ID NO: 619093 - DNA, 589 bp, Homo sapiens
ttcaatcttaattaacttagttagtattagttagtgttctccagagaaacggaatatataagagagatagatatttattatgagaattggtttacatgatcatggaggccaagaagtaccaggatctgccatctgcaagctgaaaaattagaaaagctggtctgaagacctgagaaacagaagctccaatcacaaagcaactatgcaattttaactaaataatttcatttggagggacgttactttttgaatttgtaaaatgattggattatacctaagcatttctgtgtactacwcaattgcaattttccagaatttactggttttatagggatattcactgtctgggtgagggagggaggatgggtttaatatagcaggagtggtagttgagattttccaatgtactatgtagagaaacagtcactacagttacaaaattaaaagacatcatttagtcatatgtagttacaaaattcctaattctcatatttgtaattttcaaggaaacacagtagttttacttttttcatgccttccaaaagaagaaaaaattgtgtttatttaacataaataattatatgatgct

SEQ ID NO: 619094 - DNA, 693 bp, Homo sapiens
ttctcttgactgtaaataatatattgtgtagaaaataacagaaactaagatgaaaagtgatgcagaagagtcaaatctgaatgttaagaatttgactttattattttatgatacatcaagatcctctgggaaaaacatatatgatcaaaattctatgacccaaatctatgttttgataagtctaaaatagtgcattagttaagtaaaatataaatattctacatgttaaaatcattttrttatagtttgttagtgtttttttttctttctcagtgaaatgcagaataatagtgcatttttaaatcaatgatgtcttaaattcaatgaaatacagcaaatgtttaacatatagccaaggaattgaataagccagactcatccttagtctttcccccagttgtatatcatgtactttggattatacatactgaagaaatatattttgagttaaaactatccatgaaataaaattatttcattcacttcatttaaaattaatactgacctaaggtataaatttttattttgattgatttaaatttaacatggttctaaggtattgattttttataggaagatattaagaattttatacttaccggaaggtgtgagaaatagaaatagaggacatcaactgaagtagttaatattgattaggtattctttataaaaacaaacttgtaaatgttttac

SEQ ID NO: 619095 - DNA, 693 bp, Homo sapiens
ttctcttgactgtaaataatatattgtgtagaaaataacagaaactaagatgaaaagtgatgcagaagagtcaaatctgaatgttaagaatttgactttattattttatgatacatcaagatcctctgggaaaaacatatatgatcaaaattctatgacccaaatctatgttttgataagtctaaaatagtgcattagttaagtaaaatataaatattctacatgttaaaatcattttgttatagtttgttagtgtttttttttctttctcagtgaaatgcagaataatagtgcatttttaaatcaatgatgtcttaaattcaatgaaatacagcaaatgtttaacatatagccaaggaattgaatragccagactcatccttagtctttcccccagttgtatatcatgtactttggattatacatactgaagaaatatattttgagttaaaactatccatgaaataaaattatttcattcacttcatttaaaattaatactgacctaaggtataaatttttattttgattgatttaaatttaacatggttctaaggtattgattttttataggaagatattaagaattttatacttaccggaaggtgtgagaaatagaaatagaggacatcaactgaagtagttaatattgattaggtattctttataaaaacaaacttgtaaatgttttac

SEQ ID NO: 619096 - DNA, 594 bp, Homo sapiens
acactgattttgctcattgtttctcataaattaagccaagtctctttttttatgatttcagagtttatttgcaaaagttctttgaggcctaaatctcttgtctactgataagggaaaggaggcagaattgctgctaataagcatgtaactatgtatctaatcctcccatttttgcctgtcccttattcatcttctctgttgtgctttaggtaactgagtctagaaaatgtatgtttcaaattcttctgcgtttcatgtggttagtacagaaatgacctgtttggggaggctaagtaaaatctgcatttgacaatrtatttctaaaggttttcaagcaatcccaaggcttttaaccaaatgccttaccttccgtttcttctcattaataaactcctctgcaacataacattctcagtttcttcatctcttctacacatgcttcatcttaaaataattgtttttataactgttatacattactgtttcttctaccattctctttgcatttatgagcatttcagctttcttattttttagtatcattttggcattattttggggacaatagaggtaaatgtacctacttccatattt

SEQ ID NO: 619097 - DNA, 594 bp, Homo sapiens
acactgattttgctcattgtttctcataaattaagccaagtctctttttttatgatttcagagtttatttgcaaaagttctttgaggcctaaatctcttgtctactgataagggaaaggaggcagaattgctgctaataagcatgtaactatgtatctaatcctcccatttttgcctgtcccttattcatcttctctgttgtgctttaggtaactgagtctagaaaatgtatgtttcaaattcttctgcgtttcatgtggttagtacagaaatgacctgtttggggaggctaagtaaaatctgcatttgacaatgtatttctaaaggttttcaagcaatcccaaggcttttaaccaaatgccttaccttcygtttcttctcattaataaactcctctgcaacataacattctcagtttcttcatctcttctacacatgcttcatcttaaaataattgtttttataactgttatacattactgtttcttctaccattctctttgcatttatgagcatttcagctttcttattttttagtatcattttggcattattttggggacaatagaggtaaatgtacctacttccatattt

SEQ ID NO: 619098 - DNA, 594 bp, Homo sapiens
acactgattttgctcattgtttctcataaattaagccaagtctctttttttatgatttcagagtttatttgcaaaagttctttgaggcctaaatctcttgtctactgataagggaaaggaggcagaattgctgctaataagcatgtaactatgtatctaatcctcccatttttgcctgtcccttattcatcttctctgttgtgctttaggtaactgagtctagaaaatgtatgtttcaaattcttctgcgtttcatgtggttagtacagaaatgacctgtttggggaggctaagtaaaatctgcatttgacaatgtatttctaaaggttttcaagcaatcccaaggcttttaaccaaatgccttaccttccgtttcttctcattaataaactcctctgcaacataacattctcagtttcttcatctcttctacacatgcttcatcttaaaataattgtttttataactgttatacattactgtttcttctaccattctctttgcatttatgagyatttcagctttcttattttttagtatcattttggcattattttggggacaatagaggtaaatgtacctacttccatattt

SEQ ID NO: 619099 - DNA, 563 bp, Homo sapiens
gcagtggcacgatctcggctcactgcaagctccgcctcccgggttcactccattctcctgcctcagcctcccgagtagctgggactacaggtgsccgccaccacgcccgactaattttttatatttttagtagagacggggtttcaccgtgttagccaggatggtctcgatctcctgacctcgtgatccgtccgtctcggccttagcctcatctactttaaacatattcagaacacttggaaaaataatctaacacaatgcttatttttaatgtatctctctagagctaaaatgatcaagggttgactatctcatgtaatttattggacattatactgaaagagaaaaacaaaatggctatatggacacttatagtttctactgaatgtatgctactttcaaactgtggtaaacattcatgagttgatccatcataagttggagaccatctgtacttgggtgatcactcatcagaggaagaactatgtgacaaacctctccagctgtgtttaagaaatccataaattctggtattatttacagcaacaattctaaattaaata

SEQ ID NO: 619100 - DNA, 563 bp, Homo sapiens
gcagtggcacgatctcggctcactgcaagctccgcctcccgggttcactccattctcctgcctcagcctcccgagtagctgggactacaggtgcccgccaccacgcccgactaattttttatatttttagtagagacggggtttcaccgtgttagccaggatggtctcgatctcctgacctcgtgatccgtccgtctcggccttagcctcatctactttaaacatattcagaacacttggaaaaataatctaacacaawgcttatttttaatgtatctctctagagctaaaatgatcaagggttgactatctcatgtaatttattggacattatactgaaagagaaaaacaaaatggctatatggacacttatagtttctactgaatgtatgctactttcaaactgtggtaaacattcatgagttgatccatcataagttggagaccatctgtacttgggtgatcactcatcagaggaagaactatgtgacaaacctctccagctgtgtttaagaaatccataaattctggtattatttacagcaacaattctaaattaaata

SEQ ID NO: 619101 - DNA, 541 bp, Homo sapiens
agaaatgaaactataaaaatcatagaaggaaacctgagaatgcccatttacytaagcaaacaatttacagctaggtttataaaaggaaacacaacaaaaacaaaaatagaccaatggactattgagtatcttctgcacaggaaaagaaataatccacagaataaacaaacaaccaacagaatgagagaaactatttgcaaaccattcatctgacaaaggactaatatcttgtatctacgaggaactgaactcaataaataaaaaacagccccattgaaaagtgggtaaaggacatgaacggacatttttcaaaagaggacatacagtctggttgcagtgactcatgcctgtaatcccagcactttgggaggcagcagcaggcagatcacctgaggccaggagttcgagaccagcctggccaacatgatgaaaccctgtctctactaaatataccaaaaattagccaggcgtggttgcagtcacctgtaatcccagcttctccagaggctgaggcaggggaatcacttgaacccgggaggca

SEQ ID NO: 619102 - DNA, 541 bp, Homo sapiens
agaaatgaaactataaaaatcatagaaggaaacctgagaatgcccatttacctaagcaaacaatttacagctaggtttataaaaggaaacacaacaaaaacaaaaatagaccaatggactattgagtatcttctgcacaggaaaagaaataatccacagaataaacaaacaaccaacagaatgagagaaactatttgcaaaccattcatctgacaaaggactaatatcttgtatctacgaggaactgaactcaataaataaaaaacagccccattgaaaagtgggtaaaggacatgaacggacatttttcaaaagaggacatacagtctggttgcagtgactcatgcctgtaatcccagcactttgggaggcagcagcaggcagatcacytgaggccaggagttcgagaccagcctggccaacatgatgaaaccctgtctctactaaatataccaaaaattagccaggcgtggttgcagtcacctgtaatcccagcttctccagaggctgaggcaggggaatcacttgaacccgggaggca

SEQ ID NO: 619103 - DNA, 512 bp, Homo sapiens
gtgggttttcctttgtcatttagttattgtttggtttttgtaccaagtttaagctagtctcataaaaacagctgggagccaggcatgatrgcttatgcctgtaatcccagcactttgggagggccaaggcaggacgatccattgagcccaggagtttgagaccagccaaggcaacatggcgaaacctcgtctgtacagaaaataaaaataaaaaaaatgagccaggcgtggtgggaggtgcctgaagtgccagctagcggggaggttgatgtgggaagatcacttcagcttgggagtactaggctacagagagcatgatcacaccactgcactccagtctaggtgacagagcgaggccttttcttaaaaaaaaaaaaagttggaaattattccctcttttcctgtattctagaagagtatttataaggttggaattaccagtttttcaaattgcctttaaactatctctgcctaatgtctattaaggatgttttttccactaccagatcatt

SEQ ID NO: 619104 - DNA, 512 bp, Homo sapiens
gtgggttttcctttgtcatttagttattgtttggtttttgtaccaagtttaagctagtctcataaaaacagctgggagccaggcatgatagcttatgcctgtaatcccagcactttgggagggccaaggcaggacgatccattgagcccaggagtttgagaccagccaaggcaacatggcgaaacctcgtctgtacagaaaataaaaataaaaaaaatgagccaggcgtggtgggaggtgcctgaagtgccagctagcggggaggttgatgtgggaagatcacttcagcttgggagtactaggctacagagagcatgatcacaycactgcactccagtctaggtgacagagcgaggccttttcttaaaaaaaaaaaaagttggaaattattccctcttttcctgtattctagaagagtatttataaggttggaattaccagtttttcaaattgcctttaaactatctctgcctaatgtctattaaggatgttttttccactaccagatcatt

SEQ ID NO: 619105 - DNA, 512 bp, Homo sapiens
gtgggttttcctttgtcatttagttattgtttggtttttgtaccaagtttaagctagtctcataaaaacagctgggagccaggcatgatagcttatgcctgtaatcccagcactttgggagggccaaggcaggacgatccattgagcccaggagtttgagaccagccaaggcaacatggcgaaacctcgtctgtacagaaaataaaaataaaaaaaatgagccaggcgtggtgggaggtgcctgaagtgccagctagcggggaggttgatgtgggaagatcacttcagcttgggagtactaggctacagagagcatgatcacaccactgcactccagtctaggtgacagagcgaggccttttcttaaaaaaaaaaaaagttggaaattattcccwcttttcctgtattctagaagagtatttataaggttggaattaccagtttttcaaattgcctttaaactatctctgcctaatgtctattaaggatgttttttccactaccagatcatt

SEQ ID NO: 619106 - DNA, 512 bp, Homo sapiens
gtgggttttcctttgtcatttagttattgtttggtttttgtaccaagtttaagctagtctcataaaaacagctgggagccaggcatgatagcttatgcctgtaatcccagcactttgggagggccaaggcaggacgatccattgagcccaggagtttgagaccagccaaggcaacatggcgaaacctcgtctgtacagaaaataaaaataaaaaaaatgagccaggcgtggtgggaggtgcctgaagtgccagctagcggggaggttgatgtgggaagatcacttcagcttgggagtactaggctacagagagcatgatcacaccactgcactccagtctaggtgacagagcgaggccttttcttaaaaaaaaaaaaagttggaaattattccctcttttcctgtattctagaagagtatttataaggttggaattaycagtttttcaaattgcctttaaactatctctgcctaatgtctattaaggatgttttttccactaccagatcatt

SEQ ID NO: 619107 - DNA, 647 bp, Homo sapiens
aagaaacatttttacattactggtgggaatgtaaactagtacaatcactatgggaaacagtatggagatgatttaagaaactaaaagtagaactaccatttgatccagcaatcccaccactgggtatctacccagagtaaaagaagttattatatgaaaaagacacttgcacgcacatatttatagcagaacaatttgcaattgaaaaaatrtggaaccagcacgagtgcccaacaaccaatgaaagaccattattctttgtgaagtaactcgggaatggaaaaccaaacatcatgtgttctcactcataagtgagagctaagctatgaggatgcaaagggtgaagaatgatacaatgaactctggggacttgagggggaagggtggaagggagatgatggatagttttaaggaactaaaagtagaactacattggtgcagtgtacactgcatgggtggtgggtgcactgaaatctcagaaatcacaactaaataacttatccatgtaaccaaatactacttgttaccctaaaaccattgaaataaaaaaataaggaaagtctcaaatcagtaacctaagtttctaccttaaaaaaccagaatagagtagaaattaataaaatggagaagagaaaagcaatacagaa

SEQ ID NO: 619108 - DNA, 311 bp, Homo sapiens
ctctccctaattcatcccaacccttttcattacacacagccaaagtgcagggctgtgcagtcggaattcttacacaaggaccaggatcgcgtcctctagcctttttgtccaaacaacttgaccttactgttttaggctggccatcatgtctcygtgcagtggctgctgccaccctaatagttttagaggccctcaaaatcacaaactatgctcaactcactctctacagctctcataatttccaaaatctattttcttcctcacacctgacacatatactttctgctccctggctccttcagctatactca

SEQ ID NO: 619109 - DNA, 311 bp, Homo sapiens
ctctccctaattcatcccaacccttttcattacacacagccaaagtgcagggctgtgcagtcggaattcttacacaaggaccaggatcgcgtcctctagcctttttgtccaaacaacttgaccttactgttttaggctggccatcatgtctctgtgcagtggctgctgccaccctaatagttttagaggccctcaaaatcacaaactatgctcaactcactctctacagctctcataatttccaaaatctattttcttcctcacacctgacacatataytttctgctccctggctccttcagctatactca

SEQ ID NO: 619110 - DNA, 533 bp, Homo sapiens
aacacgactgaggtcaattcttctgttttttttcttctatagttcaaagggactttatttttcaactccattttggatggatagggaactcaggaatctattttcgcaatctctgcatcatctggatggcctcagtgtgaacttgacccagagctgctgaatggtgtaaatattttactgcccattcagacattattttatcrtttctgtcattttcttggtcgctgcccattgcggaggtatttgcttctgctaatatggttgtatgaagcaatgtgttttgggtaaaagcaatgtggtgctgtgaaaaaacctttggagagaaaatcctaagacttggactttatgtttctctctggtacttctaattctgtaatctcaggcaagatcctagcctttgattttcagtgccctgagggagaatgagggaataattatgcctgcttcgccgacctttagaaagttggttttaggatccattgtgtaataattgtgcaaaggtatcacaaaccacacagtgcaaaggtatcaca

SEQ ID NO: 619111 - DNA, 588 bp, Homo sapiens
accactgccttcttggcaggctgcagaagctgagccagtggagaaatctctggaagggcagttggaagtaactggctgactcctttgcccagggtgggcatcatgctagcatctttctggctacaaagagtagaatcaagtctgtgaagtcaggtggagacctaactgcagctttaacaggccaacagctgggtcaaccagccacagagacattttcttgacagtcactctgrtgggcttaggggattcagaaaacaaaagtgaaggtggtctccacccagacccctccaggaaagcctgtggaacattgcattgtccacaagctattttgcagctgcttcaattaaagaattaaactgtatctgagtagcagcaacatacatgagagccaaattggattcctccttggaaaataagctacagaccacatctttattgtgcagacactcattaacaaatatgtaaaaaaatacccgtcagagaaagatgttttcctgctttggagactttaaaaaaagcatttaattccatctggcacgcatggctgaatctgaaatggctacaatgtgtgactggtgggaaagcatg

SEQ ID NO: 619112 - DNA, 602 bp, Homo sapiens
cccctctactgtttgcttaccaactgtgtgacccttagcaagttactttatctctctgtgtgtcaattttcctcatccacaaatggggatcataatacctaaactcatagggttgttgtgagaattaaatgaattaatacttataagtactccataactgytagttgttttttcatattgacatttaaaccaagcaaatatattttaaggtaaattagccccagaaggtccttatttctatttttttcatgtgtttaattcagaactctttatctggatttcaagagggcccttcctaagccaggccatgtgcaatgtttgcctgtttaacatgacagacccctaatctatcgctagggctgagaagctctttgagagcttggagaagaaaactctcctgttcctatgttgggagtctctagtatttcttcaacacctctcccaaattgtttgttatgtacgaagcttcagaaatagagaaggtacatcagatcctacaacacaaagggccagcacagaaatcttgaaatgcctattgctataaagggagttgggaatgggaaactcatggacccttgaatccagcctgggttgaattctgc

SEQ ID NO: 619113 - DNA, 602 bp, Homo sapiens
cccctctactgtttgcttaccaactgtgtgacccttagcaagttactttatctctctgtgtgtcaattttcctcatccacaaatggggatcataatacctaaactcatagggttgttgtgagaattaaatgaattaatacttataagtactccataactgttagttgttttttcatattgacatttaaaccaagcaaatatattttaaggtaaattagccccagaaggtccttatttctatttttttcatgtgtttaattcagaactctttatctggatttcaagagggcccttcctaagccaggccatgtgcaatgtttgcctgtttaacatgacagacccctaatctatcgctagggctgagaagctctttgagagcttggagaagaaaactctcctgttcctatgttgggagtctctagtatttcttcaacacctctcccaaattgtttgttatgtacgaagcttcagaaatagagaaggtacatcagatcctacaacacaaagggcyagcacagaaatcttgaaatgcctattgctataaagggagttgggaatgggaaactcatggacccttgaatccagcctgggttgaattctgc

SEQ ID NO: 619114 - DNA, 592 bp, Homo sapiens
ccatattcacctggctttcaacccactatyagccaacttaaaaaccaaaaccctccattgccctgagggaagacatggtaaactaacagcaaatcatcataaactcttctctctttgggtaaaacaattcagagatggcagcctatacctgggtcaataacgtcgtcttcctaaaggaagctctgataaacaaataatataaaacttttcatgtattatgttttaaatatattatttgacacatacaaaacattatctgtgcctatatgttacttttaaagcaaaataatacactcagggcctgtgaatccaccactccaccccaaaactaaaacattaccaataactcccatcaacctatgagttaccttactaccccatttccctgatttctcctgtcccacccaaggtaaccattattctaaattttatgtttattaacctattcgtatacacataaacacacaacttcattacaaatatatgtgtgcttaagcaatatgcatgcgctaattttaaacagatatttataaaagcaaaaagagcaaacatttgcctacagtatacgagaagcatacagctattacctatg

SEQ ID NO: 619115 - DNA, 574 bp, Homo sapiens
aaatggttttcatagaatatcaaaagggtaggtagggagaagamaaacgtagaagcactttgaaagcactctctagaaacggaaaatcaggccgggttcagaagctgacgcctgtaaatcccagtgctttgtgaggccaagctgggaggatcacttgaggagtgatcaggagtttaagaccagagtgggcaacatagcaagaccctgtctctacaaaaaaaattaaaagttagctgggtatagtggtgcacacctgtattcctggctacttgtgagactgggggaacctgaggcaggaggatcacttgagcccaggaggtcgaggctgcgatgagctgtggttacacaccactgcactccagcatgggcagcaaagcaagaccttgtctcaaaaaaaaagaaagaaaaggagaaagaaagggaaaatcagtgaatctgccaacaggacaagtttgggggttaacactgtattttccttattgctttgcatactactaaatggttaatagcaaactcccaaaaataaaatgttttttgacttaattctctaaactgaaaaggttttcacattttc

SEQ ID NO: 619116 - DNA, 574 bp, Homo sapiens
aaatggttttcatagaatatcaaaagggtaggtagggagaagaaaaacgtagaagcactttgraagcactctctagaaacggaaaatcaggccgggttcagaagctgacgcctgtaaatcccagtgctttgtgaggccaagctgggaggatcacttgaggagtgatcaggagtttaagaccagagtgggcaacatagcaagaccctgtctctacaaaaaaaattaaaagttagctgggtatagtggtgcacacctgtattcctggctacttgtgagactgggggaacctgaggcaggaggatcacttgagcccaggaggtcgaggctgcgatgagctgtggttacacaccactgcactccagcatgggcagcaaagcaagaccttgtctcaaaaaaaaagaaagaaaaggagaaagaaagggaaaatcagtgaatctgccaacaggacaagtttgggggttaacactgtattttccttattgctttgcatactactaaatggttaatagcaaactcccaaaaataaaatgttttttgacttaattctctaaactgaaaaggttttcacattttc

SEQ ID NO: 619117 - DNA, 587 bp, Homo sapiens
aaaagggtaggtagggagaagaaaaacgtagaagcactttgaaagcactctctagaaacggaaaatcaggccgggttcagaagctgacgcctgtaaatcccagtgctttgtgaggccaagctgggaggatcacttgaggagtgatcaggagtttaagaccagagtgggcaacatagcaagaccctgtctctacaaaaaaaattaaaagttagctgggtatagtggtgcacacctgtattcctggctacttgtgagactgggggaacctgaggcaggaggatcacttgagcccaggaggtcgaggctgcgatgagctgtggttacacaccactgcactccagcatgggcagcaaagcaagaccttgtctcaaaaaaaaagaaagaaaaggagaaagaaagggaaaatcagtgaatctgccaacaggacaagtttgggggttaacactgtattttccttattgctttgcatactactaaatggttaatagcaaactccyaaaaataaaatgttttttgacttaattctctaaactgaaaaggttttcacattttctcctccattaaagatttattttcattataaaaga

SEQ ID NO: 619118 - DNA, 550 bp, Homo sapiens
ttttccaggaatttatccacctcttctaggttttctagtttatgtgcataaaggtgttcacaagtagccttgagtgatctcttgtatttcagtggtgtcagttgtaatatctcctgtttcatttcttaatgaggttatttagactttctctcttcttttcttaatcttcttttcttcttttcttggttattcttgctaatggtctatcaattttatttatctttttaaagaaccagctttttgtttcatttatcttttgtattttttgtttgtttcaatttcatttagctctgctctgatcttggttatttcctttcttcttttgggtttgggtttggtttgttcttgcttctctagtcccttgaggtgtgaccttagaatgtcagtctgtgctctttcagtcttttcaatgtaggcatttagggctatgaactttcctcttagcaccgcctttgctgtatcccagagggtttgacaggttrtgtcattattgtcatttcgtttgaataattttttaatttctatcttgatttcgtttttgacccaatgc

SEQ ID NO: 619119 - DNA, 563 bp, Homo sapiens
tgagtagaatgtgtattctgcagtcgttgggtgaaatgttctatatatatctgttaagtccatttgttccaaggtatagtttaaatccattgtttctttgttgactttctgtcttttgatgacctgcctactgctgtcagtggagtattgaagtcccccactattactgtgttgctgtctatcttatttcttaggtctattagtaattgttttataaatttgggagttccagtgttaggtgcatatatgtttaggattgtgatattttcctgttagccaaggccttttaccattatataatgtccctctttgtctctttkaactgctgttgctttaaagtttgttttgtctgaaaaaagaatagctacccctgcttgcttttggtgtccatttgcatgaaatgcctttttccacccctttactttatgtgagtccttatgtgttaggtgagtctcttgaaggcagcagatagttggttgttgagttcttatccattctacagttctgtatcttttaagtggagcatggaggccatttacattcaatgttagtactgagatgtg

SEQ ID NO: 619120 - DNA, 588 bp, Homo sapiens
catatatgtttaggattgtgatattttcctgttagccaaggccttttaccattatataatgtccctctttgtctcttttaactgctgttgctttaaagtttgttttgtctgaaaaaagaatagctacccctgcttgcttttggtgtccatttgcatgaaatgcctttttccacscctttactttatgtgagtccttatgtgttaggtgagtctcttgaaggcagcagatagttggttgttgagttcttatccattctacagttctgtatcttttaagtggagcatggaggccatttacattcaatgttagtactgagatgtgaggtacctttgcattcatcctgctgcttgttgcctgtgtaccttggtttttttggtttttgtttttgctttttaacttgtatttttgttttataggtcctgtgtgatttatgctttaaagaggttctgttttgatgtgtttccaggatttgtttcaaagttcagagctccttttagcagttcttgtagtggtggcttggtagtggcgaattctcttaacatttgtttgtctgaaaaagactgtatttttccatcatatatgatgct

SEQ ID NO: 619121 - DNA, 588 bp, Homo sapiens
catatatgtttaggattgtgatattttcctgttagccaaggccttttaccattatataatgtccctctttgtctcttttaactgctgttgctttaaagtttgttttgtctgaaaaaagaatagctacccctgcttgcttttggtgtccatttgcatgaaatgcctttttccacccctttactttatgtgagtccttatgtgttaggtgagtctcttgaaggcagcagatagttggttgttgagttcttatccattctacagttctgtatcttttaagtggagcatggaggccatttacattcaatgttagtactgagatgtgaggtacctttgcattcatcctgctgcttgttgcctgtgtaccttggtttttttggtttttgtttttgctttttaacttgtatttttgttttataggtcctgtgtgatttatgctttaaagaggttctgttttgatgtgtttccaggatttgtttcaaagttcagagctccttttagcagttcttgtagtggtggcttggtagtggcraattctcttaacatttgtttgtctgaaaaagactgtatttttccatcatatatgatgct

SEQ ID NO: 619122 - DNA, 526 bp, Homo sapiens
tgacattccccacctcttacatttaggatattccwattccagcctcctttccctgactcacttccacctcctcccatggcaacacagagaaatctcaggcaggaaaagaacagccagaaaaaatgaactccagatacatggattctctgctggtgaaaaaaaaatctcacccatgagtgagacatggggcaagatagatggtcctctcagacaacttctctcctgaaaggaacattcactaagataaccaaaagccacctggacttgataacctcagagggccagcaaatgcttgcaggccaagccttcagacaccattttctccaagattatttttctgtggtcagagaatatatgttcctcaggaatttggattctcaacacactactttcaggttggtgctgcactcgccagccaagaatgtgtctttgcagcaaaaaggcctggcttaatgtccttgcccataagccaagcagggagagggatggctgaggcagtctttaatgccaattcctacctgagaag

SEQ ID NO: 619123 - DNA, 526 bp, Homo sapiens
tgacattccccacctcttacatttaggatattcctattccagcctcctttccctgactcacttccrcctcctcccatggcaacacagagaaatctcaggcaggaaaagaacagccagaaaaaatgaactccagatacatggattctctgctggtgaaaaaaaaatctcacccatgagtgagacatggggcaagatagatggtcctctcagacaacttctctcctgaaaggaacattcactaagataaccaaaagccacctggacttgataacctcagagggccagcaaatgcttgcaggccaagccttcagacaccattttctccaagattatttttctgtggtcagagaatatatgttcctcaggaatttggattctcaacacactactttcaggttggtgctgcactcgccagccaagaatgtgtctttgcagcaaaaaggcctggcttaatgtccttgcccataagccaagcagggagagggatggctgaggcagtctttaatgccaattcctacctgagaag

SEQ ID NO: 619124 - DNA, 608 bp, Homo sapiens
atcatctttgcaagaaaccacaataacaaggccttcctttcttttagggtctatggtggccaagtttttaagtgccattttcagggctgttcatattttgtacagtctataaattatttagaagcatctaactgaccactttgtttccatctttcacttctctctttctctggatctcagccacaactacgttcgtgggtccattacactttttatcatcaacttgcatcgatcaagaaagaaaatcaagctggctgggactctcagagacaagctggttcaccagtacctgctgcagccctatgggcaggagggcctaaagtccaagtacgtgccaacctgaaaatagctcgggagcaagtgcagcaggagctsagggagggggaggctgaagacaccaaggttgctgctaattctctcaagggctcagtgggatggagtaggacaaagagcggtctggggtcaggtgactgctgactccttttgggaacatgttcaagcccctccctatcttagattccccagttgtaaagtcaaatggtggagaaagtatttctcaacaaggatactcttggtatttgagccagatgattcttcgttatacacaa

SEQ ID NO: 619125 - DNA, 544 bp, Homo sapiens
ttgtttcctccagaaagccttccttgatgccccatgcctgtcctccacccagtatgacttctgtactcctcttctaatacactatagggcttctgttacagtccctgctaacttgtctatctccctatctctactgtaagctccttgagggcaggacagtrtctctagtgtctagcatagtatctagcacatagcatgaatgcaataagtgtttacgaataagtgaaacatgaataataagtgaacatttgcatagttatttaaacacaatccttttgaaatactcttttttctttgaaaaataggccttctttaagatcttaaaagcaataatgctgattgcagcaattttccatacaaaaaattcacgtaagaaaataaaaactgcctgtaatcttaccacccaaagaaaaccacttttaacatttagatgtagtccccttctgtaattttctacatgtatgtatatataccaaatcagaatcctatttttatacctaatttgctcaaagattgtaacagtaacttctggaggtagaggtgg

SEQ ID NO: 619126 - DNA, 571 bp, Homo sapiens
aacagccataataccaagcaccataattacaaagcatacttactatgtactgagcttgcttgcttgaggtagaataaagagtcctgaaaactgtcacagccttgaaagcatactaagaactctaaaaggtggaagtggagagtgtctctataaagacttagctcctcaccacagaaaagactgagttgaagaacccatattaaactccgacttttattattattattattaattgacttttattatttgccacatgtgcttctagccaaaaaagactgayagtgataaagaaggggtgagcttaccagatagcgacacagagtctagatctaagggaaattgctgtgagctacactgacctctggaatgtggagaacagaagagggatgtactcccagagcacaggacatgcaaacttggtggaaggaagtatgaacaacagatcctaatagagatagtacgctgcccccattcacatacttctgcaaatagatggctcgattcaaagatgagtaataattagaataggagaaagaaaactgtttatctgctgacactattattgtgtatg

SEQ ID NO: 619127 - DNA, 463 bp, Homo sapiens
atacattgctttgtctgctcagaccccatctaccaattcctttagctttttcacataaaatagacccaccagatgagaccacagaagcagccattttctacaaatgagaccctggcaccacagataaagggtctaggggtggacaacyaacctggataggtcaactgcagtcccattataacacgcacctcatgtcttctggctctaagtttggggttgaaatgatttatcctgtccaattaaaaaaatacgattctttctcagattgttttcaaccacgtagtgttagttattgcatgtttaaagttcgtagtgctgcacagtgtagaaactcaagtgtataaatctaatgacatatgcttgttgtggtctcgctgagggcagtgggactgtacaactttctttttaaaatataattcaagcaaataaaggcattaagttgtactagtgcaatcgaagattt

SEQ ID NO: 619128 - DNA, 463 bp, Homo sapiens
atacattgctttgtctgctcagaccccatctaccaattcctttagctttttcacataaaatagacccaccagatgagaccacagaagcagccattttctacaaatgagaccctggcaccacagataaagggtctaggggtggacaaccaacctggataggtcaactgsagtcccattataacacgcacctcatgtcttctggctctaagtttggggttgaaatgatttatcctgtccaattaaaaaaatacgattctttctcagattgttttcaaccacgtagtgttagttattgcatgtttaaagttcgtagtgctgcacagtgtagaaactcaagtgtataaatctaatgacatatgcttgttgtggtctcgctgagggcagtgggactgtacaactttctttttaaaatataattcaagcaaataaaggcattaagttgtactagtgcaatcgaagattt

SEQ ID NO: 619129 - DNA, 661 bp, Homo sapiens
gggcagtgggactgtacaactttctttttaaaatataattcaagcaaataaaggcattaagttgtactagtgcaatcgaagatttattatctaaactttgaacagtcaggaaattccagagttggattccaggagaaatatttctagaaaagaaagtagaaagacctaatgtatgtcagtgcttggcccatttgctgcctggtacaataatcctgtggattaagcatggggacctgccaggcatgtagctcatgcctgtaatctcagcaytttgggaggccaaggcaggagtatcgcttgaggtcaggagtttaagaccagcctgggcaacacagtgagattctatctttactactactactactactaaaacaaaatttaaaaaatcatgggggatcatactgcacagactaaccctgaaccttgcaaaaggagaccaatgtgtaatgaatgatcgttgaatgggcttcaaaggggtaaaataattttacattttaaaaaagcatttatcttgatgtaattggccaacaaaattacattttctctgttacaaaaggagaaactgaggaacaaagaggaagtaactaacttgagtctcctaacatatccatagtagacctagaactgtattcaatatttacttactccagatactggactc

SEQ ID NO: 619130 - DNA, 661 bp, Homo sapiens
gggcagtgggactgtacaactttctttttaaaatataattcaagcaaataaaggcattaagttgtactagtgcaatcgaagatttattatctaaactttgaacagtcaggaaattccagagttggattccaggagaaatatttctagaaaagaaagtagaaagacctaatgtatgtcagtgcttggcccatttgctgcctggtacaataatcctgtggattaagcatggggacctgccaggcatgtagctcatgcctgtaatctcagcactttgggaggccaaggcaggagtatcgcttgaggtcaggagtttaagaccagcctgggcaacacagtgagattctatctttactactactactactactaaaacaaaatttaaaaaatcatgggggatcatactgcacagactaaccctgaaccttgcaaaaggagaccaatgtgtaatgaatgatcgttgaatgggcttcaaaggggtaaaataattttacatttwaaaaaagcatttatcttgatgtaattggccaacaaaattacattttctctgttacaaaaggagaaactgaggaacaaagaggaagtaactaacttgagtctcctaacatatccatagtagacctagaactgtattcaatatttacttactccagatactggactc

SEQ ID NO: 619131 - DNA, 661 bp, Homo sapiens
gggcagtgggactgtacaactttctttttaaaatataattcaagcaaataaaggcattaagttgtactagtgcaatcgaagatttattatctaaactttgaacagtcaggaaattccagagttggattccaggagaaatatttctagaaaagaaagtagaaagacctaatgtatgtcagtgcttggcccatttgctgcctggtacaataatcctgtggattaagcatggggacctgccaggcatgtagctcatgcctgtaatctcagcactttgggaggccaaggcaggagtatcgcttgaggtcaggagtttaagaccagcctgggcaacacagtgagattctatctttactactactactactactaaaacaaaatttaaaaaatcatgggggatcatactgcacagactaaccctgaaccttgcaaaaggagaccaatgtgtaatgaatgatcgttgaatgggcttcaaaggggtaaaataattttacattttaaaaaagcatttatcttgatgtaattggccaayaaaattacattttctctgttacaaaaggagaaactgaggaacaaagaggaagtaactaacttgagtctcctaacatatccatagtagacctagaactgtattcaatatttacttactccagatactggactc

SEQ ID NO: 619132 - DNA, 570 bp, Homo sapiens
gcaccaaccccagagattcctgttcaagttgatccgtagaggatcccaggtgttgatatttttttaaagtccaagtgattcaacgtgaagccagaattgagaactgtattagaggtttacattgccctaattaaattaactacctttttatttttctctactcctctgtactcaactcttgcttcaatttttgagatattaacaaaatatttagtactgtctatcattcattcatttgacaactatttattgagtacctagtatgtgccagacacttstagattctgatgaaatggaggtgaaggggaaagacaagatccctgtcctcactggaggttacagtctagaaggggagactaaaaataaacaagtaaactaacaattaattacaaaattctgaatgctgtgtaggaagcagttgctaagttgaataatgaggaggggaggcttctttagaaagtgtggctaaggaggtcttcactgaagaggcagccattagagaggctggtggaagagcagagcatcgctcaacaggaacagcatctgcaaaggctgcagtgggggaaagac

SEQ ID NO: 619133 - DNA, 586 bp, Homo sapiens
gaaggaatggtgacttctaaactcctcatatatggaagtggaaaccagaagtccaataatctgtgtgttgtctttttattttcttgatggtgtccttttaagcacaaaaggttttaattttgatgaactctaatttatctattttttggtcatttgtacttttggtgttcaattcaaggccacaaagatctactcctattttttcttctaagaatttgtatagttgtagctctcctatctttaggtctttggtccatttgagttaatttttgtacatgatatgaggtagagattcaacatcattcttttgcatgtagatacagttgtcccaataccatttgttgaaaagactattcttttcccatttaatyatcttggcacttttattgaaaattaagtgaccacatatgtaagggtttatttctggactttcaattttattccatagatctttatgtctacctttatacatatatgtatatgtacagtaatcaagagattatggccaataccataatctcttgattactgtagttttgtattaaactttgaaattggaaagtgtgagtaactgcaaaaatgaata

SEQ ID NO: 619134 - DNA, 586 bp, Homo sapiens
gaaggaatggtgacttctaaactcctcatatatggaagtggaaaccagaagtccaataatctgtgtgttgtctttttattttcttgatggtgtccttttaagcacaaaaggttttaattttgatgaactctaatttatctattttttggtcatttgtacttttggtgttcaattcaaggccacaaagatctactcctattttttcttctaagaatttgtatagttgtagctctcctatctttaggtctttggtccatttgagttaatttttgtacatgatatgaggtagagattcaacatcattcttttgcatgtagatacagttgtcccaataccatttgttgaaaagactattcttttcccatttaatcrtcttggcacttttattgaaaattaagtgaccacatatgtaagggtttatttctggactttcaattttattccatagatctttatgtctacctttatacatatatgtatatgtacagtaatcaagagattatggccaataccataatctcttgattactgtagttttgtattaaactttgaaattggaaagtgtgagtaactgcaaaaatgaata

SEQ ID NO: 619135 - DNA, 302 bp, Homo sapiens
ccagaaatcttgctggtagatatatatccaaaggaaatgaaatcaatacrttgaagagatatctgcccttccatgatcattgcagcattacttacaatagccaagatatggaaacaatctaagtgtccatcaacagatgaatggataaataaaatgtggtatatatacacaatagaatactactcagccttaaaaagaagggaatcctgtcatttgagacaacatggataaacttggaggaggacattatggtaagtgaaataagctaggcacacaaagacaaataccacatgatggcactt

SEQ ID NO: 619136 - DNA, 610 bp, Homo sapiens
taagcatgtggattaaatttcccccagaaaacacatgtttaggctctctctggaccacaaaaaattgaaaaatgattggagatatttcctgagctcaaagactgagaaggagcaggtctttacttctttaactgcacataataatgcaatagataaattatccagggggtctggggaagttaaaaatatggacaggaaataagaaaatgagatttagcttgaaaatattttccagatacatttgggacaaataatcagaaatagaggatttttgtttgagggagaacccaataaagttacrtaaactataagacatttagggtgatttctagttggcatggtccatgtgacagaaggctggttattctgattcctgaggatgcaagaggaaaggccctgaactatggaatatgaaatcatacccattgcccacagagtgtgaacaaggtcttcactttggttatatcaagatttacctggtgtagaaaaggtttaactaaaatcagattaatttctccaggtaactcaaggaaatgaatgaccaaagtcaagactgtagcagtctttgagcatggattacagaagcaaaatggagtctgagatccaaacc

SEQ ID NO: 619137 - DNA, 448 bp, Homo sapiens
ttagttctaggaagttcttaggttccctgcctccagaccctattctcctgcctcaatagcaggctgatgcagttttggattggacttggaagacagttcccggagtaggcatttgtgacctgcttccctatgcccccctagtcttcgttggttgggtatgacaaaaatgagtccattttgtataatcagtttgcagagtagataagtgattacctggggccagggattgcagaggagaaaacggttgggggtggcagggggtacagaaatagggaatgactaygaatagttatggaatttcttttgtgggtgatgaaaatgttccaaaattgattatggtgatggttacactactgtagacatactaattgggttataaacactaaatgggtgaattatatgatatgtgaattatatcttaataaaggtatttactttaaagtaaagg

SEQ ID NO: 619138 - DNA, 580 bp, Homo sapiens
tgtgaattatatcttaataaaggtatttactttaaagtaaaggctcctgtaaaatgtaaatactccatagagacagttatgccataaaagaatacgttaactgactgcagagagcaaaacttcagaagtggaatcttgaattggcaaagctagggtgaggcctgggaagggacagggcttgaaagacragacacagatggagctgatgaactggtgccacactcatctgcttcacagtactgcctggtcttgccctagcaacctgccaagtcatgcatgggcatgcttagtgtatttggcacccagaaggggatcatttttcaacatccccttcctcaatatgacagttagtcatagtgataatctgtaatagtattattttcttgattccttttatagtattaaaacagttgacaatttaaaagagcaaatacatttctattttaaagatctttctatttaaaggtattgttccatttcagtaaaacattttagtgtaaaccaaaacttgcatttgtccaacagaaatagagcatagcttgtactctttccgtttacattttcaacacaaaatctctaa

SEQ ID NO: 619139 - DNA, 580 bp, Homo sapiens
tgtgaattatatcttaataaaggtatttactttaaagtaaaggctcctgtaaaatgtaaatactccatagagacagttatgccataaaagaatacgttaactgactgcagagagcaaaacttcagaagtggaatcttgaattggcaaagctagggtgaggcctgggaagggacagggcttgaaagacgagacacagatggagctgatgaactggtgccacactcatctgcttcacagtactgcctggtcttgccctagcaacctgccaagtcatgcatgggcatgcttagtgtatttggcacccagaaggggatcatttttcaacatccccttcctcaatatgacagttagtcatagtgataatctgtaatagtattattttcttgattcctyttatagtattaaaacagttgacaatttaaaagagcaaatacatttctattttaaagatctttctatttaaaggtattgttccatttcagtaaaacattttagtgtaaaccaaaacttgcatttgtccaacagaaatagagcatagcttgtactctttccgtttacattttcaacacaaaatctctaa

SEQ ID NO: 619140 - DNA, 378 bp, Homo sapiens
aactacttatagccagatgttgagctcttgggacacccaacacaaattttgtttttaaatgttgaaaatattttaatataaaaaatagcacataaaaagatgaatagactgggcacagtggctcacacctgtattcccaacactttgggaagtcgaggtgggtggattggtgaaaccctatctctattaaaaacacaaaaattagccaggcgtgttggcacgcacctataatcccagctactcaggaggctgaggcaagaaaatcacttgaacccaggaggcagaggttgcagtgagctgagatcaygggaccacactccagcctgggctacagaacaagactcagtctcaaaaaaaaaaagaaagatgaataataat

SEQ ID NO: 619141 - DNA, 559 bp, Homo sapiens
tactatgactgttgctactacaaattcaccgtttgacttcaggcaagtgactttacctgtttaaatgtctgttagaattgatgagttctatcttatctctgttttttgtgacattccaacttggctgtcttccacctaagagccatcatttatcatcayggccatgtggtgctgtgtggaaaatgggtaccctgagaatgggtacctgtattccaatcctagatgtgtagatagcagatattctttctaaagtcatcacaagcaaattcagttatgcctaggtctttagcatctcagagtctattgaaaatgaaggtaaattcttctcatgatccataattggttgcttaaactgaggagcctatatgacgccttttccttttaaaggtggctcagactgtttgctgagggctctttccctacagtggttggttgtgggatcagcctatccagctttcctcttccctgctttcccaggaaatggtaaaaataaaaaagaaaagaaaaaggacaaaatgtccccctttcccccttttgtttcaagatccactccactaaa

SEQ ID NO: 619142 - DNA, 559 bp, Homo sapiens
tactatgactgttgctactacaaattcaccgtttgacttcaggcaagtgactttacctgtttaaatgtctgttagaattgatgagttctatcttatctctgttttttgtgacattccaacttggctgtcttccacctaagagccatcatttatcatcacggccatgtggtgctgtgtggaaaatgggtaccctgagaatgggtacctgtattccaatcctagatgtgtagatagcagatattctttctaaagtcatcacaagcaaattcagttatgcctaggtctttagcatctcagagtctattgaaaatgaaggtaaattcttctcatgatccataattggttgcttaaacygaggagcctatatgacgccttttccttttaaaggtggctcagactgtttgctgagggctctttccctacagtggttggttgtgggatcagcctatccagctttcctcttccctgctttcccaggaaatggtaaaaataaaaaagaaaagaaaaaggacaaaatgtccccctttcccccttttgtttcaagatccactccactaaa

SEQ ID NO: 619143 - DNA, 580 bp, Homo sapiens
aaactgcctgggtttgagtccaagctgtgccactaactaaatgagtgatcttgaataagttacttcacctctttcagttttctcatccgtaaatgggataataacagcatctatttcactaaattgttataaaagcagtagcatcgatttcattggttgttaaattatgaaatataaataaagcacttcagacagcggtaagcaccgtatcattaaaagtatgattactacrgcacttacctcctacagctttacaatgtagttatctcctatcccagttccatcaatcatatttttttctggagggaaaaaaccatgccttattgttacctatctcccaagactatagtgaaaattggcttagaaaatgtatgttgtttacactgtgttttgaactttagacattcaataaagctgttattactataattattactgttactactattactataatctttgctctgatgcctgtgcctgacattttaatatctagagaaggtgttgatcattgttgaatggtttaagacacacatgaatgaatgaaatgaactttcaacgggaaacatgcctcacccct

SEQ ID NO: 619144 - DNA, 580 bp, Homo sapiens
tcctggctcaccacaacctccgcctcccgggttcaagcgattctcttgcctcagcctcctgagtagctggaattacaggtatgtgccaccacgcctggctaattttgtatttttagtaaagatgagatttctccatgttggttaggctggtctcgaactcccgacctcaggtgatccgcctgcctcggcctctcaaaatgctgggattacaggcatgagccaccacgcctggctcaattaactattaaaacacttagaaataataaagttaaaaatcacatttgaaacagtgatagtaatcatggattcatgcaagcattatttacgggtgttaaaatttgtggattaaacattaatgaggagaataatatttacrtagttccgaagtacatgctaagtgtagagagagacaaaacaattaagaaaacataaaaatgtaccagttaactaatctgggtgaaagttgtaaattttgtgataactttgcaagttttctttaggtttgaagtgatctcaaaataaaaatttttataaaatcattttatgaactttgccagcatcaattataatttgtattaga

SEQ ID NO: 619145 - DNA, 420 bp, Homo sapiens
gcctaagtagcccacagacttacaattttttttttttttgacacagagtctcatgtttttgctgaggctggagtgcagtgatgctatctcggctcactgcaagctctggctccgaggttcacgccattctcctgcctcagtctcccgagtagctgggactacaggcacccgccatcaygcccggctaattttttttttttttttgtatttttactagagacggggttgcaccgtgttggccaggctggtctcgaactcctgatctcagatgatccacttaactcagcctcccaaagtgctgggattagaggtgtgagccaccactccctgcccacagactcttgatattgttacaagaattatgatttctgtcttccctgcaaagcactgttatgtttctcagattcttttttttttttt

SEQ ID NO: 619146 - DNA, 590 bp, Homo sapiens
ggtttgctgccccatgataacattccatcttcccccccacccaaagggcaatgtacaaaaaccaaactatgttcaagtaacttatttcaattatccctattgacacagcctctaaacattcattaacagatagtccctcatcagtgggagcccttactctcccccatcacccaccatatgtaaagcatttgctatcagatcccagtgaattttcttaaatgccctaactggcctgtggggagcmcttgtgcttttctttggaagccatacctctgttagcatcccatcctcatcactacaaagtgtcgagaactgtgataggttcaaggttttaccctactgtcatgacaacctttggccatctcgtcttcctaggtggtggaagaagataagagactcctgtgtcagaggcaaaagacatgattactcagggcacaagtagcatggtttctcttgctcgccaattcctataggggtgatgcagcggtagacccaggcaaatgctgtgtaatagttgaggaacctcaaacttcagtaaccccaatcttttatgagggattgggagctccatctttgtcctgaaaggagac

SEQ ID NO: 619147 - DNA, 547 bp, Homo sapiens
agctagaagaagaaaagaggtagcaaggattacagcagaactaaatgtaattgagataataaaaaactatacaaaggatcaatgaaacaagaagttgctttctcgaagggacacagaattgatacagtgctagccagataaaccaagaaagaaagagagaagattcaaataagaaaaactagaaatgacaaaggtgacattataactgttgccacagaaatacaaaagatcttcggagactactgtggttagctctatgtgcasaaactagaaaaaactaaataaaataaagataaattcctggaaacatacaaacccccaagactgaaccagaaagaaatggaaaacctaaacagaccagtaaccagttatgaaattgaataagtaaaaaaaaagaagaactatctaccaataataataatagtaaacccttgagcagatggattcacagctgaattttaccagatatgcacagaagagatagtataaatcttactgaaactattccaaaacaatggaggaagaagtatttctccctaactggttc

SEQ ID NO: 619148 - DNA, 619 bp, Homo sapiens
catgagtgtttttatttaatcaaagtatccttttccgacatcttaaaattatttttatgagtttatgatcacacatgggatgaattttaagattcagaaatatcctttacttacattgttttgttttttaaaactctcttctaggtctacttgaagatttttttcttcgttaaggttcaaatggtggtacttaaaataaagttaacaattacaacagacccaatcacagacaataccagcgtagaaatattaactccagaattatgacttttatcaggagtaggagtaggagtaggwgtaggatcaatgtcatcaggatttgcttgagggataaacaaagttacttgtgcaatgttggatacttttgatgtcaaattgcttttatctatacttttaatggcaataaatatgtgggttgcattttcttctgagatattttctggtttaaatgcaaagctttccttggagttggcctcctttggtgacagatcagtagtatttacttgaagagcatcatcaaaactgtctcttagatcaagaatacttgcacttattcttatgatataacgttgaactgagaaaaaaaagttacatgtagtttagagactgcagcatagca

SEQ ID NO: 619149 - DNA, 601 bp, Homo sapiens
ctgtgtacccttaaagaatatctaatctaattggggaaatacaatgcatgaagcagtaagaggcattaaataattaaatgctaggttgtgaagtgaatactataattattatatgcattcaaaagagataatattagggttagaatagcgaaaaaagtcttcattcccttagcacccatttattgagcatgttaaataaaatatagcaggtccaaaatggaatcacccatgctaaagtttcacatcaccaaaccaaaacctaagagatgataaccaaatcccattaggccaacaggatttcacttatatccctgtaaggaaattaaccttgaaatggtcaatctgcyatttgttttttgtttctgtctgcttctgcttttttctgcctataaaactcacccactctgtttagctcattagagctcctttttattttgtagattacatattgcccagttcatgagttactaataactcaatcagagctttgaaatttaatttgctgaaacttttttgtttgtgtgtttgttttgatacagggtcttattttgtcacccaggctggagtgcagtggcacaaacacagctcactgcagccttga

SEQ ID NO: 619150 - DNA, 601 bp, Homo sapiens
ctgtgtacccttaaagaatatctaatctaattggggaaatacaatgcatgaagcagtaagaggcattaaataattaaatgctaggttgtgaagtgaatactataattattatatgcattcaaaagagataatattagggttagaatagcgaaaaaagtcttcattcccttagcacccatttattgagcatgttaaataaaatatagcaggtccaaaatggaatcacccatgctaaagtttcacatcaccaaaccaaaacctaagagatgataaccaaatcccattaggccaacaggatttcacttatatccctgtaaggaaattaaccttgaaatggtcaatctgctatttgttttttgtttctgtctgcttctgcttttttctgcctataaaactcacccactctgtttagctcattagagctcctttttattttgtagattacrtattgcccagttcatgagttactaataactcaatcagagctttgaaatttaatttgctgaaacttttttgtttgtgtgtttgttttgatacagggtcttattttgtcacccaggctggagtgcagtggcacaaacacagctcactgcagccttga

SEQ ID NO: 619151 - DNA, 410 bp, Homo sapiens
gctaatggcagccctgggcagattgtgttttgtttcttccaatatttacaaattgggacattttacataaacatctagatttctggcgcttttgaaaattagatcagctaaccaagcctctcacacacaccaatggtgggctggtgtgacctctgtgtggcacttgtcctgcggtctgctataktccctctcacttcctagttttcttgcttcagccctcagcatttatttatctttcctgtctggtccctgtaggtatttgacttagtgacctctgagttaaaatcatagcagtgacttgggaaagtacacttaaagaggagcttctttgaagcttcagaatgggaagcaagaaaggagcaagtgaagagaatagagaaagattaggctctggattaatgattccatta

SEQ ID NO: 619152 - DNA, 607 bp, Homo sapiens
tattgtcaaggggaataggtgcactccctcttcctttacatgggattcaagggctcctgttctgacattagatgattcaggtgttgtgccccatgctagttgctttaatctgtgatcagaatttttctgtgtgcttgtgttcctgtttcgatattcttctaacctagaattctaagttaaaagacataaagtgaaaggaatgaaaaggtacaaataaagggcttggaaggtttcagaggagggaaagatgaacttgggtgaagatggaagttagagaaggatttataaaagaattaaggtcaagaccaagaaagacgtgagyggatagtgtactctgaagacacaagccagtgtttgatttaattttaggtatttagtgaactgaaaggataatcagcataataccttccaggaagatatttcaggccaactttaagcacacataaattcacacacctcataaaactgctttaggcattagctattagccaacagaacattttctttgtcatccaccaacataaaaatagcactcatctttggggcgcactctgaacagcatcgaaattttttaaacaaaacttcccccaaacaacaacaacaacaa

SEQ ID NO: 619153 - DNA, 607 bp, Homo sapiens
tattgtcaaggggaataggtgcactccctcttcctttacatgggattcaagggctcctgttctgacattagatgattcaggtgttgtgccccatgctagttgctttaatctgtgatcagaatttttctgtgtgcttgtgttcctgtttcgatattcttctaacctagaattctaagttaaaagacataaagtgaaaggaatgaaaaggtacaaataaagggcttggaaggtttcagaggagggaaagatgaacttgggtgaagatggaagttagagaaggatttataaaagaattaaggtcaagaccaagaaagacgtgagtggatagtgtactctgaagacacaagccagtgtttgatttaattttaggtatttagtgaactgaaaggataatcagcataataccttccaggaagatatttcaggccaactttaagcacacataaattcacacacctcataaaactgctttaggcattagctattagccaacagaacattttctttgtcatccaccaacataaaaatagcactcatctttggggcgcactctgaacagcatcgaaattttttaarcaaaacttcccccaaacaacaacaacaacaa

SEQ ID NO: 619154 - DNA, 614 bp, Homo sapiens
catcgaaggaccctacaagggtctacagagcccctacataacttgacctctctgactactttggtgcttttctcccctttgcttgttctttgctcactgtgttccagccccacagacctccctgyggggctctttgaatatgcaagtcaagctctgcctctgaacctcggcactggcagagcactctgcctggaatgcccttcccccaggtatctcaggacttcttccttctcctccctcaaacttctgctcaaatgccaccttcttagtgaggcctaccctgaccaccctatttaaaattgcatcctctgcccttcattaccaaccttccttgccctttcatgtttcttcacagcacttgtcattttctagtacatcatacaatgcgcttatgtatcatgtgtattgcttgctccatccactagaatgtaaggtctctgagggcaaacttgtttttttgcttcttcttcttctccttttttttttgttttttgttttttgagacaggatctcactctatcacctgggctgcagtgcagtggtatgatcatagctcactgtggcctggacctcctgggctcaagtgatcttcccacttcaagcagctggaacta

SEQ ID NO: 619155 - DNA, 614 bp, Homo sapiens
catcgaaggaccctacaagggtctacagagcccctacataacttgacctctctgactactttggtgcttttctcccctttgcttgttctttgctcactgtgttccagccccacagacctccctgtggggctctttgaatatgcaagtcaagctctgcctctgaacctcggcactggcagagcactctgcctggaatgcccttcccccaggtatctcaggacttcttccttctcctccctcaaacttctgctcaaatgccaccttcttagtgaggcctaccctgaccaccctatttaaaattgcatccyctgcccttcattaccaaccttccttgccctttcatgtttcttcacagcacttgtcattttctagtacatcatacaatgcgcttatgtatcatgtgtattgcttgctccatccactagaatgtaaggtctctgagggcaaacttgtttttttgcttcttcttcttctccttttttttttgttttttgttttttgagacaggatctcactctatcacctgggctgcagtgcagtggtatgatcatagctcactgtggcctggacctcctgggctcaagtgatcttcccacttcaagcagctggaacta

SEQ ID NO: 619156 - DNA, 588 bp, Homo sapiens
actgttaacatactgggctaaataaaatacattatcaaaattaacttcgagtggttcattttccattcatttttcctttatcaaaaacttttaaattacctacgtgaccctcatgtgtagcttacattayatttctattgtgcagtgatgagataagctatgaggtcttatggaccacagtaagggtgattgcttttactgagagagaagaaaagccactgcagggtttgggcacagcagagcatgatgtgacttaacatttcacggattgttttcgctgcagggaggactacagcctctaaggggcaataaagaagcagatgagagaggatggtggcttggaccaaggtggtggcagcggaagtagttctgatagatgaaattttggatatattttacaggtagagtcaacaagacttactgatgaactggatgaaagacagatgagaaagagggaaatcaagcatgaccagaggtgttttcgataagcaactggaagaacagcattcccataaatgggatggggagactgcaggaagaacatattggggagggaaaccaggagttccattttggacacgtttagtg

SEQ ID NO: 619157 - DNA, 588 bp, Homo sapiens
actgttaacatactgggctaaataaaatacattatcaaaattaacttcgagtggttcattttccattcatttttcctttatcaaaaacttttaaattacctacgtgaccctcatgtgtagcttacattacatttctattgkgcagtgatgagataagctatgaggtcttatggaccacagtaagggtgattgcttttactgagagagaagaaaagccactgcagggtttgggcacagcagagcatgatgtgacttaacatttcacggattgttttcgctgcagggaggactacagcctctaaggggcaataaagaagcagatgagagaggatggtggcttggaccaaggtggtggcagcggaagtagttctgatagatgaaattttggatatattttacaggtagagtcaacaagacttactgatgaactggatgaaagacagatgagaaagagggaaatcaagcatgaccagaggtgttttcgataagcaactggaagaacagcattcccataaatgggatggggagactgcaggaagaacatattggggagggaaaccaggagttccattttggacacgtttagtg

SEQ ID NO: 619158 - DNA, 588 bp, Homo sapiens
actgttaacatactgggctaaataaaatacattatcaaaattaacttcgagtggttcattttccattcatttttcctttatcaaaaacttttaaattacctacgtgaccctcatgtgtagcttacattacatttctattgtgcagtgatgagataagctatgaggtcttatggaccacagtaagggtgattgcttttactgagagagaagaaaagccactgcagggtttgggcacagcagagcatgatgtgacttaacatttcacggattgttttcgctgcrgggaggactacagcctctaaggggcaataaagaagcagatgagagaggatggtggcttggaccaaggtggtggcagcggaagtagttctgatagatgaaattttggatatattttacaggtagagtcaacaagacttactgatgaactggatgaaagacagatgagaaagagggaaatcaagcatgaccagaggtgttttcgataagcaactggaagaacagcattcccataaatgggatggggagactgcaggaagaacatattggggagggaaaccaggagttccattttggacacgtttagtg

SEQ ID NO: 619159 - DNA, 588 bp, Homo sapiens
actgttaacatactgggctaaataaaatacattatcaaaattaacttcgagtggttcattttccattcatttttcctttatcaaaaacttttaaattacctacgtgaccctcatgtgtagcttacattacatttctattgtgcagtgatgagataagctatgaggtcttatggaccacagtaagggtgattgcttttactgagagagaagaaaagccactgcagggtttgggcacagcagagcatgatgtgacttaacatttcacggattgttttcgctgcagggaggactacagcctctaaggggcaataaagaagcagatgagagaggatggtggcttggaccaaggtggtggcagcggaagtagttctgatagatgaaattttggatatattttacaggtagagtcaacaagacttactgatgaactggatgaargacagatgagaaagagggaaatcaagcatgaccagaggtgttttcgataagcaactggaagaacagcattcccataaatgggatggggagactgcaggaagaacatattggggagggaaaccaggagttccattttggacacgtttagtg

SEQ ID NO: 619160 - DNA, 580 bp, Homo sapiens
aggctgaggcagaagaattctttgaacctgggaggtggagattgcagtgacctgagatggtaccactgcactccagcctgggtgacagagcaagatcctgtctcaaaaaaaaaaaaaatgtactaacagcattttctatactaaccaattaaagaaaaaaaaccaatatgattattgctatagattctggaaaaaatttaacaaaggttaatactggtttatgttaaaaagagtattgtattaattaggattagaatcatctgcacataacagaaatctccttcaaatatcaagagaaaaaaaatcatttctctcaaacaccagtgatggtatagtgactctatggcatcatcagggacctaggcttctctytactttgccatcacaatgcttggcttcaatttcatggtccaagacagccatcatacttctgcttcccatccctcctgtggcagttcctattttccaaatatggccacagcaatatctctcatcccaaatgttcttttgcaatgtgacctttccattctcccaccaaagaatggagttatttctctactcccatgaatattgaaggatt

SEQ ID NO: 619161 - DNA, 564 bp, Homo sapiens
ccttattttatttttgatggcttcatgatagatgggacctctgtataaagctcaagagaatagtttgggacagatgtttcctttccagccacattttcctgcctcaagttaaaaatagccatcctctttgctttggcttccgtaagatgtatgccattaaagctctctatttgggtttacagagacaaaggctgttaagtccctggctttcacagcctgttgggccgtgaactgatgcaatattgggttcgggaagatccagccccttgagacagattcctggacactttagtgaaaaaagattgctttcctatacctaccwttaggtagcaccagaaagagaatttccaagtggggaaggacctttcgcaaagtagttctatttttgttttcctgaataaatccttcattatggagttttcttgaatcaatgacaacatcacccccagggtaacctgaaccccctttgatatctggctttaatggaggtataaatgctgtcggtagtattcatgagcaatgttgagttaggcctacaccatcaggaagattgactgaaagctt

SEQ ID NO: 619162 - DNA, 592 bp, Homo sapiens
ttacgacacttttagaaatgtaaaagccggccacgcacggtggctcatgcctgcaatcccagcacttcgggaggccgaggcaggcagatcacctgaggtcaggagtttgagaccagcttggccaatatggctaaaccccgtctctactaaaaatacaaaaattagccgggcatggtggcacatgcctgtagtctcagctacttgggaggctgaggcaggagaatgtcttgaacctgggaggcagtggtkgcagccagccaagatcgtgccactgcactccagcctgggcaacagagtgagactgtctcaagaaaaaaagaaagaaaggaatgtaaaagccattctttactgactgaccatacaaacacaacccctgagtcaggttaggttcactggccatagtttgccaaccccccatctagatgaaataacactagaccctcaacaatatgacttggtttctagaactctcctaatcctggttatcttcacatgaacactccccaatttaattaattcccccttaaaatataacatgagaacaagactgccatgactagaggtagctggcaggaacacacctgccacagtt

SEQ ID NO: 619163 - DNA, 592 bp, Homo sapiens
ttacgacacttttagaaatgtaaaagccggccacgcacggtggctcatgcctgcaatcccagcacttcgggaggccgaggcaggcagatcacctgaggtcaggagtttgagaccagcttggccaatatggctaaaccccgtctctactaaaaatacaaaaattagccgggcatggtggcacatgcctgtagtctcagctacttgggaggctgaggcaggagaatgtcttgaacctgggaggcagtggttgcagccagccaagatcgtgccactgcactccagcctgggcaacagagtgagactgtctcaagaaaaaaagaaagaaaggaatgtaaaagccattctttactgactgaccatacaaacacaacccctgagtcaggttaggttcactggccatagtttgccaaccccccatctagatgaaataacactagaccctcaacaatatgacttggtttctagaactctcctaatcctggttatcttcacatgaacactccccaatttaattaattcccccttaaaatataacatgagaacaagactgcyatgactagaggtagctggcaggaacacacctgccacagtt

SEQ ID NO: 619164 - DNA, 592 bp, Homo sapiens
ttacgacacttttagaaatgtaaaagccggccacgcacggtggctcatgcctgcaatcccagcacttcgggaggccgaggcaggcagatcacctgaggtcaggagtttgagaccagcttggccaatatggctaaaccccgtctctactaaaaatacaaaaattagccgggcatggtggcacatgcctgtagtctcagctacttgggaggctgaggcaggagaatgtcttgaacctgggaggcagtggttgcagccagccaagatcgtgccactgcactccagcctgggcaacagagtgagactgtctcaagaaaaaaagaaagaaaggaatgtaaaagccattctttactgactgaccatacaaacacaacccctgagtcaggttaggttcactggccatagtttgccaaccccccatctagatgaaataacactagaccctcaacaatatgacttggtttctagaactctcctaatcctggttatcttcacatgaacactccccaatttaattaattcccccttaaaatataacatgagaacaagactgccatgactagaggtagctggyaggaacacacctgccacagtt

SEQ ID NO: 619165 - DNA, 639 bp, Homo sapiens
ctaaaacatggtaaagaagcctttgaatgtggcctgtctggctgcagagcctgagctctttgtctctgggctataccgccttcctggtgatacagtctgtggctcccaacggcctacttcctggcagaggctggcatgtcccttcatcctagttctgtaactctatggactaagattcccaggaactccttcragatactcctcttgatccaggtgctagaatatgaaagcatgggcaaaataagactggcaggctaggagatcaggaaacagcaccaggaaaaaactaaggagggctgtgaaaagcaagaccaagtataggaaaactcagtctcttaaaatatggggatttagttattttggtagcagagctttctggatcgctgaggatttgcaaactcactttaaagaacaaaagagtcttcaatttactagtggcaggtagaaatattttcaaaatgtattgcacatgtctttgctttcttagaatacccccccgaaaaggactttatgactcagatgtatcatgaacatgtcgtggctatgttgcaactcagtgacatcattaatgcttattaaggtatagatatctaacctattcactcctaccataaatgattcaagaaaactggtgtgagt

SEQ ID NO: 619166 - DNA, 473 bp, Homo sapiens
gccatatcatccattccccagtgacttccactagcaaagggagacttttaaaaagaaaaaaacccaggcaactccaaagtcatttgtaaaatgttatttactctcctcctaagtagaatgaccttcctaaactgtctggtttgggcttatcaaaaaaaaaaaaaaaaaatatatatatatatatatatatatatatrtatgtatgtatttgcctccccaaaaacagggactttgaataagttttgtggccaggggaacaacactgagacgcaaactggaggcaaggatgtcaaatgcacccaatgagaatatctatccctctccctgccaatctcctctctcaccactcccaccacctcttctttccccaaatcataaagtgtcactcacaccttcaccctctgacatgacgattagagagtccaggtagtggggtcacatggagagaaccttgaaacttgtcgtgaattttt

SEQ ID NO: 619167 - DNA, 473 bp, Homo sapiens
gccatatcatccattccccagtgacttccactagcaaagggagacttttaaaaagaaaaaaacccaggcaactccaaagtcatttgtaaaatgttatttactctcctcctaagtagaatgaccttcctaaactgtctggtttgggcttatcaaaaaaaaaaaaaaaaaatatatatatatatatatatatatatatgtatgtatgtatttgcctccycaaaaacagggactttgaataagttttgtggccaggggaacaacactgagacgcaaactggaggcaaggatgtcaaatgcacccaatgagaatatctatccctctccctgccaatctcctctctcaccactcccaccacctcttctttccccaaatcataaagtgtcactcacaccttcaccctctgacatgacgattagagagtccaggtagtggggtcacatggagagaaccttgaaacttgtcgtgaattttt

SEQ ID NO: 619168 - DNA, 555 bp, Homo sapiens
tgtagtattattattcaaattgttttgacctcagagaccacttggaaatgttttagggaacccccagaggaccttggatcatgctttgagaaccgcggctctagatatgttactatttcagtagcatctaagtacatgtggctgctgagcacttgtaatgtggctagtgcaaatgagagacaggacttccagctatatgtaatttaayaaactcaaatttaaaaactggaacctctttaaatgttttgttgttgttgttaaacatgaccttatagttttggtaggaatacatttcactttaacccttcaaaatttagcatttgaattgagatatgctgtatatgttaaatacatgacagattttggggacttagaaaaaaataatgtaagatatttcattaatagtttttatattgagtattttttgctatgataatatttttgatatattgggttaaataaaatgtattttaaaattaatttaagctatatttattaaaatctttagaatgtggataatagaacatttaaaatgacatacgtggttcacatttt

SEQ ID NO: 619169 - DNA, 555 bp, Homo sapiens
tgtagtattattattcaaattgttttgacctcagagaccacttggaaatgttttagggaacccccagaggaccttggatcatgctttgagaaccgcggctctagatatgttactatttcagtagcatctaagtacatgtggctgctgagcacttgtaatgtggctagtgcaaatgagagacaggacttccagctatatgtaatttaataaactcaaatttaaaaactggaacctctttaaatgttttgttgttgttgttaaacatgaccttatagttttggtaggaatacatttcactttaacccttcaaaatttagcatttgaattgagatatgctgtatatgttaaatacatgacagattttggggacttagaaaaaaataatgtaagatatttcattaatagtttttatattgagtatkttttgctatgataatatttttgatatattgggttaaataaaatgtattttaaaattaatttaagctatatttattaaaatctttagaatgtggataatagaacatttaaaatgacatacgtggttcacatttt

SEQ ID NO: 619170 - DNA, 483 bp, Homo sapiens
gccagtagccgggtcaggtagatctcggacaccatcttgctgccccggtcaccctccttctggtcaccgtggtcatggttcttcaccagatgccacaccttgaccccactttccaggtctggggtgatcatcggggcccgggaccgcaggctgtcggggctgcccgtatacctgaaggaggagtctgaggagaaggggttggtggagggctgtgagtaacagtcaccagccttgcttgtagaatccttccagaatccctgcccgcctgctgcatccactcagaataaactcatttcagctgaaaggggaccgttgggacctcatatatggtaggttattttagggatccttggttggcatgaggacggaagagcytgaaggcttttttagaaaaggatttataaattttgtgaattagagacatccttgggaatttgggagtcccctctactctgacactcccagcaatgaataattaatagg

SEQ ID NO: 619171 - DNA, 519 bp, Homo sapiens
catagagtgcttgggatgggtgggcgggcctgccaccttgctcttggtacacttagttgtcctttgggctcaccccagaccagcctcccatcctctttattgaccccctagactgcttttatggacagaaggcagagcaaggggcagaagtagaagatacacaggcgggcccggagcttccggcttcctcaccagggtcttgtactcgatctgctgccggatgagcttgtcctcgctcagggagtagcgggcctcgcccgtgatggcatcaatggggcccttctccatctgctgcttgatggcacagtatagcatgaagagtggctcccctgcgcactcctgtgggcacagrcagggcaggaggtgtgggcacggcctcctcaggtttgtacgttttccctttcctctctcggagcgaggccagtggaaggaagggctttagcacagccagtccaggttcctgctcccgagggagggggtccccatgcagccctgtggccaggatctaagcagcagtgc

SEQ ID NO: 619172 - DNA, 576 bp, Homo sapiens
tggggatccatctaagggaatcacatatgtgatgtgctggcatgcatagactggaaagatcgcagcctgtagagggcttaaattacttaytttttccattctaactcggtagttttactacgatcatcagttgggtctctctgacttacaaatttgtaaaaattatacctgaaagaatttaacttaggacatctaaaaacaacagaaatagtgaagacatgagtttgcatagtagaataactaaatgcagtctgcaaaatagttaacttaaacatgaacatacaatgtacaagtaacatgcagcatgtttctgatgctgattttcaactcaactcattagaaaaaaaattgtcaagttctttgctagttgtagccaaggaaaatgacgatctttccccctgcaaccccatcgacttggtggagcatacattttgctgtgtatcacacaggtatgtgccagaatgctaattctttgtgcctggaatttagagttaactgcagagcctttgcctttctgttgctcttcaaagctcacatgtaacttgggtcactgtatgagaaaagtgccagaaactt

SEQ ID NO: 619173 - DNA, 592 bp, Homo sapiens
cacaaataaaaaaagtaaaatgccaaatatakttaaagaactaattaaacattttcacaagtacacaacgttttgtactccatctacagatggacaaaactaagaaccatttccaacatgagcagatccacgtttagggtcttcagttaacttgacaatagggacaggcttgagtacaaagctctgctcctccatttgccatttgggagatgctgggcatgttatctagcctctctgagcttcagtttcttgatctataaaactaagataatgaacacaccataggcttttggagaggattaaataggataatgtatattaaatggctaccatatatagtcaaagctcaaaaaatgataattaatttaaaaattaattatctccccagttgtatagtaaaggagctaacaaaattctctccaggattctttccatctttaaagttttgtggttttgccaatattcagtttggtgattcctcaaaaagctacacacagaatcgccatataacccagcaattccactcctaggcagttacgcaaaagacttgaaagcagggactcaagcagatatgtgtacaccagtgttcatt

SEQ ID NO: 619174 - DNA, 592 bp, Homo sapiens
cacaaataaaaaaagtaaaatgccaaatatagttaaagaactaattaaacattttcacaagtacacaacgttttgtactccatctacagatggacaaaactaagaaccatttccaacatgagcagatccacgtttagggtcttcagttaacttgacaatagggacaggcttgagtacaaagctcwgctcctccatttgccatttgggagatgctgggcatgttatctagcctctctgagcttcagtttcttgatctataaaactaagataatgaacacaccataggcttttggagaggattaaataggataatgtatattaaatggctaccatatatagtcaaagctcaaaaaatgataattaatttaaaaattaattatctccccagttgtatagtaaaggagctaacaaaattctctccaggattctttccatctttaaagttttgtggttttgccaatattcagtttggtgattcctcaaaaagctacacacagaatcgccatataacccagcaattccactcctaggcagttacgcaaaagacttgaaagcagggactcaagcagatatgtgtacaccagtgttcatt

SEQ ID NO: 619175 - DNA, 493 bp, Homo sapiens
atgaatagcactgcaatttgctaatgcgcaaaatgagaaagctgttgtataaaatttatttaagtataataaagtacaaaaatattgagattttttggcaactacatagtgaatttgataaattttctctcaacattcaaaaaagaaccaatggaatgtattacctgaaattagaattacatatctaagaaaaaattaagactttttacaggtcccagcttgtcactttggccaaatataattttgctttggttcttacatatacatacacacacacacattttttacatggaaggataataaaaraaactatttcagttatataattttttaagaaaattatgagataaagacaaaaaagatatttcacaaaagtaagatattcaactaagccaccaaaaaattgcttataaaataccagatctctttaactacaacagagatcagctgattcaaaatctaaaaaactgcaaattttgtggttgttgttttt

SEQ ID NO: 619176 - DNA, 493 bp, Homo sapiens
atgaatagcactgcaatttgctaatgcgcaaaatgagaaagctgttgtataaaatttatttaagtataataaagtacaaaaatattgagattttttggcaactacatagtgaatttgataaattttctctcaacattcaaaaaagaaccaatggaatgtattacctgaaattagaattacatatctaagaaaaaattaagactttttacaggtcccagcttgtcactttggccaaatataattttgctttggttcttacatatacatacacacacacacattttttacatggaaggataataaaaaaaactatttcagttatataattttttaagmaaattatgagataaagacaaaaaagatatttcacaaaagtaagatattcaactaagccaccaaaaaattgcttataaaataccagatctctttaactacaacagagatcagctgattcaaaatctaaaaaactgcaaattttgtggttgttgttttt

SEQ ID NO: 619177 - DNA, 493 bp, Homo sapiens
atgaatagcactgcaatttgctaatgcgcaaaatgagaaagctgttgtataaaatttatttaagtataataaagtacaaaaatattgagattttttggcaactacatagtgaatttgataaattttctctcaacattcaaaaaagaaccaatggaatgtattacctgaaattagaattacatatctaagaaaaaattaagactttttacaggtcccagcttgtcactttggccaaatataattttgctttggttcttacatatacatacacacacacacattttttacatggaaggataataaaaaaaactatttcagttatataattttttaagaaaattatgagataaagacaaaaaagatatttcacaaaagtaagatattcaactaagccaccaaaamattgcttataaaataccagatctctttaactacaacagagatcagctgattcaaaatctaaaaaactgcaaattttgtggttgttgttttt

SEQ ID NO: 619178 - DNA, 444 bp, Homo sapiens
tgtttgtcaggggttcttgggcctctggccatagaatgagggctacactgttggcttccctacttttgatattttgggacttggactggcttccttgctccttagcttgcatacggcctactgtgggacttcaccttgtgatcatgtgagtcaatactctttaataaactccctttcattgtacatctatcctatgttctgtccctctagaaaatcctgactaatacaggtaggtaggtaggtaagtaaatgattgatagatagatagatagatagatagatagatagatagatwgatagacagacagacagacagatagagaggggatttattaggataattgtctcatggggtcatggaggttaagaagtcccaagatagatcatctgcaaggtagagaaccaaggaaaccagtggtatgtcttaatccaagtccaaaagcc

SEQ ID NO: 619179 - DNA, 518 bp, Homo sapiens
tgcttcaatattaccagtcatcaacaaaagatacatgccccaaatgtccacttactgccattgacttctggccagaagcaaacttcttcacagcatttatgacatcagcattagccaycaagtcaatctgctgaaaggctgtggaggatggcatgtaagaaccagcaccaaagcctgggccccaccttcatccaggaaaccctcagaagactctactgacattaggtatccaactttcagcttgttctcggcagcttggacatctgtatcagaaaagtttccttgagtagaatttatattaagcctatacagggcagagcaactcgactcactcatgctggctcatgaggcttattagatcatgagtggctgtagccccatctcttggtaccctttgtacccattcagggcacacatgattccaaataaccatttgtcatgtctatttctacactgagtgattgatttgatgcctgggtatttgtatacagcctctggttcaacggcttgacttccac

SEQ ID NO: 619180 - DNA, 518 bp, Homo sapiens
tgcttcaatattaccagtcatcaacaaaagatacatgccccaaatgtccacttactgccattgacttctggccagaagcaaacttcttcacagcatttatgacatcagcattagccaccragtcaatctgctgaaaggctgtggaggatggcatgtaagaaccagcaccaaagcctgggccccaccttcatccaggaaaccctcagaagactctactgacattaggtatccaactttcagcttgttctcggcagcttggacatctgtatcagaaaagtttccttgagtagaatttatattaagcctatacagggcagagcaactcgactcactcatgctggctcatgaggcttattagatcatgagtggctgtagccccatctcttggtaccctttgtacccattcagggcacacatgattccaaataaccatttgtcatgtctatttctacactgagtgattgatttgatgcctgggtatttgtatacagcctctggttcaacggcttgacttccac

SEQ ID NO: 619181 - DNA, 414 bp, Homo sapiens
ggtttccacaatggcaagaaggtgaagggtaagttcagagaagaggataagaaaatagcagattcttgctcaagatgaactgagaaatccagagaacacagagagtttcaggagttggagagaggagagaaaaagacaccgaatagaacatggacagagggggatctctaagagctagggcttatcatgaagcctgacratttaaaaaggggggcagaatgagtcttggtctagtgggctcaaaatagagagcagtggccaggctgttagtgttgtgaggtgaggaggaatggatttctgtagcaacccccttaccccatgctaaatgtctcagtcccagtgtacaattcacccttaactcctgatgggagagagatgacctgacttcgggtggatatgcccacctatgacctc

SEQ ID NO: 619182 - DNA, 414 bp, Homo sapiens
ggtttccacaatggcaagaaggtgaagggtaagttcagagaagaggataagaaaatagcagattcttgctcaagatgaactgagaaatccagagaacacagagagtttcaggagttggagagaggagagaaaaagacaccgaatagaacatggacagagggggatctctaagagctagggcttatcatgaagcctgacaatttaaaaargggggcagaatgagtcttggtctagtgggctcaaaatagagagcagtggccaggctgttagtgttgtgaggtgaggaggaatggatttctgtagcaacccccttaccccatgctaaatgtctcagtcccagtgtacaattcacccttaactcctgatgggagagagatgacctgacttcgggtggatatgcccacctatgacctc

SEQ ID NO: 619183 - DNA, 398 bp, Homo sapiens
aaggtgaagggtaagttcagagaagaggataagaaaatagcagattcttgctcaagatgaactgagaaatccagagaacacagagagtttcaggagttggagagaggagagaaaaagacaccgaatagaacatggacagagggggatctctaagagctagggcttatcatgaagcctgacaatttaaaaaggggggcagaatgagtcttggtctagtgggctcaaaatagakagcagtggccaggctgttagtgttgtgaggtgaggaggaatggatttctgtagcaacccccttaccccatgctaaatgtctcagtcccagtgtacaattcacccttaactcctgatgggagagagatgacctgacttcgggtggatatgcccacctatgacctcta

SEQ ID NO: 619184 - DNA, 418 bp, Homo sapiens
cacaatggcaagaaggtgaagggtaagttcagagaagaggataagaaaatagcagattcttgctcaagatgaactgagaaatccagagaacacagagagtttcaggagttggagagaggagagaaaaagacaccgaatagaacatggacagagggggatctctaagagctagggcttatcatgaagcctgacaatttaaaaaggggggcagaatgagtcttggtctagtgggctcaaaatagagagcagtggccaggctgttagtgttgtgaggtgaggaggaatggatttctgtagcaacccccttaccccatgctaaatgtctcagtcccmgtgtacaattcacccttaactcctgatgggagagagatgacctgacttcgggtggatatgcccacctatgacctctataatagaa

SEQ ID NO: 619185 - DNA, 628 bp, Homo sapiens
catgatctctctggacttctctcttcatatccatgttttggagaggggcacactacttggatttccttattcttactctcctgagtgtctccatatgctgctacctttgcctggaacatccttcctactcacatctaaccctcatttgactgtcagtcatgtagtaaatcttcaggtttcatcatatatatggtggaagtatcaattcttctccaagaaggatagagttggtgcccttcctaagtgcccccatgacattttctgtcaggatgctttcaggtgtaaaaaatcaaaagcctaacagtggctgaaaccacaagaaattaaatgtttgcctatgagatatccagaggtaaatagtattgatattagttaagcatctcagaaatattcacaaggatccctgctyttgctattcttctgcttcactaatattagcatgttgtctttcatgttccagcttgcccctaatggttgcaaggtgatcaccatcttgacctcacagtcatgtgacttcaaacaatggaatccaaaacaaggtcagagagaagggattcctagagctttccttttgcagtgtccttgcctcttgtcaggggagaacagctttcccagaagctcactaaaa

SEQ ID NO: 619186 - DNA, 684 bp, Homo sapiens
ggtggcacacacctgtaatcccagctacttgggagactgaggcaggagaatgacttgaacccaggaagcggagtttgcagtgagctgaggttgcaccactgcactctagcctgggtgasagagtgagctctgtctcaaaacaaaaacaaaaacaaaacaaaaacaaaacaaaacaaaaaaacaaaaaagaaggaaccactatagaatatctcattgttgtaatttatctgagtactgaccaaatgttttatctagctcaaaaattctcaatttagcttataaaattctatgctttacaatactatagttttaatattgttcttttcatacagatgtctattttagcacactaatgttgaactctagtagaatctttgatgagacccatttgctgcaaataaaatcgattttattttgattaaccatcattttaaattctataaaatattctattatagaaaataactgcaatttaaattaacatagttaaattaaatttgatttttttcaagcattactattatctgacctaaagtattctataagaaataaaagcaaaatttttgcaaaattgtggagtggagcataaattaaaagaaccagcacaaaataaaactataaaactggcagcactcacctcatagttggttcatagttcttaattttataactatatttaaattg

SEQ ID NO: 619187 - DNA, 684 bp, Homo sapiens
ggtggcacacacctgtaatcccagctacttgggagactgaggcaggagaatgacttgaacccaggaagcggagtttgcagtgagctgaggttgcaccactgcactctagcctgggtgacagagtgagctctgtctcaaaacaaaaacaaaaacaaaacaaaaacaaaacaaaacaaaaaaacaaaaaagaaggaaccactatagaatatctcattgttgtaatttatctgagtactgaccaaatgttttatctagctcaaaaattctcaatttagcttataaaattctatgctttacaatactatagttttaatattgttcttttcatacagatgtctattttagcacactaatgttgaactctagtagaatctttgatgagacccatttgctgcaaataaaatcgattttattttgattaaccatcattttaaattctataaaatattctattatagaaaataactgcaatttaaattaacatagttaaattaaatttgatttttttcaagcattactattatctgacctaaagtattctataagaaataaaagcaaaatttttgcaaaattgtggagtggagcrtaaattaaaagaaccagcacaaaataaaactataaaactggcagcactcacctcatagttggttcatagttcttaattttataactatatttaaattg

SEQ ID NO: 619188 - DNA, 482 bp, Homo sapiens
gtgcaacttttactcaatttcttactcttaatgggatttggaaaggagctgctatttcagagtgttaatctatatcaggaaaactctgctaaatttgaagttttataaatgtacatgaaaatgattgagaaaaacaaattttagtaaggattactttttcttcatttaacgagaatgtgagctttaccagacagatcattcatttatttatcaacaaactgaacaaatctatattgagcatctgccaaccattctgattagccagagcacacaacaagggtagttcacaattaatcaatttttccttcccattaagcaattatttataaacctccaattcaattaaaagacatatttattcattcattcattcaagtatttttctttattatcttgcawagccctatgctatgctctatcaaggacttcaaaaattatgtacagggcttctgttctaatagcttctaatcatgataatttgt

SEQ ID NO: 619189 - DNA, 570 bp, Homo sapiens
cagttttggctttggggtcttcatggttaatgtctgtcttctccaaaagcctgatatttcagggaaggtaaaggctgtgtacaatacctggcacataatagcaatctttacatattagataaactgaataggccagtgactgttagacccctagcaaacatatacccaatctgttcaaaatgaatacattcaattgctttatgataacaattctgaggtgggaagacaaaataaaatattataacataagaggcagagcagaagcttttatttgttcagctaaaaaatcacatacaatcttcaaatgaacttgatagttaaatgaccaaaaaggtgttacttaaatgcaacactatgcattatgaatagaacttcataaagttgttaagtctatataaagttactataaactttagctgatatataaagaataacacgagaaccggacctaatgaagyatgtctgcttcagctcaagtacagaagcccagctcattctctgccactgaatcaaattaggagcagatggtaatttggaccagatgaagtttcaaagggcagagatgcagga

SEQ ID NO: 619190 - DNA, 595 bp, Homo sapiens
tctcaggtgagtagtgcacaatataagtaatccacatctaatgttattcaaacagagtgttacgttctgagaccaaaaatcacattattacaatggaaaaagaaagctcaaacagaatattccatgtatattcctttgaggaagtattaaacacacaaggccatcagttgatacttcttttrtttaaataaacttaatagagtatttattgggacagacagatctctcagcccttccatattttcaaaggcatatatgataattttaaccttgtgagctacaagcttgcatagccatgcaagagataaagcaaagcttagccataaaaggtcacagactgcctcagagaattggagacttgcagagctaaaactggatggtctttcctgaaggttcagcctctagagaggagcagagcgtaatttaatcctgaaattatgggtctgagcaaaggactaaaaattcaaagttttgctttataaatatagactgaaatgtgaatcagtgaatgaatctttgctaaaatacagccccacccagaagattatggattgcatctgggacattctgtttttaggcagcaacaaagaccacc

SEQ ID NO: 619191 - DNA, 595 bp, Homo sapiens
tctcaggtgagtagtgcacaatataagtaatccacatctaatgttattcaaacagagtgttacgttctgagaccaaaaatcacattattacaatggaaaaagaaagctcaaacagaatattccatgtatattcctttgaggaagtattaaacacacaaggccatcagttgatacttcttttgtttaaataaacttaatagagtatttattgggacagacagatctctcagcccttccatattttcaaaggcatatatgataattttaaccttgtgagctacaagcttgcatagccatgcaagagataaagcaaagcttagccataaaaggtcacagactgcctcagagwattggagacttgcagagctaaaactggatggtctttcctgaaggttcagcctctagagaggagcagagcgtaatttaatcctgaaattatgggtctgagcaaaggactaaaaattcaaagttttgctttataaatatagactgaaatgtgaatcagtgaatgaatctttgctaaaatacagccccacccagaagattatggattgcatctgggacattctgtttttaggcagcaacaaagaccacc

SEQ ID NO: 619192 - DNA, 592 bp, Homo sapiens
ttttgacagaccctgagaggtgaatcacagcagaggcctctaggattgtggagcaaggtgctgccatcctctgaagataactactctccttttgaaagacatctcttggcctgttactgggctttggtggaaactgaacgtttgactatgggtcaacaagtcaccatgtgacctgaactgcctatcatgractgggtgctttctgacccatcaagccatcaggtgggtcgtgcacagcagcattccatcatcaaatggaagtgatatatatgtgatcaggctcaagcagatcctgaaggcacaagtaagtgacatgaagaagtgactcaaacgtccatggtctccactcctgccaccttgtcttctctcccccaccctacactgatggcctcatggggagttccctatgatcagttggcagaggaagagaagactagggcctgcttcacagatggttctgcacaatatgcaggcatcaccagaaagtggacagctgcagcactacaacccctttctaagacatccccaaaggacagcggtgaagggaaatctttccagtgggcagaacttctagcagtgcacctgtttgtgc

SEQ ID NO: 619193 - DNA, 580 bp, Homo sapiens
ataagttagctaagtgacatgaaagacttgtcccaagaaaattgtaaaacattgctgaaattaattaaagagaacataaataaatggaaacacattgcatatttatggatttgaggatttaatattgttaagataacaatactacccaaagtgatctataaattcaatgcaatcctaatcaaaatcccaatggtgttttgttgtagaaatagaaaaactcatcttaaaatttatatggaatcccaaaggacctcaaataggcaaaatattcttcaaaaagagtaacaaagttggaagactcacactttctgatttcaaaactttctacaaagctaccataatccaaacagtatggtactggcataatgacagacatgtagaccagtagaatataataacaagcccagaaataaatcctggcatatacagtcaaatgattttygacaaggatgccaagactattcaaatgggaaaagtcagtcttttcaataaatagtatgaaaaaactggatatccacatgaggaaaaatgaaactgtacccttaccaaataccatatacaaaaattaactcaaaataaa

SEQ ID NO: 619194 - DNA, 452 bp, Homo sapiens
gccctcgaacattggactccaagttattcagttttggaactcgggctggctatccttggtcctcagcctgcagatggccaattgttggacctagtgatcatgtcagttaatatttaacatatacatacatatatatatatatatatatatatatatatatatatatatatatatatatttcattggtttgggggtttctggagttggctgcttaatatgattagatccaaaaatgctaaagactctatttctaatagtatggagaatactgatagcccttggcgtgagctgtttagacagttatccaaaataaatgcatctgacactcctgattcattgcttgtgagaggcaaggagtttagtgactctctctctatataataccttttaccatatgtggagaaccaaaraacataataaagctggttggttgctcctaagttcagtgtaca

SEQ ID NO: 619195 - DNA, 695 bp, Homo sapiens
gtggaaaattttattttttagattatgttcctttattaagttttagatggtttctatattgctatagtccttttaatttatcttttcagacataaaagttctggctaaatcataaaatatcatcagttgttattgttattgcttttagtatgttgtctaggtcaactaatggtatccggtatccttcatatatatagatatgaaggatatatatgtatcaataaggaaacacttataatcaatagtgataattttctcataaatctctttagaatatattttagtctctttagtggttgcatgtgagtttaagttagaaaagaatagtggtcacatggaatattgtgaagaatttctctagttataactagtttttctcagtggtattgatgtttgcatcttccaaccaaatatctctactacagttagggaaagcatgagaactgtcaaattttttgacatatgggtaaatgacatgtttcacccaatgtttctatttatttttcttagcacttactgcatgtgaattactcaaacaccatcttkaaagggtcatgtctaaactatgtcactgacactccaacttaagctttcagttaacatcttatatgagatgcagtgagtagagattgcaccactgtactccagtctgggcaacagagtgagactccatctaaaaaagtagctttagtgct

SEQ ID NO: 619196 - DNA, 554 bp, Homo sapiens
tagtttgaaattgtttgaagaaaaagagattctcttttccttttcacttgaacttaagatgatgctgaagctggagccgctagagtcatctgctacattgggaaacctgagaatagagtcaatagagagaaaatactggtgaaagatgaagagaaaaactagttattgttgatattgttgtggctgtttcagtaacatgaaccaaaaatactcccctttaaactccagccactgaagttaggaggtttcatacttaaaatgtaaagaccacttctcagctgttgttaggagcggctgaatcactgtttgagccaggaratctcagttccccttaactctgcctttgattatctgcacggctttgggtcaatcactttattctccagtcctggctgccaaacgtgggagttaggtgagacattctctctgataccttctagttcgatcattctgtaaagcaggttaatgtgagcatgtgactaaaaacaccatgacatgccttgaagttctcccagacgagaacacttgaattctgtcttctatcagctgttcac

SEQ ID NO: 619197 - DNA, 364 bp, Homo sapiens
ctatagagaagttctgtgcctcagttcatccagtttcctgtaatgattacatckaatactgcaataacgcagtataaaaaccaagaaattagcattggtacaacatatgtatatagttctatgccattttattgcttgcagatttgtgtaaacactatcactattaaggtaaaaaattattctaacagtaacatacctctctatatccctctatagtcacacccatcctttcctgcaactatccctaacaattggtaaacaacattttgctctctgtctccataattttgtaatttcaagatcataatctaagtggaatcatatgtatcataccatcatcacattgttcacatacaatttatca

SEQ ID NO: 619198 - DNA, 558 bp, Homo sapiens
taaggtgtgctcgttggactggcctggtctcatgggcaaagccaccctgaagttttggtcagacagctcccttatggctaaagtatcctatgagagcaagttgagcccagcgggatgggtgtccctgggcatgcaccactacagatrctcccacatcaagctctctgtgattgccctggctggagaactgacttgagttctgcctctaccacttctctaagcagctttccctgaaaactcgggtgtttgtggtggtagagaggtctccacctgctgggattccagaggcccatggctagagtgggttgttccttgcctgttcaactcatcccctctgcaagagtcattgggagccaggaatgaatcccagttagcagtagacctgtgcggggttcccaacttcctagttattctttacgtcttctgtttctttgctgattttttttggatttgtgtcaaacatgttcataatttctttgaagcatttttgtcatgactattttaagattcttgtcagatcatttaatatctgtttcatcttggcatttgtatctgctg

SEQ ID NO: 619199 - DNA, 558 bp, Homo sapiens
taaggtgtgctcgttggactggcctggtctcatgggcaaagccaccctgaagttttggtcagacagctcccttatggctaaagtatcctatgagagcaagttgagcccagcgggatgggtgtccctgggcatgcaccactacagatgctcccacatcaagctctctgtgattgccctggctggagaactgacttgagttctgcctctaccacttctctaagcagctttccctgaaaactcgggtgtttgtggtggtagagaggtctccacctgctgggattccagaggcccatggctagagtgggttgttccttgcctgttcaactcatcccctctgcaagagtcattgggagccaggaatgaatcccagttagcagtagacctgtgcrgggttcccaacttcctagttattctttacgtcttctgtttctttgctgattttttttggatttgtgtcaaacatgttcataatttctttgaagcatttttgtcatgactattttaagattcttgtcagatcatttaatatctgtttcatcttggcatttgtatctgctg

SEQ ID NO: 619200 - DNA, 443 bp, Homo sapiens
aaggaaattattggacagacacccacagaagcagatgatctgcatatgctgcataaaatgtgcattttttaacaagctcrcaaggccattcttacatatatgtaagttcaagttcagaatttggaattgggactgaagatactagatttacttctagttctgtcagtaatatgctcacagtttcctaattctctaggtttccatttccttattcttcacttattacatagaatttatcttatctgactctttagtgaggaaattttttttgatgtgagtattttggaaacatgtcagtaaaatgattattagatttaattaaattttatgtacaaactaaggagttcaggactcagattttgtccagcctgtagaaggaaacaaaatagagacaaatcctgcagaatttggatgatgggtatatttaattaggaaaattgcca

SEQ ID NO: 619201 - DNA, 556 bp, Homo sapiens
ctctattaaaaaggtttttttaattagccaggcatggtggcacatgcctgtagtcccggctgctcaggaggctgaggtaggaactcacttgaatttgggaggattgcttgaggcccagaggtagccttcagtgaaccatgattgtgccactgcacttcagcctaggtgacagagcaagacctcatctcaaaaaaacaagaacaaaacccaaagacaggaagcccaatagaaaactacacaaagagcttaaattgcaattcaaagcactggaaacctgaatggataccaaatatataaagagatacttaaatgtattagaaatcaggaaaattcaaagtaaaatagtaagatgccactttacgccttaycagtttggcaaaattctgaacgttggacatatcaacagggtgacaaataaacaagaattctcacgtactgattgacgatagaggcataaactggtcaagtcattctggagagtaactggcagtcaaattaagtatgcatacatcctatgacccaacaatctacacctgggaaaataaccccaacgtga

SEQ ID NO: 619202 - DNA, 460 bp, Homo sapiens
actactttccagctccaggagcaaaagtcccaatttacctgacctcagggatggctctgcttcgtatttctccagctacgcttccagctaaagaaaaagtcccactgaagcacaatccaattacctcctttctcccaccacctctcccctttccagtgacagattgatgggctcctcaggtgcctcctgagtgtgtcctgagacagggaacagaaacattgagctcaccgaattgatttccacctgctacctatttagaccaggcctayggaggtgattttcatcactgacctccccttgacccctcaccccctgccctacccaatagaggaattacagcctgttgggggaaccctctgctctggataaatatgctgtttgctgtttggtaccaggtggcagctgctcccttccttctgggtcggggattatgtatttgtataatttttatattatgttt

SEQ ID NO: 619203 - DNA, 560 bp, Homo sapiens
caaatgacagaatctcattattttttatggctgaatagtactccatggtatatatgtaccacattatctttatccatttgtctgttgatggacacttaggttgattccaaatcttgacaataacaaatgctkgtgaggttgtagaaaaaagggaatcctcctacactgttggtggggatgtaaattagcacaactactatggagagtagtttggaggttcctcacaaaactaaaaatagagctacaatgcaatgcaacatttaagaattatagactcatgttaaaaaaaacaggcattaatacataaaaattaaatattgtataaagagatatatattcagtgctatacaagattaattattgaataaattattgactcataaaactctgagtttagatgaataaaaaaattttaacttgactttaaaaagacttaatttgccttttaaaagatgtataggatatagataataattttaaaatgacatagagaagatattaaattaaactacttctaaaatatatttacttctctaaaaatatcttgactattttaaaga

SEQ ID NO: 619204 - DNA, 564 bp, Homo sapiens
gagaataatatgacttttgtcattgtgggattcagtttctaaatatatcaattaggtcagtttataaattgtgtttttcaaattttcaaaaagtcactgatttcaccattttatcctgtcagcaattatatgttaaattctcccattctgattatggccttatctgtttytgtttttaattgtcagatgctgttttatctatttaactatgttactgggtgatatagattttaattgtttcgccagtaagataactggcaaaatgactgtttaataaatttttaaagttctggaaatttgtagtggtatgacctaacttaaattttgctttgccttatagcagtacttctacatgaaccttctcatgattagagtttgcttggcaattttttttttaacattttactttcaaactttctgagtatgttttttgttctttgtttgttttttgttttttgaaacaggtctggtctgtcacccaggctggaatgcagtggtatgatcatggctcactgcaacctccacctcccagggttcaagtgattcttgtgcctcagcctccca

SEQ ID NO: 619205 - DNA, 557 bp, Homo sapiens
gtacatcattgtatgaacgtatcacattcgtttattcattcaccttttgatagacatttgagttgttttcatcattggtcattacaaataaagctgatgtaaacatttatgtacatgtcttttgtattggactttcatttctcttggataaatacctagaagtgaaatggctatctaatatggtatatgtatatttatttatttaagaaactcccaaactgtttccaagcagtgtatgagagttccagtttttctacattcttgccaaaacttgatattgtcaatctttataattttatgtattctaaatgtgtgtagtggtatatcattgtagtttcaatttctgtttcccaatgrcaaataatactgagcatcttctctggcatctggtaatttcctcacaatggcacatgcccaggaacttttttttttttttgaggtggagtctcactctgtcgcccaggctggagtgcagtggggcaatcttggctcactgcaacctctggcttctgggttcaagcaattctcctgcctcagcctcctgagtagctgggatt

SEQ ID NO: 619206 - DNA, 518 bp, Homo sapiens
gttgtagtccaactgcgtactcatgtctacccttaaatgtcttccctattcaaaactctgacaatttctcatttcattttggccaaaaaacaaaaaaaacaaataccatgacccctgtggctataagtgatttgccttcaactttactgtgttggaatgcagtctaagctgctgtagcaaaaaaagaaaaaaagtaacataaaaaacaatggcttaagaaaggcagaagttgatttttcccttatgtaacagtcaaaagatcaattattcagggctggtcacaaagggttctgctaaccacttacataacactttcattttgggatccaaggtgactgctcgaggtcctgcctttttamttccatcctagtcagtgaaaaaaaaaaaaaaaaaaaaaaaaggaataactggaagacgaaaggaatgaacaccaatcattttaaggacatggtctgaaagtgggaaaacttatcagcggaaaaagaaattggtttgggaattgtgttatacagtcatac

SEQ ID NO: 619207 - DNA, 274 bp, Homo sapiens
tgagatgccagaagcactggctagatttcagtaaccagtttgggccccctaagcatgggccatgcttgcctgtgcctgagctaaaagacaaactgaatgcaggcattactgggagagatgagcagcgtatgaggaggaggagaatggagacagtgccaggawttccaaagagcagtcctcccccagggagctgggtgccaggctctgtgggatgggcaagagacataaatagcattctcctggatccctgtggggccagtagtgggtgggcagc

SEQ ID NO: 619208 - DNA, 541 bp, Homo sapiens
tttataacagtctgcaggtgtcattccttaggctttcctttaggggtgtggattggctagcttaaataaaacactaatgaagggggaaacccacttatacgactctggtgttgagcattaggttttatcatggtcagcagctgtgcaatgttttagttttgggttggtgacaagtgagctacatctcaaacaatcatatgggaaggggccaaaggagatggagtatgaccgggtttcaaataactttatgtcaggcctagaaatggatgtcaaagcagcaactatattaaacacatttctgtcagasgtctatgtctctgattcctggaatgtgctctgtgctcttgtgagcctagtgacttactgtggtggatgtcatattaaaacattttacattctatactaccattgtcattattttgcttacctggagcccatcacagtatcagatttgctcctactacagttcatatgatgattttgcttccccagtgagtttctctttattcctttgaactagatgtcctcatcaccccaggag

SEQ ID NO: 619209 - DNA, 570 bp, Homo sapiens
gcagtggcatgatctcggctcactgcaccctccatctctcaggttcaagtgattctcctgcctcaacatcctgagtagctgggattacaagygcctgccaccacacccaggccatttttgtttttttagtagagtcagagtttcactgtgttggccaggctggtctcgaactcctgacctcaggtgatcctcccacctcggcctcccaaagttctgggattacaggtgtgagccactgtacctggccaacatggatatttatcaaagcaaattggagagaaaaaggcaagaggcaataggatatgtaatgtatggtacaatttatatttcatttaaacacctttatataacattatgaacagtatctactactgatgttgtataagtgcatatatagcaaaggtattcttatatgtactagaatcgaccccaaatgtcagaatagtagaaatttctggagagggaaggaggtaggaaaggaagaaggggaatacaatttggtgagcatttagctttgactattgtatcagttatctattgctgtgtaacaaactacctcaaaacttacag

SEQ ID NO: 619210 - DNA, 570 bp, Homo sapiens
gcagtggcatgatctcggctcactgcaccctccatctctcaggttcaagtgattctcctgcctcaacatcctgagtagctgggattacaagcgcctgccaccacacccaggccatttttgtttttttagtagagtcagagtttcactgtgttggccaggctggtctcgaactcctgacctcaggtgatcctcccacctcggcctcccaaagtkctgggattacaggtgtgagccactgtacctggccaacatggatatttatcaaagcaaattggagagaaaaaggcaagaggcaataggatatgtaatgtatggtacaatttatatttcatttaaacacctttatataacattatgaacagtatctactactgatgttgtataagtgcatatatagcaaaggtattcttatatgtactagaatcgaccccaaatgtcagaatagtagaaatttctggagagggaaggaggtaggaaaggaagaaggggaatacaatttggtgagcatttagctttgactattgtatcagttatctattgctgtgtaacaaactacctcaaaacttacag

SEQ ID NO: 619211 - DNA, 570 bp, Homo sapiens
gcagtggcatgatctcggctcactgcaccctccatctctcaggttcaagtgattctcctgcctcaacatcctgagtagctgggattacaagcgcctgccaccacacccaggccatttttgtttttttagtagagtcagagtttcactgtgttggccaggctggtctcgaactcctgacctcaggtgatcctcccacctcggcctcccaaagttctgggattacaggtgtgagccactgtacctggccaacatggatatttatcaaagcaaattggagagaaaaaggcaagaggcaataggatatgtaatgtatggtacaatttatatttcatttaaacacctttatataacattatgaacartatctactactgatgttgtataagtgcatatatagcaaaggtattcttatatgtactagaatcgaccccaaatgtcagaatagtagaaatttctggagagggaaggaggtaggaaaggaagaaggggaatacaatttggtgagcatttagctttgactattgtatcagttatctattgctgtgtaacaaactacctcaaaacttacag

SEQ ID NO: 619212 - DNA, 570 bp, Homo sapiens
gcagtggcatgatctcggctcactgcaccctccatctctcaggttcaagtgattctcctgcctcaacatcctgagtagctgggattacaagcgcctgccaccacacccaggccatttttgtttttttagtagagtcagagtttcactgtgttggccaggctggtctcgaactcctgacctcaggtgatcctcccacctcggcctcccaaagttctgggattacaggtgtgagccactgtacctggccaacatggatatttatcaaagcaaattggagagaaaaaggcaagaggcaataggatatgtaatgtatggtacaatttatatttcatttaaacacctttatataacattatgaacagtatctactactgatgttgtataagtgcatrtatagcaaaggtattcttatatgtactagaatcgaccccaaatgtcagaatagtagaaatttctggagagggaaggaggtaggaaaggaagaaggggaatacaatttggtgagcatttagctttgactattgtatcagttatctattgctgtgtaacaaactacctcaaaacttacag

SEQ ID NO: 619213 - DNA, 563 bp, Homo sapiens
ggtcctaattttacaaagaggaaattcttacagagaagaaggacttttctcagttgcaatagctaattcatagtgaagtttggacacaggagagctctcagcctcccagtctaggaattttttactgctgcacccatgtaactaatagaattttccagttataacagaatcttgggattacctagtccatatcccttatacttcaagtacgagaacaaagacttccaagaatacattcatggaagactttaagaatcgccaagtcagcttcattcacactgtaagatacagtgttaacaaatttaagaatctcattcttgaatataaaaatagcccagtcacttaatctgaaaatcaatagtggaatcaattctgagaactgttgggtcatctaatttgagacgcttatatctgcacatcttgtactctctgttgggtggctttctccatcttctttgtctagagaaatactgttcatctattcatctactacttcctttgaggagtctctcctgtcctgccaacaytgaattggtctcccttttttttatgcctatgtaagt

SEQ ID NO: 619214 - DNA, 359 bp, Homo sapiens
ttaaatgtttttataaaattttctttattcttctttaaaattacrgtaaaaacatttgaaatcattaccccaatccactggctcttctatgtgggccataatatttttaacttaaaaaataaaatctacaagtactgaagtacttatcagctgaaaacaaattctactaaatagagaacattctcacttctaggttttgtactgaaatatgtgaatatttcagcacacactcctacaggtactgtctacttgcttccattcagaatgcctttttttcaataactttttttgtaagaaaaaacttaggaaagttaccactatttataatttagagaaagtttcacaaatttagatgctac

SEQ ID NO: 619215 - DNA, 564 bp, Homo sapiens
gggattaattaaggcattgggaagaatctggctcattgcccctgaccaaggttgttaaacaatgctgtttctgcatatattatacacaaaactaagatgaatcctgatttccttggatttcagtgtttcctcttataattgcacatgcagagacatgagaaaaatcaagctaactccaaggcaattaactacaaatatgaaggattctcttcatgtatttatttaactactctttggaaactctatattgacaagtgtgtgatggtctttatatatgaatccttctctttagaaatgaaagtacctattaaaaatttaaaagtactgactattatgaatataaatggcatttcaaatactatgggcttcaaaatgttctatcctatgcgataagaaatgaaagcctctcagtccaaaagttaggttttgaaggtgagcattttacattttctatatccactgtgacattttattataggaagaaatcttcttggaataatatgactatttctttttttwaaatttttattattattatactttaagaaataatgtgactatttc

SEQ ID NO: 619216 - DNA, 583 bp, Homo sapiens
tcctggacaaggctaacatcccacttagccgcaccctggactgctgcatccccactctcttggtggtggggacattgctctctgggcttttggtttgggggcaccctctctgctccttcactattccctctggcttcccaatagtggggactgggagggttcccctggcctgaaaaggggccagagccccakatcaatctggcataccctaccccactgccctggcagcagcaggtgtggccaatggaggggggtgctggcccccaggattcccccagccaaactgtctttgtcacgacgtggggctcacacctttcatccttccccaccttccctagtccctgcactaggttggacagcctgcttcggctacaggaaggcaggaggggtgagtcccctactccctcttcactgtggctgcagccccctcaccctctgcctgggatctgagtaatattgtggtgatggagatgcagtcacttattgtccaggtgaggcccatgagccctgtggctgccacctgaggtgggctggggctgctcccctaaccctactttgcttccaccactggccatttccccct

SEQ ID NO: 619217 - DNA, 578 bp, Homo sapiens
tagagtgaactcttttttttttttttttttgcgatggagtctcactctgtggcccaggctggagtgcagtggcgtgatctcagctcactacaagctccaggttcacgccattctcctgcctcagcctcccgagtagctggtactacaggcgcccaccaccacgcctggctaatcttttgtattttttagtagagatggggtttcaccgtgttagccaggatggtcttgatctcctgacctcatgttccgcccgctttggcctcccaaagtgctgggatgacaggtgtgagccaccrcgcctggcagagtgaactcttattgctgggaaatccttcctaaatctccactgattcaagttttttttcctaaagaatgcttcaaaagccctggctttgtcctatattcatttatccaacccccattttcatcccaatctattacagtctgacttccatttatataactgtaattaaatgataatgaataacattacatttttctcacaccacattctccttatagattttctcatccacatccgtgcttttgcaaaacacctataagcagatatcaccaga

SEQ ID NO: 619218 - DNA, 605 bp, Homo sapiens
atgggcttttatttcataattttttatgtgtcaatttttgtcagtgtatagaagcgcaagtgtgttttgtatgtaaaatctgaatcctgcaactttactaaatttattaattctaaaatttttttactagtcattagagtttttacatatatgattatgtcacctacaaacagactttacttcattctttccaatttaggtgtctttcatttctttttcttatctaatagctctggctgggacctttattaatatgttgaaaagaagtatgtcatgtggatatattgtgtaatgctaaggttcagaatatgaattatcttgttacccaggtagtgagcaaagtattcaacaatttttcaaccttgccttcctccctccctctccacttcagtagttcccagtgtcttttgttgccatccttatgtccatgagtgtccaatgtttagctcccccttataagtgagaacatgtcatatttggttttctgttcctacattaatttgcttagaacactggcctccagctgcatctatgttgttgcaaaggacatgatttcattcttttttatggttctgtagtatyccatggtgtatatgtaccacatt

SEQ ID NO: 619219 - DNA, 584 bp, Homo sapiens
acataccttccttcccccaagttcatagtaggatatatatgaataaaacaaacaaaaaggcagggctgggggaagccctgctgatttatttacaactttagtgaaaaatgctttttaaaagtatatgcactttaaaaatatgatgatttaacagaattataattagcacaaactttgagcatgagttacagtcctgggaatagagacatctcagggagatcttatctgtattcactgaatgtcaaaaaacattgaagaggccaggtataatggctcatgcctgtaatcacagcactttgaaaggcctagcggccaggatgccttgagctcaggagtttgaaaccagcctaggcaacatagcaagaccttgtctctatgaaaaattaaaaaataaaaaattagttgggcatgatggcatgtgcctgtggtctcagatactcaggaagctgatgtgagaggatcatttgaaccagggaggttgaggatgcagtgagcagtgattacgacactgcaatccagccttaagatatagcaagattctgtcacaaasaaacaaacagaaaacatgggagcgcagccttcac

SEQ ID NO: 619220 - DNA, 567 bp, Homo sapiens
ggttcatctcccattactccaggagatatctcagggcactgtaccagactcaggtcaggtcatgaccacgccttgcctacttagcccatgtggaaatatgcaaggtcaccagggcaccacaagtgagccattcccctacgcaagtaaagagaaatgcagtgccatatgtgtgatggcagaaaaatgctctgagaactgtgggaacatataggagggtgccctagcctaataatgcaatatgccttttcagatgcttgatctgcctaaatgtctctacctcataaagatttgtccaaatcaagtccagggtaaaaagttcccaccacctcctttggtcgccttctcctagcattctaggctgagtaaattgctctttcctytgtatattcagagtccttaattcacatctgtgtttattatttgccataaaccatgtatttatttataggccaggcactgcctaaggcactgtagacactgcaatgaacaaaatggaaagagcctttccctcacggggcttacatttgtcctgttctattctgtcctttcagtctatctctaaaactc

SEQ ID NO: 619221 - DNA, 462 bp, Homo sapiens
tgcctcaccctcccgagtagctgggactacaggcgtgcgccaccacgcccagctatttttttttttttttgtatttttggtagagacagggtttcaccatgttggccaggagggtctcgatctcttgacctcgtgatccacctgcctcagyctcccaaagtgctgggattacaggcatgagccactgcacccagctgatttttaatttatatattataaattcctccaattactttaaatcattcatggaatgagacaggagatgtttacatggaaaaaactaataaaccaacatagggcatcttatttcaaaatcacctcgatttttagaacaaaatatatttaaacaaaatttgaatatcagaactctcaggtacatcgaaggatatcaaattcatcattttaaacttaatctgtagtaatgatattctgatccttcccattgtattcaaactatacatt

SEQ ID NO: 619222 - DNA, 615 bp, Homo sapiens
gataaaaccctcaacacactgggtatagaaagagtatacctctttctataggccatatataacaaaccatatataaaatgccatacacaacaccatgctaaacagggaaaaaattgagttcatgttttgactttcattttgttaatagtctttcattaaacaaaagttttaattgtgaaaaattccaattatcaattgctaatggattatacttaaaatatttgtagagcrtatatcccataaagaagttgtatcttgtatcttgaatatgtaaagtgttctcataactcattaataagattaacaactaataaaaaagaggctaaaacatttgaataatacttcaccaaagtggcaatgaacacatgacaagatgcataaaatcattagttctcacaacaaatatgctttacatttaaaatgggaaaatttaatatatatataaaatatacttcaataaaactgcataaaagtaaagcagattcttttttaagcactccattcttctattggtatgttctcttttggtctattttttatttcaccaatcttttcttctgctgtgtctaatatatgttttaacctatttattgagatctcaatttcagttattgt

SEQ ID NO: 619223 - DNA, 622 bp, Homo sapiens
aacagaaattgtccattttctcagatcttatccccaatcagaataraggtgccgtgaaaggtctttggcaaggctgaagaatagaaatgcttgtgctcttcgaatttacatttttagtgatctatgatcttattcatttgtgccaacattacaaaagaagtaaataaattatcctgcataggtttgctgtgtaataaacttctcagtataaaaaatatttttctttatttcagatttttacatcttttattttgcttatcaatgtctcataaacttaaaggtatttatggattgtacttatacagattttctattagaatagtgttcctttattttgttaaattaggaaatgaatataagtcatcagagcaatttctcttttttgtgtattctaactcttcacttctttacaaataaagactttgtgttagcttcacttatcaactgaacccttcaaaaactaaaagaatgtatgttcaaaggctttagctgtgtcattttgatttcctttttattccttgcatttttgtattatttaccttatgttgtatatttgattcatttctaaaattgtctaacaaagctatttaatttagtcaagtttacaatcttaaacaaagaa

SEQ ID NO: 619224 - DNA, 575 bp, Homo sapiens
ttttatctttaagaaatatttactcttctaagctaatgaacgtattctactaaattttctactaaatattattgttttaacttctgcattttgatttgcagtccgtttgaaagtgtgtgtgtgtgagtttgtgtgtgtttgatgtgaggtagaaaacaaggttcatttttttctacatatgtatttattcagtagctttttattgcaaagaccataccatttccattgcatttccatgactcattttaaatacactcacttaaggtttggaygattcaaaatatatttttactgaagagttttctagacagagtgttcataaattgattctgttttatagtaataatgttttcagaaaaaaatttgtgagaattgggagaatctggatgtctagaaagaaattataatttttgatatacattcaatttgcatgtatctatataaagtagtatataacatttctaatgtccaggtagttagatatctttagcaaagtttgatgtgtcaaataataaccaatatcttcaggtcattattactttcaaactaagtgtacaacagagaacagatagtat

SEQ ID NO: 619225 - DNA, 452 bp, Homo sapiens
gttttgggggttacattcgtgaccttaatctgttttcagttaatttttccatatgatatgatataaaagtccaacttcattcttttcaatgtgaatatccagttttcctaacagcatttattgaaaaactatcctttctccattatgttgccttggaacccttgttgaagattktttgtccttgtgtcagtccattttcacgctactgtaaagatactgcctgagactaggtaatgtataaacaaaagaggtttaattgacccgcggttccatggctgaagaagcctaaagaaactcgcaattatggcagaaggtgaagcagaagcaagacatgtcttacgtgtcagcaggagatggagagagtgcaggggaaactgcgacttttaaaccataagatctcatgagaactcactatcacaagaatagcatgggggaaactgccctcaggatcc

SEQ ID NO: 619226 - DNA, 567 bp, Homo sapiens
ggttttgagatcttactgattttatcattaattaacaagctgaataaaattttgatgcatttattttatatttatatgagtcatcatcatattgcccttttgaagaatacactttaacaattcattcatcacgatttttttaagacctagcttgcttcagtcactgtgctgtgagctgtgtgaaacaaacaaataaaagtttattccagccttagaaaaactcacaatctaatcaaacagctaagtagagagcaaagagataaatgctctggcrtagggttgatcaaattgccaacaagctccgaagaagccttacccttattgaaggggaaaaaaatttaaaaagaaagtttcaaaaagaaagtggcttttgggttgagccttaaacgatgtattggacaattggctggcaaatactactggatgaaggtagtgggttaatttctaagtttagcacataatgcaaaagtcatcaataaacaaatttaccattgagaaaacccttaaatttacctataaagtatagtatacattttgtttatataaacctgcatggtactagggata

SEQ ID NO: 619227 - DNA, 641 bp, Homo sapiens
  misc_feature 152, 153, 154, 155, 156, 157, 158, 159, 160, 161, 162, 163,164, 165, 166, 167, 168, 169, 170, 171, 172, 173, 174, 175,176, 177, 178, 179, 180, 181, 182, 183, 184, 185, 186, 187,188, 189, 190, 191, 192, 193, 194, 195, 196, 197, 198: n = A,T,C or G
  misc_feature 199, 200, 201, 202, 203, 204, 205, 206, 207, 208, 209, 210,211, 212, 213, 214, 215, 216, 217, 218, 219, 220, 221, 222,223, 224, 225, 226, 227, 228, 229, 230, 231, 232, 233, 234,235, 236, 237, 238, 239, 240, 241, 242, 243, 244, 245: n = A,T,C or G
  misc_feature 246, 247, 248, 249, 250, 251: n = A,T,C or G
atctgtgttatattatttttatctactatcttgctaattacttcatatattttaaatgatgaagaaaaaaattagtagaaagtaagtgagaattgtatagacagacgtaggttatataacttccatgagcaccattttctgtgaataaaggnnnnnnnnnnnnnnnnnnnnnnnnnnnnnnnnnnnnnnnnnnnnnnnnnnnnnnnnnnnnnnnnnnnnnnnnnnnnnnnnnnnnnnnnnnnnnnnnnnnntttttaaaaatattataaatgttcagtatattgattgcttactttgtctaactcttttacagaatattagttgtattgagagtaagtatttacttrccttatctctaattcctaataaatgctcacaattgactttaaaaatatgtacaatataagtgaataaattgacaaaatctttgcatatggactgtagcaaatttaatttaagctaacccaaataaggacatttcatgccttgccattaataatacgttacatagaaaatgatctaacaagtagaaattaatggcagaccaagtataaatttcatatctgaagtccttaagataaaaattttacaagatgcattttgggacatgaaaaaagaacatgaacagactgcaaactgtt

SEQ ID NO: 619228 - DNA, 574 bp, Homo sapiens
gtgtgaaagttgcaagcctcacggcttccatgtggtattaagcctgtgagtacacagagggcaagagttgaggcttgggagcctccacctagatttcagaagatgtatggaaatgcctgaatgtccaagcagaagactgctgcaggggcggagcctttatggagaacctctactggtgcagtatggaggggaaatatggtcttggaacctccacacgaagttcccactagggaattgcctaatggagctttgaggagagggccaccatcctccagattcagaatggtaaatccaccaacagctttaagctccattattttggagctttaagatttaatgactgacttgcggggtttcagacttgcatagggcctgtatcctttatgttttggctgatttctccctttcagaatgggagcatctacccaatgcctgtaccctccattgtatctaggaagtaactaacttgtttttgattttgcaggcttatrtttggaagggacttaaccttgtctcagatgaatatttggacatggagttttgagttaatgacagaatgaattaagactttggg

SEQ ID NO: 619229 - DNA, 574 bp, Homo sapiens
gtgtgaaagttgcaagcctcacggcttccatgtggtattaagcctgtgagtacacagagggcaagagttgaggcttgggagcctccacctagatttcagaagatgtatggaaatgcctgaatgtccaagcagaagactgctgcaggggcggagcctttatggagaacctctactggtgcagtatggaggggaaatatggtcttggaacctccacacgaagttcccactagggaattgcctaatgragctttgaggagagggccaccatcctccagattcagaatggtaaatccaccaacagctttaagctccattattttggagctttaagatttaatgactgacttgcggggtttcagacttgcatagggcctgtatcctttatgttttggctgatttctccctttcagaatgggagcatctacccaatgcctgtaccctccattgtatctaggaagtaactaacttgtttttgattttgcaggcttatatttggaagggacttaaccttgtctcagatgaatatttggacatggagttttgagttaatgacagaatgaattaagactttggg

SEQ ID NO: 619230 - DNA, 558 bp, Homo sapiens
tctgacaatacaaaaatgcatacgcataaacttactcattatgtattgtttataattgcaaaacactggaaacaacttaaatgcccatcatggaagagtgcttgaataagctggtacaataacatggagtactatrcaaatgtataaaacaatggggaaagtctctagagtggatatggggtgctttccatgacatattaagtaacggaaaaaaaacaacaacaaaacccaaaacccaaaagatgtgattttgggttatgtgattctttgtgtaagaaatcagatataagaaaacacacaggtatctgatcctttatggaaaaaaaaaatcaagaacaataaacaggatttgaataaactcgaagtatctccctcaaaacacttatcagctacaaagagaaatacagtaactgtatagttgtaaccacccaatgggttcttcctgcctgctctccagagagagccaatttatcaagacaggggaatttcaataaagaaagttttacacatatagaactggataaacaggagactagagttttattattatgcaaatca

SEQ ID NO: 619231 - DNA, 558 bp, Homo sapiens
tctgacaatacaaaaatgcatacgcataaacttactcattatgtattgtttataattgcaaaacactggaaacaacttaaatgcccatcatggaagagtgcttgaataagctggtacaataacatggagtactatgcaaaygtataaaacaatggggaaagtctctagagtggatatggggtgctttccatgacatattaagtaacggaaaaaaaacaacaacaaaacccaaaacccaaaagatgtgattttgggttatgtgattctttgtgtaagaaatcagatataagaaaacacacaggtatctgatcctttatggaaaaaaaaaatcaagaacaataaacaggatttgaataaactcgaagtatctccctcaaaacacttatcagctacaaagagaaatacagtaactgtatagttgtaaccacccaatgggttcttcctgcctgctctccagagagagccaatttatcaagacaggggaatttcaataaagaaagttttacacatatagaactggataaacaggagactagagttttattattatgcaaatca

SEQ ID NO: 619232 - DNA, 442 bp, Homo sapiens
tcacttcattggaattgtgagggtaggggagagcatcagagtaaagcaaagatgttgaagacattcattcattcattcataaggaattggctcatgcaatcatggaggctggtaagtccaacatctgcagggtaggtggcaggctggagactcaggcaagagatatgttgctgtttgagtccaaaggcagtctgctggcagaatttctctttcttcagtgaggtcagccttttccgtatgaccttcaactgagtggatgaggtccattcacattatggcacatatattaaccatcacagaggctaagctgctttactcagtctatgatttaaatgttaatctcttctaaaaaataccttcacagcaataytcagacatctttgaccaaatatctggtcaaagggccccatacagggcctagccaagtcgcacataaaattaa

SEQ ID NO: 619233 - DNA, 442 bp, Homo sapiens
tcacttcattggaattgtgagggtaggggagagcatcagagtaaagcaaagatgttgaagacattcattcattcattcataaggaattggctcatgcaatcatggaggctggtaagtccaacatctgcagggtaggtggcaggctggagactcaggcaagagatatgttgctgtttgagtccaaaggcagtctgctggcagaatttctctttcttcagtgaggtcagccttttccgtatgaccttcaactgagtggatgaggtccattcacattatggcacatatattaaccatcacagaggctaagctgctttactcagtctatgatttaaatgttaatctcttctaaaaaataccttcacagcaatacycagacatctttgaccaaatatctggtcaaagggccccatacagggcctagccaagtcgcacataaaattaa

SEQ ID NO: 619234 - DNA, 626 bp, Homo sapiens
cgctatgttctctagacctggaattagaaggcctgggtgagaggactcctctctgtgcctcctattaaacaaaggtgaaatggggatagcatctcctcttacaacctcaccggctggtataagtattaagtagaatcatggctgtgaaaacccttcagtaaataataaaatgcccagtacatgtgaagaacaaccactccaactcctgcctccctggtgagagtggctgtaagttttgctgagcacatctgcattctcagtgtgtatgatggactgagggtcaggtgagccactggtgagcctgtatagctcccgctgctgggctgcagagttgggcgtaggggactgctccagccacaaggcccgtggtggcattgctacccaggggagagggggcatctcctgggcacccacacatgcctttgtctatgcatttactcaacattctccctgatcttaggcacaagataccaaaatgaaccccgaatyagtggtcaggtggttcagcccctgtgtctctcctcccaatgtcagattccccacctgtaaaatgaaaatgagaatggagcagaccagtgcttttcaaacgacattcctcctgtcctagacttctcaggggtgcccca

SEQ ID NO: 619235 - DNA, 485 bp, Homo sapiens
gcaggtgggtacacaggagaacaagggaatgttcctgccctcctggagcttacagtcttgtttgggagtggaatccatatcagtggaatacatacattaaacaaatttttattttttatttttgtattttttgagwcagagtctctgtttcctaggctggagtgcagtggtgcgatcttggctcactgcaacctctgcctcccagtttgagcaattcttgtgcctcagtctcccgagtagctgggattacaggtgtgcgacaccatgcctggctaatttttgtattttattattattattattatttttgagacggagtcttgctctgtcgcccaggctggagtgcagtggcatgatctcggctcactgcaagctccgcctcctgggttcacgccatgctcctgcctcagcctcccaagtagctgggactacaggcacccgctaccatgcccggctaattttttgtatttttagtagagacggga

SEQ ID NO: 619236 - DNA, 549 bp, Homo sapiens
tcattttcaattttccatttttttcaaatacctaaaatttatagagcatttatttctacggaattatatttatttgttataaatgataacttataagactttaccaccttcaagtaactttacagttcagctaattttgttctcaccatcattctgtaaggttatatagctattaccatcctaagttttcataatagaaatcctaagtttaaactatttaagcaattgtcaaaaaaaaaatcagtgtttcaatgataagattagaatccagatcatctggcttcagatttcgttctctgatcacctactttaaagacattaaygacaaagccttttctaatcttccaactgacatggtatcttcctcctgcacatttttaatagctagcatgcttttagtacataatatccatttacttaacattatttcccttacattcagtctttgttggtctacagtactttgattatatccttcttttgaacattatcatgggctataatttttaatactgtcttatttcctctactagactccaaagtactgga

SEQ ID NO: 619237 - DNA, 567 bp, Homo sapiens
gagaaatgcaaatcaaaactacaatgagataccacctcacaatcagtcagaatggctattaaaaagtcaaaaaataacagatactgatgaagctgtagagaaaagggaatgctgaaacactgctagtgggaatggaaatttgttcagccactgtggaaagcagtttggcaatttctcaaagaacttagaatgaccatttgacccagaaatcccaatattgggtacatacccagaggtatatgaattgttctaccataaggacacatacacttgtgtactcgttgtagcactatttacaagagcaaagacatggaatcaacctaaatgctcattaatggtagactaaataaagaaaatgtggtagatttacaccatgaaataatacaaagccatgaaaaagaatgagatcacatcctttgcagcaacaagaatggagctgaaggccattatcttaagcaaaccaatgcaggaacagaaaaccaaytgtcacatgttctcacttatatgtgggagctacacattgagtacacatagacacaatgcaggaaacaacagacatcggtacct

SEQ ID NO: 619238 - DNA, 606 bp, Homo sapiens
tccactgtgagtcaggtccttattaggtgctcccttgtgacatgaatttaaaacactagaaagaaacagaaaacatatgaaattgttcctatcaaggtgtttccatttctttggaccaggggttggcaaaggttttctgtaaaggaccagatgttaaatacttcagggtttatgggccacatacagtatttatgaaggcttcttctttcatctttctccttctccacatcttcctcctgcccctcgctctcatcctcctctttctacagattctttaaatatgtaaaaaaaaaaattattagctctcatattgcgtaaaaatgggccaccagacagagttggggcacaggctgctagtttctgctttaagggaataaaatggacaaacatgacttccatgacttatattaaacacaactacatcattgcaaatacaagtgtgtactctagtttaattaacttgtaaatttattggtaaatcctcttttaatttgcaatgtcccaaaaactgagagaacaatataaaatcactatatcaaaaagtacttatgacagggcctgcatggctatgacaartacatttcccttagttgctcagccttattc

SEQ ID NO: 619239 - DNA, 569 bp, Homo sapiens
gaaaaaaagttaaaacaaaacaagccatttctttcattttttccaaccttcggtagtttcttcctcctcaaattggagaacatatttctcatagacctctttctatctgtgcttggtatatgcatttccagacttgggcctgtttttagtccaggttgggtaataccagaggcagaaagaaaacactataaacttaccaccagttccacagaactttgaattttgaaattctgatgtccttccccaatacaactgctactgtgtgctttttagggcctcggattgctgttccacgygttctgtctggaacttgggattgttttcagtgggagaaactgagtgaagtgtacttacccaccttccccagaatctgaactcgaagttccttaatttttaaatgggcaaggatgagagtgaaatgaaaggtggtagaagtgaggaaataagggaaagtattggaaatggcaatatattcccaggcaagaggctacaggaggaaagcaccagtgcattaaggagaaaagcacttgctgacatacaaaggtgttttttgtgattgatttgtccta

SEQ ID NO: 619240 - DNA, 541 bp, Homo sapiens
agtgactttgttgtaatttgtttttataaaccaatataatggaatgaagactcaggcagtgtgaaatatattttcaattattattttcctataatagtgatgtaattgcactaattcttttacattcagtttccaaagaccccttatgttcaataataaatgttttcacaacagctagctatgattatgatatatagcctatatagaggtgaaaccaatgattttgataaaacagctttgcattaatcattttggcacagagaaatatgattaataaattacagtaaatagctgaactttgtggtttcttaaatggtacagttttatgaggtagcaactgaaacaaaaatatgaaaatccagagattatattggcttttgtttgctgtacaagtatgatttcaatacaatctgcttaactctgattgattrcttacaatatttacatcataaggaagtattttttaggtaatattatccaactcaaggaggtgaaagtcaacacaatttatttcaatggacttaacttttagagagaacca

SEQ ID NO: 619241 - DNA, 505 bp, Homo sapiens
ataacaaatatcaaagaattataaygatatcagctattttctggtgacaatgaaattaaatactaattaattacaaaaactaccaaaaacacacatatttcaaaacttatataaaaggcattacaaaagaaagaaaatttctaacatttgtgtaactagaaacttagaaggaaagagtacaggggatggtagcaatttttaatgacacactaaaaatttttcaaaactgatgaaagaatttaaaccatcaattattaaagctctactaacaaaataaatacaaacaaaatcagattattcacaccataatcaaaccactgaaaactaaaacaaaaagaaaatcttaatagcattcagagaaaaagaaaatatacagtaataatgttttggtcagtaacagttcctaaagataaaaatggagctgaaaaattcttcctgcctagtgatatcatagccatcttaacatagtagcacaatgaatttactcacatttgtggttatgatt

SEQ ID NO: 619242 - DNA, 552 bp, Homo sapiens
attcaacctatatcagttgattaacttttgtcactacaatattcacataaacaacatattttcatcattactattgtgcttattaactttcataggaaatgattaataactattctgagccaccacccactcccatgggcagtgtagcttggaatggtctgctggagatttttatatatgcctccaacarcattgtctccatcaccaccatcttgagcatcatgatttttaaccatctcaagaagtgtgcaggtcacatagctagttaatcagaacaatgttttttatatcttgctacactgttttagacatgtttttaaaaatgaatttatgtatactgtatttattcattcattaatgtccaagtatgtatatcttagaaatttatttgttatatatagaccttcttgaaataaaaaaaatctgctttaaagatttaatataaaggaaagaataaataaaatgtcattttaacatcaccttttcttttttcccatttaaatatcatctttcttttaatttcaattcgtagtagtattatgttttaaatgt

SEQ ID NO: 619243 - DNA, 542 bp, Homo sapiens
tttgacagccttggctgctcatttgtaatctaatggagttaacttattgaacttcacacaccacattaggttagtgaattctcttagcaaagcagactggattgggttacaagttacgtctagatttagtagaattcaattcaagtcaactaatgatgtacattaaacaaactcctctgaagaatcccttcctccttctaactataaattacacttatccatttcactactttaataactataaaagactctgaagggaagttgcaaaatggggcattccctctttatacagacaaagtcccaatattctctcagatggcacaaaagtcatttaaggtttctctggggaagtgtcattgttcttttctaaaataatgtaaggtacagaaacctccaggagttaagagtaatgagagtatattcattattagtgttgtcatacaaaactaccacacacaaggtggcttaaaacaacataaatttattctttcacatttctgagggctagaagcacaatatcarggtgtcagcatgaagatatt

SEQ ID NO: 619244 - DNA, 395 bp, Homo sapiens
aaaggagacaatgtgaatatttttggtgggtttagactaataatcatttttaccataaatgatatcatttctatcttatttatgtaaagtactctgtgaaatatccaacggaatatttccactagtgacctaatgacacragactacaaaattaggtttgatcagcagaatataccaataaagcatgttatagttactttaatgtgttgacttgactaggctatagcacccagttatgcaatcagattccaatcttggtgttgttatgaaggtgttttatagatgttcatatctataattcgttgaatttatgtaaagaaggttgccctcactaatgtgggtgtgccttgtccaatcagtcgagggccttaaaatcaaaaaactagaattttctg

SEQ ID NO: 619245 - DNA, 580 bp, Homo sapiens
aataaaaaaagataccataaagacacttaatagaggacacagagataagaatctcaaaataaaggtataactatggacataatttatctcaatgagttgatatctaayactgaaagcacagcaataaaatggaagtaaaatgttaccaagtcagcattaagttttcatgtttcagtagataagccacacactgtcgaaaaataatgaagtctgaaaagttggccactgggaatccttgccacaaacacatatcttctcctgctgtgacagtatttataatttctttctgtagacaaaagtaccttcagaaccctaggtcatatcagaaaaaagtaggaggagcttaaaaggaaattaaaccttgcatttttgtttgaaattggaagcagagatatcatttcttaataaactccagtaatagtgattcacaatacaaaatatcaatgtaacaactatatatgcagggagagagagatgtatgcatgtgtgtgttcatgatgtgtggtgtaaatgtgttgtatgtgtatttatgattataattcatcataaaagttgtggatcattaaattcctagaaaaaa

SEQ ID NO: 619246 - DNA, 580 bp, Homo sapiens
tgctaactctaaacacatgaaagcagaaagaataattcaggaatcctggaggactgtaaagaggtggtaaactgggggaatgcttcactgatgacmactgcttccaagaattgacatgaccttttaagagttggagagacgctgttggagatcaggggttaaagagagtggagaagttgtaaaattgccgttgtagagaagggaaatgagagcgacaagggagaactggaagtagtgtctggcaattcagaggagtattcagctgaggttagaaccacaaattaatagtgacaccaacctgtgagattctaagatttttctcctgaggcatgcaagcacatgttcatgctctctgtctctctttctctctctcacatgcacacacatcactcaagatttttaatagaaaataatttcattggaaagttgcaagatatattaaaataggagcaaagatggctattatttcaagatagcagaggtatctacaaattttggtttcaaaatgatactccccattttatgaatgaaatgtctctactttttgacttcccaaaatatattattataaacggcaaca

SEQ ID NO: 619247 - DNA, 480 bp, Homo sapiens
gttttattcttttaaaatttcaaaatatatatatattccaaaaatgttaattataaatgaagattgtagctctgtgatcaggtgttccagtttctttatacacacacacatagacacacacagagctatgtgtacatatatattttttataatgtccataatcgtagcaatgaaatttcaggtcrtagattcaaacctttatggctattatagggcctctggaggaatcttgtttaagattgttaaagatagcattcacagttagagtcctaaccttggtagatcattaaataagaaactactaatgagacattcacttcctctagccaatgcttcttttttattcagcatgacagcattcacaccataactgcaaactaatctgttttgttttggaatcataattacgtattgacaagctaaactgtgagacctaaataggggaacttaagctattatgggagcattctcatggggaaa

SEQ ID NO: 619248 - DNA, 588 bp, Homo sapiens
ctggtttagtctttgaaactttcttacttctggtaactagcatcatattcttggggagaagtgctccctcaaactcctatttcaattttgtagttatagtgggggctgccaatgatatcatatggttcttgaaaaattggagagcatgttacycaagcagtgtcaaccagagcctttcctgagtaatattttaattagatgaacataaaagaagagggatttttgagattcaagtctcttgagtctacgatcctctaggaagcataataagcataatatctgctttctagctggtaaaggggaaattttcttgtgttacattcataatcaatccagtttagtatgaaattctggaaagtggcaattcaaaacaaattgatactttatatataaagtggtataaattgttgtagttgggattatgcctgctattgcttttctcacacctggtatttagtgggggactgagcagaagtaactacagctggtaaatgcagccaacctattagcttgtaattctaagaaactttcaacaagaatatttggaattatagtaagatatttgggacttaaagaggttgcagtgat

SEQ ID NO: 619249 - DNA, 455 bp, Homo sapiens
ttatgctaaattttacgtttattttgaaaggtcatagtctttctcttttcgcttactttacgctggtgtttatctgctaagaatcttacaatcttttcagggtttatatttattcatttttatctacagaagcaataattcytatacgttaatatattgtatgcagaatgtgattaccaatgactattcataagtctactttattccactactaataaaaaagttaacgtattttttctcagtgcaaatatcctgaattcttggtttctggctacttttgtcattattgagagattacaattataaacaatcttctaacaaatcagaaatcctcttcataaaggcaatagaggaagaaaacacatataattgaataagccttaaattagaatgtgatgctcatgataagccatccactaagagactgcaaacacagaaagaaatctcaccccttt

SEQ ID NO: 619250 - DNA, 551 bp, Homo sapiens
tctctgctacaacttgtttgattagccccttgacattactctcaattgagggaaagcaaaagtaattcatgacatttttagaaatgtggctaatctactttcacaagctttccagctggggatttcaagttgagggtgactatagttaatttttttaatttctcrttttctaagggaaccagagcttttctactaacaaatactttattttttgctgttattgttggctaagagtgtctttactttgaggtgatgtgtaacctccctaaaacgaccttggaactcagatccccaaggaccatatccaatttaagctgtctccaccaaagggaagctagattgttattttttatagggacggacttgaagcacaatgcatttcactgtggaatagatacggaatatgattcatagcactgctcaccaggtgaggaaagggcacgtgcaatcatatgtccttctgctgttcctcagctttctctcctctgttaaaaagaattacaaagcaggtggcaacataggggaaaactgagaatgaggaggtgacagga

SEQ ID NO: 619251 - DNA, 563 bp, Homo sapiens
aaacgcgattgtttttgagaagcactgtatattcctgctgtcaatgtagattaagttaatttcttttgcttttaatgtcttgagccaaagatatatcaaatttcagtagtactgcactctgaaaagttctgaaccatcaattaactattaaatattgaggcaggaaagcatkaaatagaatattttagaccctttcttcctttcttccccccatcattggaagcttgatactgatctctgagttaacaagggcaggggattgatcatgtatcctgcccagaattctagttaaccgaaattgtgttctatttttttgttgttgttttgttgaacacaaagcactgcttggttgattgaaccttgccttttcttaatgatgaatttagtccaatcactttcaggttataaaaaaggcctctatcttattgtatttatttgtatttcattatattgataagtactactacagagaggctcacatcacatttataccccctgaaagtctctctgggtgatgtagaattcattaaatagttgacctcacataagcagcagatgttttc

SEQ ID NO: 619252 - DNA, 577 bp, Homo sapiens
acatgctaattgatttctgtttaatttggctgctttctgtattgcagtaaatcacactacttgataagactcctaaagtgagatttttgctcttagcttttttttttkttttttttttagatagttaccatctatgtgtaaattttggtttatattggctttattttccatactgctatacctttaatgtgatttatcttaagataaatgcagtattagataaatccagatttgaatgagaaatatattttatttagatcatgtatttacaaaatattggcatgaaacagctgcataaagtgtatgagattctgtgtaaaccaatatatcactggtttattatgtgcaaaacaataaactaggtctaatatcaaaattattcaaagacaaaaattgaattatgaattgatgcctcctttgggacataaatacaaaattcccatagaacgttttaactgaaacaaatatagaaaacaaacttctgttttgttattatagactaacattaacttgaaacattaaataataaagaagtgaagtacatatttttaaacatcaagtaaagattgtctagagt

SEQ ID NO: 619253 - DNA, 577 bp, Homo sapiens
acatgctaattgatttctgtttaatttggctgctttctgtattgcagtaaatcacactacttgataagactcctaaagtgagatttttgctcttagcttttttttttgktttttttttagatagttaccatctatgtgtaaattttggtttatattggctttattttccatactgctatacctttaatgtgatttatcttaagataaatgcagtattagataaatccagatttgaatgagaaatatattttatttagatcatgtatttacaaaatattggcatgaaacagctgcataaagtgtatgagattctgtgtaaaccaatatatcactggtttattatgtgcaaaacaataaactaggtctaatatcaaaattattcaaagacaaaaattgaattatgaattgatgcctcctttgggacataaatacaaaattcccatagaacgttttaactgaaacaaatatagaaaacaaacttctgttttgttattatagactaacattaacttgaaacattaaataataaagaagtgaagtacatatttttaaacatcaagtaaagattgtctagagt

SEQ ID NO: 619254 - DNA, 491 bp, Homo sapiens
atggggctcccctcgccattccatggggctcccctcagcattcttgcaggcagctcttttagctattagtggtccttaggattaaagtttgtagggtagaaggctctcatctactcacttattttttttccccatgcaaaaccagaatgaggacaggcagagggaacaaatggctggttcactgccttgggcacagaaagtcacaatttttgtgcttctatcagtgctaaggaaaatgcacacatctccctcctgaatacatgtagaatttctaatgtcattatagtgagtacttttaaccrtgcctcctgtgtgtaggcatagttctaggcaccacgaatgcaacactgaacaaagcttctcatgaatcctccattccaataggagaagctcataggtagattagataacaataagtgctttggaaaatacgatgaagggaatagtaccgagatttttggagtaaacctgtatgcttctacagggagtta

SEQ ID NO: 619255 - DNA, 648 bp, Homo sapiens
gtgtaccaaccaattcatagtttaacatgaacttagataactttgaaaaagactttgtctcatgtttattatatttaatatatttagaatattagttggagttattaatcatgttaagagctttttataaacttaagaatttcttatcaaagcctcaatatgaacattatctcatggtacttaaattrtcactctggaatacaattgccatcaattttgtttggttgattcgttagtttaaatcatactaacctatataaatgcataaaaataggaaaccttaaaacaacatgaaacaaatttacatgatatctatgggaacagactgagaattaattttgttagggttctccgtatttttcccattagatgatgaaactttgtgtgcacaaaatccataacactctgcttttattttggccaataaggcagccaattggttcatgacatgacataatatattggattctgccttctcattaaatcatacttttaaaaaattatacttttatagaaccacatggaataatttgaatactaatatttaaaagaaaaaatttcttcttattaatatctgtgtgaaatttctgcaatcacaatctcaccagatataaagttatttcatttaactataatatgtattctcaa

SEQ ID NO: 619256 - DNA, 537 bp, Homo sapiens
ccacttcaggctaagcccttgatctctttaggagccactgcacactaattcttgctagtaatcatggccacagacactacaatcccattgtttgtgcccaaatcgtgactctgccacatattgagtgttcctgagcaaatgactctactcatctttgtgactgagtttcctcttctgtgaaacaggagtaataatggtacctacctatgttgatttgctaatgtgatgtgctttgcttgtttaaactgtttaagattgwacaaagcccatagcaatacttataaaatttagacatttattattgatgtgcttctctcatgctgttaacagtcaactatctatctctcacattatctttattcatttcccccgactagggaaaatattaacttggttgatccaggctgaacatgaacacaataaatattcttttcttactccaacatcatgtttttgatttattaacatttgtccagtgacccatctaaaaacttaggtcatttgaatccatttcaatctttgtcctctatatcgaaa

SEQ ID NO: 619257 - DNA, 614 bp, Homo sapiens
ttaactataatatgtattctcaaactcttaatttcttaaattagaggacttttcaatcaactgcagtattatttggaatataaaacagctgttatagttgaaaataggataagagagccagagttcagcctgttgcccaccctggaaggattcatcgctgctcccacatcaccagcatccctacctctccaaataactcccaggcacttaggagccttgagggaatcaatggatctttggttttcaagtatgccatcttatatgactatcccatatagctattttgtaattaatattttaatattcatgagattccgctctatactttctaattgcattttattttctttactgatccacaataattgtgtatatttactgagtacagggcaaggttttgctacatataaaatagaatgatcagatcggggtaattagcatattcatcatcataaatatatcctccttcaagctatattaaactaaatsatgtatttttgttacctatagtcatcgtaaggtggtatcaaacactagtattaattccttctatctagctgacaatttcgttgtaattgaagagctctcagagatgattgctttctttcaagtac

SEQ ID NO: 619258 - DNA, 591 bp, Homo sapiens
ctcccatagctttctccattttcatataattatatattggctattttatgtgattttaaatcaaggaatatattttccatatacatttctacagcttgcttctctcaattcacagcagatcatgaacattcttcccagtaagttaatatgaatgtagtagattctacatcagtttgaaatataaaattattcctcacgtaaggaaaagttaacatatacttggataggttcaagttcattcctatgmtctaatagatactctaacaatcacttcattttgaacaaagtagtagttgggggaaaatgtcttatcatggagttatagcaatcagtgctagttgggatgtttatagaaattgtcttgtgggaactttaaagagaggttaaatttattagagattggaaatgattccaaagggtaacttcgcgagtttaattgttggagagcatgatgcacgtgatttttgaaaaatctaaacaggtaaaataatagttgtttagactatagagctcctaaatactgacctggtttgaaggaggtggggaacaaattgttggcaaatagacatttttgccttgaggaaaaaaaat

SEQ ID NO: 619259 - DNA, 613 bp, Homo sapiens
gggaaaggaagaaagaagtttaattggtatagaatttcagattttcgaaatgaaaaagttttgggaatctgtttcacaacagtgtgaatgtacataaaatctctgaacaatacacttaaaatgattaagattgtaaattttttgccacattaacataatttttaaaaactatagcagcagaaagcaaatcaatttctttgaactggtgaagttagggagggtttgactatcaagggggatgaaggaatatcttggttctattatggttattcttcctcaggtgtttggaaaagtttatagaattgccagctaaaaactgcattttactgtatttaacttatactttaattttaaaattataggcattggaaaaaatatatcattctagtgcataaaattattttatgaaatatgagaatggaaaagmggtattttgaaatcaatatagtttgtgttttaataaaaaattaaatgtatgtttgcatatcttttttcctgatttaaaatgtttacatttatctttgtaaaaggaaagaaaagaaatttaggagattcttttcattagaaatgagtatttcttcttataggtaagcatatacgtggaattaatata

SEQ ID NO: 619260 - DNA, 501 bp, Homo sapiens
taaatggagatattgatcatgtattgaaagactggattcatcatttcccagtgaatatatgctacttattggtgcgctgatcataaaacaagaaagatctatcataaggaactgaaaattgaaggagagtgtgaatattcaaccagctggttgcagaaatttaagaaaagatacagtattaaatatttaaattttgtggtgataaagcccctgctgatgacamatcaacaaaggaattcattgacaagtttgtcaaggtcatcactgatgaacatctgatggaagaacaaggctataatgctgatgaaacatcaccattttggcattactgccccagaaagaaagctggtgagacagcccctacaggaattaagaatgccaaggatagaatagctgttctgggatgtgctaatgcagcaggcacacataaatgtaaacttgctgtagtaggctaaagcttgcatagtcgctactttcaagtaatgaatatctcacaagtct

SEQ ID NO: 619261 - DNA, 564 bp, Homo sapiens
gttctttttgggcagaaaacaccacttagtttcacttcatccaaactcatccatgcacacacaccatcgtttcccaggctagtccactgctctgttgggatagtaacsaagaaatccacaatgttgttgctgaagcctccttctgctctttaaatatgcaaagctcaaattcaacttggtgtactttaaggaaaaattttgtaatacacataataagaacattttctagctgtcagaccaaaaatgtgacaatgtaactgcttttcttatagccctgacaatgtaaaagaggtagagatgtaggtgcaaaaatagagaaagaaggttgaaactcacagagatgcacataggagatgtgattcaagtcttttattttctggattagaaaatactacttatttaagtttagaaacctttggattttcatttctcagttttttttttcctccatgaattcttgtctcaaaaccagccccagaacaagagatgtaaaaggagaatcagaaagaagatttgaaacttaaaaagaatggcatttatgagcatgtgcttttcctttatttg

SEQ ID NO: 619262 - DNA, 556 bp, Homo sapiens
tttcagagtattatattatagtatagtatagtatagtatagtatagtatagtatagtatagtatagtatagtatattattttttctgagttggagtcttgctccattgcccaggctgaagtgcagtggcaccgtctcrgcttactgcaaactacacctcccaggttcaagtgattctcatgcctcagcctcttgagtagttaggattatagtacccaccaccacacctggctaatttttctattttttaaatatttatgtatttatttatttttgagacagggtctcattttgttgcccaggatggagtgcagtggtgcaatctcatctcagtgcaatgtctgcctccgaagctcaagtgattctcccacttcagcctcccaagtagctgggattacagtcacgagccaccagcccggttaatgtttgtatttttagtagagacagggttttgctgtgttggccaggctggtctccaactcctgacctcaggtcatccttttgccttggcctctcaaagtgctgggattacaagcatgagccaccatgcccagtct

SEQ ID NO: 619263 - DNA, 547 bp, Homo sapiens
acaaaacttcttaaaactgaattggaaaaaatattagaaaagccaagcatccaacaactgtggaatttcaaaaggtgtaaagtatgcctagttggcttatcagaagtacaagaaagagataacagaggagaaatttgtaaaatagtaatggtgaaaattttttcagaattaaggatggacactaaacttaaatgcaaaacataaagctataaatctattagaaataaacagaagaaaatctttaggacctagggctaggcaaaaatttcctacacatgacaccaaaaacatgacccataaaagaaaaattggcaaattggactatgtaaaattaattttttttctgygaaggaccctgttatggggatgaaaaaaataggtgagaaaaaatatctgtaaaccatatatctgataaaggactagtttctagaatatattttacaaaagctcaatagtaaggaaataagcattccatttaaaaactgggcaaaagacatcaacattttacccaagaggatgttcaaatggcatataaacaaaggagacc

SEQ ID NO: 619264 - DNA, 547 bp, Homo sapiens
acaaaacttcttaaaactgaattggaaaaaatattagaaaagccaagcatccaacaactgtggaatttcaaaaggtgtaaagtatgcctagttggcttatcagaagtacaagaaagagataacagaggagaaatttgtaaaatagtaatggtgaaaattttttcagaattaaggatggacactaaacttaaatgcaaaacataaagctataaatctattagaaataaacagaagaaaatctttaggacctagggctaggcaaaaatttcctacacatgacaccaaaaacatgacccataaaagaaaaattggcaaattggactatgtaaaattaattttttttctgtgaaggaccctgttatggggatgaaaaaaataggtgagaaaaaatatctgyaaaccatatatctgataaaggactagtttctagaatatattttacaaaagctcaatagtaaggaaataagcattccatttaaaaactgggcaaaagacatcaacattttacccaagaggatgttcaaatggcatataaacaaaggagacc

SEQ ID NO: 619265 - DNA, 640 bp, Homo sapiens
attttttagcaatcaaaaaatatattttggaaagaaaacatagagaaattgatttcgatatagtcataaagtcagaatcagagcttgacaaagcaaacacagaaasgtaaactagaaataaagaatatttgaataatatagtaagacttaggtaatagatatattttatattctattaacaggaaatatgccttattttcaagaaacaatggagtatatttaaggatttctaaaaattcagtcactaaggtacacatacaaaataattataatttgtaagccatattatctaactgtagtactaaaaaagaaaataacgatataatgaaaaattatattgactacaacagaactagaaaataatactcatgtcaaggagactatgacaaattgaattaaagaatgtttagataattacgagaacagacacagttgatgattattaaaagatgctcaattatgtgttgaggtgaattaatagtagtaaatcatttctttaataaactaaatgagttagcataaatgacctaaagtttaaactcaagaattagaaaatgtaattgatttttaaaagtcaactaaagaaaacaagaggaagaaattgctatggatacatggaaatgcgatggaattgaaagcc

SEQ ID NO: 619266 - DNA, 640 bp, Homo sapiens
attttttagcaatcaaaaaatatattttggaaagaaaacatagagaaattgatttcgatatagtcataaagtcagaatcagagcttgacaaagcaaacacagaaaggtaaactagaaataaagaatatttgaataatatagtaagacttaggtaatagatatattttatattctattaacaggaaatatgccttattttcaagaaacaatggagtatatttaaggatttctaaaaattcagtcactaaggtacacatacaaaataattataatttgtaagccatattatctaactgtagtactaaaaaagaaaataacgatataatgaaaaattatattgactacaacagaactagaaaataatactcatgtcaaggagactatgacaaattgaattaaagaatgtttagataattaygagaacagacacagttgatgattattaaaagatgctcaattatgtgttgaggtgaattaatagtagtaaatcatttctttaataaactaaatgagttagcataaatgacctaaagtttaaactcaagaattagaaaatgtaattgatttttaaaagtcaactaaagaaaacaagaggaagaaattgctatggatacatggaaatgcgatggaattgaaagcc

SEQ ID NO: 619267 - DNA, 507 bp, Homo sapiens
gaatagacactccagatatgggtctgcctatcctgcatgtgatgcttctgccgagactaccatcgtggacacatggaatgccttatccactgtcatggtattgtgtgcagcattccctctgaccaaggcactcactttacagctaaagaagtatggcagtgtattcatgctcgttagatagwgccctcaatcttggggggcactatctaatcagctcgtggaattcactggtcttaccatgttccccaacatcctggagcagctggattgataaaatgctgggatggccttttgaagtcacaattacaacaccaactaggtgacaatactttgtagagctggggcaaagttctccagaaggctgtatgctctgaatcagcatccaatatatgggactgtttctcccatagccagaattcatgggtccaggaatcgaagggtggaagtggcagtggcaccactcaccatcacctccattcatcatcacccctagtgacccattagcaa

SEQ ID NO: 619268 - DNA, 173 bp, Homo sapiens
aaggcaaaaggaatacagaatgggtagtagaagaaggcagtcatcaataccagctatggccacatkaccagttgcaaaaatgaggactgtaattatcatgagtctttctttctcattttattaagaacatgtttgtgcatatatacacttgtactaaaaaacaacttcatttt

SEQ ID NO: 619269 - DNA, 627 bp, Homo sapiens
ggagttcatatcagcatttaagtgttaactttatgtaatagcatttgggttggggattggtgcatttctggttgtatgaaggatagctgtattatgttaggtataattgtaaccttattactgtctttatttgacgattacgtattacgatttcaggagatgtgtatgggttcaagttgactaaggatggacttacgatgattatgggttcaagttgactaggggtggacttgtgatggttaatattgagtgtcaactttattgaattgaaggatgcaaagtattgttactgggagtgtctgtgagggtgttgccaaaggagattaacatttgagtcagtagactaggagaggccgacccaccctcaatcttggtgggcaccatctaatcagctgccagcatggcttggataacaggcagaggaatatggaagtactagactggctaagtcttccagcctccatctttctsccatgctggatgcttcctgccctcgaacattggactccaagttcttcagcttttggactcttggacctacaccagtggtttgctggtggctctcgggtattcagccacagactgaagactgcactgtcggcttttttacttttgaggtttttgggg

SEQ ID NO: 619270 - DNA, 621 bp, Homo sapiens
tgtagattgagaactacaaaacataagtaaagtaaagaagacacaaataaatggaaagataccccatgttcatagatggaagactagtattgttaaaaaggccatactacactaagagagttatagattattttcaatctctatcaaaatcccagtagcattttttacagaaatggaaaaaatattctgaaattcgtatggaaccataggagacctgaacagacaaagcaatctagagaaaaaaagagcaaagtcagaggcatcacacttcttgatttcaaaatatattataaatgtctagttataaaaataatacagtactggcataaagacagacatatagaccaatagaacagggtggacagcccagaaataaactcaggtgtatatggcaactgatctttgcaaaaatcaactcaaaatcgattcaatacttaaatgtragacatgaaactgtaaaattcctagaagaaaacatagctaataaactttatgagattggactggcaatgatttcttggatatgacaccaaaagcataggcaacagaagaaaaaatgggcaaacgggattgcattgaactaaacagcttctgcatagcataggaaatagtcaacaaagt

SEQ ID NO: 619271 - DNA, 582 bp, Homo sapiens
gttgtggcatgacctcggcacactgcaacctcctcctcccaggctcaagcgattctcctgcctcagcctgctgagtagctgggattgcaggcacatgccactactgcccggctaatttttgtatttttagtagagatggagtttcatcatgtttgccaggctggtcatgacctcaaatgwtccacccacctcggcctcccaaggtgctgggattacaggcatgagccaccgtgtggcccaatgttttaattcataaatttaactttttatagatattatttataattaaatatctcagcatcatttattagattatctttgatttttcccattcatttgaaatactatttttcctacacattatcagtagttctcaattttttttcctctgatgcaactgtttaatgatatttatgccatcacaaatgatatcccactgtgacctgctatgtacataaggcaattcccatatttgcaataattggaaggtgtacttattgcatcttcatctttttttcctccaagatcaatgatatacaatagctcagaatctataaaccaggtatttatagattttgtttt

SEQ ID NO: 619272 - DNA, 332 bp, Homo sapiens
acaatcaagaatgcgcatgcacgtgcacgtacacaaaaccattttaaagcatcactatcttctctcttcacagttaaatctgattagcacaatggtgatgggatttttttattggttattctgtatgtttctgcttttagagccttaacagtggttgtttttggtattttcttggacatgcttctcaaatcagtattagatacaagtatattgggatgaatcggatggttaccacgtatgattaaagcgcgatttttttttacagcagtaagaaaatgcaatasaatattccactccagtgttatccaaacttagttatgccttgccaactg

SEQ ID NO: 619273 - DNA, 611 bp, Homo sapiens
tgctattacaatagtcaaaaggttaaataagttaaaacatttataaataagttaataataaataaataagtcaataataaataaataagttaaaacatttataaataagttaaaacatttataaagttaaaaaagtacagtcagctaaggttaatttttattgaagaaagaaaaacatgtttaataaatgattgtagcctaagtgtacagtatttataaagtctacggcagtgtatagcaatgtcctaggacttcacattcactcatcacacactcactgattcacctaaacgagttccagtcctgcaagcttcattcatggtaagtgccctactcagttttactattttataatattttatacagtatttttactgtaccttttctatctttaaatatgtttagatggacaaatacttaccattgtgttagaattgcctacagtattcagtacagtagcatgctgtatagktttgtagcctaggagcaataggctatgccacatagcctagagcctaggtgtgtagtaggcgataccatctaggcttgtgcctagatgtttgcacaactacaaaatatcctaaggaagcatttctgagaacctatcccca

SEQ ID NO: 619274 - DNA, 575 bp, Homo sapiens
accataaatccagaaggaaacaataattccacaaattcttataccaaattctaataaatggctaatggcacaaattgtaaatttgttcccttttctcaccctgcccttctccatttcctgtcctgaatttgcatctacttccttatcatgctgtcgagttcatctcttcactgagggctttccaagccagccctatccaatctctattcaacatgggtcacttaatgagacccagaattctaatcaaaayccacagcagaaaaaaaaacacctggccagccaatgtgttctcccttacgtatgtgtcctcatctctctcagcctccctttccaacaggctcagtcactgacactccttcctcaacacagccttctcaggcctcgctttcggcagtgtacccagagttcaagatgtacaactgtcccacccactgaatcctcaagtcatcaaaatgccagtttgctcaaggtcttaatttaagtctgcagtttataggaatgcatctgattaatttcctttcccacctcatatgtaggtatttgaattttaaaaatggaaattatattaaactgag

SEQ ID NO: 619275 - DNA, 576 bp, Homo sapiens
atttctgttttctaccttctagaaagaagccacccacattccttggcttccagcactyattctccatctgcaaatacagcaagagagggtagataagttcattctggccatgtgtcatagtcacatctcccagtcattacagccaggaaaggttatctgctttcaaaggcccatatgattagattgggcccacctgggtaatgcaggctataatttccttatcacctcttagtcacatctgcaaagtcccttttgtcagagaaggcatcatattgatagtatctgaggataagaaactgtgcatctggctgggcgcggtggctcacgcctgtaatcccagcactttgggaggccgaagcgggtggatcatgaggtcaggaggtcgagaccatcctggctaacacggtgaaaccctgtctctactaaaaaatacaaaaaattagctgggcgtggtggcgggcacctgtactcccagctagtggggaggctgaggcaggagaatgacgtcaactggggaggcggagcttgcagtgagccgagatggcgccactgcactccaacctgggtgacagagcg

SEQ ID NO: 619276 - DNA, 496 bp, Homo sapiens
aatcatcctgtatgcctttgcatacccatggcttagctcctacttgtaaatgagaacatacagtatttggttttcggttacttcacttaaaattcctgagttacttcacttaaaataatggcctgcagcttcatccaagttgatgcaaaacacattatttcaatctttttaatagctgagtagtattccataaagtgtgtgtatgtatattatatatatatmtctctcacattttctttatccactagttgtttgatgagcatttaggttggttgtatatctttgcaattgtaaattgtgctgctatacacatatgtgtgccggtgtctctttgatataatgacttcttttcctttggatagatagccagtactgaaattgctgcattgaatcgtaggtcaacttttagtgctttaggaaatctccatactgttttccatacaggttgtacaaatttatattcccaccagcagtgtataagtgttcccttttcacc

SEQ ID NO: 619277 - DNA, 631 bp, Homo sapiens
ttaatccaaaaagaatactttgcagatttcctgaaaatttctgtggtacaaataactttatatcaatacataaatagatagatagatttaagtacaaatatagattttttttatatacgtatagttatataagttttttaaaagaatggcatgtacaatcaaaaatttcaaaattaaagttcacaagtatttcaaatagtaacataaagacccaatattattgcacttgaactagagtattaaaatacatgaaggaaacagtcaccaaaaagaaaatcagcattcagaaagaaataataggcagggcgcagtggcttatgcctgtaatcccagcactttgggaggccgaggcgggcgtgtgatgaagtcaagagatcaagaccatcctggccaatatggagaaaccccgtctctactaaaaatacaaaaattagccgggcgttgtggygggcgcctgtagtcccagctactcaggaggctgaggcaggagaatggcatgaacctgggaggcggagcttgcagtgagcctagatcaagccactgcactccagcctgggcgacagagcgagactcaatctaaaaaaaaaaaaaaggaaataataaatgttatattcttaaaaaatatagtgat

SEQ ID NO: 619278 - DNA, 599 bp, Homo sapiens
gcttgtggagaggacatgtggaaaggaccccagggcagcctctaagaggtagagcagtccaggaccagaagccaacataaaaattgagactctagttttacaactataagaaaccaaattctgccaaaaatcagtgagcgtggatgaggaccctcagcatccaatttctgattaccattgaaccattctttttccatccttttacttttaacctgactttgcccatatatatataccacattagttgagtcttgctattttatttagtctgccaatccttgcctttaaattagaatgtttaagccatttatattaaatgtgtgtaaccaatatggttgggttcaaaattgccatcttgctaatatttttccatctgttccatctgttatttgtttmttttttcatcttgtcctatttctttttaaaattgtggttaaacatacatactacaaaatttaccatcttaataattttaaatgtatagttcaatactgtaaagaagtatattcacattgtaacatatctctaggagattttcatattgtaattttaaaactccatacccattaaataacttgccatttccctctcccatcagc

SEQ ID NO: 619279 - DNA, 632 bp, Homo sapiens
gctttggcctcagtttggaacagtttattcacaataacttcactcagttaagtgatttataattttgtgggatctttctatcttgaagcataccacccaaccataaaaattttttaaatccttattgtcyaaatcctgtcatgaaaaaatcaccccaaatgtatttcataaaaaaatcttgatttaatataactgtacacatagtataaaggtatttaaaataaaaaagaaatgcaaaaagataagtgatacgtgcactgtatgagaagagtagagagaaatagactagaggctaatcagacaaactacagaaattctgtctgcttagctgggtgtccagcgtagtccatccttactccgtttgcatacctccttattttagaatttttgccgatggaaaaaattgtgaatatttaaattatgaaacagtcacaacttgatatttgtcctcaaatatttgaagatgtccttctaaaaggggatgcaggtatattttatgatagcgtatagaccaaactgggatgaatataaataaatagttagagagataaaatgatagatagatcaatctacatatctatagagagaatttagtaatagatatcagttttttataaggtaggacataataa

SEQ ID NO: 619280 - DNA, 558 bp, Homo sapiens
ttttgtaataacacttatcttaaaccacaaacacatggtatggttgtacaaacatattttctttctttttattctataagctttagcttttcttttttttttttttttgtcttttaaaaatattttgttaaaaactaagacacaaacacacatttactgttttccacctccacatcttgtcccactgaaaggtcttcaggggtattaacayacatggagctgccgtgtcctatgataacaatgtcttcttctggatacctcctgaaggacttgccagaggctattttagagttaacttttttcataaatagaaggaatatactttaatgacaaaagagtagtatagtaaatgcataaaccagtaatatattcttttattatcattatcaagtattgtgtactatacataattgtatatgctgtactttcatatgactggcaatacagtagatctgtttgcatcagcattaccacaaacacatgagtaattcattgagccatgaagtcacaacagctacgacatcactaggcgataagaatatttcagcttcattataa

SEQ ID NO: 619281 - DNA, 577 bp, Homo sapiens
ggatgacagacgcatgccaccatgtccagctaatttttgtagttttagtagagacggggtttcaccacattggccagactggtctccaactcctgacctcgtgatttgcctgcctcagcctcccaaagtgctgggattacaggtgtgagccaccacgtccagccatctctttgatatactgatttcctttcttatggatatatgtagagcagtagaattgctggatcatatggtagtcctaaatcatggtttytgagtgtctagaagaaaagctagtattaaaataaaaatttaaagaactttaactggtcatcttttttttattcatcagttataattctattggttgcaaaaatagaagttgttattatgaagttaacttccttagctattcatgtgtcaaactgctaactaaaagctcttcggaatatttctgtcttctgcttttactctaaaacccactctcatatgtgtagttagacccatgtacaaacagaaagcacatcattgatacaggtttataccatattatgtccaaagtttgacacatttaagaattattaatttctattttaaa

SEQ ID NO: 619282 - DNA, 494 bp, Homo sapiens
atcctagcactttgggaggccgaggtgggcagatgacttgaggtcaggagttggggaccagccttcccaacatggttaaatcctgtctccaccaaaatacaaaaattagctgggtgtggtggcatgcacctgtagccccagctactcaggagactgaggcaggagaaccgcttgaacccaggaggctgaggttgcagtgagctgaaatcacaccactgcactccagcttgggcaacagagcaagattccatctcaaaataaataaataaataataaaaataaataaataatgttttgggaaaaattwcctataattttagaaaaattacatatgtactattactttattcagtgaaaaataaccactgtttttgaaaagattgcatgctttttaaaatgtgtatttcaaaactttcacaaaatatgaactaagtgcatagttttaatattcagtgactctctttttaatggcttggctaacccttactctaaaa

SEQ ID NO: 619283 - DNA, 575 bp, Homo sapiens
  misc_feature 373, 401, 503: n = A,T,C or G
agaataaaggctttttattattattattactttttttttgagacagagtctcgctctgttgcccaggctggagggcagtggtgcgatcttggttcactgcaagctccaccttccgggttcacgccattcccctgcctcagcctcccgagtagcggggactataggcgcccaccaccacacccatctaattttttgtatttttagtagagacagggtttcactgtgttagccaggatggtctccatctcctgacctcgtgatccacctgccttggcctcccaaaatgctgggattacaggtgtgagccacygcacccagtggaataaaggctttttatacatgatcacataaaattaattaaacagatcctttnagagcaaacccttggaagatttattttntaagaaaggcatgaaacagaatacacaataccctaaaatggaacctgtaatacaggagttagaaaataggaattcttaaactgatagagaaggtaatatgtntttaggatagctatgtactaagattaaagaggtccaaaactttgtaattaaaaccagagcatggtttacaag

SEQ ID NO: 619284 - DNA, 617 bp, Homo sapiens
ctgtgttccatagtggctgtactaatttacatttccaccaacagtgtatgacagttcccctttctctacatgctcgccagcacctgttatttcctgtctgtttgataaaagtcattctaactggaatgagatgatatctaattgcagttttaatttgcatttctttcatgagtagtgatgttgagtactttttcatatagctgttaggcatttgcatgtcttcttttgagaaacatctttaatcaagttttgaaattaactgtgataggataaaagttttgagaaattgaaatagaatgatatcatcaatatatgctacactattgagcagaaaatattataattgtgattatataacctaggctatcagccaataagaaacagtctcttgaaataagagataatkaatttttacaaagaagatacagacatatagctgtggaaattccatatatccaaatcaggtaaaggttaaaagagatgttcaaatacaacatagagaagtgttattaaaagagaagtggattgttttcaccttattattgtatcataaatgaaccgcacttagagccaaactgtcatcagtgttctttcttttctttttattttttggattt

SEQ ID NO: 619285 - DNA, 617 bp, Homo sapiens
ctgtgttccatagtggctgtactaatttacatttccaccaacagtgtatgacagttcccctttctctacatgctcgccagcacctgttatttcctgtctgtttgataaaagtcattctaactggaatgagatgatatctaattgcagttttaatttgcatttctttcatgagtagtgatgttgagtactttttcatatagctgttaggcatttgcatgtcttcttttgagaaacatctttaatcaagttttgaaattaactgtgataggataaaagttttgagaaattgaaatagaatgatatcatcaatatatgctacactattgagcagaaaatattataattgtgattatataacctaggctatcagccaataagaaacagtctcttgaaataagagataattaatttttacaaagaagatayagacatatagctgtggaaattccatatatccaaatcaggtaaaggttaaaagagatgttcaaatacaacatagagaagtgttattaaaagagaagtggattgttttcaccttattattgtatcataaatgaaccgcacttagagccaaactgtcatcagtgttctttcttttctttttattttttggattt

SEQ ID NO: 619286 - DNA, 617 bp, Homo sapiens
ctgtgttccatagtggctgtactaatttacatttccaccaacagtgtatgacagttcccctttctctacatgctcgccagcacctgttatttcctgtctgtttgataaaagtcattctaactggaatgagatgatatctaattgcagttttaatttgcatttctttcatgagtagtgatgttgagtactttttcatatagctgttaggcatttgcatgtcttcttttgagaaacatctttaatcaagttttgaaattaactgtgataggataaaagttttgagaaattgaaatagaatgatatcatcaatatatgctacactattgagcagaaaatattataattgtgattatataacctaggctatcagccaataagaaacagtctcttgaaataagagataattaatttttacaaagaagatacagacatatagctgtggaaattccatatatccaartcaggtaaaggttaaaagagatgttcaaatacaacatagagaagtgttattaaaagagaagtggattgttttcaccttattattgtatcataaatgaaccgcacttagagccaaactgtcatcagtgttctttcttttctttttattttttggattt

SEQ ID NO: 619287 - DNA, 617 bp, Homo sapiens
ctgtgttccatagtggctgtactaatttacatttccaccaacagtgtatgacagttcccctttctctacatgctcgccagcacctgttatttcctgtctgtttgataaaagtcattctaactggaatgagatgatatctaattgcagttttaatttgcatttctttcatgagtagtgatgttgagtactttttcatatagctgttaggcatttgcatgtcttcttttgagaaacatctttaatcaagttttgaaattaactgtgataggataaaagttttgagaaattgaaatagaatgatatcatcaatatatgctacactattgagcagaaaatattataattgtgattatataacctaggctatcagccaataagaaacagtctcttgaaataagagataattaatttttacaaagaagatacagacatatagctgtggaaattccatatatccaaatcaggtaaaggttaaaagagatgttcaaatacaacatagagamgtgttattaaaagagaagtggattgttttcaccttattattgtatcataaatgaaccgcacttagagccaaactgtcatcagtgttctttcttttctttttattttttggattt

SEQ ID NO: 619288 - DNA, 540 bp, Homo sapiens
aagacagtgcatgatctcactcacatgtggaatctaaaaagttgttcttgtggaagtagacagtggaacagtagttgccacaagatagggaggttagggaacaagtggggataggagagattggccaatgggtgcaaagttatagttacacaggaggataagttctggtgttctgttgaatagcaggatgactagagttaacaacaatgtattatatgttccaaagagaagtttttgaactcattacaagcaaatgataaatgttatcagaaattgactttttaaatatgagactataataggacctgataatatcttctaataaatgaatataggaaaatcaccttgatttacactaaaaaagacaatattaaacaaaggtatattattgggaaattctctaaaatgctcaatgatggctttaaaaatagaaktttggggggctgaggtgggcaaatcatgaggtcaggagtttgagaccagcctggccaacatagtgaaaccctgtctctactaaaaaaaaaaaaaaaaaaattagcc

SEQ ID NO: 619289 - DNA, 595 bp, Homo sapiens
tgtctttccacctaatctccatggaaaaggtgttcttcattatagctcaagctaatctttcgtttggactggaactttcaccgatttgcccagaagtcttactctaccaaaaactcactgttttggcatatcttccaccttatcttctttaatgtttctttcttctcagcataagaaactgctcaaatatctcctgtcttgaaatacacttcctcagacccaaacccgaccccttctcttctacccccttgagagccaaggttcttggaaagagatttatatactcacattccacttcttcatccctcactcatgcctccattcacaaacatttggcttctgctttcaccactttgctcaaccagttatcactaaagatcattaaaacctgcatattgccaaagtcgattcttgggttattctgaggcatatgacactgctgactactcccttgagattctcctctcttatgtttcttctttcctatccttagatttattcttatctcactaatcactctttcacagtcaacttcatggacttcattcttcaytagactttcaggtgtcagtattatccaaggctctgtcccacc

SEQ ID NO: 619290 - DNA, 561 bp, Homo sapiens
tcttatattaatatatgtacttcaacttattttgattagtgtaagcatggtatatctttctccrtccctttacttttttttttttctattgagacagtctctctctgtcacccagggtggagtgcagtagtgtgctctcagctcactgcagtctctgcctcccaagctcaggcaatcctcccacctcctcagtctcctgagtagcggggactacaggcacccaccagcatgcctggctaagttttgtagagatggggttttgctgtgtttcccaggctggtctcaaactcctgggctcaaatgattctcctgccttggcctcccaaaagtgctgggattacaagtgtgagccaccacagctggcccttccttcacttttttttttttttttttttgcttaaaacaatagaaatttattccctcaccattcaggagcccagaagtctgaaattcacatgttggcagggttgccctctctctggaggctttaagggagaatccttccttattgcatcttccaatttctggtagctgtcagcattcctggtggctatatccatc

SEQ ID NO: 619291 - DNA, 610 bp, Homo sapiens
gccttgctgcccataaaatatagttcaagaaccagcagcatctgtagcgtatgggaacttgataaaaatgcaaaatctcaagcctaagattttgaatttctaaaaagggctcaggttatgctgatgctaaggcctcatggactttaccttgggcaacactaatttagaccatctctctgtcctaagacaggattttacctgggtatatatatatgtgtgtgtgtgtgtgtgtgtgtgtgtgtgtgtgtgcatgcacgggcatgtgtatgtgtttctttttatacctgtaagtaatgttttctaattaattcagcaccccaacattactttatgccttacccatcctaaagatcataatttaatcttaacttaatcattagttagatttatgcttagacctctccatttataagaagtacaacatgcttcttttataccrcatagcttagtgattaaagctttagagccagtctgctcaggttgaaatcccagcttcaacatttactacttttgtaaccttgggcaagttgtttaacttttctgtgtctcgcttccttcttctgtaaaatacagataaaataataccttgaattagttttaaaaagtcaag

SEQ ID NO: 619292 - DNA, 477 bp, Homo sapiens
aggtagttatgatagtatttttatctaaaaccattttaatatttttccaaaatggcataatggaaagatcagggctatggagtcagaggagggtttggatctgggctgtaccacttattagctccattatatttgggcaagttatataacctctgaactcattttctttacctgtaaaagtaaggagagtaaaagctcttcaaggggattgttttgagccttgaataccttcatgtattagtatatagtagatgtttaatagatattttcttctctctccttccctcctttaaagtatcaacttgtgaatgttttctcagttcaggaaggaaractgctttggaagaaaatttgtttcctgctgtcctgcagactttttgtttggcccacgatttccacccctacttttaattccaactagaagactaaggcagttcatcaaagtcctcattaatgtaggacttaatgcttcctcca

SEQ ID NO: 619293 - DNA, 477 bp, Homo sapiens
aggtagttatgatagtatttttatctaaaaccattttaatatttttccaaaatggcataatggaaagatcagggctatggagtcagaggagggtttggatctgggctgtaccacttattagctccattatatttgggcaagttatataacctctgaactcattttctttacctgtaaaagtaaggagagtaaaagctcttcaaggggattgttttgagccttgaataccttcatgtattagtatatagtagatgtttaatagatattttcttctctctccttccctcctttaaagtatcaacttgtgaatgttttctcagttcaggaaggaagactgctttggaagaaaatttgtttcctgctgtcctgcagactttttgtttggcccacgatttccacccctacttttaattccaactagaagactaaggcagttcatcaaagtcctyattaatgtaggacttaatgcttcctcca

SEQ ID NO: 619294 - DNA, 605 bp, Homo sapiens
agactctgtctcaaaaaaagaaaaaaaaagactctgatgcattttttagctccagaatttctccttgatttttaaaaattatttcaatctctttgttaaatttgatagaattctgaattccttctctgtgttatcttgaatttatttgagtttcctcaaaacagctattttgaattatttgtctgtaaggtcacatatctctgtttctctatgatcttatttggttcatttcatgaggccatgttttctgggatggccttgatatttgtggatgtgtgtatgtatctgagcattgaagaggtaggtatttattgtagtcttcagagttcaggcttatttgtacccatcstttttgggaaggctttccaggtattcaaaaggacttgggtgttgtaatctaagctatatcttcattaggaggcacccagtaacaaagtccagtaacactgtagttcttgcaaactcatggaggtactgtcttgatggtcttggacaagatctggaaaaattatctggatcactaggcagagacacttgttctcttcccttactttttcccaaacagtgtctctttctccgttctgagtcacctagagctgagggtg

SEQ ID NO: 619295 - DNA, 290 bp, Homo sapiens
aatacatggacacagggaggggaacatcacacaccagggcctctcagggggtggggggctaggggagggatagcattaggagaaatacctaatgcaggtgacaggttgatgggtacagcaaaccaccatgkcacgtgtacacctacataatgaaactgcacatttgacacaggtaccccagcccttaaagttaaaaataataagacattatgtaaaaactaaggaaatctgaataaaatatgaatgttgttaaataataatgtgttggtcatgaatagccaatactatta

SEQ ID NO: 619296 - DNA, 580 bp, Homo sapiens
aagcttcacttttagaaactgaacattcaagtactactagaattattttatttattgatagaagtagtgagtgcagcaattgctattcatcttaacccctttaggatggcactagcgaggcaaatactagtcctaaaaataaagaagaaaacttacttgtccttgagtgtgcttctaaatcttctgaaacactcacctcccttcaggtctcatctcatagctgggcttcatgttacttaagtgtagagcatttgtctttggattctcagaacccaacttagagcctcacacttagtaggtgctcagtaaatattgatgaagatggattgggcatgatgagattcaagctacagggaaaataagtattatggaacagataatgataaatcttacctacttcacaacttcatctctaatcctacccccaagctgcatcacatgattgtgactacagtggggacattttttaaccaagcatctggctgtaaaactgttttcttagatagcaactcaaggtggaaggtggaaggtgagggagcggcctgttgggtgtggmggtaaaacagtgtgggatggaaac

SEQ ID NO: 619297 - DNA, 466 bp, Homo sapiens
atctatttatctatctatatatatatatctttgtgctgttttcctttagaacattggttctcaactgagggcaattttgctgtctcccgtctaggacatttggcaatgtctgcagacatttttggttgttccttgtgggtgaaatggtgctgctgacatttggctagaggccagagatgctgctaaacatcatctaatgcrcagaaaagcccccacatacccaacaaagacttatatggccccaaatagcaacaaggctgatataataccaatatttatttccttccttgattcctctttcctcccaaaattatagtcacactggtcatctacttccatatactatttattttttacttacaattatattgtgaatatttcttcatatcattattcttcaaagcatgaatttaatgctgtacaacagtttatcatgtgacttatttaatactccttactgatgaca

SEQ ID NO: 619298 - DNA, 608 bp, Homo sapiens
actgacagctagtatcataccgaatgtggaaaaactgaaagcctttccttgaagaactggaatacgacaaggatgcccactgtcaccactgttgttcaacatagtactagsagtcctagctagagcaatcagacaagacaaagacataaagggcattcaaattggaaatgaagaagtcaaattatccttgtttgctgatgatatggtcttatatttggaaaaaaaaaaaagactccacaagaaaactactaataactgatcaactaattcagtaaagttgcatggtacaaaatcaacatacaaaaatcagtagcatttctatctggcaacagtgaactacctgaaaaacaaatttaaaaagtaatcccatttaaaatagccacacataaaattaagcacctaggaattaactaggccaaagaagtgaaggatctctataatgaagactataaaacactgatgaagaaaattgaagaggacaccaaaaaatggaaaaatattccacgctcatggattgaaagaatcaatattgttaaaatgtccataatacccaaagcaatctacaggttcaatgcaatccctatcaaaatacctattttgatactatt

SEQ ID NO: 619299 - DNA, 486 bp, Homo sapiens
actaccttaactttttgaaactaacagcctcaagtagtccctctaaatccaaggactaaactgaactatttggactggactgggaaccctagagcaggaggccccacaatgggagatcaaaatgggggccttgttaacctaaccaactgattaatctgtgtccttcttagggtgccctaactctttgtctccagcaggaccatgtatgccctctaggattatactccttgtgtgtatacccyaactatcatgagaatgccctagctctagaagatatttaggtcagctttaacttactggtcagagttgtgctgtgcctgaattgatatcttgggccagataaaaatgattcatataaaaactttaaaaagaagcctcctgtatccttaaagtacaccctaatgttctgagacaatttttcctggcttggtaactgttgggattcatggttatatccaatcctctaggcaggtctaaacgcatcat

SEQ ID NO: 619300 - DNA, 407 bp, Homo sapiens
gtcaagggtgttcaaaaggcaggagggagcaggcggatctgaggcattacctgcacccgcatctagtctcagtcaccacctctcagggatgccatctgccgtccttgcacccacctcctccaacagcaaccgctgctcctctccacgaacgcgtcgggcaggtagactctctgcttcttgagctcctggacaaaagacagacgggctaagacgctcccggttggctgacggattgtttcctttaccaacaaatgctgtagttccagtcgcytgagaaattagttttcaggctgatgcagcatggaaagacacctacctaccttaacatcccgccgttcctcccacgttctgctctgcggagcacaggtgtcgtccgcctctcaggtcttttctggatgcaagaaaac

SEQ ID NO: 619301 - DNA, 556 bp, Homo sapiens
ttgattttatatatatgtatatgcatatgtatatggtatatacatatgtatatgrtatatacacatgtatatgtatatgatatatacacatgtatgtgtatatatatgtatatatcaaaatataccctttagctgaataattctttaagctgtgaatctattctaaagaaatagcctaaatatggtaaaatattttttgcattatatctttacattcatcaattttatttataataatgaaaaatggaaagacagcttaagtgctcacaattgaggaatttttatgtaagtggccaaatgataaaaatttatgcagttattaagcttgtttacaaacagggaaacaaggaaagaattgggaacctggtgaaggaaatgaggagagaatttgtattagtccattttcactctgctgataaagacatgcctgagactgggtaatttataaagaaacagaggtttaatggactcacagttccatgtggctgggaaggcctcacaatcatggcagaagacgaaagtcatgtcttatgtggcgacaggcaagagagaaaat

SEQ ID NO: 619302 - DNA, 650 bp, Homo sapiens
gtagactgctgtatccccagagcctcaaaaagtattggctcaaaaagggaagtcaatttattttttcaaatgagtggrgaaaaaaattaggtcctgctgtctgggcactgctctttatattgatgagaatacctcgccccctaagaaagcattgatttgtttcctttgactgagaagacagttctaatcattccatcacacgctgctcaatccctatcaagtgttttctaaaatttaataaagtctgggccccttttaaagaaaaaaaaattggcaaacaccccgtgtttaaatgaataaataatatgtggtatagccatgctatggaatgttactcagcaacaaaaagaaatgaagtactgatacatgtcccaatatggatgaaccttgaaaacattacgctaaatgaaagaagccaaataccaaaggccacatattgtatgatgccatttaaaatgtccaaaacaggcaaatccatagagacagaatgtagattagtagtagtctggggctaggggtgttggggaatcagggatgatggattagaggtatagagtttctttttggggttcgcgccccaaacatgtttgaaaattgattgtggtgatgattatacaacattaagaatatactaaaactcactgaattgt

SEQ ID NO: 619303 - DNA, 650 bp, Homo sapiens
gtagactgctgtatccccagagcctcaaaaagtattggctcaaaaagggaagtcaatttattttttcaaatgagtggggaaaaaaattaggtcctgctgtctgggcactgctctttatattgatgagaatacctcgccccctaagaaagcattgatttgtttcctttgactgagaagacagttctaatcattccatcacacgctgctcaatccctatcaagtgttttctaaaatttaataaagtctgggccccttttaaagaaaaaaaaattggcaaacaccccgtgtttaaatgaataaataatatgtggtatagccatgctatggaatgttactcagcaacaaaaagaaatgaagtactgatacatgtcccaatatggatgaaccttgaaaacattacgctaaatgaaagaagccaaataccaaaggccacatattgtatgatgccatttaaaatgtccaaaacaggcaaatccatagagacagaatgtagattagtagtagtctggggctaggggtgttggggaatcagggatgatggattagaggtatagagtttctttttggggttcgcgccccaaamatgtttgaaaattgattgtggtgatgattatacaacattaagaatatactaaaactcactgaattgt

SEQ ID NO: 619304 - DNA, 650 bp, Homo sapiens
gtagactgctgtatccccagagcctcaaaaagtattggctcaaaaagggaagtcaatttattttttcaaatgagtggggaaaaaaattaggtcctgctgtctgggcactgctctttatattgatgagaatacctcgccccctaagaaagcattgatttgtttcctttgactgagaagacagttctaatcattccatcacacgctgctcaatccctatcaagtgttttctaaaatttaataaagtctgggccccttttaaagaaaaaaaaattggcaaacaccccgtgtttaaatgaataaataatatgtggtatagccatgctatggaatgttactcagcaacaaaaagaaatgaagtactgatacatgtcccaatatggatgaaccttgaaaacattacgctaaatgaaagaagccaaataccaaaggccacatattgtatgatgccatttaaaatgtccaaaacaggcaaatccatagagacagaatgtagattagtagtagtctggggctaggggtgttggggaatcagggatgatggattagaggtatagagtttctttttggggttcgcgccccaaacatgtttgaaaattgatkgtggtgatgattatacaacattaagaatatactaaaactcactgaattgt

SEQ ID NO: 619305 - DNA, 562 bp, Homo sapiens
cccaaagtgctaggattacaggcatgagccaccacattcagccaccatgcataaagttttgtgatcttctttattcacttaatagtttatatgattacttcacatctttaaataatcctttacaacattgtttttaatggctgagtatagttacattctattaatacatatatttatttaaccagatcccattttttgacatttagcttgtttctagtttctcacagctgtcaacatctttgtagttacatcacaaaatcattcaaaattattccttaagaataaatttctaaatagaattttgcacccaagggtatggagaattctaatgcttttgatacttacattgtcaaattgactcctcctgccctccagtattataccctctgagtatgagratgtgttgggctttctaccaccctctccagtgtgtagaggtgttatagacctgtgaaaacggctgagtagaagatgttggagatagttcatggaaatgtaggtcagtgacaatgaggggctcaggcaaattcttgagctggatcagaagcagagtgaccttgca

SEQ ID NO: 619306 - DNA, 599 bp, Homo sapiens
catctactgtgaattcatttttaacaaagatgccaagaacatatattggggaaagaatagtctcttcaataaatggtgctgggaaaactggatatccatatgtagaagaataaaactggactcctatctctcaccatatacaaaaatcaaaacaaaatgaactaaagacttaaaactaagacctcacactatgaaactgttaaaagaaaatgttggggaaactctccaggacattggaccgggcaaagatttcttgagtaataccccatgagcacaggcaaccaaagcaaaaatagacaaatgggatcacatcaagttgaaaaagtttctgcacagcaaaggaaacaatcaacaaagtgaagagacaatccacaggatgggagaaaaaatctgcaaacttcctatctgacaagggattaataaccagaatatataagaagcccaaacaactctgtaggaaaaaaatctaataatctgatttaaatatsggtgaaagatctgactagacatttctcaaaagaaaacacacaaatgggaaacaggtacataaaaaggtgctcaacatcattatcagagaaatgcaaatcaaaactacaatg

SEQ ID NO: 619307 - DNA, 523 bp, Homo sapiens
catgctttagtcatcactagctgaccgtgcctcccacaggtccaggtacacaggagatgctcaaaatacatttgactgagtggaatcctccaraaatgaacacagattcaccccaagtgcccatgggagaatctctcctctgaggagcatcctgagtcctggattctgcctggtgttccggcatctgaggcatcagcctgctccttccagccctccattacactctgtatagtcccacagcaaaacttacttgacttttatccaggtacttcaattggacctaagccagatgcttttacagtagcacatgcaattcctggtttaccgagaggggtggtatgttaaaccttcctgctggtggatttttaatcacctagccttctgtaagacttctgtagcattcctgcatcccccccttccaggaatccctgctgtgagacatcaaacagggcctctattcagaacattgaccactgagcttaaggggaaataaggtaaaggagtttaaaaataccagggccta

SEQ ID NO: 619308 - DNA, 623 bp, Homo sapiens
ttctcacgtgttcggtgtggaaaacaaaacaagtacatgctttagaagcaacaacaatgaaatccttttgaaatgtgtgttaatatcgtttaataaaataactagtttgaaaggtttgacatttttctttgagacgggcttggaccaggggcccctggcttcctagtgagtgcaaataggagggaacttctcaggagctgaaaccgctgctttgtggagcaggcctgtggttggaaaacctaagttttctctagcaaagacccarcctgactgtccagggccgaaggtgaaaccaactagagaatgcagaaggaaaagcctggatatatctcagaagatatggttgtattggcttttggtccaagggtatgggggtgggagtagtggtgtgtgcgcccacacatttctcaggcacacacagagataccacagaccacccacttcgtaaccacttgcactttactctcttccagacgttccttttttttttaatccctttgtccccattattttgttttccagtttaataaagtatggtttcctttgttgtgtggttgacttttcccctcctgttgatcttttccagatgtcccctttgacttctgcacttaatgtcactgaag

SEQ ID NO: 619309 - DNA, 585 bp, Homo sapiens
ttttgctccagtcattagcttccttaataaaatkagtaggctagaaaattgcattgtaattcatcaaggggaaagtaatgctgcaaaagatcttaaggctatgattgtatatttacttagtataaaatataaatttttccaagttatttcttataacttatttatttaatatatggtatttcttataacttatttatttaatatataagttatttcttataacttatatatttacttagtagaaaatataaatttttccaagttatttctaataaaaaatatgccagggagtatgtattattgatttcatctggaattatgacaatccatttctgcacatttggtttctgtaaatggagttttttatctgccttgaattccctgtgtaatggcattaaaataaattacagagagaatgtgatctctctgttattactgtctcttgcatgttccatttaaatccatcttgagcaccacgtacttttgaaagaatccttcaaatgcaaccaatattaacaatattttcacttgaatgcaagtaaataatgtaccatgaaaatttctctcctgcaaaccaaagtgcta

SEQ ID NO: 619310 - DNA, 532 bp, Homo sapiens
tgtaatattttacccagcattcatctcaacataactactagttaggcagtttaatgataataaatcaatgacctggtatggttgccaacttgtacaggggttatatatctttaatggttaactggaacactagtatctgaagagcatctttaagtggcaactaatatccgtcattagagtggattttttcttcttcttaaagctggagacacatataccagtagagtcaactgttagacacatgtaaatcaaggcaaactaggacttcaaaccagtatagaamggcagctgcaaaagtgtttgatggaatctttctgaatctctattcttcccccacctgttctctcaggccattccttcctcccaccagctccctccagtctcatttttcagtaggtgtattctattaacaaatcccatcttgtttgtagagtatgaaaaaccatctcaggtcagagattatttttatctaccatcattattctgcatttcagcttttgggagaccttcttatttgaattccagtcttcat

SEQ ID NO: 619311 - DNA, 563 bp, Homo sapiens
aatctagaaggaaaggcattataattagaagtaatctgcatatataatttacgttgtttggaaagcctaaatcattgctaagagttacatgaatttttagaaaacaattgctaattttacttcacttcactttgatttttgagtctctgaggcctacttcttaaagcctcaaacaagtttagttaaaattatcttcctctactgtgcaacaagtttaagcagaaaaacaaaatgcttttcctacttctcttacagcctaagttatagaaatcgrtgtagatgctcttaggctcttttattcttggctgcctatgaaaaatttctcttgctttttctccattctgacccagatcccccaattacattccgcagcacaccaaaattgctcctgttgttttacactgttgaaaggcagggtaacaggatggttaagagggttggctcaaaagccaaactgtggagactgtaagcctggtcctgccactttacagccaggaaatctcagacaagttacttagctttcctttgcctctgtttaagagaagataataatagtaccaatt

SEQ ID NO: 619312 - DNA, 623 bp, Homo sapiens
tgggaaaccttacaaatttttctctgtgttgctctgctcaacaagctaaattagttatcccatgtctgcattcccacattaygttctattaattatagtgtattttaactgtctattaatttatctgcttttcccttttgtccatcaggtccttaaggtcaggattttttgtcattgaatccagaatgaattttctgagtgcattttttgtcattgaatccagaatgcctggcacactgcctcatatatgagaagcactctttaattgttcaataaatagaatgaataaaggacatagattgtaagaatcaaaacacacaaagggggtgcttggaaatgtttttgggtgcactaattcagaaaacatattaacttcactgaaatgtttttaaattaaattgtattttgatgttggggacaaagttctaagttttcctcccctccaaacaggctctgaggcagagatttgttatgcaggaagtttattgaggagtattcccaggaacaatgcctgtaaagtagtgagagaaacgggattgaactgaaggagaaggtgaactacaaggcacttacaacagagacctcagttgatcctaatgggacctctgaacctgagatgaccc

SEQ ID NO: 619313 - DNA, 564 bp, Homo sapiens
gctttcaggaaactgacttttaaaatactctcctaaaattccaaaaaccaaccattttcattctcaaatttcwatctcagttcaagagatgaaaaaaaaaaacacttgatagaatatgttgagaaaaacaaaacagtttgcaaatttctgaaatatgtatatagcaactattatcagaggtaaacacaaaaccaatgaggactgtgtagaggacataataaacaactaactcctagcatgtattgctattttgttaacatctggcataggccagctttcagttcttccaaagaaacttttttcctagctatagaaaactatctatccatctgacaaagggctaatatccagaatctacaaggaactaaaacaaatttacaagaaaaaaacaaccccatcaaaaagcggatgaaggatatgaacagacacttctcaaagaaaacatttatgtggccaatgaacatatgaaaaaaagctcatcatcactggtcattagagaaatgcaaatcaaaaccacaatgagacaccatctcaagccagttagaatggtgatcattaaacagt

SEQ ID NO: 619314 - DNA, 599 bp, Homo sapiens
aacatagccctggggcaagactgtaagtttttactgttatctaattcaagtgaatgtgaagtgcttctgttcctcctccctgataagatgagaagaaatggatttgccagatcaatggctgccaaccatgtacttgaagcctggttgagtttgtgatagccctctgtcattcactagaatttatmtgttttttgtaggggccagacttatgctcatcaccattttctttgctatcagagagtccaattctgtaacagcatcttttcagtgaaccttggacaacagaggatggctaccactggcttttcagggatgatgatgctcctctcactaatatttttattatctgtttggctccaggtcctccagaacacgaccatctgttagtttttcagccctctgtgtaccaacacaacttctctgagccttttgattagttcatccactgtctgctacagcaaaattctggcatttctatttattatagtattggtcatcatttttaccaagctttcaagaatcattttagcaatatgttaacaccatctcccaaagcccttgccagggtgttaaattctctatcattagcaagtgatccc

SEQ ID NO: 619315 - DNA, 599 bp, Homo sapiens
aacatagccctggggcaagactgtaagtttttactgttatctaattcaagtgaatgtgaagtgcttctgttcctcctccctgataagatgagaagaaatggatttgccagatcaatggctgccaaccatgtacttgaagcctggttgagtttgtgatagccctctgtcattcactagaatttatatgttttttgtaggggccagacttatgctcatcaccattttctttgctatcagagagtccaattctgtaacagcatcttttcagtgaamcttggacaacagaggatggctaccactggcttttcagggatgatgatgctcctctcactaatatttttattatctgtttggctccaggtcctccagaacacgaccatctgttagtttttcagccctctgtgtaccaacacaacttctctgagccttttgattagttcatccactgtctgctacagcaaaattctggcatttctatttattatagtattggtcatcatttttaccaagctttcaagaatcattttagcaatatgttaacaccatctcccaaagcccttgccagggtgttaaattctctatcattagcaagtgatccc

SEQ ID NO: 619316 - DNA, 440 bp, Homo sapiens
gaattcctttttcccttagctcagctcatcaattcatccattcagtaaatgagcaaatagggccttctaagtgccaggcattattttagctgcttgggatacattgatgaaaaaaaaaattcatrgggattggagggcaggtgtggaccgcagacccattaaagtgagctttggttaaatcattcaattactcaggttgctagttgctttatgactttagtcaggatgacatccttctttccgcaaaagaagagagattgaagaaaccttcctttgtgactcccttcagctccaagactctgaagtctagttctgtacaaattatcacctgcacaaataaccaccaaagcattcctctcccctctttcatgattgcgaggcttcgcctgaaggaatttggaaaaggtgctctctaacatcatctataagggctcagggtt

SEQ ID NO: 619317 - DNA, 620 bp, Homo sapiens
atggttctggggaatgcgtatgaatcattgcttattctcttgactgtatatgtgtatttctcatatacattcatgtatcrcaaacatacttcaactgatagaactcatgttgtcagaagtgcgacttgaacataaactcctgattcttatttaatacaatttccactatacccctgtttttaataccctattagaaatttggctcaaaattaatgttttggaatgatttcctaggtctctaatgcgacttataaaaatcacagtatttttaagctccttctcaggaatactgaagaactcagaacctttatacacagagcccagaatatttaaaacttcactgtaggtgcatagaagaaataaagtacaagcctgaaagtacaatgggatgtagatatagatttagatatagagcaaggtacaaatgatttttgttaagtagtagctgatttttttcctccctttgtttcccaaacccaaaccttctgtcatttcataatacttttagaatttaaaaaattatgcaaaatgtttaaaaactcaccataatcagatgagttttaagaactttatagatcctaagactattgttttagggaggtccgacctcatagcatatg

SEQ ID NO: 619318 - DNA, 617 bp, Homo sapiens
cacgtggctaattttttttcgtatttttagtagagacagggtttcactgtgttagccaggatggtcttgatctcctgacctcatgatccgcctgcctcggcctcccaaagtgctgggattacaggtgtgagccaccacgcccggccccttattgttaattttaatataaaatatttcttggacattgtaagagtgaggtcttggctgaaaaaaagggtggggagggatatgttttcagactctttgacggtttttaagaagatgtgtcagaatgggagaaatcagagggtaagggagcttaataataactctttgaaatcagtaatataagatcatttttgaaagtgcctacatacagtatctgatattttctaacaaaagtcctgtgaagtagtcagagaacacacgattatcctcaatatacaaatggggaaactaaggcattaagaggttaagcaattagctcaatgttgcacagcaaataagtactagagcccmaacaaaatgctatgtccttggattctcaagtcggttctattttagcttgacaggtcaacatcagccttggataaacttggcttcatttataattttaccccagtttggggaaaaaaaac

SEQ ID NO: 619319 - DNA, 608 bp, Homo sapiens
gtttattccaagttcccagagaaacaaatgtaaaatgcagatgccaagcacagattttaattcttcccagagttatctgtgtgtagatttaccatctatgaattcatttttctacactctatgctatgctgtaattcttctccatgtactgatacattatcaatttcttactctccttgccctcacaaagtttttgtttgatctttaaattattattaactataaaatatttttatcatacaattaaccaacataaatgtttatgtatattctgtgatttaaaaacctatgcaggaaaagggttacctataaggaagtaccctgagctgcctcttatgtacctgttcactatcaccaatcaaagtatcacaggaatattataaaatataaaggatgcaattaggagaagtattatttttattgtcctttggaggacttatgcaatgycaaaaaagataaacactatgaatttcataggtaactaggatgtgtctaaaactccaaagtccattgcaagaagaaccactcaatccaagttcttttaaagcagtgtgttaaacagtcttgttataaatatgcatcaggaaaaatgtactcactttcataag

SEQ ID NO: 619320 - DNA, 599 bp, Homo sapiens
gcattgtttaaatctttgcaaatatctttaatgtctggttttaaaaaaagacgactggattctcgtatctgcttctgcattcaatatgttaaggtatcacctgttatgtagccctctggaaaacaccatgcatttaagagagaaagagagtgaaaaaaggcacatatcactcattagtatttaaatgaaaatagagttgacctcatgaamctggacgaaagggcccgggggacctccagaggtccccacaccacactttaaatactagtgctttagaatatccccaaatcatatagaaattgaagccacatgaaggagataactattagcagactcctacctagcaaataacaatggcagcaccatgctatggttttcataactatttcttctaaatatatgtcccaccagttatagttctctgagttcatttaggcagagattgagtgtcagcaccatgtggtacgttggaagggcttcctggtcttctaagagatcgtggattctgtttagaaaagtagattcggtgacataagttttttcctcattagaacgatctctataatgaggacaaatatgatgtgttctctaatcctgca

SEQ ID NO: 619321 - DNA, 581 bp, Homo sapiens
gggactggaaaattcttccatatgggaaaagagttggaaagagcttccaggagcaatccctttccctaaaggtggaatatcagattctcctgtgttatgaaagtaatcttgcagatctacctggcatcaaaaatcttactgagatcaaatgacgtaacatatttgaaattcctttgaaaattatgattagttacttggtatagcrggcaggtaacagcaaatgagactgaagagacagttgataaattacatttggggagtgataaagtaactactttgtttcttctctctctctctctctctttctgttttgagacagggtctcactccattgcccaggctggaatgtcatggagtaatcatggctcactgcagcttcaacctcccaggctcaaatgatcctcctacctcagcctcccaagtagctgtgaccacaggtgcatgccaccatgccaggctaatttttaaattatttttttgtagagacagggtctcactatgttgcccaggctggtgttggactcctgggctcaagtgatcaatccacctcagcctcccaaagtgctgggtttacaggcatg

SEQ ID NO: 619322 - DNA, 581 bp, Homo sapiens
gggactggaaaattcttccatatgggaaaagagttggaaagagcttccaggagcaatccctttccctaaaggtggaatatcagattctcctgtgttatgaaagtaatcttgcagatctacctggcatcaaaaatcttactgagatcaaatgacgtaacatatttgaaattcctttgaaaattatgattagttacttggtatagcaggcaggtaacagcaaatgagactgaagagacagttgataaattacatttggggagtgataaagtaactactttgtttcttctctctctctctctctctttctgttttgagacagggtctcactccattgcccaggctggaatgtcatggagtaatcatggctcactgcagcttcaacctcccaggctcaaatgatcctcctacctcagcctcccaagtagctgtgaccacaggtgcatgccaccatgccaggctaatttttaaawtatttttttgtagagacagggtctcactatgttgcccaggctggtgttggactcctgggctcaagtgatcaatccacctcagcctcccaaagtgctgggtttacaggcatg

SEQ ID NO: 619323 - DNA, 581 bp, Homo sapiens
gggactggaaaattcttccatatgggaaaagagttggaaagagcttccaggagcaatccctttccctaaaggtggaatatcagattctcctgtgttatgaaagtaatcttgcagatctacctggcatcaaaaatcttactgagatcaaatgacgtaacatatttgaaattcctttgaaaattatgattagttacttggtatagcaggcaggtaacagcaaatgagactgaagagacagttgataaattacatttggggagtgataaagtaactactttgtttcttctctctctctctctctctttctgttttgagacagggtctcactccattgcccaggctggaatgtcatggagtaatcatggctcactgcagcttcaacctcccaggctcaaatgatcctcctacctcagcctcccaagtagctgtgaccacaggtgcatgccaccatgccaggctaatttttaaattatttttttgtagagacagggtctcactatgttgcccaggctggtgtkggactcctgggctcaagtgatcaatccacctcagcctcccaaagtgctgggtttacaggcatg

SEQ ID NO: 619324 - DNA, 559 bp, Homo sapiens
ccagcatccttttttagaagtataaatgttcaagggttgatgtggaaaacatgcaaggctttcaaaagctttcagtttagactactcaggatagaatgaaaargtgggagaaagtgaataagcatgcaactcacatatttataatcccagaatgtcacaggtagagtatctacagaatatagatagcagtgacatatggaaatacaaaaggcagaagagaaacctgagtgctccataactaaagaaatcacttttgagtcatttctgttttgcccattgcaaagataaagctaaagacactgattcccacttatattttgtatatttttaagcaccaatgtttcagcacattttctgctcatctgttaagctgcaggccttatgaccacaggaattccctcatagaagggaaataaaagagatgaattcgggggtctctatagtcttggcatgctacagaacccattactacaaactggaaagcccactctgaggtccaagacagtggacttcaggccatcaacaataagccaaatctctccaagaaggagagattact

SEQ ID NO: 619325 - DNA, 559 bp, Homo sapiens
ccagcatccttttttagaagtataaatgttcaagggttgatgtggaaaacatgcaaggctttcaaaagctttcagtttagactactcaggatagaatgaaaaggtgggagaaagtgaataagcatgcaactcacatatttataatcccagaatgtcacaggtagagtatctacagaatatagatagcagtgacatatrgaaatacaaaaggcagaagagaaacctgagtgctccataactaaagaaatcacttttgagtcatttctgttttgcccattgcaaagataaagctaaagacactgattcccacttatattttgtatatttttaagcaccaatgtttcagcacattttctgctcatctgttaagctgcaggccttatgaccacaggaattccctcatagaagggaaataaaagagatgaattcgggggtctctatagtcttggcatgctacagaacccattactacaaactggaaagcccactctgaggtccaagacagtggacttcaggccatcaacaataagccaaatctctccaagaaggagagattact

SEQ ID NO: 619326 - DNA, 559 bp, Homo sapiens
ccagcatccttttttagaagtataaatgttcaagggttgatgtggaaaacatgcaaggctttcaaaagctttcagtttagactactcaggatagaatgaaaaggtgggagaaagtgaataagcatgcaactcacatatttataatcccagaatgtcacaggtagagtatctacagaatatagatagcagtgacatatggaaatacaaaaggcagaagagaaacctgagtgctccataactaaagaaatcacttttgagtsatttctgttttgcccattgcaaagataaagctaaagacactgattcccacttatattttgtatatttttaagcaccaatgtttcagcacattttctgctcatctgttaagctgcaggccttatgaccacaggaattccctcatagaagggaaataaaagagatgaattcgggggtctctatagtcttggcatgctacagaacccattactacaaactggaaagcccactctgaggtccaagacagtggacttcaggccatcaacaataagccaaatctctccaagaaggagagattact

SEQ ID NO: 619327 - DNA, 513 bp, Homo sapiens
atctctgcacatcagctaccgtagctctgagattaacctttcctgtttgcttgtgcctgacctcagggcatcctaaattactcaaagccattctgatggctttaatttatgagaacacctccaaatattcatcttttaaatcctgaaaatgattatccctgtacaacagtggctctctttttaatcttagctgataactctgattaaacacatccaaaggctgattamccccactgtggttaatgccagtgtcactgctaactacttatttcacagcaggaattgccttcaagagcccatttacattattacctagaattgatttacactgttatttcctattgatcacataggaaataggaggtatagacagcgtcctctaaaggcttgctatgatggcaaataatgcaaaacacagctgtttaattctacactcagccagtaatacaacagtgtaaacaccagttgcttccaaaaggtagatattttttaaaagacaacatttagtattag

SEQ ID NO: 619328 - DNA, 498 bp, Homo sapiens
aaaattttttacaagagctttaagaaaagtattttaaagtaaacgttttcttggcaaagaggtaattagttgctttcaaatagataatgaaaataggatttcctagtatacttaatcatatgctgtcaaatattacctgcattatttagattgctccttaatgcagtttgcagatatctaattctcaaaattttcatggttatcccagtattcctgactgcaytcgggcagtgaaagtctagctgaagagctatttaataataataactacagcttaaatgtaccaaatgcatcaatgtgctgggcactgcactaaggacaaccttataaggtaaatattaattttatcatctccatttcctaggatcttaggttagtaacttgcttacattcacaaagtactcacgacgtgattcaaaaccccagatttatctgatattgcaaccatgctcttaaccattattaatcactgtcttctcaattcctgcatgtggcata

SEQ ID NO: 619329 - DNA, 646 bp, Homo sapiens
ttattaattccatttcactttttaaagtttcaaatatttcatttttttcattcttgaaatttccatttggttcttcttcttactgttttcctatgactcctgaaatttcccatctcctcatccattctattttatctagtcatgtaaattccttaacagatgtgacatagttattttaatgtccctatgtgccaattccattatctaggtcagctatgggtctgtctgtattgactcatttttcatttgactctggaatacattttcttatttctttgcatgtctagtaaattactgatggcatattgaaacttgtgtataatatatggtagaggctttagattctattatcttctattatcttagaagattctattatcttagaagtttgttctagcaggcaggtaaaatactgccaagtaatatggacgtttcgttaaggtgggtctatttcaattttttcttaagttctaygataaatcccttaatgccaggatgtagtctttactcctaccgcatagcccttctggagtttcagcggaaaacccaagatgttagccaagccccctctaacttggggagaactaaaattccaaattctatagacatacagttaagaagctgctgaattattttctcagttatt

SEQ ID NO: 619330 - DNA, 561 bp, Homo sapiens
cccacccttaaaagtctgcattgaaagcaagcaatattaactggaactggaactgaactcaatgacaagtaggatttcaattaaacagtgtttcacttaacgctatacatgggaatcatgaaatatcttgggcataaggagccgcttgatgcatggtctccaaagtgaggctacaagacattcatataaaggatgaaaaaatgcactgaaactttagttgatatttataatttttatctaaaaagataagaatgaagttcaagtttattaatatttaatatatagatgacagtagkacttgtatgtaatttataagcaaacatacacatacatataagtacatgttcaaaatatttgtactgagagaactatacaatcaagaacatttggagtccacagatctggtaattaaaagggctttaaaatcaaaatgccagtctctgtcgcttagaatttttgcatctatgtaatgggtataatattagtatcaaccttgtagagttcttatgagaattgaatgagataacatgtacagtgcttagctcatacagtgcctgaata

SEQ ID NO: 619331 - DNA, 511 bp, Homo sapiens
cagctgactccctacctccatcacttattactcctatataaccttggttgtatttactttggctttgatcaccaaggatttgggaaatatgttccagtcaaagccaggatgtgcagcccagtcctctcttcctcatgccctcctttcttctggtcccctattatatcagggtctagttctaactaatgctgtggaggcaccaatttcccctctgtaagttcctatgcactaatcttcttgacctgttgaactcytttcttaagctcttttctctttggcatcatgacgtccccctataaaagcactgtcttcggtggattcatcagaccatacaagtttgggaaatgcagcatacgctgtccctgtcttggaaattcacagtgcataatgagtaatactgcaagaagtaaatctatttaatgacatttaattctgtaccttccaaacttatctgatcctagaaccctgttttggacataacccctcttgacattctatagacctaatattc

SEQ ID NO: 619332 - DNA, 472 bp, Homo sapiens
gccagccttttacaaactggtatgataatgggagcaaccaagtggcttttgggagaggaaacagaggattcattgttttcaacaatgatgactggtaagtaaatatcaattaaaaataatattttgtaccagtatgttcttggtttattcttttttttttctgttcattgacatttatcatatctgaaaaatcatgtagtcagtggagcgagaagacaatagagatcaaaattgggtagaagcaaaaggatgatggctgttactccttcgttctcctgttttcataagkgctttctgttgtaagcagaatcctttctgtgcacccttgcaatatcttatgcatatatagaatgcacattcatatgcttacctacacatgccacaaaatacacaaagtaattaatagaaggattgtgaaatcattaaaagaacgtttcttatagtcctgctcttttaatcatggaaaaatgct

SEQ ID NO: 619333 - DNA, 575 bp, Homo sapiens
taccctctgtctgactttttcttctattttctctccttttcctgagcctcctcctagtacgtcttatgaaagactgaggtggctactcttagaaggttttctaaggtgccttctagtcctatagcctgtttctgtagcttccttcaaatatcaggagctgcttgagtaaacctgtctttcaagatgagctgtccctcaattgaattacgagatagggaagcatgttttgccaaagtctctctcagcctttataaaaaggctgagggattttcatctgggttttgatctatcatggatagcttagagtagttaacaggtttggctctggtcccctgtaagacttctaccgtatacatctgaaagtgtttctatttttcaatcatctatgggcttagtagrgttccaattagagttttcaagggatactgcctcttttcctactgggaatggggattctgcctgtttctcaccctctttccctttttgactggctataggaaacatgctgctcatctctgattttttctgctacctgtagggctgcctgtctctcaacagcagttagggtttcagag

SEQ ID NO: 619334 - DNA, 572 bp, Homo sapiens
aagacaaacaggtaagcatgcaaaaatgtactaaaatatgaattaaatggtcataaccatttattgaggactaggctctatactctatgctttaaagatattttcatgtcagtcctcaaagaaagatattctttttcaaacaaaaaaaccttcatggtttgttattacttcagaaggcttgagtggcttttttctcttctcttcttatactatggaaacattgctttggaaatggaaaacaaatgtttactgcttttttttttttagayggagtctcgctctgtcacccaagctggaatctagttccatagaactagcgcagtggtgcaatctcggctcacagcagcctctgcctcccaggttcaagtgattctcgtgcctcagcctcccgagtagctggaattacaggcatgtgccaccacacccagctaatttttgtattgttagtagtgatggagtttcactatgttggccaagctggtctcgaactcctgacaagtgatctgccagcctcggcctctcaaagtgctgggattacaggtgtgagccaccacacccggcctgctttctgc

SEQ ID NO: 619335 - DNA, 604 bp, Homo sapiens
atctttgtaaatgaactttcccctccagttcctcctctgggaggttagacwttataagaaaatagttgtatgaatcatctatatttctaaaaaatactgagtgcctccaggtgtgacacagatggtggacaataaaaggggagaaaccatttttcattaataaggcacatagatacatgcactcataaacaccaaatcctctttacttcccggcaggacttcccacctctccaccaaggtcatcaacagtaccaatgtccccacattccacacccagtaaaaatgtctaaagggacagagaaatctaaaaaatgcactaacaaatctctgaagtcagattgcctggattcaaattccagtgccaccacttacaggttgtgtgaaattgggtaagtaaacttctgcaagccatagtttttccatctatagaattgagatcatgttaatactttcctcttgggattttgtgaaaattaaataagttaatgcctagaaagtaaccagtatggtgccagacaccaggttttatggtcaggacataattgctaacctgtaatattccttcaaacaaaaagaaagagaagaggagagaggaggagaagag

SEQ ID NO: 619336 - DNA, 604 bp, Homo sapiens
atctttgtaaatgaactttcccctccagttcctcctctgggaggttagactttataagaaaatagttgtatgaatcatctatatttctaaaaaatactgagtgcctccaggtgtgacacagatggtggacaataaaaggggagaaaccatttttcatkaataaggcacatagatacatgcactcataaacaccaaatcctctttacttcccggcaggacttcccacctctccaccaaggtcatcaacagtaccaatgtccccacattccacacccagtaaaaatgtctaaagggacagagaaatctaaaaaatgcactaacaaatctctgaagtcagattgcctggattcaaattccagtgccaccacttacaggttgtgtgaaattgggtaagtaaacttctgcaagccatagtttttccatctatagaattgagatcatgttaatactttcctcttgggattttgtgaaaattaaataagttaatgcctagaaagtaaccagtatggtgccagacaccaggttttatggtcaggacataattgctaacctgtaatattccttcaaacaaaaagaaagagaagaggagagaggaggagaagag

SEQ ID NO: 619337 - DNA, 604 bp, Homo sapiens
atctttgtaaatgaactttcccctccagttcctcctctgggaggttagactttataagaaaatagttgtatgaatcatctatatttctaaaaaatactgagtgcctccaggtgtgacacagatggtggacaataaaaggggagaaaccatttttcattaataaggcacatagatacatgcactcataaacaccaaatcctctttacttcccggcaggacttcccacctctccaccaaggtcatcaacagtaccaatgtccccacattccacacccagtaaaaatgtctaaagggacagagaaatctaaaaaatgcactaacaaatctctgaagtcagattgcctggattcaaattccagtgccaccacttacaggttgtgtgaaattgggtaagtaaacttctgcaagccatagtttttccatctataraattgagatcatgttaatactttcctcttgggattttgtgaaaattaaataagttaatgcctagaaagtaaccagtatggtgccagacaccaggttttatggtcaggacataattgctaacctgtaatattccttcaaacaaaaagaaagagaagaggagagaggaggagaagag

SEQ ID NO: 619338 - DNA, 428 bp, Homo sapiens
atctgctctgtggtcttagtttggataatttcgtgctgaaagaaaaatcattattgtawgtcctgtgggtagtttttgtttgggtaattattatcctttggaatttgtgacctgagaagtgttgatagttggagactattttgacttttctctgcctaggaatacttcaactaaacatcccagatagtcactagaaattaatgtccaggaacaaccgggctttagaatctcaacttttcagttttctttgtgcagacttcagctgaagaaatacagatggtcactgcaagcctggcccttggaatagagacctctgctagatggtcagttgagagtgttttttctcaaattagattatgtcatccaaggagtttgaggagtccagagtccaccaaggatctaagctttctagtttttacggtcttgtg

SEQ ID NO: 619339 - DNA, 613 bp, Homo sapiens
ttgggctgggaaaatctctacctcccacaaagtattttggagaaaggaactgtgaacagcctggaggaaaatttaatatttaactcaaacaagtggcatccactatattcacactggcagagcttttcagaattagagtcttgctttctttttgtaagcatcaggattgatttttatatgtgttctaatcttagtttagtcctttaaccatttttcccaggataatagaaatgaaagaatgttgtattttggcttgctgagttagaatgaatggaaaaaacttaaaggaagcagcagaaggaacagtgagaatgacatacattttctttttttctttttttttttttgagagtgagtcttgctctgtgacccaggctagagtgcagtagcacgatctcggctcactgcaaactctgcctcccgggttccagcgattctcctgcctcagcctcccgaatagctgggattagaggcgtccactacagcgcctggctaatttttgtattttttagtagagacagggtttcatcattttggccaggctggtctsgaactcctgacctcatgatccacttgcctcagtctcccaaaatgctgggattacaggcatgag

SEQ ID NO: 619340 - DNA, 613 bp, Homo sapiens
ttgggctgggaaaatctctacctcccacaaagtattttggagaaaggaactgtgaacagcctggaggaaaatttaatatttaactcaaacaagtggcatccactatattcacactggcagagcttttcagaattagagtcttgctttctttttgtaagcatcaggattgatttttatatgtgttctaatcttagtttagtcctttaaccatttttcccaggataatagaaatgaaagaatgttgtattttggcttgctgagttagaatgaatggaaaaaacttaaaggaagcagcagaaggaacagtgagaatgacatacattttctttttttctttttttttttttgagagtgagtcttgctctgtgacccaggctagagtgcagtagcacgatctcggctcactgcaaactctgcctcccgggttccagcgattctcctgcctcagcctcccgaatagctgggattagaggcgtccactacagcgcctggctaatttttgtattttttagtagagacagggtttcatcattttggccaggctggtctgraactcctgacctcatgatccacttgcctcagtctcccaaaatgctgggattacaggcatgag

SEQ ID NO: 619341 - DNA, 644 bp, Homo sapiens
agaagtttagatccattgacaagcagcagctggcagggcgtttccagcttatgctcctaaatagcacaaggtgggtctgcagaatgttattgccaagtaccccctgaaaataaatgcaataatcttcctcatgttcaacctttgtagcaaccatagggctggggaaaaaataaaataaaaattgcatttataggcctggaaaaaataggggcggattatctctctcataaaacccaacttctagacctgaaattgtatttcttccagactaatatttcagtttatctttgatcattataaattattctttttctgtttctttctttttaaagtcctggttgagaaagtagttggcagtcctttccattgcagcttaaatggacttatttgttgaaaaatactcaaaagtaaaaattctagagtgcttcccattacactcctctgaacccaccaagattgctgcatggagctgtctgtgtaaaattatgggcagagtcgggtaaccacctctggctccagactcaactttccatagctctcaatgccaaatacgtttgcttactcagattttcacttgaatcataatctttttttttctttttttctctgtggrtgattccaagttatgaggagatggctgggca

SEQ ID NO: 619342 - DNA, 646 bp, Homo sapiens
gatttctcaaagaactaaaaacagaactgccattcagtccagcaatcctactactgggtatctacccaaaggaaaaatcattatatcaaagatacctgtactcatatatttcttgtagatttattcacaacagcaaagatatggaatcaacytaagtatccattgatggatgactgaatacaaaaaaatggtgtgtatatacaccatgaaatattactcagccattaaaaagaatgaaattatgtgttttggagcaacatggataaaactagaggatattatcttaagtaaaataactcagaaagtcaaatattgcataccgtcacttataaatgagaaataatgtatacacatggacatagagcatagaataatagacactggagactcagaaaggtaacatggtgagaggcggtgaggaatgagaaattaactcatggatacaatatatactattcagctgatggttacactaaaagcccagactccactactatgaaatatatccatgtaacaaaatgcacttggatcccctaaatgtataaaaataacactattgagccattttaaaaaatgaaattgtcatttgtgacaacatggatgaacctggaggacattatgttaagtgaaataagccagacacaga

SEQ ID NO: 619343 - DNA, 646 bp, Homo sapiens
gatttctcaaagaactaaaaacagaactgccattcagtccagcaatcctactactgggtatctacccaaaggaaaaatcattatatcaaagatacctgtactcatatatttcttgtagatttattcacaacagcaaagatatggaatcaacctaagtatccattgatggatgactgaatacaaaaaaatggtgtgtatatacaccatgaaatattactcagccattaaaaagaatgaaattatgtgttttggagcaacatggataaaactagaggawattatcttaagtaaaataactcagaaagtcaaatattgcataccgtcacttataaatgagaaataatgtatacacatggacatagagcatagaataatagacactggagactcagaaaggtaacatggtgagaggcggtgaggaatgagaaattaactcatggatacaatatatactattcagctgatggttacactaaaagcccagactccactactatgaaatatatccatgtaacaaaatgcacttggatcccctaaatgtataaaaataacactattgagccattttaaaaaatgaaattgtcatttgtgacaacatggatgaacctggaggacattatgttaagtgaaataagccagacacaga

SEQ ID NO: 619344 - DNA, 658 bp, Homo sapiens
tatacctgccaaaaatgcacaacctgaatctaatcctggggaaatcccagaaaaactcagactttgagattttctacaaaataattggcctgtacactctttaaatatatcagaaacacaaaractgaggaaatatgtcagattaaagaaaaccaaataggtattaacacctaaatcctacacatgatcctagagcggaccctggacggagggtgggggagatagttatacagcatattattgggacagcatatatacagcatatattggtgataaaatctgaacatacactgtggattagataatagtattgtatctattaggttggtccaaaagtaactggtttttgccgttgaaagtaatgcaaaaactgcaattacttttgcaccaacctaatataatttccttgttttgattaactactgggtttatgttaaaggagagaaaagttgttgttcataggaagtacacattcaagtatttacagataaagggcacaatatctcaatttactctcaaatggacctcccccaaaatgggaatggattttacacacacacactatatttatatacgcatacagaggagagaggataataaagcaaatgggatgaaatgtaaacaattggtgaatcttggtaaagagtatatcgtaccc

SEQ ID NO: 619345 - DNA, 588 bp, Homo sapiens
gaggtgagaggattgcttgaatccgggagttcaagaacagcctgggcaacatagtgggaccccatctcttaaaaaaataataaaattttgtagtcccagctacttgggaggctgagatggaagaactgcttgagtctgggagatgaaggctgcagtgagccatgatcataccattgcactccagcctgggtgacagagtgcgaccctgtctcaaaaaaaaaaaagttaaagataaacaaaaaaaaatagaatacaagcaaaaggctgggaaaatatataagatgttaacactattcaaaaggaagctagagtgactatattaatataagataaagtagatttccaaggaaacaacattaccaaagataaagaaggtcattttacaagaggatataacaatcctaaatgtttatatacctaaaatagaactycaaattacatgaaagacagaatttaaaaagaaatagataaatccacaattataatttgaagttactgctcttctctcaatatctgatataacatgtaaacagaaagccaacaaagatgtaccaataatagtcaccccttatccacagtttcacttgc

SEQ ID NO: 619346 - DNA, 560 bp, Homo sapiens
aaaaaaactcctattttgtcatgatcaatatttctaatatactgttgaattcagtttgcattcccatgtattttctgggcattctcagaaaaccagagcagctctgacatcaggacctaaccctgcttctttatttttctaaactttgcttacatttaggcaatgtattgacagcttgatatggtttggctgtgtccctacccaaatctcatcttgaattgtagctcccaaaattaccacatgttgcaggagggacccggtggaagacaattgaaacatgggggcagtktcccctatactgttctcatggtagtgaataagtctcacaagatctgatgattttataaaaggtttcctctttcactaggctttcattgtgtcttgtctgccaccatgttaagatgtgccttccaccttctgccatgattgtgaggcctccccagccatgtataactgtgagtacattaaacctctttttatttataaattaccctgtctcaggtatgtcttcatcagtagcatggaaataaactaatacataactctaaattttagtgtgt

SEQ ID NO: 619347 - DNA, 459 bp, Homo sapiens
ccaccctcagtctctactcaccccactgccaccaccactaacaacctcatatgtctatatgtagcaactttgtgggagttgcaacctagttctcagtctggaatgcaggctcaacactccttactacaattatgatggtgtatcagagctttgtataagayattgcaccaagtagcagcgagttgttgcttttctcaaccttttcttatgggaaatgggcaatctcacccatttgtttcaagcagagaaatcgaatatacaaacagacaacggtcagaccatatatgacaatagaattctgatgcacagccactgcagcaatcatcctgagaagccacaccgccaactctttagcaattgaccccaaacagaatggacttggtcaatgactgcccacttctccaatttttgtccctactgcttgctcaggaccaggaaagccaagcctgcctccaccaa

SEQ ID NO: 619348 - DNA, 600 bp, Homo sapiens
gttatgagggttaaatgagataatgtgtttatatgtgtgtgtgtatgtatatatatacacacatatatataagtgtgtatgtgtatatatatatacacatatatataagtgtgtgtgtayatatatggaggctaactcctttgcacagcaagctgtgcaatgtatatatatatgtgtgtgtatgtatatatatacacacatatatacacacacatgcatatgtaagtgtgtatatatatacacacacacaaacttatatgtatatacacacacacacttatatatatgacatatgtatcagggtacatgcacagtacatgctcagtaaatggtaacttgagatggtaggattttgctcaactatttgtccctttcaagtatcttcaaatgtacaaataagcctggcatttagcatacaacaagcttttaacctgttctcaccaccttctctaaactgttatcaacctcttattgtgtatgagttcaccaaatatttttctgagaacctgttttgataaaggaagaagatcagaagaacattaactgtcttccggggagaaggagagccatcactagtggtagaagagggactgacagaaa

SEQ ID NO: 619349 - DNA, 240 bp, Homo sapiens
aatggaattagtggccttataaaaggggccccagagagatccctcaccccttctaccatatggatacagcaagaagakgccatctttgaaccagaaagtgggccctcaccagacatcaaacctactggtgccttgatgttggacttctcaatcttcagaaacgtgagaaataaatttctgtttataagccacccgtttactgcattttgctatagcagccagaatggactaagacaacat

SEQ ID NO: 619350 - DNA, 381 bp, Homo sapiens
cccactttgtaatgggatgatttgtcctttgtccattttttaattgggctgtttttgttgttgttgttgagttttaggagttatttatacattcttcatattatcttcttatcagatacatggtttgcaaatattttctcttgctccataggctgcctttttattctattcatygttgtgtttggcacatttttatgtagcctcatttctctattttttgcttgtattgactgtgcttttgttaacgtatctccagactttttttttttttttgcatttgagagtttctggtacaacaactcagactgcgattgaactcacctacagaacctgctgcttctgctcagataagagtgctttatgagtccttctaactcctct

SEQ ID NO: 619351 - DNA, 381 bp, Homo sapiens
cccactttgtaatgggatgatttgtcctttgtccattttttaattgggctgtttttgttgttgttgttgagttttaggagttatttatacattcttcatattatcttcttatcagatacatggtttgcaaatattttctcttgctccataggctgcctttttattctattcatcgttgtgtttggcacatttttatgtagcctcatttctctattttttgcttgtattgactgtgcttttgttaacgtatctccagactttttttttttttttgcatttgagagtttctggtacaacaactcagactgmgattgaactcacctacagaacctgctgcttctgctcagataagagtgctttatgagtccttctaactcctct

SEQ ID NO: 619352 - DNA, 506 bp, Homo sapiens
aacctaacatcacaactaaaagaactaaagaagcacaagaaaaaaacaatcccaaagctagtagaagaaaaaaaaaaatcagagctgaactgaaggagactgagaaacacaaacacacacaaaaaaaaattcaaaagattaatgaatccaggggtttgttttttgaagtaactaataaaatagacttctagttagattaataaagaagaaagaaagaatatccaaataaacacaattagaaatgacaaaggggayattaccattgaccctacagaaatacagatagccaacaaagaatattattaacacctctatgcacataaactagacaatctagaggaaattgataaatttctggacatatacgccctcccaagacagagccaggaaaaaattaaatttctgaacaggccaataaaaagccctgaagttgaatcagtaatagcctaccagccacatcctccataaaaaaagagcacaggaccagacagattcacaacccaatt

SEQ ID NO: 619353 - DNA, 587 bp, Homo sapiens
acaatgctctgcctactacacatttgcacccatgctcctaaatgaagacaaggaaaaggttgcagtcctattggaccatgagtctcatgttaaatttatgagcacaaacctcaagtggaagtggaatgccatctgtcaatcacactatccctatcccattttctctcttgcactcttccagatagcaattttgtgtcttctccttcctcaaatctccaatacctcctcctcattcctcactctcagttgaagatctcacttattattttatggagaaagcaagaatgacaagaagacttcacaagctcccaccctaacatacactcaggcattcctccttagaactctacctctcttacctactcaatgccatgcctctagaaattstctccttctcttcctgcattatatcttcctctctaatgcactgcatcttcctttcagcataaagcatactttttaaaaattactataagttctgggatacatgtgcagaacgtgcaggtttgttacataggtatacacctgccatggtggtttgctgcacccatcaacctgtcatctacattaggtatttcccctaatgt

SEQ ID NO: 619354 - DNA, 577 bp, Homo sapiens
aagtcttactggccaggtgcagtggctcactcctgtaatcccagcactttgggaggccragacgggtggatcacctgaaatcacgagtttgagactagtctgaccaatgtggagaaatccgtctctactaaaaatacaaaaattagccgggcatggtggcccatgtctgaagtcccagctactccagaggctgactcaggagaatcacttgaactggggaggcagaggttgcagtgagccaagatcatgccactgcactccatcctgggcaacagagcaagactccatctaaaaaaataaaaaacaagagaagtaagtattaccaaatgccaaagtatcagttctaagcaaaatgttctttttttcagacacttccttttctggatccttaagagaaatacaggaattgtaaataacagagttgaaaagctaataatctcttcgcatcttccctctggcttcaaatttcactcacgttctctgttcaagaaacttggcagcttggaaaccaggtactgaaattacgcgaaactatagtgttataagtgttcacacatactataagtgtgtacacata

SEQ ID NO: 619355 - DNA, 609 bp, Homo sapiens
tgaaacccctagacatgctggagccacactgcagaatcccagcagagctgaaggggtcctttttctttcccgaggtgttttcagtttctgaggttcaaatcatgaaaacaaaagagttatttcctttaacagaggctctaagagcatttttattctaacaaaaygctatgttttagtaaaagaatctggttggagattgcccctgtagtagtttcctacaatgagaaaaactggcttcaaatggcagttgtgtgtaccatgtatgtattttgatttttctgatgctacgtgtccatattagaaggacataacatagttagcttcagtttgaacacagggtcaatcttatctacatgtagaagctatctaaggcactttagtctttcttacctgcttgctggtatctgagattccctcagtagaagagagagcccttcaattcccagttagcaataaggattaacactgaaaatgcaaaaacagtggttctccacctggtctatttccacctgagtacacctgaaggatatgacacacgtaataggagcttatggtaacagtcaatctcaccaggttgagattaggagagcaaagagctttcagagagta

SEQ ID NO: 619356 - DNA, 569 bp, Homo sapiens
tttgtgatcttttaggaggcaaattatattttataattcacagcgtattattttttggattctgcttacagaatactaagataatrtgtttatttgttgcaggggaaacaggaaacagcaaaatgaggaggcagaggtgggaaccttatttatcacataaatggagctatccatctcttgtggaccccctcaagaattaacctcttctgtcatccagcttcctggctcaaaacaccactgtctgataggcagcagttagaaaccccccccacaaagtagtcacttgtgcctaagagggctttactcaggtgatggtggtgaggaaaagtacccaacatatccaagcaggaggtgtgaaagtaaaacactgctcagctttcagcccagacttctgcaatgaaggtggggactggtaggtgcttggtttgacttccaagaccccaggggaaattggcacctgtgtacacaagcccctgtctaccagagaatgttctttttagcctaggttctcagtatgactgagacagacagatttaaagattgaagacacaaaatggaagtgattgaca

SEQ ID NO: 619357 - DNA, 569 bp, Homo sapiens
tttgtgatcttttaggaggcaaattatattttataattcacagcgtattattttttggattctgcttacagaatactaagataatgtgtttatttgttgcaggggaaacaggaaacagcaaaatgaggaggcagaggtgggaaccttatttatcacataaatggagctatccatctcttgtggaccccctcaagaattaacctcttctgtcatccagcttcctggctcaaaacaccactgtytgataggcagcagttagaaaccccccccacaaagtagtcacttgtgcctaagagggctttactcaggtgatggtggtgaggaaaagtacccaacatatccaagcaggaggtgtgaaagtaaaacactgctcagctttcagcccagacttctgcaatgaaggtggggactggtaggtgcttggtttgacttccaagaccccaggggaaattggcacctgtgtacacaagcccctgtctaccagagaatgttctttttagcctaggttctcagtatgactgagacagacagatttaaagattgaagacacaaaatggaagtgattgaca

SEQ ID NO: 619358 - DNA, 569 bp, Homo sapiens
tttgtgatcttttaggaggcaaattatattttataattcacagcgtattattttttggattctgcttacagaatactaagataatgtgtttatttgttgcaggggaaacaggaaacagcaaaatgaggaggcagaggtgggaaccttatttatcacataaatggagctatccatctcttgtggaccccctcaagaattaacctcttctgtcatccagcttcctggctcaaaacaccactgtctgataggcagcagttagaaaccccccccacaaagtagtcacttgtgcctaagagggcttyactcaggtgatggtggtgaggaaaagtacccaacatatccaagcaggaggtgtgaaagtaaaacactgctcagctttcagcccagacttctgcaatgaaggtggggactggtaggtgcttggtttgacttccaagaccccaggggaaattggcacctgtgtacacaagcccctgtctaccagagaatgttctttttagcctaggttctcagtatgactgagacagacagatttaaagattgaagacacaaaatggaagtgattgaca

SEQ ID NO: 619359 - DNA, 569 bp, Homo sapiens
tttgtgatcttttaggaggcaaattatattttataattcacagcgtattattttttggattctgcttacagaatactaagataatgtgtttatttgttgcaggggaaacaggaaacagcaaaatgaggaggcagaggtgggaaccttatttatcacataaatggagctatccatctcttgtggaccccctcaagaattaacctcttctgtcatccagcttcctggctcaaaacaccactgtctgataggcagcagttagaaaccccccccacaaagtagtcacttgtgcctaagagggctttactcaggtgatggtggtgaggaaaagtacccaacatatccaagcaggaggtgtgaaagtaaaacactgctcagctttcagcccagacttctgcaatgaaggtggggactggtaggtgcttggtttgacttccaagaccccaggggaaattggcacctgtgtacacaagccccygtctaccagagaatgttctttttagcctaggttctcagtatgactgagacagacagatttaaagattgaagacacaaaatggaagtgattgaca

SEQ ID NO: 619360 - DNA, 564 bp, Homo sapiens
gcacacgccaccacacctggctatttttttttttgtagagatggggttttgccagtctcgtctcaaactcttggctcaagcaatccacccacctcggcccctcaaagtgctgaaattacaggcaagatccaccatgcctggctgacacattttaactttataatagatttgtgtatgtttttgggtagtgataaaatagactagtatctatatacattttatacattcatgacatacytaaatttttcttaattttaaaaaatatttctaggctatgcagtttatctaacagttttttcaattgcaaatctccaaaatattttccaatatattttcagaaaaaaaattgcatataaatggacccctgcagttcaaacctgtgttgttcaagggtcaaatgtgtgtgggtgtatatatatatttaattgatatttggggggccggttggggttttggatgaacagtaacacgttttcctacttaaaatagtggaaatagactcattacattttctacccaaatacccagaacatttgctatctaaaacattttcaggaacttgat

SEQ ID NO: 619361 - DNA, 485 bp, Homo sapiens
ggagtcttgctctgttgcccaggctggagttctatgscatgatcttggctgactgcagtctctgcctcccaggttcaagcgattctcatgcctcagcctcccaaatagctagaactacaggcatgtaccaccacgcctggataattttttgtatttttattagacactaggttttgccatgttgaccagtctggtctcgaactcctgacctcaggtgatacacccacctcatcctcccaaagtgaggggattacaggcatgagccatagtgcctgaccctaaatagactttaagataaaaattgttattagagttagggaaggacattcaataatgaaaaatatccattcaatcaaaagataaataataccaaacatatataaaatagacaaaaaagcccccaatacgtcaagccaagattgacaaaatttataggagaaataggcaatttaataataatgtttgtagactttcatttcccactt

SEQ ID NO: 619362 - DNA, 689 bp, Homo sapiens
  misc_feature 490, 491, 492, 493, 494, 495, 496, 497, 498, 499, 500, 501,502, 503, 504, 505, 506, 507, 508, 509, 510, 511, 512, 513,514, 515, 516, 517, 518, 519, 520, 521, 522, 523, 524, 525,526, 527, 528, 529, 530, 531, 532, 533, 534, 535, 536: n = A,T,C or G
  misc_feature 537, 538, 539, 540, 541, 542, 543, 544, 545, 546, 547, 548,549, 550, 551, 552, 553, 554, 555, 556, 557, 558, 559, 560,561, 562, 563, 564, 565, 566, 567, 568, 569, 570, 571, 572,573, 574, 575, 576, 577, 578, 579, 580, 581, 582, 583: n = A,T,C or G
  misc_feature 584, 585, 586, 587, 588, 589: n = A,T,C or G
tttcctaatgaacttgtcattctaattattttcacattgagttggttcccaatcagttcttagggcatttttcctcatataatctaaaatagctgaacaaaagcaatatattatgtgtcttaaaaccattaaagataaaagatgttttcaatctgcaatggtaaataagaaaaaggcaaaacatagtggattgaaaggtggaatactaatgtaatattgatctcggtttttttaactgtgggttaatttcatcaaaaccagaatgctttgagtaagcctaatatgcaacaaatatcacggtgtataracatatttaattcaactcagaagttgatacagtcttagacaaaataaatatgctaacatataattgtttttacatgcataactacttctcttataatagtgaataattaaaaaagaatacgtacattaagtgtgtaaataaaataaacctatgtatcaaagtaaggtatgattagttaattgnnnnnnnnnnnnnnnnnnnnnnnnnnnnnnnnnnnnnnnnnnnnnnnnnnnnnnnnnnnnnnnnnnnnnnnnnnnnnnnnnnnnnnnnnnnnnnnnnnnntcagatgagtattttaaagcataaagtaactggccatattatttaatagactagcttctccattagaatagactaagaatccaataattaactcacacta

SEQ ID NO: 619363 - DNA, 484 bp, Homo sapiens
tagcttatcacctggattataaaagaaatctgtacgcaaaactctgatgagaccccatttacctatataacaaacctgtacatgtatccctgaacctaaaataagttaagaataaaataaatgtgatgttgcatctacaaaacatttcttgctctgcataattatagaataaatataaataatgctaattatatcagacaattacatatatcatcctttagtaacagattagtctatcatctaatattatcagaagcaaacatttggaatrcctactaacaactaggctctccaaaatattttgtacatattatcactaaccaatctgaaaggcaaacattatactcatttcacaggtcacaaaaacaggctgaaaaagactaagatgatcacagggctaataagtgacagggtgagcactctgtctccccttcctatggcataatcatcttagtagacaaacagcttaatgacttaaaaagtg

SEQ ID NO: 619364 - DNA, 441 bp, Homo sapiens
cctcttctgtctaatgtattgccacctcactcttatagccatacttgtcattggatttagggcacacctggacaatccaggatgatctcctcatctcatgatttttaatttaaatctgcaaaggccctttttttgaataaggtcacrttcataggctctatggattagaacctgagcctgtctttttatgaactatcattcagttcactacaatttactcccagaattttgttaaattctccagcaatcttgtgatggagacatcattatcctctgtttacaggtgaagaaatgaaaatttagaaagaagtactcggccaaagccttctggtgcatgccagagctaagattcaccccaatgctccctgatacccatatccagtgctgacatggtctaccctgtacctggttggttatatggcactgttcccaccaaaacaa

SEQ ID NO: 619365 - DNA, 537 bp, Homo sapiens
gtggttttaggcttattttttccttgaaaaaatgtacttgacagtcagtttactgtaatattgcccaacaggaacaacggaggcattggactcatttctctacaaagagaactctttacagttcagaattttgcttataatgacagacctaaattaataccagtaattacattataacttaacaggaggaagattatagatgctaaaatgcagmataacaaacaaaattaaaacagacaaaaaggggttgagaagagaaacttccaaagggtaaaaaagacaccacaactaaaagaatttggattaagagaagcccctggaaaaaagcattatgaaagttgagagaaaaaaaaatcatgcaaatgtgatgtatattaaaatgttaagggataggccggcgcggtggctcacgcctgtaatcccagcactttgggaggccgaggagggcggatcatgagatcacgagatagagaccacggtgaaaccacgtctctactaaaaatacaaaaaattagccgggcgtggtggcaggcgcct

SEQ ID NO: 619366 - DNA, 544 bp, Homo sapiens
tgcaactacattccagcctgggtgacagtgagacttggtctcaaaaaaaaaaaaaaaaagaaaaaaaaattaggactttccacttcttcrtagagccaaatctacatgagataaggaggccagtactccttagaaaattcagtaacagaaggcaggctgaggttgtatcatcatcactgagagttcctgtacctcataaacaatgtcaacacattctgactttcatttgggatgtcccttgaaagattacccttatcacttcccttcctgaataaatcctgaatccatttctacgtattgttccccatccccacattaaaaacaacaaaccaacaaacataatattaaaagaatccattcctaagcctaacaaaactcttcttaaatgtaccctggagaatggcatgatgaacacttaaaaaaacccaaaaaccaaaaaaacaaaaaatcaaccaaacaacaacaacaaaaaacccaaaacaaaactacttcccaaaaagtgtttgggaatattcttcaataatacatcaatgtaggctgggtg

SEQ ID NO: 619367 - DNA, 610 bp, Homo sapiens
cacaataaaaaagataaaggggatatcgccaccaatcccacagaaatacaaactaccattagaatactataaacacctctacacaaataaactagaaaatctagaagaaatggataaattcctggacacatacaccctcccaagactaaaccaggaagatgttgaatctctgaatagacaaataactggttctgaaattgaggcaattatgaatagcctaccaacmaaaaaaattccaggaccagatggattcacagccgaattctaccagaagtacaaagaggagctggtaccattccttctgaaactattccaatcaatagaaaaagagggaatcctccctaactcattttatgaggccagcatcatcctgataccaaagcctggcagagacacaaaaaagaaaaaaaagaaaaaaaagaattttaggccaatatccctgatgaagatcaatgcgaaaatcctcagtaaaatactggcacaccgattccagcatcacatcaaaaagcttatccaccgtgatcaagtgggcttcatccctgggatgcaaggctggtacaacatatgcaaatcaataaacgtaatccatcacataaacagaaccaacgac

SEQ ID NO: 619368 - DNA, 610 bp, Homo sapiens
cacaataaaaaagataaaggggatatcgccaccaatcccacagaaatacaaactaccattagaatactataaacacctctacacaaataaactagaaaatctagaagaaatggataaattcctggacacatacaccctcccaagactaaaccaggaagatgttgaatctctgaatagacaaataactggttctgaaattgaggcaattatgaatagcctaccaacaaaaaaaaktccaggaccagatggattcacagccgaattctaccagaagtacaaagaggagctggtaccattccttctgaaactattccaatcaatagaaaaagagggaatcctccctaactcattttatgaggccagcatcatcctgataccaaagcctggcagagacacaaaaaagaaaaaaaagaaaaaaaagaattttaggccaatatccctgatgaagatcaatgcgaaaatcctcagtaaaatactggcacaccgattccagcatcacatcaaaaagcttatccaccgtgatcaagtgggcttcatccctgggatgcaaggctggtacaacatatgcaaatcaataaacgtaatccatcacataaacagaaccaacgac

SEQ ID NO: 619369 - DNA, 579 bp, Homo sapiens
gccattggtctgtcttccttttaaaaatgtctactcatataccttacccacttttacttggaattgtttttgttgttgagttccttgtatattgtggatattagttccctgtcagatcaatagtttgtgaatattttcttccattctcaggttggtttttttactctgttgattatttcttttgctgcgcagaagcttttcagtttaataaaatctcatttgtctattttcrttttttgcatatgcttttgaggtcttagtcctaaattctttgcctaggccaatgtccagaaaagtttttcctaggattttttctgatatttttcatagttggagtttttgttttgttttgctttttcttgagatagtgtctctctctgttacccaggctggagtgcagtgggggtgatcgtaactcactgcaactttgaattcctgggctcaagtggccctttacctcagcctcccaagtaactaggactacaggcatgcactaacacaccttgctagctttttttttttttttagaaacaggtctatgtcacccaggctggtctcaaactcctggcctcaagtgat

SEQ ID NO: 619370 - DNA, 579 bp, Homo sapiens
gccattggtctgtcttccttttaaaaatgtctactcatataccttacccacttttacttggaattgtttttgttgttgagttccttgtatattgtggatattagttccctgtcagatcaatagtttgtgaatattttcttccattctcaggttggtttttttactctgttgattatttcttttgctgcgcagaagcttttcagtttaataaaatctcatttgtctattttcattttttgcatatgcttttgaggtcttagtcctaaattctttgcctaggccaatgtccagaaaagtttttcctaggattttttctgatatttttcatagttggagtttttgttttgttttgctttttcttgagatagtgtctctctctgttacccaggctggagtgcagtgggggtgatcgtaactcactgcaactttgaattcctgggctcaagtggccctttacctcagcctcccaagtaactaggactacaggcatgcactaacacaccttgctagctttttttttttttttagaaacaggtctatgtcrcccaggctggtctcaaactcctggcctcaagtgat

SEQ ID NO: 619371 - DNA, 440 bp, Homo sapiens
ttctcatgtctctaagccaacaggctacaaagrgatttaaagtgttggctggagtgattgacccaaacctccaaaaggaaattggagttaagaaagagtatgtctggaatataggagatcccttagggaatctcttagtattactatgccctgtgattaaggtgaaaggaaaattacaacaacccaatccaggcaagactacaaatggtccaaattcttcaggaaaggtttgggccaccctaccaggtaaagaaccatggccagctgaggtgcttgctgaaggcgaaggaaatacagaatgggttgcagaagatagctgtaaatactacctatgaccacatgaccagttacagaaatgagaactgtaattgtcatgagtattttctccctcttttgttaagaatacatttttatgtattgcatatatacatatattaagc

SEQ ID NO: 619372 - DNA, 524 bp, Homo sapiens
tgtattatcaatactaaagctaattttaataaaattttaggtagatctattcaatcccaattatctttgaccacacaaaataatatgatttctacaaactttttataacccttaataattttcccattttctttcccagctttttatatctatttagttttatctataattccttttctgtcaatttataactttcaaaacctctaaactagccaaatttctttccctttaacaaaaaaacacattttcacttctttataagataacagacaaattaagcaagtgtcaaaaatatcagaaaacaacagttttatgaccttacgggatgtagcagacagtataaaccagtctgacaagtagaccccggggaaaaaaaaaatgtctacattaaattttgaatatatgtctattttattttaccaataatcttcaaaccttaatgattwatcaaagattactaaaatcacataaacttagcatttagggtttgtaacttaaattatgagtgccatttatttacgtca

SEQ ID NO: 619373 - DNA, 573 bp, Homo sapiens
agggcaggttttttccatatgtgataaaaactatccacagatccaagaagctcaataaatcccaggtatgaaaaataaacagaaacccacaccaaggcacataatactgaaaaaaaaagactgacaacrgatgtcttgttagaaacaatatgagaaagaatagtagcagaatatattttaaaagctgaaagaaaaatctgtcaagacagaattctatacccagtgaaagtatctgtcaaactgaaggcaaaacaaagatttttttcagacacaaataagctgaaataatttatcacaagcagacctgcactacaggagaggttagtgatagactttcagtaagaaagaaagtgggcctgtgaaataaaaataattatttacttccacaatacagtggtgggacaggcataggatatatatttccaacccaaaaggggaaaagaggcaggaaaaaatgggtaactggtcccaagtaagaccaaaactcaccaagaaaaacaatctttcacttcctgtgccaccttcttgaggtggggacaatgtctggattcaaacttcagtgtgatggatgcc

SEQ ID NO: 619374 - DNA, 501 bp, Homo sapiens
acggcaccactaattcaaaattatrtttccgacttaacttgaggcattaactcacaaaagacttacacccaaatcaagtcgattaatccaagtgtcacatatgggcattcaaatattaaagaataaattcctgaaaactcaggacacttctaaattaagactactaaatcagtctcttacctcctgaggctagaatggtatgtagatggaagtaacttcccctaatgaaagaaatcaatctggcaagagaaccagagaagttaaagtaatttgaaggtgtctacatttcctgcccacccagccttattttctaaatttttttactatttagagagccactacagttgcttcaggcatgtcaggcccttccacacagcacatcttcccttgatgccaaaaccactggaaatggttttcaataggattgctgatttgccaaactacacttttgtcctcttcgcctttgccccttgagtggccctttaagctattttagctgaa

SEQ ID NO: 619375 - DNA, 492 bp, Homo sapiens
gtgggtatgcatataaacctagccagctaattgtcatttgtggatttaactcctcatccacccattcacrcttgtactttttttattccatcctcaccaacacaggcactatttacagtacatgttgtccctaaggaagagacccagttctgtcctcttctcttattctgttccacaggcagtttctatacacatgtgtgtgcgtgcatgcatgcaggtgtgattgtaagtcactttgtaaaatgtcaagtgtaatctagccactcattaataacacctagctctgcatttctgggtaagtaactaattgccgcttttcttgtgtcatcttctcctgcctgtgttgtcactttggtacttcaagggatcaaaatgtggaaactttcagttctttaaaaatcttatcttcaaaggaaaaattctgcgactgacttgaattgacataattggctccatatcattatttttccctacacacgttttaaatttaaa

SEQ ID NO: 619376 - DNA, 581 bp, Homo sapiens
ttgaaacaggtaggctagattagaagaagagacttcaaaggagtcttatgaaaatgttattagcagttaaagaaatgagatgttggattataggtcagagaaatgggaatgatcaatttaggattcctagattgaataattaagcaataaaaatgggagaaaaacaatcctaaaggtggacaaagccaacaaacaacaaacactctcctttgtggctatttaatgtttcataatactcaatatctcaatatctgttcatttctagaataaaaagggaggaggagatccaaattgattaaggtgattttccatagtcaaaacaatttttgaaaatctaaaaatttgaaarctcctcatttgtgaaatctcggtgacaggctgggtagattgcatcattgcattactttatgtgatcaccacaacaatgctataagatagttaataggaagtttttttttctttttctttttttttttttttgagacggagttttgctcttgttgcccaggctggagtgcaatggcgctatttctgtcaccgcaacctccgcctcccgggaacaagcgattctcctgcctcag

SEQ ID NO: 619377 - DNA, 539 bp, Homo sapiens
actataggatttatctaagtctcatttgttcactaagtaaaaaaaagttctgagaataatttctaagtagcgccatcttaaaaacaaagagaaaagcctgattaagtggaaggtcagtggcacacactgtcttagactgaaaaacaaggatttaaaataaggccggagctgtcttccattcctatcctccagtaacagacgtgattcctcagtccacaaaaccctttcccctgcctgcctgcctgacttctgttcatcaaccaagaggcagctcaagtgccacttccttgagaagccttcccccttgatccaccaagaaaggaaaagatcgaactaatytgaagcacaatgatccttcacttcttttggttacagccctcttttgagaatctgatgaaggtagactccctgcccagaaaagtgtgtgctctcaacaaaacttaaatataatttcagcagactctacaacttctaaggtcacaggttaggagttctcgctatagagaaacgaatgaatacctcataggtagtcagtagca

SEQ ID NO: 619378 - DNA, 581 bp, Homo sapiens
tgagttcgccaacatggaaatttaacttttgtgacatattgatgacagtggcggcctatctagagcagctgctgtcatgatgccacttgcaatgggggtggcacaccaggtctgccagctccatgaagctgggggaaccaggaacaggtggaggccctgcctcccttttgagttggcagggcaggagcttcctgctccccaggtacagctgtggctgcccagctgcagctgcagacctgggcatccctgtgctctttggggctaaaagcaggcaggagccctaccctctcaggcacagctgcagctgcctgagtcatgtccaccaactcggcctccctgtgctcttgggttcctggagcaggcaggagccccaccctcctgggtgcagctatagctgctcaaaccacagctgcagacctgggcatctctgcactcttgggggccctgtaagaccycccaccccattcctgcaggctaagaagtgtctcctcccattgcctggcctctttctgctcccagcacccactccattcccagagcaaggttggagctgaggctgggtgctattgcagcctggccag

SEQ ID NO: 619379 - DNA, 565 bp, Homo sapiens
tttgcaaagtatgtatttgataagggattaatatccaaaatatataaggaactgaaataatgcaatagaaacaaataactggattttttaaatgggccaaagacctcaatagccatttctcaaagaagacatataaatggccaacaggtatatgaaaaaaatgctcaacatcactaatcataagggaaatacatatcaaaactacaaggaaatatcacctcctgttagaattgctattatcaaaaaaaaaaaagataagtgttggcaaggatatgaagtaaagggaacccttacacaccrtaagtaggaatataaattagtacagccattatggaaaacagtatggaagtgcctcaaaaaattataaactgaactactgtatgacaacatatgattgagcaatcccactactgggtctatatccaaagaaaataaaatcagtatgctgaagatatctgttctcccttgttcatcgcagcattattcacaatagctaagatatggaagctaagcgttcatcagtggctaaataaagaaaatatatgtatacacaatggaatactta

SEQ ID NO: 619380 - DNA, 565 bp, Homo sapiens
tttgcaaagtatgtatttgataagggattaatatccaaaatatataaggaactgaaataatgcaatagaaacaaataactggattttttaaatgggccaaagacctcaatagccatttctcaaagaagacatataaatggccaacaggtatatgaaaaaaatgctcaacatcactaatcataagggaaatacatatcaaaactacaaggaaatatcacctcctgttagaattgctattatcaaaaaaaaaaaagataagtgttggcaaggatatgaagtaaagggaacccttacacaccgtaagtaggaatataaattagtacagccattatggaaaacagtatggaagtgcctcaaaaaattayaaactgaactactgtatgacaacatatgattgagcaatcccactactgggtctatatccaaagaaaataaaatcagtatgctgaagatatctgttctcccttgttcatcgcagcattattcacaatagctaagatatggaagctaagcgttcatcagtggctaaataaagaaaatatatgtatacacaatggaatactta

SEQ ID NO: 619381 - DNA, 565 bp, Homo sapiens
tttgcaaagtatgtatttgataagggattaatatccaaaatatataaggaactgaaataatgcaatagaaacaaataactggattttttaaatgggccaaagacctcaatagccatttctcaaagaagacatataaatggccaacaggtatatgaaaaaaatgctcaacatcactaatcataagggaaatacatatcaaaactacaaggaaatatcacctcctgttagaattgctattatcaaaaaaaaaaaagataagtgttggcaaggatatgaagtaaagggaacccttacacaccgtaagtaggaatataaattagtacagccattatggaaaacagtatggaagtgcctcaaaaaattataaactgaactactgtatgacaacatatgattgagcaatcccactactgggtctatatccaaagaaaataaaatcagtatgctgaagatatctgttctcccttgttcatygcagcattattcacaatagctaagatatggaagctaagcgttcatcagtggctaaataaagaaaatatatgtatacacaatggaatactta

SEQ ID NO: 619382 - DNA, 572 bp, Homo sapiens
cggaagtcccagctacttgggaggatgaggcagaagaatcgcttgaacccgggaggcggaggttgcggtgagccgagatcgcgccattgcactccagcctggcgactcagcgatactccgtccccctctccccgccccaagaaaaatctgttcagtggggagcgacaaggaaggagctttcagcccgactggggtcgcagggaagaattcaagatggcgtgtttaggagctctagctccttgacaaattagtaaaatgttagtcttaggagaagaacgaaaaggctctcctaggctaagaaacagcatacacagtgagaaacctcagaagaaataaaattcaaggaagatagcaacaacgaaaacatcagaaggaacactaaaggtataaaaagggcaaagacagccctagggttgggagggatccaggttttttatgaaaattagtggaatccctaagrtacttacctttgtattataagtatttgcatgtctccttctagaaacgtttatcactctgtgttacacagaccagcagtgttggcgtcaactgggagcctgttagaaatgcag

SEQ ID NO: 619383 - DNA, 642 bp, Homo sapiens
tttagccataaattttctcatctgtaaaatgagaggagtaggcatgtgatcattaaatcctgggttacggtaggaggcatcaatatgaaatgtttagcttaatatagatacagatgggtaaatatagaaatacttaaaaatgcatgtggattcatgtttaatacattagtatacacacatatatttccaagttctgtcctccgaaggcctagaagcaatgacaagcagaagcaaggagcacacccagcatccagttttttgtttctaatactgttctccaacaaagggaaccagagcccttgagaaaaatgcctaattctaggactggggcaggggatatacaagatgagtctgaaacatcttatagtgccagaaaataaacaagtgctttaaaaagacacaaaaaactgatggtatatcaaagtgacataggagccaactaaaagagmtcccaatagctaaagctagaataattcaaaaaataagtaattcagcattggatttaacccaaattataaaataagatccatgagttcatactgatacaagtaaatgattgaagaaacaaataattgggagataattctcatattgaaaaattccaaaaaatttatgtactctaccctcgagaagatggaacat

SEQ ID NO: 619384 - DNA, 436 bp, Homo sapiens
tatgaattgatttggggatgacaaaaatccgattttgaatcccagcatatagcttaatattcaaccttctctatwtaattactctatatcagtttcaaatgggaaatataacagaatcttcctcataaggatttatagaaaaaaaatgagctgatgtatgtacagtctttaagatactagtataaatatatatatatatatatatatacaaacacatatgtaatataaatgtggttgtatgttaacttaattatccattaatgtgtagttttacaaacattattattacttctttttcttatgattttacaaccatgacatttcaacttttgatatgggcaactaacagtgacccatctgtcagtcagaagtcctcgtgggtccctctgtctgtctgctaaaagtcctcatgggtccgtctgtctgtgttctaaat

SEQ ID NO: 619385 - DNA, 613 bp, Homo sapiens
gccaattacctaatagttctggctcataatgacatatgcttctttaataagaagcaatatrcagtgaaactgcattgtttgatattaagaactaatcgaaaactcttaagcttttaaagaaacaacagaaagaatacgtttgtaaattgggtcattacaatgcctctttaaagtgggcatgtatggctacggactagacaaagacaaaaaatacaaactttaggccaaaattagcacttaaataaatgttttaagagtggtggttatgtgtttgatatttactggtatcataatcctgttgcctaaaccaaatttaatttcacataaacattgtgctttaagtactttaagtgagtgtctttaaagtttgactatagcttggataaaaattgaagagaaaccttaatggaggacccctatttatttattaatctgtttactattcaaagttagttgatttataaaggccatgtagaaatttcaaaaataccacagtgatctaggaataaagtagaaattggaaattggaaatttctaactctttggccttttcttctcaggtggaactttcccagaagacttttcaatactatttacagtaaaaccaaaaaaa

SEQ ID NO: 619386 - DNA, 613 bp, Homo sapiens
gccaattacctaatagttctggctcataatgacatatgcttctttaataagaagcaatatacagtgaaactgcattgtttgatattaagaactaatcraaaactcttaagcttttaaagaaacaacagaaagaatacgtttgtaaattgggtcattacaatgcctctttaaagtgggcatgtatggctacggactagacaaagacaaaaaatacaaactttaggccaaaattagcacttaaataaatgttttaagagtggtggttatgtgtttgatatttactggtatcataatcctgttgcctaaaccaaatttaatttcacataaacattgtgctttaagtactttaagtgagtgtctttaaagtttgactatagcttggataaaaattgaagagaaaccttaatggaggacccctatttatttattaatctgtttactattcaaagttagttgatttataaaggccatgtagaaatttcaaaaataccacagtgatctaggaataaagtagaaattggaaattggaaatttctaactctttggccttttcttctcaggtggaactttcccagaagacttttcaatactatttacagtaaaaccaaaaaaa

SEQ ID NO: 619387 - DNA, 581 bp, Homo sapiens
ttgttattccattttatgcagtattgacatacatacatagtatagtcaatataagagccaaattctacacagtaaagcattttttcttatttgatggacactatgcatgttaattcaggtgttctgagaaatgacagctgtgtagaaatggtaacggcattttgtactttgttttgttggtttaagagagccatggtgatggctacctagaaagtagtattgcccttaatcaaagataaattcagaatcatgtattttatgtagagttgacttttgaccaacataagagtaagaggagccaactccctgtgcattgaaaatccatgtataacttttggctccccyaagacttcattactaatgcctaccattcatgggaagccttattgacaaaataaacagttgattaatacatattttgtatgttatatatattttatgctgtattcttacaatagagaacagaaaatgttcttaagaaacataaggatgagaaaatatatttagtattcattaaatgtaagtgaatcatcataaagattttccttatcatcatcatcatcttcatgttgaggaggagg

SEQ ID NO: 619388 - DNA, 602 bp, Homo sapiens
gtattttaattattttgaccaaaaaaaaagccacataaaaattgttaycaaacactgtgaagcaacactgcgcaagagtttgagacacaaagagaagaggaatatatccgttgaaactgaagaaggaactgagatgacagaaaaataattattcaaattggagtctgtccaggataccgaaactagaacaagagccatgtggaactcatcacataaagtttggagaaattgtatacagaggctttgtatggaataacagagtcatatacacatgtataagtgctatggaacgctaacacacttgtgtaattccatacaaggaggaggagattctggagtctattttgactcagaaactaaatgatagactattatagtcccaatcactattcagtaactaagagccatctgatagtgattcccactcataaaacaaagccactagatattttttgagagactgaattttcttactgaatatcaagtcctgccccaagctgatctcttcttgagtaaccaagtataccatataaggggagggaaaagaaaaggagaactaaaataaaatgttctcaaaaaagcagcgttttttttctattttg

SEQ ID NO: 619389 - DNA, 627 bp, Homo sapiens
tatgattttatatagtacctgggatgaagtaaatacataaaaacgattagtcatttctgtataagacacatccaataattatagtgttagctactttttaatgaaatgtaatttaattgtactccttgtgaaaatatcttggctatacatcactgctgtttcaagaygtttttatcttgttcgtagtaaaggcattagtgttttatttgttttgagaattgtaatttaattatatctacacttctttcttagttaaatgctgtttaccctcaagatttatattctcttcatatctgattggaaaagatatccaattccccctaataacaaagccatgctttatcttttagtggcagtaggtaataataaagctgtttctttattttttttccttcattgttcatggtcagcagtaaaaagagaagccaaactactcattaagctgtatatttgatagactttataaagtaatcttcaatagcaaataagaaagaaacaaaactgagcaataaataaagctacaaattgaaatgaattgcacattgcctggaaaattataaagacacaaaataagaaaattctgtttgtgaagcatgccttgcttgcttttcttttttgtttcataga

SEQ ID NO: 619390 - DNA, 627 bp, Homo sapiens
tatgattttatatagtacctgggatgaagtaaatacataaaaacgattagtcatttctgtataagacacatccaataattatagtgttagctactttttaatgaaatgtaatttaattgtactccttgtgaaaatatcttggctatacatcactgctgtttcaagacgtttttatcttgttcgtagtaaaggcattagtgttttatttgttttgagaattgtaatttaattatatctacacttctttcttagttaaatgctgtttaccctcaagatttatattctcttcatatctgattggaaaagatatccaattccccctaataacaaagccatgctttatcttttagtggcagtaggtaataataaagctgtttctttattttttttcctkcattgttcatggtcagcagtaaaaagagaagccaaactactcattaagctgtatatttgatagactttataaagtaatcttcaatagcaaataagaaagaaacaaaactgagcaataaataaagctacaaattgaaatgaattgcacattgcctggaaaattataaagacacaaaataagaaaattctgtttgtgaagcatgccttgcttgcttttcttttttgtttcataga

SEQ ID NO: 619391 - DNA, 178 bp, Homo sapiens
gtacaagatgtgattacgaagataagagtggtgacctataaaaattattcttcacacaaataygtcacgaatatattcacatgctccttccctactctcattttatgcaataattctatgaggaagacaagtgatgttacattaaattagcttttacaaataatccattaaaagaata

SEQ ID NO: 619392 - DNA, 566 bp, Homo sapiens
agtgtgtaagcatttccttttctccacaatctcaccaacatctrttgttttttgactttttttataacagccattctgactggtatgaaatggtatctcattgtagttgtgatttgcatttctctaatgattagtaatatcaagcgttttttcatatgcttgttgaccacgtgtaagtcttcttttgagaagcgtttgttcatgtcctttgcccattttttaatgggattgattgttatttgtttgttgatttaagttccttatagagtctcggtgttagaccttttcagctgcatagtttgcaaatattttctccaattctgtaggttttctgtttactctgttgatagtttcttttgctgtgcagaagctccttagtttaattgggtcccacttgactatttttgtttttgtttgctcttgaagtcttcaccatgaaatctttgccaaggcctatgcctatgtccagaatggcatttcctaggtttcctcctagggttttaatagttttaggctatatgtttaagtctttaacccatgttgagttagtttttgtatatggtgaa

SEQ ID NO: 619393 - DNA, 582 bp, Homo sapiens
gtatatttaattacttctagtaactccttattgcatttagaataaagttcaaattccatgatctggccactgtttccatcagcctcattctcatttgtcatgcctgagttacactgaccttctttctttttctggaacatgttaagctcattgtcacctcagggccttcatatttctttctgtctggaatggtacatgctactcccccagatctttctgtgatctttctcatcattcacatctcagctccttagagacttatctgatcatcataactagagtagcctcgccttgtatctgatcttctatttcattttgctgttttatatatttttatagtactgttgcaggtggatgcccagggaaccagagagtgagtagtggttttgcatggaagaagttattagaggtactcttgatcaacacctgaagaagggaaggaaaataagaatgctgggaaaagggagaarttaggctataactgcagtctcaacaaagacctcagccagccccacagggagttctgaagctagaatggctttttagaatataccaagtttcaaaacgaggagacaagtcttt

SEQ ID NO: 619394 - DNA, 617 bp, Homo sapiens
attagaattggcaaaagggagaatggaactcacatgaactcagtatcctttattttagtttcatttagtggttaaagtcatacatttgttttattttatgtacaatttttacatctttttacaaaggctttaaaaggtatctatattaagtrcccacaaacttttcctctgaaacatcatttaaatcactctggctgattctgctctcaaccagataaggtattaaggaaagacaagaacaacaacaataacaaaatggtatgaaactttatccaaccatggcttaaaaggacttattggttaatttggatttgggttgatggtcaggatggccttgaaattcatattctaaatttaaataggaatttcttcaattttccattcaagaagtgattctctttcttttgttccactaggctgtacagattgtattctctgtttctgaggctgtcatccgttagcaggatttacagttgctgacaacttgctttaataattcacaaggaatagaatctattttgtgctctctgttttctcagtcagttcagtgatgcagacagattaaaaacatgctttttgtcagtgaaataaattgagagggcacagagacaccctag

SEQ ID NO: 619395 - DNA, 575 bp, Homo sapiens
ccagtgagatcagaaaatgacatttggtgcagagcagtgtccctgatgacacaacaagtccaccaggtacttagaacacttccatgsagaaaaaaaacgaagaagaggagaattttgaactgaatatttacctcaaagagactgagctttaaaacagaagcatgtgtgtgaaacgccactaagcaaaagagctcatattctaagctaggttcaattatacagaactaaaattaaaaataacttcaattttctaatattagagtttatgattgtgttgaaatatcatatccactaaatcatcaggctttggatacctcaaattttagttcttaattaatctgaaattctctattatctgaaatagtttccaagataagaaagaacagagatatagaccaatggaacagaacagagccctcagaaataatgccgcatatctacaactatctgatctttgacaaacctggcaaaaacaagaaatgaggaaaggattccctatttaataaatggtgctgggaaaactgcctagccatatgtagaaagctgaaactggatcccatccttacaccttatac

SEQ ID NO: 619396 - DNA, 606 bp, Homo sapiens
aattagcacatacttagtggcttaaaataacacaaatttattctgtcatagatgtagggattacaagtctgatatcaagttgttggcatggccatgctcccgccaaggtctctggaaaaaaattcccctttgcctcttcctacttctggtggttaccagcaatttttggcattccttggcttgtagctgtgtcacttcaatttatgcttgtgtcttcacatggctgtcttctctctgtgtgtgtctgtgtctttttctctgaatccgcctctcctttcacttataaaaatcctggtcattgaatttagggtctaccctgatgcagtatgacctcatctttatttgattatttctacaacaccctataccaagtaataccaagtaagatcacattctaatgttcagggtatacacgaattttggggggacaytattcaattttggggggacactattcagcccagcacagatggtataacatggtgccaagggaagcgtactcagaagttcaactgtctgggactttaatcccgatctgcaacttgctcactgtgtgacccagaaaatctcgtaacttctctaaatctcagttttctcttctgtaag

SEQ ID NO: 619397 - DNA, 456 bp, Homo sapiens
cagaattctgaaattctaaatcattgtattttttgtttggttttgagatggagtctctctcrctccatcaccaggctggagtgcagtggcgcaatctccactcaccgcaacctccgactccctggttcaatcaactctcctgcctcagcctcctgagtagctggaattacgggcatgcaccactactcccagctaatgctagtttttgtatgtttagtagagacgggttttagcatgttggccaggatggtctcgatctcctgacctcgcaatcctcccaccttggcctcccaaagtgctgaaattacaggcgtgagccaccgtgctcagcctaaataattgtcttttaaagtattataaaagtcgtgaagattttcaggttccaaaatttgactcccaaactcagagactaagcttatttttgtattgcctgcactctgttaaaagaatgcttct

SEQ ID NO: 619398 - DNA, 410 bp, Homo sapiens
gcagatagaagtattttgtgaattaagtgtagtgtccctaattattacaagctcctgggtctcccrattataaagcctgggggagttccttacttgctactggatttctagtctctgaaagtggtacctggaggccagggcctagagtttctgaaagtgggacagtggtcccaatgtgccaggaccacagtgggtaggaccctgtacctgtgtattagtttattttcacactgctataaagaatacctgagactgggtaattgatgcaggaaagaggtttaattgactcatgatttcacatgactgggaagcctcaggaaactacagttgtggagaaggcaaaggggaagcaagcaccttcttcacagggtggcaggagagatagattgtgcaggggaaactgccacttt

SEQ ID NO: 619399 - DNA, 552 bp, Homo sapiens
gagatgttggcctccttgcccagtattgtacttgatggatctcagaaagcacaaagtcagaagaaaacttttttttttctggagatggggtcttgctctgttgcccaggctggagtgcagtggtgcaatcttggctcactgcaacctccgcctcccaggttcaagcaattatcctgcctcagcctccctagtagctgggattataggtgtgcacctccacacccggctatttttttttctttccttttttttttttttttttgatatttttagtagagatgggatttcacagtgttggccaggctggtcttgaactcctgacctcaagtgatctgcccacctcagcctcccaaagtgctaggaatacaggcatgaaccaccgtgcccagcctgaaaacatactttgaatgagttcggcataatgggaasaaggcctcccaacttgtcgagagagggttctctctcacacaagtggtggtgtctctttggccttgtttgtacctgaacactatttgtagtgaagcttcttccagtgcctctgcctggaaggtg

SEQ ID NO: 619400 - DNA, 622 bp, Homo sapiens
tgcctgcttcccctttgccttccaccataatggtaagttccctgaggtcttcccagaagcagaagccactttgcttcctgtacagcctgctgaaccataagccaattaaacttcttttctttatcaattacccagtctcaggtattctttatagcagcgcaaaaacagattaatacagccacctgacttcaattggtagggagaggtaagggatggcctccggagtctgagaaagataacttaggtaaagcctggaacattagcagaacatgagaaagctcatggcacactcaagacagacagtgtgggtagagcctactgcccaagggagagaataggaaaaagtgaaggtgaataggtagactggagcctggccatataatactttataaggtgatattcctcagcccttgaatcacctgggaacttttaaaaactattgatggcctgatcttaccaagtgaaattaattcactttgaatcttaaggggagagacctgagcatgcacagatttttaaagcttcccaagtgattcagatgtgtagctagcactgggaatacctgctgtagggtttttaccarttggttcaacttccctctatcattgtatctctggtttgc

SEQ ID NO: 619401 - DNA, 495 bp, Homo sapiens
cactaaaattcctttttacttttataggatggaaatattagaaacacaataaatgaaaatgtgacaatttctatactgtttatatttccttttctcccccttttacttttcccttggcttttaaaataaaattctccttgaaaatgtgagtctgtctcatctacactgaggggctataaggaaggggatgattatccaacatgggagtaaagtattgcaggggatatgagtattacagggggcctgtagtgatggtrggaacatcctggaatgggcacatgaggccttgaggcacgctagtgtgctgagcacagcctgtcctaccgtataccacagccccaggggacaagagtggtcaagaaaccctgcagaaaccacagctaggcctgaacagctgcaaagtctcccatttttatcctaaaattttatgtgaattgtagattgtactccataataccacaagccacaacatctaaaatgcattattgcaagaca

SEQ ID NO: 619402 - DNA, 399 bp, Homo sapiens
tccaggtagcaatcttagcgtccctgtgaccccgataggagaatctgtcagggcagraccaagatggccgctcacaagtctcgcgagatgaaaattttgtactcttccttcaactttccttgggagatttttaaaaaaaattatcgcgagaagagtcaagtaacgctgagagcctatcgcatgagggcgacagccggaaagcaggatggagccatagaagcaattctcgcgagaagtagagttgcggttccctcgggagaggggcggaggctcagaggtgcaccacgtggggtttgctgccggagctgagtctccggccggcgtccagtttgagtctaggttggagttggaaccgtggagatgcgaaaggaaaacccaccccccctagtgcccccggcg

SEQ ID NO: 619403 - DNA, 399 bp, Homo sapiens
tccaggtagcaatcttagcgtccctgtgaccccgataggagaatctgtcagggcagaaccaagatggccgctcacaagtctcgcgagatgaaaattttgtactcttccttcaactttccttgggagatttttaaaaaaaattatcgcgagaagagtcaagtaacgctgagagcctatcgcatgagggcgacagccggaaagcaggatggagccatagaagcaattctcgcgagaagtagagttgcggttccctcgggagaggggcggaggctcagaggtgcaccacgtggggtttgctgccggagckgagtctccggccggcgtccagtttgagtctaggttggagttggaaccgtggagatgcgaaaggaaaacccaccccccctagtgcccccggcg

SEQ ID NO: 619404 - DNA, 563 bp, Homo sapiens
atatatagtatatatattatatataatatatagtatgatgcactatatatgtaatatatagcatatatagtatgtatcttaaaaaaccattttctccatcttatattttaaaaacccttcatattgtattcagctattctacggtgggagaggggcaaaattgaaacaggagtaaccttgtaatttcattaatgggtaggatgtttttcctcattcttgccaattacaaacaataatgttcgcccccctcctgacatrggatgtaaaatgccctttgctctcacttaaagacaaaattcagcttttatcaaatcactaaattaacataggaagagttattaaattaaacctgggcggtgcaattaaaacaaactttcacatcatttctctagaggtaaagaaaaaggttacatatgcaaccagagcgttctgctaatccataaagaagtccacagggcccaagtgagttgcagagccatctccaagacagagtgactgctgtgtaaagcagccaaggcccgctgaaagcataagactcatttcctgtatttcaagacaaagca

SEQ ID NO: 619405 - DNA, 563 bp, Homo sapiens
atatatagtatatatattatatataatatatagtatgatgcactatatatgtaatatatagcatatatagtatgtatcttaaaaaaccattttctccatcttatattttaaaaacccttcatattgtattcagctattctacggtgggagaggggcaaaattgaaacaggagtaaccttgtaatttcattaatgggtaggatgtttttcctcattcttgccaattacaaacaataatgttcgcccccctcctgacataggatgtaaaatgccctttgctctcacttaaagacaaaattcagcttttwtcaaatcactaaattaacataggaagagttattaaattaaacctgggcggtgcaattaaaacaaactttcacatcatttctctagaggtaaagaaaaaggttacatatgcaaccagagcgttctgctaatccataaagaagtccacagggcccaagtgagttgcagagccatctccaagacagagtgactgctgtgtaaagcagccaaggcccgctgaaagcataagactcatttcctgtatttcaagacaaagca

SEQ ID NO: 619406 - DNA, 491 bp, Homo sapiens
ccacagttctgcatctgcatctggagatttaaccaactgcaggtggaaaacacagtgatggtgggatgcagaatctatggataaggaaggtggactttttgtatccatgggttccacagggctgaccactggacttgagcatcctcagatttacgtattgttggggatcctggaaccaatgtgtgtatatgtgtgatatggttaaaatacgtatttagttttcatccccatttcctgataatatagcttctaaaacgcttggaatctctggagtgatgtcttctgtataccaatgagctgactggcaactggcagtccctgggcatcttcaggtagagccggtagcaagaaacaccaaggcaggattaaaggattggggctttcagacccaccacaaccttcagggatgggagggggatgaaagctaagttgatygccaactatccaatcagtcattcctacttaatgaagtttccatacccaacccctca

SEQ ID NO: 619407 - DNA, 490 bp, Homo sapiens
actcagccataaaaagaaatgaatatgtcttttgcaacaacttggatggagctggaggccactattcaaagtgaagtaactcaagtaactcaggaatggaaaaccaattattgtatactcttacttataaatgggagctaaagtatgtgtatgcaaaggcatacagagtgatataatggactttggagacttggaaggtggaaggtgggatgtgggcaaggggtaaaaaactacatattgggtacartgtacactactcagtgacagatgcactaaaatctcagaattcaccactacataattcatccctgtaaccgaaagccacttacacattaaaagctactgaaataaaataaaattcttaattcacataccgtaaaatgtgtacattgcttgattttaagcatatttacaaagttgtgcaaccatcattactaattccagtaccttttcgttacccctgcaaaaattctatactcattagcagtca

SEQ ID NO: 619408 - DNA, 619 bp, Homo sapiens
tacaaatatatacaagatataattggcaccaagtggaagaataggctaagaatgaatctacctaaagtcaattagtcaagatagattgccaatgctgtactctaacaggtcaaaaggatctcccaagctgaatccttgtcaaaatttactagttgcacccatagaatgccagaacatatttcaaatcatatgtctgataagcctaacrtccaaatactgtcctgcaccaaataaggacatttcagtcattgactaaccacatataagacaatggtcccataagatcataatactgtatttttactgtaccctttctatgtttagatacacaaataccatcgtgtcacaattgcctaaagtattcagtgtaataacatgctatacaggtttgtagactcagagcaataggctataccatatagcctaagtatgttgcaggctatacaatctaggtttctgtaagtacactttatgatgtttgcaggaggacgaaatcgcctaacaatgcgtttcacagaattttctccatcattaaacaacacatgactgcttatatcctattatcgttggctttgtcctgatcacaagtatgaggaaactttggaggacaccaaattta

SEQ ID NO: 619409 - DNA, 582 bp, Homo sapiens
aaaaggtaaacatttattacacagcataggcataactgagcaaaaccttggaaaaaaacaataagagattacgaaaattatcattttaatcattgaaataaaaggacagagagtggtttccagattggcatgtaaggagcttggaagctgtcactccattctaacaagtaaaaatctgaacaaactgcaaaatcaataactcttcttctaagaggtatctacacctcacagaaatgaggtcacagggtcaacaattgcccccaaaactggtgagacagacaggaagttacagagaatcacaactgaccagagctggaacctcacaggaaygaggactgaagtaggaaaatatgaactgtaattgagaaatagagatttcatgaggacaattctaggggttacaatctccaggaagacctagtaatggggaggccaatacatttttgagagctttacctccagaaactactaggttttcattgtaaataccagagaaaaattccatcatgcttccaaaaaggggaggggaaaagtaactattttgagatacggcagagtattctgttctttttaacaaggcct

SEQ ID NO: 619410 - DNA, 635 bp, Homo sapiens
acaacagaacaccaaactaaatgaaacaaaaactgatagaactgcaaagagaaatagattaattcactgtgatagttggagacctcagaacttctatcaaaaatgaactgatccagtatggagaaaatcagtaagaacatagttgaactgaaaaacaccatcaatcaactaaatataagggacacctayagagtattttatccaagagcagcagaatacacattcttctcaagctcacatgaaacctttaccaatatagatcacattctgggctataaaacacacattaaccaatttaaggaaaaagaaatcataaagtatctgctcacagaactcaatggaattaagctagaagtctgtaatagaaatataacagaaaatttccaaaatagttggagattaagcaacacacttctcaataatacatgggtcaaagaagaaatattcaataaaacaagatatttttaactaaatggaaataaaaacaaaaattaatacaattttaggatgcaatgaaaacagtgtttagagggaagtgcatagctttgaatgtacatattagaaaattaaaaaatcacactttggaagaaaagaagacaatgatttaataaaaatatgccaaaatgatttgtggt

SEQ ID NO: 619411 - DNA, 575 bp, Homo sapiens
gtgggaaggacttgatcctgtggcttggatgccagctcagctgcaacagaatagaacaccaaggagatttctaaggttccacactccaggccttggctcctggatggcatttctagatctgtgctgaaccagggaaaagcttgccacctggatggggaaggacacaagcctggctaggtctgccatgtactgtttgaagagcccttgggccttgagtgaatattgatggtagccagggagtgattcctatgggccatggttgaaactcagtgctgtagtggcttcaggttaaascaagcactgttccagtagtagtgaccacaggggtacttgtgtcacccctcttccagatccaggcagctcatcacaaagagagagacttcatttgtttggaggaaaatagggaggagaacaagaatccctgtctggtaatccaaggaattctcttagattatatctaagacccccaaagtggtacctaattgagtctgcaagaaccacaacattactaagtttagggtgctccctaatgcatatatagctgtagtgaccaaaaacttagattacaacactca

SEQ ID NO: 619412 - DNA, 522 bp, Homo sapiens
cttttttgacccagaggtcattaagaagtatgttgggctgggcgtggtggctcacacctgcagtcccagcaatttgggaggccgaggtgggtggatcacctgaggtcaggagtttgagaccagcctgactaacagggagaaactccatctgtactaaaaaatacaaaattagctgggtgtggtggcacatacctgtaatcccagctactcaggaaccagaggcaggggaatcgcttgaacccgggaggcggaggttgcagtgagccgagatcgcaccattgcactctagcctgggcaacaagagtgaaactcgtctcaaaaaaaaaratgttgcaaaaaaaaaaagatgttgccttatttccatatattttagtattttcaggatgaattcacattatttaattttagtttaattttgttgtggccaaaggtgatactttatatgatttatattttttctttattgtggtaaaaaaaacacataatatgacacctactcattgttgtacaacacatctctag

SEQ ID NO: 619413 - DNA, 532 bp, Homo sapiens
ttatttccatatattttagtattttcaggatgaattcacattatttaattttagtttaattttgttgtggccaaaggtgatactttatrtgatttatattttttctttattgtggtaaaaaaaacacataatatgacacctactcattgttgtacaacacatctctagagctttttcatcttgcgtgactgaaactctagattcattgcatagcaaatctccatttccccctaccctgagtcactggcagctaacattaaactttccatttctatgagtttttactacttttgatacctcatataagtagaatcatgtggtatttgtccttctataactagctaatttcacttaacataacatcctcaaagttcacccatgttatggcataggataatttttttttctttttaaaggctgaaaagtatcccattgcatgattatgccacattttctttatccattcatccatcaaaggattttagttgtttttacatctaggctattgtgactaatgccaaaatgaacatga

SEQ ID NO: 619414 - DNA, 518 bp, Homo sapiens
tgctctttctctacttttttgttctattagggccctcaatatacattagatgacgaccactcacttttggtgagggcagaacatttttactcagtttactgatccaaatgctaatattttgtggaagtgccctcacagacacacacagaactaacgttttacagcttatctggtcatcgtttagcccagtcaagttgatacaaaattaatcatcatacatattaaatggtaactcaaaaccacatgaaaaactaaaaagcacagtaaatgtaatgacatagataaatatcaaagaatatagaaatataycttctgtttgtataatgtataaatatatcctttgtaacttttgcttcctatcttaataatgtatcttaagttgatggacataaaatgtatatagatgtaatttgaaacaataaagcattaagtgggggcaaaacaatatagaagcaaaatatttgtatgccatattagtttgctaaggctaccataataaagcaccacagactgggttg

SEQ ID NO: 619415 - DNA, 536 bp, Homo sapiens
ttcttaattaatttacatggtattatatgaggcatttttctgtgtttatatttgaagagtgatcatacaaaaggcttcatgcaaaaataaattctgcttgtaattagtagtgatttaggttagaacattaaataagaggactggcttgagtaattatttcattctctgattttataktttaagatacattttctagagcgcctaactccctattataccaaaatatggaaagatacatacaccacttttttccccatggcagacagccatagtgattctcttaaaatttaaatcagatcatgtcactctcaatggctttccatctcattaagtacagaacccagtccttcacatgcacctaaaagggcctgcaaatctgaccccctgataactctttgtcctcatctcttatctattaatactttcctgttaacccacttcactccagtcatattaggctgcttattgttccttggaatactaagcaagataccaccacagacacttcagtcttgctatttcctccattttgtgtg

SEQ ID NO: 619416 - DNA, 411 bp, Homo sapiens
aagaaaatgttaccgcagtgattaccctgtaaactcagttcatgctgtctgtgactcagaataagaattaaaatgacgataaggcactaaatattccaaagatttaatgtgaagtgttgatggttgagaaaaatgtttyctctttatatgcatgtactcaagcttttaatacatatttctgttatgagttaggattaagcattagaggaaagtgctgttgaaatgccggctgtactctcaaagcactaaaacttaaataataataaatagcagaaaacccagggagaaaatgaagaaataaagttatttataaatctctggttagctaacagtgcattacatttatttagcattaattagtaaacagtaatttaaaataaatagtatttgaataagaaagaagatggaaac

SEQ ID NO: 619417 - DNA, 411 bp, Homo sapiens
aagaaaatgttaccgcagtgattaccctgtaaactcagttcatgctgtctgtgactcagaataagaattaaaatgacgataaggcactaaatattccaaagatttaatgtgaagtgttgatggttgagaaaaatgtttcctctttatatgcatgtactcaagcttttaatacatatttctgttatgagttaggattaagcattagaggaaagtgctgttgaaatrccggctgtactctcaaagcactaaaacttaaataataataaatagcagaaaacccagggagaaaatgaagaaataaagttatttataaatctctggttagctaacagtgcattacatttatttagcattaattagtaaacagtaatttaaaataaatagtatttgaataagaaagaagatggaaac

SEQ ID NO: 619418 - DNA, 602 bp, Homo sapiens
aaatcacccattgaatatctggaaggcttaaagagtagcagttcaagaatcaggcagagctggcttgaattctggtttcacactttacaggctgtgtggtattgaataaagtgcttcaaatattgaatccccagttttcctatctgttaaatgaggataataaataactcttcatgaggagagaaacagaagattaaataaaataaagcaaaaagtaatatgctgtaattccctcagaagcattgtgtttcacagttgtcagaattctgagttctaagcaacagaaactgactttggttacattaatcagaaaaggaatgtattggcaagatatcaataacttagagaattaatcaacagttgagaattagactctggcagaaaaataaggaaagcaggttatgagcctgaagtctgcttaggacataggaattgatactgctgctactggattcttgctgccacaccagtagtctctcaaaccttscacattggctgggaaaaatctctaaccctcattattcaaagctacaggcaagagaatcttactagataaacttgagacatgtatctgtatgctattgtccagaggataaataaga

SEQ ID NO: 619419 - DNA, 596 bp, Homo sapiens
cctatgtgcttgccaaattttagtctattttaatagtctagtgttggttgcacgtagtttctgacttttaaatcaaatctttaatgaattttgttaaacccgtaaatctcacataatgagtttttgtaattgtgtttatgtgttcagaaggaataacaagtgtaattaaggttactattatctgtggagaattaaacccttcttttaaaagcaatggagttccttcatcatattaataaaaaagacttaaatactttctaaaataatatattttctcacagcacatcataagcaggtctgttaactaagataattgtaaatatagcttttccatgaaaataacaatttctttaacccrggaccatatcggtctatgctgtgatttgagccatgtttcacttgcatttctttgtccaaactgtaatgtttacatttattctttagtatcttactacatcatgtttaaatgtaaacaattgagatttgtttctctctgttggaatttctgaataacagttctgcatattacaacgttaaagatgtgtcatggcagctgcaaataacttttaaaaagaaactttgtgcagcaaactatc

SEQ ID NO: 619420 - DNA, 638 bp, Homo sapiens
ttttgtctatcattagttttgaaaagttgtcawctatttttacttgaaatatgtactctgctccttctctcttgttttggtattttgactatacatatgttatactttcaaattgcctcataatttttggatatgctgttctggttttattttctttctcttctccttctcaatttaggaagtgtttattaatgttaatatatcttcaaactcattgagtctttctttgcccatgtgcagtctattaaggagcctatcaaacacattctttttaacatttttttaaattttttacttttttaaatttattttttatttgtaaagatggtgtcttgctgtgttgtccaggctggtctcaaatttctggcctcaagtaatcctccagcctcagcctcgcttatttctgttacagtatttttttatttctagcattttaaaaaaattctttctttgagtttacatatttctgcttacactacccacctgttcttacatgttgtatacttttttcactagatcctttattatattaactttagttattttgttccctccctgaaaattgcaacatctgtttcataataaagcatggttctgatatttgatttctcttcagaccattttatttattcccgttt

SEQ ID NO: 619421 - DNA, 638 bp, Homo sapiens
ttttgtctatcattagttttgaaaagttgtcatctatttttacttgaaatatgtactctgctccttctctcttgttttggtattttgactatacatatgttatactttcaaattgcctcataatttttggatatgctgttctggttttattttctttctcttytccttctcaatttaggaagtgtttattaatgttaatatatcttcaaactcattgagtctttctttgcccatgtgcagtctattaaggagcctatcaaacacattctttttaacatttttttaaattttttacttttttaaatttattttttatttgtaaagatggtgtcttgctgtgttgtccaggctggtctcaaatttctggcctcaagtaatcctccagcctcagcctcgcttatttctgttacagtatttttttatttctagcattttaaaaaaattctttctttgagtttacatatttctgcttacactacccacctgttcttacatgttgtatacttttttcactagatcctttattatattaactttagttattttgttccctccctgaaaattgcaacatctgtttcataataaagcatggttctgatatttgatttctcttcagaccattttatttattcccgttt

SEQ ID NO: 619422 - DNA, 638 bp, Homo sapiens
ttttgtctatcattagttttgaaaagttgtcatctatttttacttgaaatatgtactctgctccttctctcttgttttggtattttgactatacatatgttatactttcaaattgcctcataatttttggatatgctgttctggttttattttctttctcttctccttctcaatttaggaagtgtttattaaygttaatatatcttcaaactcattgagtctttctttgcccatgtgcagtctattaaggagcctatcaaacacattctttttaacatttttttaaattttttacttttttaaatttattttttatttgtaaagatggtgtcttgctgtgttgtccaggctggtctcaaatttctggcctcaagtaatcctccagcctcagcctcgcttatttctgttacagtatttttttatttctagcattttaaaaaaattctttctttgagtttacatatttctgcttacactacccacctgttcttacatgttgtatacttttttcactagatcctttattatattaactttagttattttgttccctccctgaaaattgcaacatctgtttcataataaagcatggttctgatatttgatttctcttcagaccattttatttattcccgttt

SEQ ID NO: 619423 - DNA, 594 bp, Homo sapiens
attcagccttctacaaatgacataattccagcctttttatggctgaatagtattccatgatgtacatatcacgtttttaaaaatctattcatctgtcgttggacacataggttgactccatatcttgactattgtgagtagcactgcaatgarcatggggtgtgcaggtgtctctttgaaatattgacttcctttcctttacattagtggatttttttgtctttttgataatagccatccgaactggggtgatatgataccttattgtggttttgatttgcatttccctgattattcgtgatgttaagctttttttcatatatttgtttaccatttgtatgtattctttcaaaaatatctgttcaaatcatttgcccatttttaaatcagattgttgggtttttttttactgatgagatgtttgagtttattctatattctggatattaatttcccagtggatgaatagtttgcaaatattttctcccattctatagttgccttttcactctgttgtcgatcgttttctttgccctgcagaagctctttagtttgatacaatctcatttgtttatttttacttttgttgcctgt

SEQ ID NO: 619424 - DNA, 642 bp, Homo sapiens
ctttctgttaacatgcttgtttcacttaacacaatgtcctccagttccattcagccttctacaaatgacataattccagcctttttatggctgaatagtattccatgatgtacatatcacgtttttaaaaatctattcatctgtcgttggacacataggttgactccatatcttgactattgtgagtagcactgcaatgaacatggggtgtgcaggtgtctctttgaaatattgacttcctttcctttacattagtggatttttttgtctttttgataatagccatccgaactggggtgatatgataccttattgtggttttgatttgcatttccctgattattcgtgatgttaagctttttttcatatrtttgtttaccatttgtatgtattctttcaaaaatatctgttcaaatcatttgcccatttttaaatcagattgttgggtttttttttactgatgagatgtttgagtttattctatattctggatattaatttcccagtggatgaatagtttgcaaatattttctcccattctatagttgccttttcactctgttgtcgatcgttttctttgccctgcagaagctctttagtttgatacaatctcatttgtttatttttacttttgttgcctgt

SEQ ID NO: 619425 - DNA, 642 bp, Homo sapiens
ctttctgttaacatgcttgtttcacttaacacaatgtcctccagttccattcagccttctacaaatgacataattccagcctttttatggctgaatagtattccatgatgtacatatcacgtttttaaaaatctattcatctgtcgttggacacataggttgactccatatcttgactattgtgagtagcactgcaatgaacatggggtgtgcaggtgtctctttgaaatattgacttcctttcctttacattagtggatttttttgtctttttgataatagccatccgaactggggtgatatgataccttattgtggttttgatttgcatttccctgattattcgtgatgttaagctttttttcatatatttgtttaccatttgtatgtattctttcaaaaatatctgttcaaatcatttgcccatttttaaatcagattgttgggtttttttttactgatgagatgtttgagtttattctatattctggatattaatttcccagtggatgaatagtttgcaaatattttctcccattctatagttgccttttcactctgttgtcratcgttttctttgccctgcagaagctctttagtttgatacaatctcatttgtttatttttacttttgttgcctgt

SEQ ID NO: 619426 - DNA, 542 bp, Homo sapiens
ttaataaaattgaaaacaggacatcgagagagagaaaactaacaaaaccaaaagccagctcctaaaatgtttttaggagtaaggtttttagaagtaaggtttttttgtcccctggaatcttttaatatatttttctttatctttgattttctgtagtttcaaaatgatacacctagaattttctttcctttttcgtctttttgctgtttttcctacaaaaataacaggcgtactctgagcttcctgcatctgtgatttggtttctgactttatttggggaacattctcagtcattgttgttttaaatatttcttctgtttctttctctctttcttcttattctsgtattcccattatccacaagttacaccttttctagttctctcacagtttttgtctttttctctctttgcttttcagtttgtaagttccaactgatatatcctcagagagcttttccttagccatatccagaaacctgagctcatcaaaggcatgcttcatttgtgtaatgttgttttttcatctctagcatttctttt

SEQ ID NO: 619427 - DNA, 603 bp, Homo sapiens
aatattcactttttttgttgcctggtccctttgatgtagacttgggcatatcatgtgctttggccaacgcaacatgtatagaagcaatgtgagcagaggctttctaggtgcctgtgtggtttgacttgactgtcacatgtatttcctcataagcagagcatggcctgggtagttcactagctccagaatgacccatgcagcagatctgaaaataactccacatcttgaagcagagctcctcacaccaatctgtagacttataatcaagaagcaaacatttgcttatataaccaataatatttagggggtcctttgtcatgcagtattatttgagcaatctgaaaaaatagtcatccatacccagctccttgatttttaatttttttaatcatgggaatacaataggttattaaataatttaaaaatcaagagtgtatatattgattaaagatatagtgctggccaggagtagtggctcacacttgtaatctcagcactttgggaggctgaggcaggagaatcactcgagcccacgagttcaagagcagcctgggcaacaaaacaagactccawctctgcaaacagtttaaaattagctgggca

SEQ ID NO: 619428 - DNA, 614 bp, Homo sapiens
aagcttgttagaattttgtgattgccaattttaatgaataagttcattgaccaatttgaggagatgaatttgaggagagaatttggagagacatctcaacaatatcatgttttccaatcaacaaatatggcatataccacgctttattaagtcttctttaaattgccttagtatttatttatagttttaagtgtagaagaattgcatgtatttggtcaagtttatccataattcatactttatgctattgttaatacccyaatttaatttttaagatacaagtgttagctcacttattagttctagtaggtttttgttagacttaaaattttcaccataaacagccatggcatctattcataaagagatttatttttccctttccaatttgtatgtctttcctttcttttccttgccttttgctctggctgcaactatcaggataatgtcaaaaagagctggtgagaacagttattcttgccttgctcatgatcactcagtgttccacccccaaatatgatgttagtcgttgtttttttctagattttttttttcagaatatctaagttgccttcaatttttggtttgctgagaatttttatattatgaatagg

SEQ ID NO: 619429 - DNA, 612 bp, Homo sapiens
caattttaatgaataagttcattgaccaatttgaggagatgaatttgaggagagaatttggagagacatctcaacaatatcatgttttccaatcaacaaatatggcatataccacgctttattaagtcttctttaaattgccttagtatttatttatagttttaagtgtagaagaattgcatgtatttggtcaagtttatccataattcatactttatgctattgttaataccccaatttaatttttaagatacaagtgttagctcacttattagttctagtaggtttttgttagacttaaaattttcaccataaacagccatggcatctattcataaagagatttatttttccctttccaatttgtatgtctttcctttcttttccttgccttttgctctggctgcaactatcaggataatgtcaaaaagagctggtgagaacagttattcttgccttgctcatgatcactcagtgttccacccccaaatatgatgtyagtcgttgtttttttctagattttttttttcagaatatctaagttgccttcaatttttggtttgctgagaatttttatattatgaataggtgttgatttttgaggggaagctt

SEQ ID NO: 619430 - DNA, 612 bp, Homo sapiens
caattttaatgaataagttcattgaccaatttgaggagatgaatttgaggagagaatttggagagacatctcaacaatatcatgttttccaatcaacaaatatggcatataccacgctttattaagtcttctttaaattgccttagtatttatttatagttttaagtgtagaagaattgcatgtatttggtcaagtttatccataattcatactttatgctattgttaataccccaatttaatttttaagatacaagtgttagctcacttattagttctagtaggtttttgttagacttaaaattttcaccataaacagccatggcatctattcataaagagatttatttttccctttccaatttgtatgtctttcctttcttttccttgccttttgctctggctgcaactatcaggataatgtcaaaaagagctggtgagaacagttattcttgccttgctcatgatcactcagtgttccacccccaaatatgatgttagtcgttgtttttttctagattttttttttcagaatayctaagttgccttcaatttttggtttgctgagaatttttatattatgaataggtgttgatttttgaggggaagctt

SEQ ID NO: 619431 - DNA, 615 bp, Homo sapiens
accattaactattgtgttacttgtataaacacacacacacacacaccccaaaaaccaaaaaccaaaaaatatatataaaatttgtttaaattgaggaaatttccttcttcttttagtttgctgagagtttttaacataaatgggtaataaaatttgtcagatacttttcctgcatctattatggttgataaaagaaaaacttcagccaaattaaatttaaaagagtttaattgagcaatgaatgattcacgaatcggcagcctcctgagtcagagtaggctcagagacgctagtgcaaccatgtggcagaagaagattttatggaaagaaaaaggaaagtgaggtacagaaacagctggattggttataactcagagtttrccttatttgaaaatggttcaaagagttggctacatttgattggccaaaactcagtcactggcacaacggtaggctagggtctgtttacacctccacttgttataattcaagatgtacagttaagtctttaggccgaacttaaaatatgtaaggaggcagctttaagtcaaacttgatttaacagggcttttctcctttattgtaataaacaatgagatacatggattgattttc

SEQ ID NO: 619432 - DNA, 615 bp, Homo sapiens
accattaactattgtgttacttgtataaacacacacacacacacaccccaaaaaccaaaaaccaaaaaatatatataaaatttgtttaaattgaggaaatttccttcttcttttagtttgctgagagtttttaacataaatgggtaataaaatttgtcagatacttttcctgcatctattatggttgataaaagaaaaacttcagccaaattaaatttaaaagagtttaattgagcaatgaatgattcacgaatcggcagcctcctgagtcagagtaggctcagagacgctagtgcaaccatgtggcagaagaagattttatggaaagaaaaaggaaagtgaggtacagaaacagctggattggttataactcagagtttaccttatttgaaaatggttcaaagagttggctacatttgattggccaaaactcagtcactggcacaasggtaggctagggtctgtttacacctccacttgttataattcaagatgtacagttaagtctttaggccgaacttaaaatatgtaaggaggcagctttaagtcaaacttgatttaacagggcttttctcctttattgtaataaacaatgagatacatggattgattttc

SEQ ID NO: 619433 - DNA, 541 bp, Homo sapiens
  misc_feature 461, 490: n = A,T,C or G
gcacattcacacaatactagtgaaagtataaattggtacaactcctatagagagcaatttggcaataactgtccaagttaaaatatccttttaaaaaatgtaggagtcttagcaatggaaacaaaaaaaacttggagaacttgattctacagatycacttgcacatgtacaaaacagtggatgtacaagtgtattcactgctgcactgtttctaataccacaagagtagaaatagcctaaacgtccatcaactgaaaattggttaaagcaaatgctagaacatctaggtatgtacatgtaagaaaaaggtaacgatgactgctctacagagggggactaggtagttgaggatgggggctgccagagttacttttcactgcctatgttacactttctgaatttcaaatcaatatatatgacctattaaaaataatttttttttttgggggcgcctggctctntcacccaggctggagtgcagtggtgcatntgggctcactgcaacctccgcctcccaggttcaagcgattctcctgcctca

SEQ ID NO: 619434 - DNA, 525 bp, Homo sapiens
cgcttactgcaacctctgcctcctgggctcaagcagtcctcctgcctcagcgtcctgagtagctgggattgcaggcatgcgccaccatgcccagctgatttccattgtattttttgtagagagtaggtctcaccacgttgcccaggctggtctgaaaactcctgggctcttgcaattcacccactttggcttcccaaagttctgggcttataggcatgagccactatactcagccaaaaaaatttttttattcagtcaaccattgatggacacttgggttgatttccgtatctttggtattgtgaataatgctacagtgaacatacaagtgcacgtgtcttttttgtagaacaatttcttttcttttgggtatattcccggtaatgggattgctgggttgaatggtagttctatttttagttcytttttttttttttttgagatggagtgtcactgttgttgctggagtaaagtggcgctatctcaactcactgcactctccgcctcccaggttcaagcagttct

SEQ ID NO: 619435 - DNA, 525 bp, Homo sapiens
cgcttactgcaacctctgcctcctgggctcaagcagtcctcctgcctcagcgtcctgagtagctgggattgcaggcatgcgccaccatgcccagctgatttccattgtattttttgtagagagtaggtctcaccacgttgcccaggctggtctgaaaactcctgggctcttgcaattcacccactttggcttcccaaagttctgggcttataggcatgagccactatactcagccaaaaaaatttttttattcagtcaaccattgatggacacttgggttgatttccgtatctttggtattgtgaataatgctacagtgaacatacaagtgcacgtgtcttttttgtagaacaatttcttttcttttgggtatattcccggtaatgggattgctgggttgaatggtagttctatttttagttcctttttttttttttttgagatggagtktcactgttgttgctggagtaaagtggcgctatctcaactcactgcactctccgcctcccaggttcaagcagttct

SEQ ID NO: 619436 - DNA, 664 bp, Homo sapiens
aaaaatgtaagaggttttttatgttgtattatgatacatagaatgctttgatgttgcattctgagaaataaagaaaatataaatgatatctataaaatgccagagagaaaattacccattactgattgtaacagcccaatctaatagcataaagttatcttagctgtataccattaaatatctaatatacgtgtacactattctttactccacatcaaatggactggttaattcagaaaatgtgcaatcttggaaacatcagaaaatgagcatctctgtgcataaaattatcttatgctatacatgtcaaatacttggcaggcaattctagaaaactcctgaaacttgtgattttcttcaaatgaatttgaaattaaaatgtccattcaaatatttttaggtgtaatgagcttcgtgtagcctggaactagtaatgactgctttgtttgatatcgttggacagtagtgtatatcaaaatagcaacttttcagcaaatgaaaatttaagactttgagcaaggaagattttaaaaacaatccttytgattattttttcacagcatattttttaatgaattgccatcttcaaaagagaacaaggaacataatttaagctttatatgatgactcgaggttattattatgaacattcatgctacagtgt

SEQ ID NO: 619437 - DNA, 549 bp, Homo sapiens
tactcattcacttaaagatattattttatgattacattacaatttagaaatatagttactagattgacgaatcatcagtgatccagatacatcttaaataaggtaactttttagtctgttgatgcaagcaagaaatagtacattggctgaaaattggtgaaacactaaagtacaagaacaggattcagaaagcttttaaaatgtgatgatccagtgatccaaggttggctctactaggcacatgtttcctaactgaattattcttatcaaacttatctcttgtagaattatgtcaagtaagatttggagattgagtttatgatatgagtataaacagcctatggmtgactcttgcctatgtattttctttatattctggaaatggcttctttattactttatctgaaatgctacctattgaagcttctgattttcaatttttcaattactcaatcttctaaaacaggggtgtccaatctttcggcttccctgtgccacgttggaagaagaaggattgtcttgggccacacataaagcacactaacacta

SEQ ID NO: 619438 - DNA, 566 bp, Homo sapiens
ttactccgtgttttagaagaatcgatgttaacttaccatcttatgctgtgaaatgtataatttataaataattgactgtacttattaatggatgtggggatcttaaagtattgtcctttccttgaaattgaacaggacattccttaaaatttagtgtggtaaaggagaaaaggaattatactgcaataaagaatttcatgcaaatatgaaccttgaaagggcacaaacatttctttaacccaaatatatgctagattttgataggatggttgtgcttgggaaaaaaattgtatctagttgaccatcttccagaccctgcacaaatgctgctatgaatgataatcatggttgttgccaaggtcacctaaaaaatgatttatagtcccctttccccaaaaatgtatcagctgcttacttagaaaattaggtttctattcagttayggcaccaaatcacttctgcatgattcttctatttttcctgtacaccagaacttggaaaatgtatgtttctgcaaatgtttatccccttctaaataggaacgattgaaaataataaaagtattt

SEQ ID NO: 619439 - DNA, 566 bp, Homo sapiens
ttactccgtgttttagaagaatcgatgttaacttaccatcttatgctgtgaaatgtataatttataaataattgactgtacttattaatggatgtggggatcttaaagtattgtcctttccttgaaattgaacaggacattccttaaaatttagtgtggtaaaggagaaaaggaattatactgcaataaagaatttcatgcaaatatgaaccttgaaagggcacaaacatttctttaacccaaatatatgctagattttgataggatggttgtgcttgggaaaaaaattgtatctagttgaccatcttccagaccctgcacaaatgctgctatgaatgataatcatggttgttgccaaggtcacctaaaaaatgatttatagtcccctttccccaaaaatgtatcagctgcttacttagaaaattaggtttctattcagttacrgcaccaaatcacttctgcatgattcttctatttttcctgtacaccagaacttggaaaatgtatgtttctgcaaatgtttatccccttctaaataggaacgattgaaaataataaaagtattt

SEQ ID NO: 619440 - DNA, 703 bp, Homo sapiens
tttaggtatcattttaaaaatacctttatcaaaaataaagttcttctggcactattttaattatatgtattaaatgcatatttgagaacactaaaactaacgaacaatgaaaacatcatttggatataacattttgggggtgaattataaatatttttctaaagtatttatattactcaaagttctattctctacccttttctctctttatatcttagaccatttatgttgctataatagaatatctgtgactgggtaatttactaagaactgaaatttattttctcacagttctggaacctgaggagtccaagatataaagtgctggtgtctagtgaggaccttcttactgtgtcctcacatggcagaaggtggaaaggcaartagggaccaacttctcctatcaagccccattataagaagacctaatcccattcacaaaaaaagaagttctcatgtgccaatcacctacctcttaaatactattaagattgacctctcaatactataatattggtaaaatctaaattttggggggagtacattcaaaccatagcatcctgtatctctgactggtattattatgcataatggactcaactacaagtgactttatgctgaagatttcaaacaatatatctcttggaaacattttcttagctccaaagaacaagataaaagcacaagaaatgtatttaacatt

SEQ ID NO: 619441 - DNA, 703 bp, Homo sapiens
tttaggtatcattttaaaaatacctttatcaaaaataaagttcttctggcactattttaattatatgtattaaatgcatatttgagaacactaaaactaacgaacaatgaaaacatcatttggatataacattttgggggtgaattataaatatttttctaaagtatttatattactcaaagttctattctctacccttttctctctttatatcttagaccatttatgttgctataatagaatatctgtgactgggtaatttactaagaactgaaatttattttctcacagttctggaacctgaggagtccaagatataaagtgctggtgtctagtgaggaccttcttactgtgtcctcacatggcagaaggtggaaaggcaaatagggaccaacttctcctatcaagccccattataagaagacctaatcccattcacaaaaaaagaagttctcatgtgccaatcacctacctcttaaatactattaagattgacctctcaatactataatattggtaaaatctaaattttggggggagtacattcaaaccatagcatcctgtatctctgactggtattattatgcataatggactcaaytacaagtgactttatgctgaagatttcaaacaatatatctcttggaaacattttcttagctccaaagaacaagataaaagcacaagaaatgtatttaacatt

SEQ ID NO: 619442 - DNA, 532 bp, Homo sapiens
cctctataaaaaataaacaaaattagccaggtgtggtggtgtgtgcctgtagtcccagctactcaggaggctgaggtgggaagatcgcttaagccaagcaggtcaaggatacggtgagccatggtcatgccactgcactccagamtgggcaacagagttagaccctgtctcaaaaaaaaaaaattgtaaaaaaatcagttggcttatttgtgtggatctatttctggattctctattccgttccattgatctgtgtgtctatccctttgccaatattgcacagtcttgattactgtagctatataataactcttgaaattcctcttactttattcttattttacgtaattgctatatctattctagggtccatgccttttaatataaattttagaataaattagcctgtgtctataaaaaccctttctgggggttttgataggaattgtattaaacttggagataaatcttgggaaaacttatatctttattatgttgactcttccaaaatgtaaacaaggtatgtttagcc

SEQ ID NO: 619443 - DNA, 537 bp, Homo sapiens
gatctgacaggaggcggagctcaggcggtaatgctcactcacttgcagctcacatcctgctgtgtggcccagtttctawcaggccatggatcagtactgcgggagctggagacccctgctgcagaggatctgactctttttggccctgggagggagtggttcacaaaagaaaaagaaaattacaatagtcccccaccttattggcaattttgcattctgcggtttcagttagatgctgtcaatcacagattgaaaatattgaatggaaaaattccagaaataaataattcatgttttggccagatggggtggctcacacctgtaatcccagtactttggtaggctgggacgggcagatcacttgaggtcaggagtttgagactagcctggccaacattgtgaaaccccttctctactaaaatacaaaaattagctgggcatggtggtgtgtgcctgtagtcccagctacttgggaggctgaggcaggagaatcgcttgaacctggaaggcagaggttgcagtgagccaagattgcac

SEQ ID NO: 619444 - DNA, 609 bp, Homo sapiens
gtgaccaaggtgctgtttactgtggtttaacatttggaaggaaaggaagcaggcttataaataattgcttaatggttctgtctcaattgtaattctgaaaatttaagagatccaaatagtatcacagatttccctttttggtattagatgaaataattgaagatattataaaaccttaaccactgatatcatctgtatattgtgtgaaggaagctttggtatactcgacttaaaaacacttctctaaattgacatactaaaagtcaagttgcaaggaagagaaagccgctaggccaaggggacacacaccaattggacaaacagcaacagagcttcaaagggtctgagacagactttgaggaataatagaagggggaaaagcaaattggcaatttttcatgaagataatcatttcattaaaatcttgccatcacttcccctttggtgccagcagacygatactaaactgctatggagacactttcctagcatgggtcacaaacaacattgaaggcaacataaatttaggatgcttgctactttgctaatcattttggaactcaaatgtgaggaaacatttcttcattaatatcaagaacccaattcaaa

SEQ ID NO: 619445 - DNA, 524 bp, Homo sapiens
cttgttaaaactggagatccctgagcccagccctgcaagatggagaggagatttagaattcgggaacatgttgttttaattcagaactcagggaatggttataaatattaaagtttgagaaccactgacgatcaggatctgttgtgtacattaacacaagtggaattactgtaatagggaaaaacacttctacttaatatacccaaaaatgatatactttaaaaatctcaaacctgacttcttaagctgctttaaagaatggtttctctgtacattccaaatggactttcacatatttgccctcagtgatttctcatgtagctttgaatcctggagaactacccaataattagtcttagaaaccagtgaaggtggccgggcttagtggctcacacctgtaatcccagcactttgagaggccgaggcgggcrgatcacctgaggtcaggagtctgagaccagcctggccaacatggggaaaccccgtctctactaaaaatatgaaagttagccaggggtggtggc

SEQ ID NO: 619446 - DNA, 438 bp, Homo sapiens
aagggttgtaagcagcaaggaagcttttgtctatgaaaatgcatatctctatttaatagtcactaaattttagtagatgttacaaaaattttatatttgttttgctattcatgtgattttaaaatgattcaatttaaaatcaaatgatttaaaattcatgtgattttaaaatgattgctattcatgtgatttttaaatgattcaattctaggcccttatataatggggcccctatattaatgaaggtattaatttgtttattcatgtgtccactgaaaggcattaggggactgactgatatttggctgtgtccccacccaaatctcatcttgaattgtagttgccataatccccacgtgtcatgggagagacctgtgaatgaatcacgggggcggttacctccatgctgttctcatgrtagtaagtgagttctcatga

SEQ ID NO: 619447 - DNA, 496 bp, Homo sapiens
tcaactctccagctcatgacattatcaaccctttgccccaccagggccactccagccaaagttcttcatcccaactctcagccaactgtgtgccaccctactccaaggacagaggagaactccagggctctataaattccacttatgactcaatgctgtggtgtgtgtgtgcaaaccctcttcttacaggcaatactacgctgcaccccaagattgcaatagatagtctacaaggggatttcctctcagatcctaatgtgaagtttggcagaagctctcctgccctcttgttttcctcagtgtatttcaaatgcttttcatcacttcttgaactttcaatccagagaggaaaggcaggaatagtttgcatctcactgtttcttctcactctgtccatttttctcttctcacaatacttgtactagaaargaaatgcatacctctccctctttctgtaatggcaattacacctaaatatctaggctcaaaataatag

SEQ ID NO: 619448 - DNA, 584 bp, Homo sapiens
ttccactaagatattcagatccacagtgctggggaagacattattctccccagtttacaaatgagaaaactggggctctgaaaaatgaaattatgtcttgaggtcacattgacaggaataggactcagcccaggtcttcctgctgcagggtctgggtttatttctattccaacattttgcctcaaaggctctgatggttttattgggttcttgagtcttcactggtaaaaaaaaaaattaccagaaaacacaccccgttgtatagtttaagttgcgattgctggtcactgtatrgtcatctcaaccatgaattaactccctgaagaaaccatttgaaggcacttttcaaaacggtagatggtaaaaaaaaaaaaaaaaatctaggaaggaggtaagatgcggaaccatagcccaagaatataaataactcatgacagaactgttctaatataaggcttcaaaacaatactattttttgtaacattatgaagaccattttgctggcagttctattttttctggatgtcccaaataaatgcagtttgtttttacctcaatatgacattacttgtaatttaaaaccc

SEQ ID NO: 619449 - DNA, 623 bp, Homo sapiens
gtggtagtactagagaagtggaatcaaggacttatgtattaagacttttattaggcttgagagcaagagttagaagaaacctccaaatgtccttctagtgattaggactggttcaggataggaaaagggaaagagtttcagagcaaggatctgcttcaggaaaaaaaaatatatatagatagatagctgggtcttgaaactggttcaagagaatgaaccttatatggsataatattaattttcagaggaaccagttgtggagaagacaaattctattcttgaatgactttagtaacttaattgttcaacgcaaagaaagttctgggggagattagtggtaagagctcgctctctgaatgctaaaattctagctggagcgatgtccctacagttgtattaaaattaagaagataagcctttgggataggtaacatgacctatgcctcaagacattcaacatctccatcttggtttctctatctctaaaatggtatttacagtatgaacccttcccatatgttgttatgggatgaattatgtctcttccaaaatctgtatgttgaagttcttattcccaccactttagaatgtgcctacatttgcagatggggcttttaaagagg

SEQ ID NO: 619450 - DNA, 571 bp, Homo sapiens
gcacagggggaagaccatgtgaagacacagggagaaaacagccatctgcaagccatggagtgagaacttagaagatgtcaaccctgccaacaccttgatcttggacttctagcctctagaattatgagagaatacatttatggttttttttgtttgtttgtttttgagacagagtttcgctcttgttacccaggctggagtgcaatggcgcaatcttggctcactgcaacctctgcctcctgggttcaggcaattcttcttcctcagcctcccaagtagctgagattataggcacctgccaccacacctggctaatttttgtatttttagtagagacagggtttcaccatgttggccaagctggccttgaactcctgacctctgatgatctgccttggcctcccaaagtgctgggattacaggcgtgagccaccacacccagtcaacaaatttatgttttaagctrtccagcctgtggtagtttgttatggctaacctagcaagctaatatacatgcctagagatatttttagatgaatgaaattcttcatgagaatatgtatttatttat

SEQ ID NO: 619451 - DNA, 571 bp, Homo sapiens
gcacagggggaagaccatgtgaagacacagggagaaaacagccatctgcaagccatggagtgagaacttagaagatgtcaaccctgccaacaccttgatcttggacttctagcctctagaattatgagagaatacatttatggttttttttgtttgtttgtttttgagacagagtttcgctcttgttacccaggctggagtgcaatggcgcaatcttggctcactgcaacctctgcctcctgggttcaggcaattcttcttcctcagcctcccaagtagctgagattataggcacctgccaccacacctggctaatttttgtatttttagtagagacagggtttcaccatgttggccaagctggccttgaactcctgacctctgatgatctgccttggcctcccaaagtgctgggattacaggcgtgagccaccacacccagtcaacaaatttatgttttaagctgtccagcctgtggtagtttgttatggctaaccyagcaagctaatatacatgcctagagatatttttagatgaatgaaattcttcatgagaatatgtatttatttat

SEQ ID NO: 619452 - DNA, 600 bp, Homo sapiens
gggtggattttatttcaggcaattccaatctaaatatttgttgaagttagctatttgcaaaaagcatcagagcagctagtatagtgtagtagttataaagacaaacatgatgcagtgttgtactgcaaggagtttgttgtgaaaatggccatcygtttatattctcaaagcaactatcttgaagaaaccaattacagtggatgtggtgaggcactaccatgaccttcctttcaggatcaagtcactcattcccccagctgccaggagtgttgctggctaatggcttacagctgttctcaagctgcacccaagactgggtaatttataaaggaaagaagattaattgactcacagttcagcatggctggagaggcctcacaatcatggctgaaggcaaaggcacgtcttacatggtggcaggcaagagagcttgtgtaggagaatatccctttataaaaccagcagatctcatgagacttattcactatcatgagaacagcaccagaaagacccaccccatgattaaattacctctcactgggtccctcccacaacacgtgggaattatgagagctacaattcaagatgagatttgggtgg

SEQ ID NO: 619453 - DNA, 600 bp, Homo sapiens
gggtggattttatttcaggcaattccaatctaaatatttgttgaagttagctatttgcaaaaagcatcagagcagctagtatagtgtagtagttataaagacaaacatgatgcagtgttgtactgcaaggagtttgttgtgaaaatggccatccgtttatattctcaaagcaactatcttgaagaaaccaattacagtggatgtggtgaggcactaccatgaccttcctttcaggatcaagtcactcattcccccagctgccaggagtgttgctggctaatggcttacagctgttctcaagctgcacccaagactgggtaatttataaaggaaagamgattaattgactcacagttcagcatggctggagaggcctcacaatcatggctgaaggcaaaggcacgtcttacatggtggcaggcaagagagcttgtgtaggagaatatccctttataaaaccagcagatctcatgagacttattcactatcatgagaacagcaccagaaagacccaccccatgattaaattacctctcactgggtccctcccacaacacgtgggaattatgagagctacaattcaagatgagatttgggtgg

SEQ ID NO: 619454 - DNA, 440 bp, Homo sapiens
tcaagaaagataaatctgttctccagattgaggcttttgaaagcacattatcttatttctattatagttggagggtaagtgaatgaatgggagaagagctgaggtatgacttatagtgagactttaaaaaactgtgggatcacgtgatttgaaaagcacaattctaccgttggtgggataagatatttaaaactgagattataatggaaaagctaggaatgtttcttgtgagggctgctctgaaataatcttaccttttaggaggctttcctaaagtgattgtgtttattgacacattacattttttctctaacataaatataatgtctcctcttttctccatgaaaaacattatttsaagaaatgctatgcgttggttaaagtcttgttcattgatatagtcaacaaacatataatgaaatagtactaggagctaagta

SEQ ID NO: 619455 - DNA, 524 bp, Homo sapiens
gtgaatgtcagttacttagctttcctaaaacattaaggttagggaaccttcttttgtgatrtagatcagttagaggtttgaagagcttcctcagtaatttttttttttttttgtggggggtgtggtgaggactgaatagggagggctacaggttatgaggtaaaagtagaagaatgctttctagaaagtgaaaaaaaaaattctaatggagggtcaaggaataaatagtttaaatcccagaaatctggatctggttgtaaacagcttggacctcacatttactgaaatagctataccgtatttgaataagacataacttaacagaagaagaaaaaaagaaacaactgaaacagaaggaaatgtggaaatctggttctaaccttaacaaaaaggattttaaaataaaattcctaaacaatttttttaaaacagtgaatttttttctttgaaaaagagcatgacttagaagctgaatatataaaacaggtgaaaaaaattatctttcctgattgacagaaggtgga

SEQ ID NO: 619456 - DNA, 567 bp, Homo sapiens
tttgaataagacataacttaacagaagaagaaaaaaagaaacaactgaaacagaaggaaatgtggaaatctggttctaaccttaacaaaaaggattttaaaataaaattcctaaacaatttttttaaaacagtgaatttttttctttgaaaaagagcatgacttagaagctgaatatataaaacaggtgaaaaaaattatctttcctgattgacagaaggtggagcatggaaccttggttgcttaatatttctttccctaaatgacctacctacttccccttcaggggacactctctctctctttctctctctctgtgtctctctctcatagaggagctccatgaatcctctctggtctaggcatgaacacatgaaaattgctgggctatataattatcctccctccttcacctcccccatcctattgcttccctgtgaatactcaactttctggggtttcttaaggactttttattcattgatagtaacaaggwaatagtaaaagactaaatatgttctattttttaaataaataaaaggacaaattcacatttcagagaaagttg

SEQ ID NO: 619457 - DNA, 480 bp, Homo sapiens
aggtgatccacatgcctcagcctcccaaagtgctgtgattacaggcgtgtgccactgagcctggccaaatwaagctattttggccacagtaacagaaagcctaacagtggcttaagccctcgagctattaattatatattttaagagcgcagagattattgatcccagtgtggatttagtaattcagtcatgtcatcaaagatcaagagtttttccatgtctctgttcccccatttgcaacacattgatgttttcctcatggctgcagaatgactgccatagctgcagatactacaccctctcaatttccaaagccagaagagaaaaaggggtgggagaatggggacaagataacattttttcttcctagtgtagctgttttaattatcagggaaaggttctttctagaagctttcacaccccctagcagacttccccctaaaattcatcgaacagaaatggtggcctgcctacatgtag

SEQ ID NO: 619458 - DNA, 586 bp, Homo sapiens
ggctgtaccttagaaacacctaagaagctttaaaaatataccacttcagggcatggtggctcacgcctataatcccagcactttgggaggctgaggtgtgcagattgcctgaggtcaggagtttgagaccatcctggctaacatggtgaaaccccatctctactaaaaatacaaaaattagccaggtgtggtggtacatgcctgtagtcccagctactcgggaggctgaggcaggagaatcacttgaacttgggaggtggaggagttgcagtgagcccgagatcrcaccactgcactccagcctgggtgacagagggagattccgtctaaaaaaacacacacacacactttccaggccgtactcaagaaaaattaaattagaaactcttggaggtagggcctaagcattctttaaagctccacagtgattctaacgtgctatctgggttaacaatcactggcctaggtactaggtaaatttatcctaatttcttgcacttctcccttcatttcttgctcactaactttaggtcactgcctgcaattagttttatcaaccctgctcagaggacagaagtaggtgttt

SEQ ID NO: 619459 - DNA, 477 bp, Homo sapiens
atgctgaaatttatttgtattccctaaatcaatactcccagtgcttttgtggtcattcacagacatgcagagagcagcaaaaaattgagttgcccagtgcatatgttttcagcaggggctggacaaggtgatgctttaccttcttgttctagctctcctactataaacaactgttctttcctagtctacgtagcatcacagttttttttttgtatttttgtgctttttgttggtgattttgctgtttaaaatagccaccaaacatagtgctgaagccctgcctagcattcctaagccagagaaggctggaatgtgtcttatggagaaaatgyatatgttagataagctttgttcaggtatgagttatagtgctattgcccatgagttcaatgttaatgaatcgacaatatatattaaataaggtatctttatatagaaacacacatcaaacaaggtcatatattgattagttgatga

SEQ ID NO: 619460 - DNA, 212 bp, Homo sapiens
caggtatgagttatagtgctattgcccatgagttcaatgttaatgaatcgacaatatatattaaataaggtatctttawatagaaacacacatcaaacaaggtcatatattgattagttgatgaaattgttgtaagcagaagcttgtaggaccctaaccttatattaccctaggagcaattgttcagaacacttagtattcatggtgacttt

SEQ ID NO: 619461 - DNA, 481 bp, Homo sapiens
ctagcattcctaagccagagaaggctggaatgtgtcttatggagaaaatgcatatgttagataagctttgttcaggtatgagttatagtgctattgcccatgagttcaatgttaatgaatcgacaatatatattaaataaggtatctttatatagaaacacacatcaaacaaggtcatatattgattagttgatgaaattgttgtaagcagaagcttgtaggaccctaaccttatattaccctaggagcaattgttcagaacacttagtrttcatggtgactttatagaccatacctcctgtggataatgagaatcaactgtgtgtgaaaataaaattgacatttaactgggattcccatattttatccagcaactccatttatgtgttcctttacataaaagtttatggactcctgctctatcttatcatcaattatctttcaaaaacaagttcaatcatgtcttctggtaactcccaca

SEQ ID NO: 619462 - DNA, 386 bp, Homo sapiens
ttgaacagtcctgatttaaataagactggcttatagctaaatgaatatgatcagcttttttgaattttgatagtaattcaaagtactattaccattttccccttctaaagatatgattggacttcactagtaatgtccaacttctcacagagatggcaaatgttgtctcaaaacatattggaggtcagttttatatttacatttatacaactggttatatgamtatatttaaatactggggaaatatcttcactgtctcagaaccaagtaacactcacctgtggtttaatttgtgttcattggcgtattaagggcaagggttgaagataagatagcaatgtctactttatatttttggtcctgactatgctaatctaatcagaatt

SEQ ID NO: 619463 - DNA, 386 bp, Homo sapiens
ttgaacagtcctgatttaaataagactggcttatagctaaatgaatatgatcagcttttttgaattttgatagtaattcaaagtactattaccattttccccttctaaagatatgattggacttcactagtaatgtccaacttctcacagagatggcaaatgttgtctcaaaacatattggaggtcagttttatatttacatttatacaactggttatatgactatatttaaatactggggaaatatcttcactgtctcagaaccaagtaacactcacctgtggtttaatttgtgttcattggcgtattaarggcaagggttgaagataagatagcaatgtctactttatatttttggtcctgactatgctaatctaatcagaatt

SEQ ID NO: 619464 - DNA, 386 bp, Homo sapiens
ttgaacagtcctgatttaaataagactggcttatagctaaatgaatatgatcagcttttttgaattttgatagtaattcaaagtactattaccattttccccttctaaagatatgattggacttcactagtaatgtccaacttctcacagagatggcaaatgttgtctcaaaacatattggaggtcagttttatatttacatttatacaactggttatatgactatatttaaatactggggaaatatcttcactgtctcagaaccaagtaacactcacctgtggtttaatttgtgttcattggcgtattaagggcaagggytgaagataagatagcaatgtctactttatatttttggtcctgactatgctaatctaatcagaatt

SEQ ID NO: 619465 - DNA, 386 bp, Homo sapiens
ttgaacagtcctgatttaaataagactggcttatagctaaatgaatatgatcagcttttttgaattttgatagtaattcaaagtactattaccattttccccttctaaagatatgattggacttcactagtaatgtccaacttctcacagagatggcaaatgttgtctcaaaacatattggaggtcagttttatatttacatttatacaactggttatatgactatatttaaatactggggaaatatcttcactgtctcagaaccaagtaacactcacctgtggtttaatttgtgttcattggcgtattaagggcaagggttgaagataagatagcaatgtctactttatatttttggtcctractatgctaatctaatcagaatt

SEQ ID NO: 619466 - DNA, 555 bp, Homo sapiens
cagaattcgcagcgttagagatcccaccattcagacttattcaagtcctttcccatgggcaagactcaacaaaaccaacatgctcactcacacatttacagtgaaaacagtcacatcttcattttagcaggtcaataaccttggaaaaaaaaatacattcggattggagttgtgctgtgaatatgaaattaaaataraagaagccagctgttggaagaaatatttttaccaagccatggtcagctaataagttcccattctccactatcgagagacagatactgtttatcctgcttgtgaacccctttcctttctgatttctgtgtttctgaccaattcctttctcttcacctttcccttctcaatgctccaagccaactctcagaactcaactcacaaaaacattgcaccatcatcatcctttgcatggagttcgtgccaatcctagttgcacttcctcatcagaacctgactattttatgatcatttctcaaagcttctcttctcagtccttgctgctgtcagtttccccttcaccaagtgcttggcctcctt

SEQ ID NO: 619467 - DNA, 588 bp, Homo sapiens
tagtctattttccattcacccttactctaagaatggagtgctttgtggtcccaatcaaaagcctggattgtttgccagaacttctcttccataaagggcactgaaacccaaactgtgcccacctggccctgtcaaagtgctaaacctctgttttcccttttgccactcagttgtcttccaaattagcaactgcctcaaggagagatgcagtgcccggtgccaggcttgcctctcttagcttccatctcttctggatcttggctctacaaattgccttgctagttctctgataattccaagcacatgggttttggattttcccttgttaastattctgtctagcttttctagtcattcttaatggcaggattgctctgaaataaactagtcagccatatccagaagcagaattctacatatacatgagtgaaaaatgttatcataatataaatactttctaataacttgcttttctcacttatccatatatgaaccatccacatctttcataagtatgtcaatattaatttgtgcaataatttaatgctagatagaatttctaccattctatgattgtagcataatttt

SEQ ID NO: 619468 - DNA, 598 bp, Homo sapiens
tgtgcctttggactcaaatcacttatagactttggatctgggaagtgcagagaatgaagttttacratggtgcttcctcatcgacatcaagaaacacagtctgtgtcaggcaccactgatctaaatagatgagggtgctccctgccagaggcaattggcctggaggctttcaataccaggcactgcccagctgtctgggactcggggcacggacggccaccgtaatggtgtgccacacagcccagtgtttaggaagttcttagtctaaaaaaaccaggctgagtgtgctgattacttttgtggctttcagtaagttgcaagaagaaatagacaggcttcagccgaattggcacatcaggaggccatgcagtcttggataaaagccacggaatcttgcagaaggaggactttccagcctgcaccaacaatcccaaattggaagaggcatgtttcctgcagaatgcaaaagctgtatgaacgctcccaagttggagtaagtgagagttagtcagagaggcgggtaaacacctgggaagtaagcctgagagcaggcttacaggctgggtgtgtgacctgcatggtcacacatcaccccaca

SEQ ID NO: 619469 - DNA, 598 bp, Homo sapiens
tgtgcctttggactcaaatcacttatagactttggatctgggaagtgcagagaatgaagttttacaatggtgcttcctcatcgacatcaagaaacacagtctgtgtcaggcaccactgatctaartagatgagggtgctccctgccagaggcaattggcctggaggctttcaataccaggcactgcccagctgtctgggactcggggcacggacggccaccgtaatggtgtgccacacagcccagtgtttaggaagttcttagtctaaaaaaaccaggctgagtgtgctgattacttttgtggctttcagtaagttgcaagaagaaatagacaggcttcagccgaattggcacatcaggaggccatgcagtcttggataaaagccacggaatcttgcagaaggaggactttccagcctgcaccaacaatcccaaattggaagaggcatgtttcctgcagaatgcaaaagctgtatgaacgctcccaagttggagtaagtgagagttagtcagagaggcgggtaaacacctgggaagtaagcctgagagcaggcttacaggctgggtgtgtgacctgcatggtcacacatcaccccaca

SEQ ID NO: 619470 - DNA, 599 bp, Homo sapiens
  misc_feature 424, 441, 451, 483: n = A,T,C or G
atcctgctggagatatgaatgtgagagtcatcaacgctgaatattgatctcaccaaaaattacaatacagctataatgggaggatggtaggaggagaaagtatatgtgtgcatgggtgctctgggggggattgtgtgtaagaagttaactcttcatgtcatatagcaggaagccagtggttgataactgatttggggtaaaaaaatttgagaaacagctgtatatgcatcacaagaaataactgttcaaaatctttaaaaccttctttcctgccttttttgaggggggtatttttaaatttttcttatttatttttactttttaacaggtttattgagacataatttgcatcccatacaattcatcaacttcaaatgtacaattcattacctttcagtatattcacaragttgtgcaaccatcnctattataaaacttagnatattttcantaaaccaaaagaaaaccctggaccctaaagcnaaaacccctccaactcccccatctttccccctagccctaggcaaccacaaatctcttttctgtctttatggctttgtctattctggatttttcctatggatgggaattacataata

SEQ ID NO: 619471 - DNA, 525 bp, Homo sapiens
taagtttagggtttagtaatatactaacatttatttcatataccatgataaaataagatgataaaaatggataaaactgggtaagtgatatatgagaactctttgtactgtctttgaaacattttagcaaatataaaatttttccaaaaggaaaaggttttgtttgattgttttttgtgatttttttttttttttttaagagagcgtctcactctgtcgcccaggctggaaggcagtgataccaacatggctcartgaagcctcagcctcctgggctcaagtgatcctctcacctaagcctcctgagtaggtgggaccacaggtgtgtgtcattgtgttcagctaattaaaaaaacaattgtagagatggggtctcaccatgttgcccaggctggtatcaaactcctgggctcaggcagtccttctgcctcagcatcccaaagttttttgggcctagccaaaaaagtttttcatgtacatgaaaaattacatctatctgtctctatgtctctatctttgtatttc

SEQ ID NO: 619472 - DNA, 632 bp, Homo sapiens
agttgtaaatttcctcttagtgcctacaaagtttggaaactgcagttttacaacataaggctttgggccttctgtatcaacaataaaggaatccaaatccacattttctctaattatgatttggaagtccttgcttgaagtgaatatagtaagatgttcatgctgcccttgctactgtcgttaattgtgcacagttctcccatgatccttcaccmgctgctgctactgcctatactgaggtggtcagaacaaagttcaggagaaatagatgttgaaatggacaaaaataagtgatcgtatgtcctatatgtatttcttaagaaggaaataaatatttagcatttggggagtctcttggttattcagatttctagctagatcagaaataggtaagatttactagatttcttaatccttttattaaacttattggattctggattgtaaagcacttgatacactttcatttaacttgggtactcaaatagtatctttcacatatagctatttttatagcaaccacacctgtgtcttatagagcaatccataggtgtcttttttatttaacctgtagaatattgagaatgtttttagtctagaattgcattgatgtataacacttcacagctaaa

SEQ ID NO: 619473 - DNA, 570 bp, Homo sapiens
aaattattataatcatattgacagatggatgcttacttctaggcagttagaatactagagaaaaataggtagtagggggttagggcaggacaaaggggtggagttttccatgctccaccaggcacaytgtccccattttcttatatcgtgccctcactatgcgttttctccatcatctagcacactcgatactgtttgtttcgttgaaagttgggttgcccttgggcttacaagttctttgataacttgtaatataaagactaataaagtaatcatattctcagatccagcacactgcctgacacacagtacctgttcaatgtatactgaaataagttcagcgagtaagaaaggcataaaaaagtcagacacagggagagttaagatgattatttctcctatcaaaatgtatttagtgcttcctatataatccagacactatgctaggcactggagatataggtactgttgggggtggcgagagagtgtgtgtctatgtgtgtgcgtgacaggggaataacattaactcaatagagtatgatctgtactaccaaacagagaagcagaaag

SEQ ID NO: 619474 - DNA, 566 bp, Homo sapiens
tgaatataattaatattttagtaaaaatttaatctcttatcctattataggaattctgtgctcaagaatttttgcaaccatcaaatcctagaaattagagtccaaacattactatcagataccatttttaccttataaactaattaaagattttagccaaacttctaaataatgagatttaaaacattcataaggaattaatattctagcatttcttcttcacaaagtacttacccagtgaacaaagaaatttcaacttaccaaaacaacaaaatactgcatatatttgaggattcttccaactggaactaaacagttggagctgtatgttttaggcatgtaagccttattcaattctactttgaatatagttaatattttagtaaaaatttaatctcttattctgttataggaattctgtgctcaagaatttttgcatccatcaaatcctagaaattagagtccgcacattactaccaggtaccatttttaccttataccctaattaaagattttagccraacttctaaataatgagatttaaaatattcataaggaattaataa

SEQ ID NO: 619475 - DNA, 532 bp, Homo sapiens
gaagcagcagcaactggtggagctggagccgcagcagcctgagtcgccgcagcagcccctgccggagccrcagcaggaggaggaggaggcgggcgccggggtgggcgccggggcgggacacggagcggggccctgggacgaccccttggaaaagcctttggcggaaacggcgctctgttgagaggacatcgcggagctcctcacgacaaacctggaagaaaggcagcctttcaaaggcgagccggctttttctttccaccaatggaactctgtctgggcttttgagattcggcttagtgtacaagtcagcctggcctgggacaaggagggaaaagcacccagaaagagcggacgcaaagaagcaaatccaagcaggtgtttccagtgagttaaacatgctcagagcaggacacaatccatgcaatgaatcaatgcatttccattttctctgactagaagaagactgctcaagttctccacagtggaaaataaacagcacactgcggcaacttatctgtatgatccagtccaa

SEQ ID NO: 619476 - DNA, 479 bp, Homo sapiens
ttataaattattggttaattttaatagcttgtttttctaagttctttacaatttgatattttttctttcagctcttttagtttttcccaattgttacctaatgcataatcaacattaagtgcttggtagtctaaacctttgatttgaactttttcttcatagctgaatatacctcttgtgaatgaatgtccattattacatgttattttatacttataggttaaacttagggccaatagaagcagttctatttttccaattcatatttttaataagagacacacatattccaccaagcccattatacattagtaaagttttattatgagatatkcattggaagttaaagccgttaaattgtaagaaacaggattcagtttatcccgaatcttgagacaaacccattcaaagggccatttctcatattttttattgcaatagctacatttgaataaaaaataattaaatcttctagaatt

SEQ ID NO: 619477 - DNA, 285 bp, Homo sapiens
tttattatgcaaaagaagctagttaatttctggtgcttgttattttggaacttgaagccacaatgtcttgtttgctattttgcatgctagaatctggactttaaaaactattttgattcctcttttacattattgaggcaactattttacttagaaatgaataaaatcaaagaatctcttaaatacaaggaaggaaaataagctatgtagttttccaaaaactctgttgaacatacataagctacaaacgctrttaatatacacaccaatttccatatgtttctg

SEQ ID NO: 619478 - DNA, 529 bp, Homo sapiens
cccacaaggcgcacacacactctgtgatattgttaatatacagagaaggagagaatgatattacttttaatatagcagggaatttaacctgccctgtataattttttataatataagggaggaagagaattatatttctttgaatatcacagtgggtgtataacttcttagtgatattatttttgatayctggggaggagaggataatattactcttaatatcacacactctctctgtgatattattcctaaattacagggaagaataaagaatgatattactcccaatatcacaggagtgtacaccctccgtttaatattgtttttaatatttagaaagaaacggaatgatattacttccaatatcacaggaaatgtacaaccccctttgatattttccttatatccaggtgaggagaggattatattactctcaatatcacagcagaagatgtacacctcccgtgtgatattgttcttaatagtttgggagaaaattatattactcccaatatcgcaggtggtgtac

SEQ ID NO: 619479 - DNA, 529 bp, Homo sapiens
cccacaaggcgcacacacactctgtgatattgttaatatacagagaaggagagaatgatattacttttaatatagcagggaatttaacctgccctgtataattttttataatataagggaggaagagaattatatttctttgaatatcacagtgggtgtataacttcttagtgatattatttttgatatctggggaggagaggataatattactcttaatatcacacactctctctgtgatattattcctaaattacagggaagaataaagaatgatattactcccaatatcacaggagtgtacaccctccgtttaatattgtttttaatatttagaaagaaacggaatgatattacttccaatatcacaggaaatgtacaaccccctttgatattttccttatatccaggtgaggagaggattatattactctcaatatcacagcagaagmtgtacacctcccgtgtgatattgttcttaatagtttgggagaaaattatattactcccaatatcgcaggtggtgtac

SEQ ID NO: 619480 - DNA, 551 bp, Homo sapiens
gcatgtacacttccctgtgatattgtttttaatatccaggttgggagatgatgatattgcctgcaatatcgcatggggtgtacacccccccktgatattgttcctaatatacagtgagggaaagaatgatattactcccagtatcgcagggagggtcccctccacccgtgagaatgttcctaatataaagggagctagagtatgatattactttcaatatcgtagagggtgtacaccccttctgtgatattgttcctaatatccaggggggagaagataatatttctcccaatatcgtaggtggtgtacaccccttaggtgatattgctcctaatatcctatggttaagtggctgctattactaccaacatcgcagaagtgaacatccccctgtgatattgttgctaacatccaggaagggaaaaaatgatatcactccagtatcccagagggtgttaactccttctgtgatattgtttctaatatccagggaaggagcggatgatattactcccaatatcgcagggagtgttctcccccccatgatattt

SEQ ID NO: 619481 - DNA, 551 bp, Homo sapiens
gcatgtacacttccctgtgatattgtttttaatatccaggttgggagatgatgatattgcctgcaatatcgcatggggtgtacacccccccgtgatattgttcctaatatacagtgagggaaagaatgatattactcccagtatcgcagggagggtcccctccacccgtgagaatgttcctaatataaagggagctagagtatgatattactttcaatatcgtagagggtgtacaccccttctgtgatattgttcctaatatccaggggggagaagataatatttctcccaatatcgtaggtggtgtacaccccttaggtgatattgctcctaatatcctatggttaagtggctgctattactaccaacatcgcagaagtgaacatccccctgtgatattgttgctaayatccaggaagggaaaaaatgatatcactccagtatcccagagggtgttaactccttctgtgatattgtttctaatatccagggaaggagcggatgatattactcccaatatcgcagggagtgttctcccccccatgatattt

SEQ ID NO: 619482 - DNA, 560 bp, Homo sapiens
tcttaaaccatataaacacttagtagacacacaaaatattcaattaaaaattggattaaaatcccaaaatactcttaggcctggaaaatacctttaaagaatagactaattttttatgactttggagaaaacaggaatatcgatttatcagtgccaagaggagycagctccaatgcagaaatggcttggcaaattaaaggcaagaacagagggccaagacctttggtccaagacatggggaaggtgtttcctaggaaggtgtttcctaggtcttatattaatgttatccactgcaacacactactacaacacacccacgcccacccacactgccacaccccccaaaaccattgcctcaagtatccttccagactcttcttccagaatacatatgattactttgtgtgctttctttggcttccccattttgaggcaatttattaaagataaagacagatcccatacatgatgttttggcttgtctctggcttcctagactgtccctgccctggtgaagtgaacaccactttctctttgaagcctatcccagaactatgaat

SEQ ID NO: 619483 - DNA, 584 bp, Homo sapiens
aagaaaacaaaacaagacataaacaaaatcaccaggctcagkttatttcaggggaaattctgtcaagcctttagagaccagattactccagtgttaaataaattatttcaaagcgtagaaaattaaacaagaaactcttatattcatttatgaagcaactgtaacatttatatacttaaactggataaatatagctaaataaataaaattccagaattatacaacttatgaaattgatgaaaaaatttaaataatgtattagccagcaaactccaacaccaaattgtaaaaaataatatactatagctaagtgaaatttaaataaaaaatgcaaacatggttcatcataaggaaacgtactctataacatatcatcttaatacagctaaagtaaacaaaaaatcaaaattatcttctgtagatgctgaaaaagccttagaataattcaatatatttattataaaaacactgtgaacatagaaatggatagataccttttaaatcccaaagccaacattgtacatatgggaaaaattagaagcattcccacttaggccaggaaaaaggcaaggatgtccactaac

SEQ ID NO: 619484 - DNA, 584 bp, Homo sapiens
aagaaaacaaaacaagacataaacaaaatcaccaggctcaggttatttcaggggaaattctgtcaagcctttagagaccagattactccagtgttaaataaattatttcaaagcgtagaaaattaaacaagaaactcttatattcatttatgaagcaactgtaacatttatatacttaaactggataaatatagctaaataaataaaattccagaattatacaacttatgaaattgatgaaaaaatttaaataatgtattagccagcaaactccaacaccaaattgtaaaaaataatatactatagctaagtgaaatttaaataaaaaatgcaaacatggttcatcayaaggaaacgtactctataacatatcatcttaatacagctaaagtaaacaaaaaatcaaaattatcttctgtagatgctgaaaaagccttagaataattcaatatatttattataaaaacactgtgaacatagaaatggatagataccttttaaatcccaaagccaacattgtacatatgggaaaaattagaagcattcccacttaggccaggaaaaaggcaaggatgtccactaac

SEQ ID NO: 619485 - DNA, 534 bp, Homo sapiens
ttcaaaaaacagaggaggagataatactttcaaacttttctataaggccagtattaccctgaatacaaaaaccagacaaagacacattaaaaacaaacaaaaaaaactataggccaatatctctgaygaatattgatgcaaaaaattcttaacaaaatattagcaaactgagttcaacaatactttagaaagataattcatcatgaccaagtgggatttatccctgggatgcaaggatggttcaacatatgcaaatcagtcaatgtgatacattatatcaacagaatggaaaaaaagcatatgatcatttcaattaatgctgaaaaggcatcagataaattttaaagcatcagataaatgttatccttcatgataaaaaccctaacaaatactggggatagagggaccatacctcaacataataaaagccatctatgacatacccatatttcgtatcatactgaatgcagaaaaacgtaaagcctttcctctaatatctgaaacatgacaaggatacacactgtcacctctgtt

SEQ ID NO: 619486 - DNA, 625 bp, Homo sapiens
ggcttaaataatatgttatggattagtcggagttcttcagagaaacagaaccaatagaaccaatgtattggcttacatcattacggaggttgagaggttcccatgatctgccatctgtaagctggagacccagtggtatagttccaaggcctgagagctggagagtcagtggcatagactccagtctgggtctgaaggcctgagaaccaggagtacctagggcaggagaaaatggatgtcccagctcaaaaggcagaattaattcaaccttcctctgcctttttgttttattyaagccctcaaagaattggatagagcccacctcattaactttagtcaatccaccaatttacatgttaatttcttctggaaacaccctcacagacacacccagaaataatgtttaaccacttatctgggcatactgaggcccagtcaatttgacacataaaattaaccatcacaatgtaattctatgacgtgagaaaattgcctttaaacagaaagttaaaaacttgccttgaggtagaaatttcatcatatatacggggtgtccgtgtatgtgtataatatatagtcaaatttatttctcaagattaaaatatcaattgcttaatatactttt

SEQ ID NO: 619487 - DNA, 590 bp, Homo sapiens
gatgcatttcttgaggctaatgcaaataaatgtaacccctaaaggccaaaacaagcatagytgttttgaaacacagtgagttaaaactacaatgagctatgagcagtgacaaagagcaagcactagaataatcctgtgtgaaattttaaactagattgtaagtttgagatttttcaaaatacttagggagtagaaattcaagcttcatatctgcatgaaggctagcttgtggttaccaatattcagagaatattttgtttcctttgttcagggctcaagttcaagatggacaattttataaatagtctcctgggtaggtttgtttattgtttaacttatactgagggcatagaacattagagtcttagttttatgtggtgtggaaagttcaagttccttttagacttcccaaatggggtagatgctcagttggggttctgtgtagcccttgtgtgtgcttccatggcctgataactaaaattgaagtccatccaatttgataaattttctcaatgtaaaagacagtttgtttctctgttttcttctctggattctattttattttttacctctagtaatttttttttttt

SEQ ID NO: 619488 - DNA, 639 bp, Homo sapiens
taaaatacaatattgccattttgaaaattcatggatgtggattatgctccgtattgagaagatggtatttgtaacttgtttttaatgccagagccttagggattctcgaccaccaatctattgatgcattattttctgagtttgtactatgtgctgaaaagcattcagcaaataaaatatacctccatgtcactttgtttgctttcatacaagtaaactttawaaaacatcatgaaattggagcggtctccagctaggaaattttattatggagatgttattgccagtatttctgaatattctcaagcatacattcagtctgagaactgataaagtgctataatattataattgtatgagagtatgtagaatctatgtgaatccttatatataaagattataccaattaaataaattttcttgaaattttatcaagacattatatttagaataattccagaatgtcttttgccatttaattcattaatctgagtaatcatttatttatccattcaaaagtatctttattctgactgattaaatttagaaagaagggcaaagttttgagaatgagccccagtttttagttttaagtcagtgaatagatcttgttgtctttaactagaatgaaaaacccag

SEQ ID NO: 619489 - DNA, 595 bp, Homo sapiens
taaaatacaatattgccattttgaaaattcatggatgtggattatgctccgtattgagaagatggtatttgtaacttgtttttaatgccagagccttagggattctcgaccaccaatctattgatgcattattttctgagtttgtactatgtgctgaaaagcattcagcaaataaaatatacctccatgtcactttgtttgctttcatacaagtaaactttaaaaaacatcatgaaattggagcggtctccagctaggaaattttattatggagatgttattgccagtatttctgaatattctcaagcatacattcagtctgagaactgataaagtgctataatattataattgtatragagtatgtagaatctatgtgaatccttatatataaagattataccaattaaataaattttcttgaaattttatcaagacattatatttagaataattccagaatgtcttttgccatttaattcattaatctgagtaatcatttatttatccattcaaaagtatctttattctgactgattaaatttagaaagaagggcaaagttttgagaatgagccccagtttttagttttaagt

SEQ ID NO: 619490 - DNA, 595 bp, Homo sapiens
taaaatacaatattgccattttgaaaattcatggatgtggattatgctccgtattgagaagatggtatttgtaacttgtttttaatgccagagccttagggattctcgaccaccaatctattgatgcattattttctgagtttgtactatgtgctgaaaagcattcagcaaataaaatatacctccatgtcactttgtttgctttcatacaagtaaactttaaaaaacatcatgaaattggagcggtctccagctaggaaattttattatggagatgttattgccagtatttctgaatattctcaagcatacattcagtctgagaactgataaagtgctataatattataattgtatgagagtatgtagaatctatgtgaatccttatatataaagattataccaattaaataaattttcttgaaattttatcaasacattatatttagaataattccagaatgtcttttgccatttaattcattaatctgagtaatcatttatttatccattcaaaagtatctttattctgactgattaaatttagaaagaagggcaaagttttgagaatgagccccagtttttagttttaagt

SEQ ID NO: 619491 - DNA, 591 bp, Homo sapiens
tctgggcagggcatctctgaaaaaaaggcagcagccccagtcagggacttatagattaaaacccccttctccctgagacagagcatctgggggaaggggcagctgtgggtgcaacttcagctgacttaaacgtccctgcctgacagctctgaagaggacagcggatctcccagcacagcgctcaagctctgctaagggacagactgcctcctcaagtgggtccctgaccccttgtatcctgactgggagataccttccagtaggcccaccagatacctcatacaggagagctctggctgtcatctggcgggcgccccactggcacaaagcttccagaggaaggaacaggcagcaatctttgctattctgcagcctccgctggtgatacccaggcaaacagagtctggactggacctccagccagctccagcaaacctgcggmagagaagcctgactgttagaaggaaaacagacaaacagaaaggaataacatcaacatcaaccaaaaaagacagactgcctccttaaggaaaactaacaaacagaaaggaatagtatcaacatcaacaaaaaggacgtccactcagagac

SEQ ID NO: 619492 - DNA, 594 bp, Homo sapiens
tgtgtgtgtgtgtgtgtgtgtgtatatatataatatatatacacacttaagtaggtgtatatatacactttatatatatacacatatataaatattaaaagtaggtatatttatatatgtgtatagatacatagtttttatttttttatattttatacatactttttatattttgtgtatatayatacacatatatttatatatatataaaaagtacgtgtatatatataaagtgtatatatatatacacttaagttatagttacttaaaagtatgtgtagatataggtttatatactttaagtgtatatatatactttatataaatgtctgtatatatatatatatgaacattttttggccaggcacggtggctcacacctgtaatcccaacacttttggagtccaaggctggtggatcacttgagcccataagtttgagaccagcctgggcaacatagtgaaaccctatctctaataaaaatacaaaaaattagccaggcattgtggtccacatctgtaatcccagctattcaggaggctgagacacgagaatcgtttgaacctgggaggcagagattgcagtgagctgtga

SEQ ID NO: 619493 - DNA, 594 bp, Homo sapiens
tgtgtgtgtgtgtgtgtgtgtgtatatatataatatatatacacacttaagtaggtgtatatatacactttatatatatacacatatataaatattaaaagtaggtatatttatatatgtgtatagatacatagtttttatttttttatattttatacatactttttatattttgtgtatatatatacacatatatttatatatatataaaaagtacgtgtatatatataaagtgtatatatatatacacttaagttatagttacttaaaagtatgtgtagatataggtttatatactttaagtgtatayatatactttatataaatgtctgtatatatatatatatgaacattttttggccaggcacggtggctcacacctgtaatcccaacacttttggagtccaaggctggtggatcacttgagcccataagtttgagaccagcctgggcaacatagtgaaaccctatctctaataaaaatacaaaaaattagccaggcattgtggtccacatctgtaatcccagctattcaggaggctgagacacgagaatcgtttgaacctgggaggcagagattgcagtgagctgtga

SEQ ID NO: 619494 - DNA, 544 bp, Homo sapiens
gtgataaaacttcagatttgaaaaactctacaaatcttaagcaggataaatacaaagaaaatccacagcgcctgaaaacatcatagtaaaacttatcaactcccaaaatacagaacacctttaaaacagacatcaggtgggttggagtggagaacagaaacaatatgactaggaattaacctataaaataaataaataaaacacagaatgaaaaaagccaaaagacaataaaatgatattttcaaagcactataagaaaataattgccaacctagaattctattggttcaaaatatcctttcaaacatcgaggtggatttccaagatgtttagagaaataggaactaaaaattcatgacaggcaaacctgcactaaatcaaatactaagaagcgttctttcagaagaagaaatatgatactaggtggaggtcagacattcagaaaagaatgatgagcaacaaaaaatgayagtcatttggctaaatcaaaacagatgttgaccaataaaataagtatactttcttgcagggtgtgaatttaaga

SEQ ID NO: 619495 - DNA, 622 bp, Homo sapiens
ccttttgtagtttcttctgcctgcttctctgtaagtgaaaatgaaagaatttgccagtatccatattctgtcccaaatgtctccatagatccacaaacaaatggtgtaaagaggtaaaaataaaatacgaattttcattttgcattgttgctatcttagaaatcgggttttgcaatttacctagtgtgtgtagatatctggaggggagagagagaaaaatatgaatgtatatgtgtatgtattttagtggtttgtatttgtacattcacgtacctataggaaaacataaaaagccccttggatatttcatactgtatattagctttccttcagaaaatatatttttccccttaaataggttgatctcccctgccccaagatgtttaatttttatttcttcctctacactgttctttaaaacatgaatttgtagctgataaaccttaaagtccttcatagccattactttcttttgrctaatttgtagaaaggcaccatatgaaaattggatttttgatctgatggagtgattcttgagttcttacgagccatttatagtctatcaagtaaatccttcttagttcacggattattgacccaatggaccatattagctgcttcg

SEQ ID NO: 619496 - DNA, 597 bp, Homo sapiens
catgtcttgaatttttattcaaattactttgggttttaatttattcagtcaaatgtcaaccaagtgttgtttatcctgtggattacattcatgctcactgcagaattctctaacattttgatttctaattattttcttgtttatccatgtggtaggatgttttgaatattaccttctgaccactgaccagttggaattataattttctctcttttctaagcatctggtaagtaaaatttagcaagtgtgtagtcttagcacatctatcaactgcattgcaacaacttttattccatatagcattgtcttccttagttatttattgtgcttgaacaagccaatgtattttggatattggagctgagccttgtacacaacgtgcaactgcarcctttctaagattcctgtgcacaaggctatacaaagagatattgaggcgcatctccaaggaattccaaactaacagaaaaagttaattgaagaagctgtgaagctgtttctataccagagatcaactctaaactcctctattccattttctcccactcagctgtttccttctattcttctctggattctatcccttttctctctcct

SEQ ID NO: 619497 - DNA, 315 bp, Homo sapiens
gtgaggtgccctgatactggtgtgaaagtaggatgaaaaccttgcacacattttcactttcccaacttctggttgaatggaaaggattcagaggacctataagaggggaatcatgmgatataatgaccctggtcactggatgactgcatgaagccaaggagcttgctgccaacctgtgatgaaggcaagaagtaacattttattgtactaggcctctgacatttgggaatatttttaaacaactgttaacctattgctaacaatagcctactgtcaacaataaaatactattttcaaaaattttcaaaaatttat

SEQ ID NO: 619498 - DNA, 315 bp, Homo sapiens
gtgaggtgccctgatactggtgtgaaagtaggatgaaaaccttgcacacattttcactttcccaacttctggttgaatggaaaggattcagaggacctataagaggggaatcatgagatataatgaccctggtcactggatgacwgcatgaagccaaggagcttgctgccaacctgtgatgaaggcaagaagtaacattttattgtactaggcctctgacatttgggaatatttttaaacaactgttaacctattgctaacaatagcctactgtcaacaataaaatactattttcaaaaattttcaaaaatttat

SEQ ID NO: 619499 - DNA, 617 bp, Homo sapiens
cttgtttaggttgtgtagaccccctgattatttattatgtcagcagactttatgtaataggaaagacaattgctcaagggcatagagagatattgttaaaaatgggaattgaatgcccagcaaccaaaaaaataagtccatggtactttactttttataaaaaatgtaaaacatattcaacttaacctttgcagcaacactctgaaatatacaggcagtattaaaactgtgttatagattaggtaatttaggattaaacatatcaggtaaattctcccaaatcacatagtaattcagtgacagaataatattcaaaaccaagtgtcctcattatatattttatgtttttctttgctttctttcctattctttggggctttgatacacaaacagataagatcattgaggaacttcagttccaaaatattttctccttttatccctctggccctcccaccctctgtcatcactccttgtatctttctttgttccctttggctaatattattgaaagcttattgaatcctcttcccttaattaatttgaaaagatgaacttcaggtactgagtgtattgactttttttttttwatctccatgtctgtattaattaggatg

SEQ ID NO: 619500 - DNA, 507 bp, Homo sapiens
ttttagtagagacgggatttcaccatgttggccaggctcatctcgaactcctgatctcaggtgatccaaccaccttggcctcccaaagtgttgggattacaggcgtgacccacagtgccaggccattactttttctgtagtgttatatcatctggcttttgattgcttkatttgttaaaaccaaccatgttttccttttgctttcccaaaagaaggtaagttccttgagagtagaaactacgtatattgtaatgatttaaactgtgggaactgtagctagacaagcctagctttgtcatttaatatctgtgtttaagtcagctaacatcactggacttcagtttctttctctataatatggagacaagagttctccagcctcattacattcataaaataattacattcatttataagcataaaatacttagaatagttcctgatacataataagtgctcactataaatcagctacatatttgatttcccagaatagcgtttatcaca

SEQ ID NO: 619501 - DNA, 436 bp, Homo sapiens
agccctgaaatatcaaaaagagaagaatcaaatactgtaaaaataaaagagaggctcaggagagatgtggtaaaaggccgtggtacctttgagagttctgctcttctaggtaccacttctatcttagtgcattcaattataaaatagagaagtttttaaatgaccacataattgcattggtttattcaaagcaactccatggtgccagctttgtaactatctgcctaagacacaattgtttctctggctgaatcagagtatgttttccctaggaagccagcatggttctggcacaacaagaaaactgttcttttggtttcaayatattcatctgtaatctctatctcatcttagaaaagattccactctttaagggcagccttagaagtcttttttttttttccagttttgtgtatatagttttgagatagcaacc

SEQ ID NO: 619502 - DNA, 548 bp, Homo sapiens
ataatgaattgatgaattaactttttaaaaatcaattttaatactgtgtattgtrtgcagcacacaggatttgataccaggcactcaggatttggtaatcaagacaatacctctatttcatcaaataactaagggaatatgataaaatcagaagatagtaactgtttttctgcatcacttcacaatctttgttgatataacaattatgttcaaaatgtgatgttgattgcttcttaattttgtatttttggatcttctttcctgtcttcctgaaaattcttgttaaaatttcctgttttccgtaatcatttatgatagcaagagacacacatatatttaccaagaatttaacataacttcttagtattttgtcgaaaaatgtgtaacatttcacaaaatttattaacataaatgttataactactagccttattcttgttgttaccacagaaaaaacattttggggtccataatataataaaatatggcagaaatacttgtatatttcagagtatgtaatgaagtcataagtacaacatttgttacat

SEQ ID NO: 619503 - DNA, 575 bp, Homo sapiens
tacaactttcttgagagaagagaaatttcatagagtacataaaatataccactggttatacaaatatatctgtaacactacacaatctaaaataagaaaaagataacaagaagaggtaaagcagaaagggtttatcccaacatatgttaacattatctttgagaatttcctccataagacatgacaatcagttagaaagagagaaatctaaattctccactagctgtcttatgttgcccaacagtgaagtcatattttgaatgtgtatcyatttagtctttattatatagatgctattagccttcaaacatgttttattagacttcacttactatttattcattaaccagtttagttgttagattcttcagctgtgaaaagaagggattaactaactgatcaataaggttccttccaatcctaaaattatagtcctataattataggtattgcagtgtagtgcaaaatgtatcttacagccatggaggaaggcagctgaaaggtatttctcagataaacatatgttccagtttctagtaattggctgactcaaaaaatgttgcaaggtattttgc

SEQ ID NO: 619504 - DNA, 598 bp, Homo sapiens
tgtagtgaattaaataatatatgtgttccatgtaagtatgtcagaattccatagggttaagaaaagtcaaaggcatgaaatgcaaacaatagaaagaccagagaaagtggtatagttttaaaagaggtaataaagaaaaatgaaatgtagaacaacttattaaagaagagaatatgcagtaaaaataaaaacatatttattatttatttatgtatttttcagacaagatcttactctgttgcccaggctgcagggtgcacttggagtgcactgcagggtattatgtatccctggagtgcaggggtacaatcatggctcattgtagcctctacctccctgggctcaggtgatyctcccatctcagcctcccaagtagctgggactacaggaacacaccaccactcccagctaatttttatttttatttttgtagagaacagagtctctctatgttgcccagtctggtttcgaactcctgggttcaagtgatctgcccatctcggcctcccaaaatgttgggattgcaggctgagtcaccctaccttgctgaatacatttttatagtttacttgcatgctatttgttgctgtaaaaactg

SEQ ID NO: 619505 - DNA, 543 bp, Homo sapiens
ctcattattttatctgagcctatttgatggttcacagatacttagttaattttccctttttttctttctcccattgggtgttagtcccttggtgtaagacatacagagacataagtaaatgayataaaatcaaatattacctctaagtcatgtatatagtttggctagcagtgaaagtatattttgttaacaactcctctgctctagctgctgtatagttaatggtgagagaatatgaaagcaaaacagcaaccaatgggcctgcagaaaatgtgcttgctactttccccaaacagctgctatttgattcaggaaatctgccatgcaacaaattaaaaatgcctaggacaattatgtattcatcaaaaaaaaaaaaaaaaaaaaaaaaaacccttgcagcctgttgcacatttcagaaaatacatttaaatggcttctttatattcaaatttaaaacatcatatatattgttctttgaaagtagagtaagaaaaccttggatttgagaaagagaagatggaaatattgagataaatatatgct

SEQ ID NO: 619506 - DNA, 543 bp, Homo sapiens
ctcattattttatctgagcctatttgatggttcacagatacttagttaattttccctttttttctttctcccattgggtgttagtcccttggtgtaagacatacagagacataagtaaatgacataaaatcaaatattacctctaagtcatgtatatagtttggctagcagtgaaagtatattttgttaacaactcctctgctctagytgctgtatagttaatggtgagagaatatgaaagcaaaacagcaaccaatgggcctgcagaaaatgtgcttgctactttccccaaacagctgctatttgattcaggaaatctgccatgcaacaaattaaaaatgcctaggacaattatgtattcatcaaaaaaaaaaaaaaaaaaaaaaaaaacccttgcagcctgttgcacatttcagaaaatacatttaaatggcttctttatattcaaatttaaaacatcatatatattgttctttgaaagtagagtaagaaaaccttggatttgagaaagagaagatggaaatattgagataaatatatgct

SEQ ID NO: 619507 - DNA, 542 bp, Homo sapiens
tgctttatatatccttaggtttatattctgcttaataattgcagaaacttttctccatttgtattttctttacagacacaattgtgttattagataaattgcacaataaagtgatgactattcagagcatgaagataccaagtcaaggttgaaacccttgcttggttgaggatcacatgtcagacttggtatcaaatcttcacctctaaraacacaacaggacaaacccaagtgacctctctgggcctcagtgtcttcctgtaagaataaaggtggtgaactgtttgatatcaaaggccctcacccgttacaaaaaagtagaatccttgacatattggcagcatgatctctcgaagatttttcacaatacactggaagggacatagtctagataatggagggatgatggtggttgggaatatggaatttataatcttttaatcttttctccttcaaaagaatattgtagcttggaggcaatttatagtacttgcatacttcttcaattactcttgggatatcagtattcagtaacagtaaaa

SEQ ID NO: 619508 - DNA, 542 bp, Homo sapiens
tgctttatatatccttaggtttatattctgcttaataattgcagaaacttttctccatttgtattttctttacagacacaattgtgttattagataaattgcacaataaagtgatgactattcagagcatgaagataccaagtcaaggttgaaacccttgcttggttgaggatcacatgtcagacttggtatcaaatcttcacctctaaaaacacaacaggacaaacccaagtgacctctctgggcctcagtgtcttcctgtaagaataaaggtggtgaactgtttgatatcaaaggccctcaccygttacaaaaaagtagaatccttgacatattggcagcatgatctctcgaagatttttcacaatacactggaagggacatagtctagataatggagggatgatggtggttgggaatatggaatttataatcttttaatcttttctccttcaaaagaatattgtagcttggaggcaatttatagtacttgcatacttcttcaattactcttgggatatcagtattcagtaacagtaaaa

SEQ ID NO: 619509 - DNA, 542 bp, Homo sapiens
tgctttatatatccttaggtttatattctgcttaataattgcagaaacttttctccatttgtattttctttacagacacaattgtgttattagataaattgcacaataaagtgatgactattcagagcatgaagataccaagtcaaggttgaaacccttgcttggttgaggatcacatgtcagacttggtatcaaatcttcacctctaaaaacacaacaggacaaacccaagtgacctctctgggcctcagtgtcttcctgtaagaataaaggtggtgaactgtttgatatcaaaggccctcacccgttacaaaaaagtagaatccttgacatattggcagcatgatctctcgaagatttttcacaatacactggaagggacayagtctagataatggagggatgatggtggttgggaatatggaatttataatcttttaatcttttctccttcaaaagaatattgtagcttggaggcaatttatagtacttgcatacttcttcaattactcttgggatatcagtattcagtaacagtaaaa

SEQ ID NO: 619510 - DNA, 550 bp, Homo sapiens
ctcctggttgctcaaggtgaaatctgctcctgagcaatctatgaccagtagtctaaccaaccccaagcatgtctgagtaaactacaaaagacaaacayagacaataaaagatgattcgagcaaagtttgaggtcttcctttatgccaaaaacttgtagtaggcaacaccttcactaagcaccaccagacatcacaaccatcaccacacgtgaattatcaaacttaaagtgtctgggtgtggtggctcacccctgtaattccagcactttgggaggccgaggaaggtggatcacttgaggtcaggagtttgagaccggcctggccaacacagtgaaacccatctctagtaaaaatacaaaaataagccgggaatggtggcaggcacctgtaatcccagctactcaggaggctgaggcaagaacctcttgaacctgggaggcagaggttgcagggagccagggtcgtgtcactgcagtgcagcctgggcctggatgacggagacagactctgtctcagaaaataaataaataaataaataaataaataaata

SEQ ID NO: 619511 - DNA, 550 bp, Homo sapiens
ctcctggttgctcaaggtgaaatctgctcctgagcaatctatgaccagtagtctaaccaaccccaagcatgtctgagtaaactacaaaagacaaacacagacaataaaagatgattcgagcaaagtttgaggtcttcctttatgccaaaaacttgtagtaggcaacaccttcactaagcaccaccagacatcacaaccatcaccacacgtgaattatcaaacttaaagtgtctgggtgtggtggctcacccctgtaattccagcactttgggaggccgaggaaggtggatcacttgaggtcaggagtttgagaccggcctggccaacacagtgaaacccatctctagtaaaaatacaaaaataagccgggaatggtggcaggcacctgtaatcccagctactcaggaggctgaggcaagaacctcttgaacctgggaggcagaggttgcagggagccarggtcgtgtcactgcagtgcagcctgggcctggatgacggagacagactctgtctcagaaaataaataaataaataaataaataaataaata

SEQ ID NO: 619512 - DNA, 322 bp, Homo sapiens
catctctctgaaacacttgaaaattttgaccmttccttttttcagggcaaaaataaaaattcttttgctttggcttctgcactgtcattctatctgtgttacctccttctttttggccatttattcccattgtcatactcttaaactcctttttcttttcctatttcttaactcatgatgttgttcaagattttattcccagtcttgttttctcattgtttacctcgttctccctaaaacctttcatttgactcgtgtttctgtacctgtatgctgtagactcaccaatctacattttcagttgtttgtactgacctccata

SEQ ID NO: 619513 - DNA, 322 bp, Homo sapiens
catctctctgaaacacttgaaaattttgacccttccttttttcagggcaaaaataaaaattmttttgctttggcttctgcactgtcattctatctgtgttacctccttctttttggccatttattcccattgtcatactcttaaactcctttttcttttcctatttcttaactcatgatgttgttcaagattttattcccagtcttgttttctcattgtttacctcgttctccctaaaacctttcatttgactcgtgtttctgtacctgtatgctgtagactcaccaatctacattttcagttgtttgtactgacctccata

SEQ ID NO: 619514 - DNA, 322 bp, Homo sapiens
catctctctgaaacacttgaaaattttgacccttccttttttcagggcaaaaataaaaattcttttgctttggcttctgcactgtcattctatctgtgttacctccttctttttggccatttattcccattgtcatactcttaaactcctttttcttttcctatttcttaactcatgatgttgttcaagattttattcccagtcttgttttctcattgtttacctcgttctccctaaaacctttcatttgactcgtgtttctgtacctgtatgctgtrgactcaccaatctacattttcagttgtttgtactgacctccata

SEQ ID NO: 619515 - DNA, 547 bp, Homo sapiens
ctggacagaatatgcttctgtgatctttagcagctctgtattgccccataaatgactcagctacaaatcagtgaatgtgcttcaggctttgatttttgttattagttcaaagatgaacatcatgaggacatcactcagagacagatttatcatgttttgtttcagatctcatagtgaaagctgaattttcttgtctttgttctaccaaatacattgctatatacatgatagtttaaaaaaattaaacctttttgaatatgctagagaatattaaccaatgcataataaaattaaatcaagtaggtgccatcacagtctaaaaatataacacccgatatatgtctgttgacatatttgttattcaaattcaaattttctttctcatattgttgtatatttacaaatgtgtatctatactatgcaaacattgatgrctttttaaaatttattttatattatgagtatataataggtgtatatatcatcaaatattgtatctgtttttctccttcatgaaacaaatgacaagatgagattagatgcacaa

SEQ ID NO: 619516 - DNA, 521 bp, Homo sapiens
cattatttgtttatgacctaatgtcattcattagttctgtttcattaaaaaaatggatattactgaagaaatatgtttatcaaagaaaagattcaaggtgggctttattatcttcaagcatgtggtctrttaagcaaaataagatattcagcaaaagactatgataaatcagtttctctttattgaagaagctactttgacatttccattccagctcagtctaagtctgcatgacaaacaactgtttcttgctagcttctgtattaatgtttaaactctctttggtaatcaggacttttaaacattttttataatgatttggatagaaatagtcaaatttataattacatttgtgacagaaaggtgaaccttctaacagtagtatttttaaacatatctctatactgaagcaaaaagaacaacctagcatcctttgccttatcatcttctattctataaaatatgaaaatgggataaaagtgaagtatacactgtgttttcaccctacgcttgaattaaga

SEQ ID NO: 619517 - DNA, 572 bp, Homo sapiens
catcttatgaactagtatattaatcattcagtgtaggaagcagaaggcaacattacatatcactgtgatgtgctaagtgctagtctcaaatattcatggcttargcaagagtttatcaaccttggtgctgtttagttgaagtcatggggggctattttttgtaaaatgtttaccagcatccctaacctttacccagtagatgttagtagtagttctcatccccagttgtgacaattaaaaatatctccagactttttgccaaatgtcccctagaggcaacatcacccctgatggatcactggcttcatttgagtatatttctaatcattatttttcattaaataattatgtttcagacttgcagtaaagatatgctgtaactttagatatgatttagaagtctatatcttagaaactactataaatagactcagtacaattggaagtggaattggactaccgatgattatattcattcacataaccatttgttaaatacacactaaatgcctgtcactgttccaggttctaggaatacaaaaataaaggacacatttgagatctgcattaca

SEQ ID NO: 619518 - DNA, 463 bp, Homo sapiens
ttacacagttggcaagtgatggatgctggattaagacacgagggacctcagtccaggccccatcttttaattgccattctgtattgcttcttgctgggtaatattgccactctttatcctcaacttctggctattttctcaataactttcctctttctaagtggtaaatactttgtttctttgaacaaattctaagagttttatgtccatataaactatgactataacaatttgaaattaattttgtgtgaagttggtgagtgcctaaatgtatgctggttaaaaagtgaaaacaaaaataaaacatatatacatgtgacccgtrgacacaccatggaaaaataaataagtaggtgacagcttcccaaaaggtgattatgtggaaagtatatagcgtaatgtactcattttccaggcgaggaggagtgtctggtctccacttcacgctgaaaaatatctccca

SEQ ID NO: 619519 - DNA, 609 bp, Homo sapiens
atcaaatttccacacattttctacaggatgctcagctaccactgataaggaaggaaaaacatgtctctaagcactttcaatatcagcaggtattggcagtgggtacaaggaagtcactatttccaagggacatttcaaaccaggactcttgctctaaatttttgagcctgaaagaattttggaaatctgcatgaaagtctcagtcaatgctattatcatggtggcatttatgatgtttatgaggtgataattgttaagacatcaaaacctaatattcctctgggatgaatacaagttataaaattaataaaatcaatattcttttttttccttttgcccagaggaaattrctatttatattatgtaagtatgatccaccctggcatttgtatgcaggaaactgatgtgtttaccaagatttttaagaaaatatctaaggtgatacacattgggcaaatatctgtcacattatgcatagaaatgaatttttatattggttttcaaatgctaagttaagctcttttgttatttttctaccagaatcaaacatatttaggtatctatttaagaaaaatggcatatatgtattacttttctgtgtaaatgagg

SEQ ID NO: 619520 - DNA, 420 bp, Homo sapiens
tatcttaaacagtgttatgartcaacataggtcaacagaatgaaccagaagaatgcatgactttaaaagtttattttccttgagaagatgataaagtacttactaaaatattacccaggtctctccttacattgcgtgaatcttaggaaaatataagttaacacaatgtatattcatttcctttattcaagcagccttgagagagaagggaccaaaggaaagatgccattaatctaatgaatgaagagctcctgtgttcctggggaatggggaatggatgggaacaacgtagaaggtgaggtgggaatgcctacgaaaggttgaagtctagatcacaaacttggctcccagcatgcactggcagctcatccatgcagtgtgatggatgacactccaaacccaattcttcacctcacgttc

SEQ ID NO: 619521 - DNA, 550 bp, Homo sapiens
taggaaaatataagttaacacaatgtatattcatttcctttattcaagcagccttgagagagaagggaccaaaggaaagatgccattaatctaatgaatgaagagctcctgtgttcctggggaatggggaatggatgggaacaacgtagaaggtgaggtgggaatgcctacgaaaggttgaagtctagatcacaaacttggctcccagcatgcactggcagctcatccatgcagtgtgatggatgacactccaaacccaattcttcacctcacgttctcccttagaaaggaatgagacttgygtcttgatccaggaaagaacatctgtaccctagaagccattggctatatttattttcaacagtgcatttcattacagccagggatgcacaggtttatttattcataacactaaatgctctccattccctcttttcctggctaatataaaagtgtgcccaatttagaagaaatgaacaagagagtactgaaatatgccctctgtgtattactgaagggatcccaggaacacttcagcagtaccaggtta

SEQ ID NO: 619522 - DNA, 606 bp, Homo sapiens
cctatgatacccagaagataaacctttatgatagttttgaagcatccaagaaaggtaattgatagatttttaacatctttgtttcctggaattcaaatttctaggtattcttaagagatttttttatttttcaacatacagttaataagttgttaggaatatttgcatgcaaagatttattttcaaaatgcatataaattttatcagagaagataaagtataattcctcttgcaaaaaatctgcttataacatgaaatacaattacatctgttagtgaaattttttttctattgatccttccatcttattatagaagcattcctatttttaagaacccacaaatataaaatttatatgagtggattttaccaattttgcaatccattcttacatctttatttgcattatctttcaatcccattatattattactgtggtctcaattgattggctaccttgaaagttatgtggttctaagtgacttcaaaatgtcagyatatattgaaacttaattggaaaattttaaacaaccattagtttatgtatattccatgctcatattttaaccatctaatatttctttttgtaactgaaaataaatggct

SEQ ID NO: 619523 - DNA, 569 bp, Homo sapiens
tgaaatgcatctagatacaaattagagtaattttgttttcttatttaaaatgtgaaatatttataaataattaaaaattaggaatacattattaagagtccttaaaaataagtatgtttgatctctgttagctcaaattaaacctattaaatttattatattgctttcttcctaaatcattacttctttgtcattggtaaagttctgtgttccaattttgaatgtcaggttctatatgaatgatttctgtgagtatgtgtaatcaaatgatccaagggatcctcagttgcaaattggtccacttatgtttatggatggtcatctacaaaactatataaatatagatacatgtgcattgttaatctgtggattgtttacttctccattccttcctgatgtaattcatgtataggttgtccaaacatcatatatccttataatgtatacattatatacatatgtgcatgcacacagrtatgtacatcatacatgtgatattttgtattaattatcatccttaaactcctcataggaagaagaaaattgacaagtattcaaaatgtctacag

SEQ ID NO: 619524 - DNA, 574 bp, Homo sapiens
ggttatttgttttttgcttgttgatttatttcagtttcttataggttctgggtattagacctttgcttgatgcatagtttgtgaatatttgcaaggtatagttttaatgatagaattcagcaaagagaatttgtcagcttctcaaaagagcaagatgactatttgatgatgtgataggaaatttactgtgaactgaaatgggaaaaactccacctcatacacaataaaataaacattactgtctttatgatggacttaygtatctgcttttactgcaaaacacacatgtgcttttttttttacatatttcctttttcctttccatatttatttattatgtatgctgttgctcccatttgtattcatttcttttttgttgtgttgtccagtttgatacataataattatactttcatccagtctttgttcccacccccaaaacagatgggatgataaatgaaatatagtgctggaataggataaattcttaaaatgatgttaacaggagctatttattttttacgataattagcatttgttgttgtcatggatgaatgcttttaaacaccctgaa

SEQ ID NO: 619525 - DNA, 574 bp, Homo sapiens
ggttatttgttttttgcttgttgatttatttcagtttcttataggttctgggtattagacctttgcttgatgcatagtttgtgaatatttgcaaggtatagttttaatgatagaattcagcaaagagaatttgtcagcttctcaaaagagcaagatgactatttgatgatgtgataggaaatttactgtgaactgaaatgggaaaaactccacctcatacacaataaaataaacattactgtctttatgatggacttatgtatctgcttttactgcaaaacacacatgtgcttttttttttacatatttcctttttcctttccatatttatttattatgtatgctgttgctcccatttgtattcatttcttttttgttgtgttgtccagtttgatacatrataattatactttcatccagtctttgttcccacccccaaaacagatgggatgataaatgaaatatagtgctggaataggataaattcttaaaatgatgttaacaggagctatttattttttacgataattagcatttgttgttgtcatggatgaatgcttttaaacaccctgaa

SEQ ID NO: 619526 - DNA, 548 bp, Homo sapiens
aaaaatgataatactcctaaacatcccctgagaagtgaactgcatatttataatcaagcaaaggttttaaagcatttgttctaaaattcgttagtgagaattattagtctatcacctcttgtgcatttactccatgttgaatgtgcagctcttaactgagtgtaacayagtaggtgctcaataagtgttttttgcattaatataaatataatgatatgtagagtcaaggaataatctttgagcaagcaattttgtatatttctattagtaagaaaggcaaattacatagctattgaagaattagacaaattttactagaaataacacatgttcaattatattcatagaagaactatttttaattatgaaatacaattgaaacaatctaaatgtatatcatctgggaggagattctacaatagcattgtaaaccaccagaggaatactgtgcaatcgttaaaatgcatggttaaatttatatttattgatgtggaaaaatattcagaatatatggctaataaaataggaaatattgtacagtgattaaa

SEQ ID NO: 619527 - DNA, 588 bp, Homo sapiens
atacaagagaagaaggaaagagaaagagagagagagagaaagaaagaaagaaagaaagaaagaaagaaagaaagaaagaaagaaagaataatgcctgcaagccctaaaaaagtcaattacaaattttaccactgaaaamattgtaatttgaacctaagaattcaatggaatgtaatagaagaaaaaacattgtttcactggaaattatgtcacagcgctataatcaaaaggatggaaatacataaaagagcataacagttttattgcaattctaattgcagtcctgaaagagtggagaggcagaaagattctgaagcaatatttgaagaaatactggccaataattttctaaaactggcaaaacagtgaaataaagcatcaagaatgaataaagaaagtgtaatcatgaacttgtagcctggtatcattacttaattagaattttgggatcttagtttagttgtgtgacttactttgatctcgtggagcgtagagtgagctttttagatttttgggtttgggctccatcatgcaacgtgcttaggctaatgagatgataacatataagaaacagaagagatttgaaat

SEQ ID NO: 619528 - DNA, 575 bp, Homo sapiens
cattttgggctgctttcaatttgtgctatgatgamtaaagctgctctaacataatttacatgtctttttcatggttatctgtaccgatttcttttggttatatacttagctgtaaaattatatgtggcacctaataggtgattaataaccatttgttaaataaaaatgaacatatgaggaaattaatgagtaaataatcttaaaaatgatccatgcacagtgcagggacttcgctccctttaggggaagagtgttgcaaaaggctggagatgggatgcgaagggatgagatctggttcctaaagcaggacctgataccatttacccaggggctgatttcaatccagaaagaacatatatagtgaccctgccctgagatgcaggctacagcaagtggggtcaggtagagtctgctacttgggtatgctcagcaatcactggtacggcccctgtccctttgtgtgagtcactgaaggggtccaggaggaggagcaagaggtacacaactccggctctgcttataggcaacactctatcatctggatgagtcactttagttttccgagtgtccctttg

SEQ ID NO: 619529 - DNA, 514 bp, Homo sapiens
atctgcaaagcaatttcctcaagttcaagaagacaatcctctttcttcccctctcaaaaatcaactggcaattagttatcttctatttctttctttctgtttttttattttttattttttgagatggagtctcgctctgtcacccaggctggagtgcaatggtgcgatcttggctcactgcaagctccgcctcctgggttctagcaattctcctgcctcagcctcccaagtagctgggactacaggcacccgccaccatgtctggctaatttttttttgtatctttagtagagatggggtttcaccgtgttagccaggatggtctcaatctcctgacctcgtgatccacccgcctcggcctcccaaagtgctgggattaccagcgtgagccactgtgcctggccctgttatcttccatttcwtagtatcctagcctgaaaatagttgtctagtaatttatgagccagcaaacttatataacttatataggtttcttcattgtatctttgaattc

SEQ ID NO: 619530 - DNA, 487 bp, Homo sapiens
tccctctttttagatggttcttaacccacagttttgaagctaattctgaaactttaaaacaacttgatattgctgtggcctacgtatacactcacaagtaaaggagagttaaaaactctccaatgctgtttgtgaaaatatttcgagatcactttctgtttgctgctgttttgcttgattcttaaactctttgttctttgttccatcatccatttggaatcctgcctccagcctgggattgtccactcyagtcagcctcttggatctcaacctctaactaaggggcactccagctcaggggaagaactatctctggagcctttctacaagaaatctctaattttgacccccatctctactctgtcttctcccaatatttgggaatatgttccttcatgactactctggttattttacctgactgttttgttccgttcgaattgagtaccatccctgctatccctctttaccttccaggctcacatgc

SEQ ID NO: 619531 - DNA, 570 bp, Homo sapiens
gcagtattttattttctgtttctgcattaattcacttaggataatggcctcctgctgcatctatgttgctgcaaaggacatggttttgtttctttttgttggctgtgtagtattccatgatgtatatgtaccacattttctttatctaatccactattgatgcacacctaggttggttctatgactctgctattstgaatactattgtgataaacatatgagtgcaggtgtctttttggtagaatgatttcttttcctttgggcaaatacccagtaatgggattcctgggtcaaataatagttctagttttagttatttaagaaatctccaaactactatccacggggattgaactcatttactttcccatcaatagtgtacaaatgttcctttttctctacatgttcactgttattttttactttttaatatatccattctgactggtgtgaggtggtatctcattgcagtttcaattttcatttctctgattattagtgccgttgggcattatttcatatgtttgttggctgcttgtatgtcttcttttgagaagtgtctgttcatgt

SEQ ID NO: 619532 - DNA, 590 bp, Homo sapiens
gatcatatggtagttctatttttcattttctgcaaagtctctatattgttatccatgatggctgtactactttacatcccacctacagcctatgagagctcccttttctctgcatcctcaacagcatttcttattttgtgtctttttgataatagccattctaactgcaataagatgatgtctcattgcagctttgacttgcatttccctgacgattagtgatgttgagcattttttcatatacctgttggtattttgaatgtcctaaaagaatttatttttattgttttcactacaaagaaaagtatgtgaggtgctagrtatgttaattagcctgatgtaatcattccacaatgcatacatgtatcatgttgcccttgtatagacaccacatactctccttaattcctagaaaccgttaatttgttctccatttatataactgcatcatttcaagaatgttatataaaaaatgtacaatataaacctcttgagaatggcattttttactctgcatgattctatggcaattaatttagatcattgtgtgtattcagcactgtaatccaattcctctgcatatttgccag

SEQ ID NO: 619533 - DNA, 439 bp, Homo sapiens
ggcttgaacaaacatcttcagtttggggaaatatgatttggcgtcagttctaataactctttgcctaatcctggagtcccaagattttctcctattctttgaaaaagtattataattttacactttacatttatgttcatgacttaatttgagttaatttttgccaaaggtgttggytgggcttaggtcaaacttatttcattttatttgtattttgaatagatattcaattgctccagaactattagttgaaaggctctgacctttgttttatttctgattctgataactttgtcttttctctttttttcctttgttggtcttcctatgggttgtcaatttttttatattttcaaagaaccagctctttgtttcattgatgttttctaccattttctgttttcaacttcattgatttctgctcttataattatcattt

SEQ ID NO: 619534 - DNA, 602 bp, Homo sapiens
tgtgatttttcctcttttctaacacagtcatgcaacacttaatggtggggataggttctcagaaatgcttccttaggatattttgtagttgtgcaaacatctaggcacaagcctagatggtatcgcctactacacacctaggctctaggctatgtggcatagcctattgctcctaggctacaaamctatacagcatgctactgtactgaatactgtaggcaattctaacacaatggtaagtatttgtccatctaaacatatttaaagatagaaaaggtacagtaaaaatactgtataaaatattataaaatagtaaaactgagtagggcacttaccatgaatgaagcttgcaggactggaactcgtttaggtgaatcagtgagtgtgtgatgagtgaatgtgaagtcctaggacattgctatacactgccgtagactttataaatactgtacacttaggctacaatcatttattaaacatgtttttctttcttcaataaaaattaaccttagctgactgtacttttttaactttataaatgttttaacttatttataaatgttttaacttatttatttattattgacttatttatttattat

SEQ ID NO: 619535 - DNA, 374 bp, Homo sapiens
cggtccctaaagctgttctcaacttttttcatcatttttcctgtttgttattcagattgtttaatttccattgcttctcttccagtttgctgtttcttcttctgtcctctccattctgttcttgagtctatctattgagttttgtgttttagttatttcatttttcagctctaaaatttccatttagttctttgtatattccctttctttgctgtgcctttctattgatttgttgagactttstgtctttacatatgattcaagattgatcataattgttcattgaaatatttttaatggccaccttaaaattgtattcagataattctaacatttctgtcaccttggtgtacacattgattgcttgtcatttt

SEQ ID NO: 619536 - DNA, 374 bp, Homo sapiens
cggtccctaaagctgttctcaacttttttcatcatttttcctgtttgttattcagattgtttaatttccattgcttctcttccagtttgctgtttcttcttctgtcctctccattctgttcttgagtctatctattgagttttgtgttttagttatttcatttttcagctctaaaatttccatttagttctttgtatattccctttctttgctgtgcctttctattgatttgttgagactttgtgtytttacatatgattcaagattgatcataattgttcattgaaatatttttaatggccaccttaaaattgtattcagataattctaacatttctgtcaccttggtgtacacattgattgcttgtcatttt

SEQ ID NO: 619537 - DNA, 536 bp, Homo sapiens
ttgctgaatgaataaataaatacatgaataaagaaagtaataaaaaaattcactgcctgtaggcaagtacctggaagacatgattgtacagtattatattattctattctctgatgggaagagtctgatttagactagaaaattcaaaacaagtaagaggacatcgagactaagcaaatcacagcagtgatacttattagtttatagacagagaccaaagacttataacatggatcacttgaaataaggaccaggaaattcacagaagtaggcaatctcataatgcacaggataacctaatagatctttccacctgttattcctctaagggaggactctttccatgaaaccaaagatgactaacttgaraggcaaagcacgactgcttaaaccggccatgcatcactggcaccaaactgctacaactgaaaatgtggaaagcaggctatccacattcaagcaaacccatttaattcccatactacatcccttcttgtaacatgctcctcataggggagaccacagtgaggaaatcc

SEQ ID NO: 619538 - DNA, 536 bp, Homo sapiens
ttgctgaatgaataaataaatacatgaataaagaaagtaataaaaaaattcactgcctgtaggcaagtacctggaagacatgattgtacagtattatattattctattctctgatgggaagagtctgatttagactagaaaattcaaaacaagtaagaggacatcgagactaagcaaatcacagcagtgatacttattagtttatagacagagaccaaagacttataacatggatcacttgaaataaggaccaggaaattcacagaagtaggcaatctcataatgcacaggataacctaatagatctttccacctgttattcctctaagggaggactctttccatgaaaccaaagatgactaacttgagaggcaaagcacgactgcttaaaccggccatgcatcactggcaccaaactgctacaactgaaaatgyggaaagcaggctatccacattcaagcaaacccatttaattcccatactacatcccttcttgtaacatgctcctcataggggagaccacagtgaggaaatcc

SEQ ID NO: 619539 - DNA, 497 bp, Homo sapiens
ccatctggtgggcagccccatgacctcatgggctggccagtttcacgttgttgttgtgctccagacttcctactacgatgaccattatgtgaatatgggtcattgtcacaagaggaccagctggctgagtgctaccacccctgcggaatgaatctcagagtatatgatttattgagcataagccaaaggcattattttgtaaagaaagaatggcccattcgcttaccatctggggaatcaataccaatggtgactcagtggagttctaaactcctagctcatgctacagaactgtctgttatgttatataggttgataaataaggcttttacctactggtgattttaatcactttttcatggtttatgagatgaatgtttgtattataatttagttaggagtactctctmtgtaccaaaggcattctaattaaatatttgagtctactactattaatttctgtctttctaattaaactgaacagactaccgcctgag

SEQ ID NO: 619540 - DNA, 573 bp, Homo sapiens
actttgggagtctgaggtgggyggatcacgaggtcaagagatcgagaccatactgaccaacgtggtgaaaccccgtctctactaaaatacaaaaaattagccaggtgtggtggtgtgctcctgtagtcccagctacttgggaggctgaggcaggggaatcacttgaacctgggaggcagagtttgcagtgagctgagatcctgccactgcactccagcctggcaacagggcaacagaacgagattccatctcaaaaaaaaaaatccattctcatatatatttcccaggtttctgctggtttaaattaacaaaatcttggaaactgtttagaatattagctattttcttctggattataatttgtgcttgttctcctaaaggattctaagatgtgactctagaattctaatttatgaccctagtggcaataagggtgtttatatggtgggaattagaagaataggcattctcctgtaagacaccctcttctccaggcagttattataatgtcttcaagaaagagatataaactcttcagacacaagaaaataggttgtttctattagaagaaaa

SEQ ID NO: 619541 - DNA, 573 bp, Homo sapiens
actttgggagtctgaggtgggcggatcacgaggtcaagagatcgagaccatactgaccaacgtggtgaaaccccgtctctactaaaatacaaaaaattagccaggtgtggtggtgtgctcctgtagtcccagctacttgggaggctgaggcaggggaatcacttgaacctgggaggcagagtttgcagtgagctgagatcytgccactgcactccagcctggcaacagggcaacagaacgagattccatctcaaaaaaaaaaatccattctcatatatatttcccaggtttctgctggtttaaattaacaaaatcttggaaactgtttagaatattagctattttcttctggattataatttgtgcttgttctcctaaaggattctaagatgtgactctagaattctaatttatgaccctagtggcaataagggtgtttatatggtgggaattagaagaataggcattctcctgtaagacaccctcttctccaggcagttattataatgtcttcaagaaagagatataaactcttcagacacaagaaaataggttgtttctattagaagaaaa

SEQ ID NO: 619542 - DNA, 579 bp, Homo sapiens
gttactttgattggtagaaacaaataagtgcttcttacaaggtctgtcaatctgctcctgcttatgggaagacaaactattcccagccctgtgtaagtactagaaactgtttggcccactgctttttggtgtcttttccctagcctcgtggagtttcatccttccattgcacagataagtactcagagccaaagggaagtacgcaatacaaaggaacactcttgcagatgtccaagactctcctgtgtgccatgtcctcctctcagatactctgcccatcagcctctccaacttcccatctctgtcacctccatctctgtcgcctccatttagtgaaatcaccggtttttgtttgggttcccctccctgttctaggctctggacactgcctccagatagtaagctggggtcattatggaacttaattcatycgtttcccttctctcagggatcacgatactgcactgcctgttggctaatgtctgaaaacaatgatttcatagatacatacatatatgtgtatatgtatatatacaaccctttcctaaatatgtataagtatacatacttatgatttat

SEQ ID NO: 619543 - DNA, 588 bp, Homo sapiens
aaactattttaaaatttatatggaaccagataaagagcccaaataggcaaggcaatcctaagccaaaagtataagctgaaagcattatgttacccaagttcaaactatactacagtgctacagtaaccaaaacagtatggtactggtacaaaaacaggcacatagaccaatacaaccgaataagagcccagaaataattctgcacayctacagtcatcagatctttgacaaagctatcaaaaacaataggccagttatcccagcaccattaaaaaatgtgatgtgattagtgctcaacatcactaattatcagagaaatgcaaatcaaaaccaaattgagatattaccccacagctgttagaatggctattatcaaaaagaaaaaaagttggagaaaactggacaaaaaggaacccttgttactgtagatgagaatgcacatccattatggaaaacagtattaaagtcctttaaaaattaagactagaactaccctatgatctagcaattccacttctaggtatatatccaaaaagggaaaaggaatcacatacttgcagagttatctgcactctcgtgttcattgca

SEQ ID NO: 619544 - DNA, 455 bp, Homo sapiens
ctgtcatctaggttttaagccccacatgcattagatatttgtcctaatgctttccctccccttgcccccacaccctgcaacggtccccgctgtgtgatgttcccttccctgtgtccatgtgttctcattgttcaactcccacttatgagtgagaacatgcagtgtttggttttctggtcctgtgtgagtttgctgagattgatggctggtgggaaaggagatattatattaaatatcccttcaaattcttatatagcttgactttaaaatatctcaacttagcatccttttctgtaaataaattcaatgcttcattaaaacacaccagtaatataaatgataatgaaggccttacactactatttaccttacatttgttttgtggcactttacatataattctgcatttggctacatacagctatgtakctatgtagaacacagctcctgtaagc

SEQ ID NO: 619545 - DNA, 348 bp, Homo sapiens
tagtttttgttgaggatttttgcgtctatgttcatcaaagatactggcctgaagttttctttttttattgtgtytgtgccaggttttggaaacaggatgatgctggcctcatagaatgagttaggaaggagtgcctcctcctgagtttttggaatagtttcagtaagaatgataccacctcttctttatacattgggagaattcagctgtgaatttgtctggttctggactttttctagttggtatgctttttattactgattcaatttcagaactgattattgatctctttagggattcaatttcttcctggttcaatggaggtcatatatttccaagaatttatcc

SEQ ID NO: 619546 - DNA, 348 bp, Homo sapiens
tagtttttgttgaggatttttgcgtctatgttcatcaaagatactggcctgaagttttctttttttattgtgtttgtgccaggttttggaaacaggatgatgctggcctcatagaatgagttaggaaggagtgcctcctcctgartttttggaatagtttcagtaagaatgataccacctcttctttatacattgggagaattcagctgtgaatttgtctggttctggactttttctagttggtatgctttttattactgattcaatttcagaactgattattgatctctttagggattcaatttcttcctggttcaatggaggtcatatatttccaagaatttatcc

SEQ ID NO: 619547 - DNA, 380 bp, Homo sapiens
atctataggtaactgaaccttgaggagccaaattgaggcctgatgaaggagactgtacatcatccagagagaatgaacttggagcaggatgtaaagactgcaggggagaaatcagggtttttctgctggaggaagaagcagagggtacatagacataaggtatccaaagaagcccactatagaagctgggacagattgcatacttattctcaattcttcactcctycctatgcagtagagcagagaaaatcgagtatacctgtgacttgctttgaccaatggaaagttagaggggacaagagcacaggctttaaacatgcccatatgggacttctgtgcctaccatgagaacatgccccataattgttaatgcagggaga

SEQ ID NO: 619548 - DNA, 380 bp, Homo sapiens
atctataggtaactgaaccttgaggagccaaattgaggcctgatgaaggagactgtacatcatccagagagaatgaacttggagcaggatgtaaagactgcaggggagaaatcagggtttttctgctggaggaagaagcagagggtacatagacataaggtatccaaagaagcccactatagaagctgggacagattgcatacttattctcaattcttcactccttcctatgcagtagagcagagaaaatcgagtatacctgtgacttgctttgaccartggaaagttagaggggacaagagcacaggctttaaacatgcccatatgggacttctgtgcctaccatgagaacatgccccataattgttaatgcagggaga

SEQ ID NO: 619549 - DNA, 380 bp, Homo sapiens
atctataggtaactgaaccttgaggagccaaattgaggcctgatgaaggagactgtacatcatccagagagaatgaacttggagcaggatgtaaagactgcaggggagaaatcagggtttttctgctggaggaagaagcagagggtacatagacataaggtatccaaagaagcccactatagaagctgggacagattgcatacttattctcaattcttcactccttcctatgcagtagagcagagaaaatcgagtatacctgtgacttgctttgaccaatggaaagttagaggggacaagagcacaggctttaaacatgcccatatgggacttctgtgcctaycatgagaacatgccccataattgttaatgcagggaga

SEQ ID NO: 619550 - DNA, 427 bp, Homo sapiens
atgagcaaatatgagtagctttttacatatttaaaagtcttttgagtttctcttactgtgaattatctgtctataatcttggcctatttttaaaaaktaataagttagaagaaatgagccaattttcatatatcttggcaggtttttccagtttcttattttccattcaaatttatttatggttgttttaaaccattttgaaattttgatctttttttaattttgagattattgtagatttatttgcagttttaagaaatactacagacagaattccatatacctttcaccattttccctcactggtaacgttttgcataactacaggacaatgtcacaagtaggaagttgacactgacacaatgcatctaccttattcagatgtcagatttacattcacttgtgtgtgtgttagttctacacaatg

SEQ ID NO: 619551 - DNA, 427 bp, Homo sapiens
atgagcaaatatgagtagctttttacatatttaaaagtcttttgagtttctcttactgtgaattatctgtctataatcttggcctatttttaaaaagtaataagttagaagaaatgagccaattttcatatatcttggcaggtttttccagtttcttattttccattcaaatttatttatggttgttttaaaccattttgamattttgatctttttttaattttgagattattgtagatttatttgcagttttaagaaatactacagacagaattccatatacctttcaccattttccctcactggtaacgttttgcataactacaggacaatgtcacaagtaggaagttgacactgacacaatgcatctaccttattcagatgtcagatttacattcacttgtgtgtgtgttagttctacacaatg

SEQ ID NO: 619552 - DNA, 427 bp, Homo sapiens
atgagcaaatatgagtagctttttacatatttaaaagtcttttgagtttctcttactgtgaattatctgtctataatcttggcctatttttaaaaagtaataagttagaagaaatgagccaattttcatatatcttggcaggtttttccagtttcttattttccattcaaatttatttatggttgttttaaaccattttgaaattttgatctttttttaattttgagattattgtagatttatttgcagttttaagaaatamtacagacagaattccatatacctttcaccattttccctcactggtaacgttttgcataactacaggacaatgtcacaagtaggaagttgacactgacacaatgcatctaccttattcagatgtcagatttacattcacttgtgtgtgtgttagttctacacaatg

SEQ ID NO: 619553 - DNA, 427 bp, Homo sapiens
atgagcaaatatgagtagctttttacatatttaaaagtcttttgagtttctcttactgtgaattatctgtctataatcttggcctatttttaaaaagtaataagttagaagaaatgagccaattttcatatatcttggcaggtttttccagtttcttattttccattcaaatttatttatggttgttttaaaccattttgaaattttgatctttttttaattttgagattattgtagatttatttgcagttttaagaaatactacagasagaattccatatacctttcaccattttccctcactggtaacgttttgcataactacaggacaatgtcacaagtaggaagttgacactgacacaatgcatctaccttattcagatgtcagatttacattcacttgtgtgtgtgttagttctacacaatg

SEQ ID NO: 619554 - DNA, 588 bp, Homo sapiens
caaaaataacattaaagaagtagttcatgtcaggtaagatgagaatgccccataaatactgattctgaacctctagcagccatacatatgttaattcattattccacaaatattttgtgcacatattstgtgccaagcactgtgctaggtccgaaggataccaaaattaatcattacaaactcagagtccaaagaaaaaggcagactcacaaataaacagctgtaaaaatgtgtgttgctctatttggaggtattacgtagacattagggagagagcatctgtattagtccattttcacactgctgataaagacatatccgagactgggcaatttacaaaagaaagaggtttattggactcacagtgccacatggctgaggaggcctcacaatcatggcagaaggtaaaaggcaaggagaagcaagtcacatcttaacatgaatagcggcaggcaaaaagagcttgtgcggggaacctccaccttataaagccatcagatcttgggagacttattcactatcacgataatagcacaggaaagtcctgcccccatgattcaattacctaccaccaggtccctcccacaa

SEQ ID NO: 619555 - DNA, 433 bp, Homo sapiens
ttgggtaaatacagccattccaatagggagaaattggccaaaacaaaggggctacagaccccatgcaaatctgaaatccagcaggacagtcaaatcttaaagctccaaaatgatctcctctgatcccatgtcttgcatccaggtcaggctgatgcaagatgtgggttcccacggtcttgggcagctctgcccctgaggctgtgcaggatgcarcctcccctccctgctggctgctttcatgggctgccactgagtgtttgtggcttttcctggtgcacagtgcaagctgtcagtggatctcccactctggggtctggaggatggtggccctcttctcatagctccacgaggtggtgccccagtagggactctgtgtgggggctccaaccccacatttactttctgcattgccctagtagaggttttccatgag

SEQ ID NO: 619556 - DNA, 595 bp, Homo sapiens
gacccttcctttcatgaagattctctgtgcatgtgatacttttcaatagcattttatcagcactaaaacttctttcaaaattggaggcaattttctcaaaacctgccactgctttaccaactgagtttatgtaatagtctaaattctttgttgtcacttcaacaacatacacagcattttcaccaggagcagattccatctcaagaaacactttcattgctcatccataagaagtaacttgtcatccagtcaagttttatcatgagattgcagcaattcagtcatttcttccagctccacttctaattctagttctcttgctgtttccaccacaactacagtgacgtcctccactaagtcattcatagagattgaaattaacttcttccaaattctggttaatgttgatattttgacctctgcccatgagtcttaaatgttcttaatggcatcaagaatcataaattttttttccagaatattttcaattggctttgcccaggtacattagagaaatcactaactatgacagctgtaccattacaaagtgtatttcctaaagaataagayttgaaattcaaaattactccttgat

SEQ ID NO: 619557 - DNA, 588 bp, Homo sapiens
ttgctggatacagtttctgcataccttcaatttgcaaaaattgcagtatctatgaagtgtaataaagtgaagtgcaataaggtgaggtatgcctgtacacagtgtagcacttagatgtaattctgaatgattctggcttaccttcactcacatttctttattccataaaatttttaactcattttatcatttgttttataagatagctaatrggatattcattaacttatttacagtagtggacaatggtttgtttatagtaagctcattttttgctgctgtataattaaacatttttttctgaatttaacttaccctgaaggcattattggagaaaatgcatctacagtatttacatttgtaactcctttttaaatttactagcacagggaaattttattctttttaacacatcttgggtttggttctttgtctctggatcaaatagagatcacaattactagaacatttaatgtcccatatgaatttctcaggctccttactctctgagaattcatctgcacaatttaaccacaggaagaaataaacatttctttggatttataagaagtaaaatattcaaacctc

SEQ ID NO: 619558 - DNA, 588 bp, Homo sapiens
ttgctggatacagtttctgcataccttcaatttgcaaaaattgcagtatctatgaagtgtaataaagtgaagtgcaataaggtgaggtatgcctgtacacagtgtagcacttagatgtaattctgaatgattctggcttaccttcactcacatttctttattccataaaatttttaactcattttatcatttgttttataagatagctaatgggatattcattaacttatttacagtagtggacaatggtttgtttatagtaagctcattttttgctgctgtataattaaacatttttttctgaatttaacttaccctgaaggcattattggagaaaatgcatctacagtatttacatttgtaactcctttttaaatttactagcacagggaaattttattctttttaacacatcttgggtttggttctttgtctctggatcaaatagagatcacaattactagamcatttaatgtcccatatgaatttctcaggctccttactctctgagaattcatctgcacaatttaaccacaggaagaaataaacatttctttggatttataagaagtaaaatattcaaacctc

SEQ ID NO: 619559 - DNA, 588 bp, Homo sapiens
ttgctggatacagtttctgcataccttcaatttgcaaaaattgcagtatctatgaagtgtaataaagtgaagtgcaataaggtgaggtatgcctgtacacagtgtagcacttagatgtaattctgaatgattctggcttaccttcactcacatttctttattccataaaatttttaactcattttatcatttgttttataagatagctaatgggatattcattaacttatttacagtagtggacaatggtttgtttatagtaagctcattttttgctgctgtataattaaacatttttttctgaatttaacttaccctgaaggcattattggagaaaatgcatctacagtatttacatttgtaactcctttttaaatttactagcacagggaaattttattctttttaacacatcttgggtttggttctttgtctctggatcaaatagagatcacaattactagaayatttaatgtcccatatgaatttctcaggctccttactctctgagaattcatctgcacaatttaaccacaggaagaaataaacatttctttggatttataagaagtaaaatattcaaacctc

SEQ ID NO: 619560 - DNA, 544 bp, Homo sapiens
tctggccaaatttctccactttctttccctctttttcctgctctgtactttagatacagtactaccagaatagtagtttttctacaaaacaaatattctataatatataaatagtattgggggagcacaggggagtttgatctctaggagaaagagacttgcactggccacaatcgcaaatatcccccaaataaaaaaggggggaaatgaacaactgttattagaaaktttgtatctaatcaattatggaataaatgaaaaacatctttattacacctgagattttatagcaatgcttagaaatatattgaaattccatttttctccatgagacagtctctaggtctgacttgtttagaataaatgtttgattcttttactttcactgaaatcttatatatcaaacttatttcatttgctcaaagaattgccattttctcttctgcattttttttcattcaaatcccacctcaaaggaagaaattctgataaaataagaaattcctagagattattttaatatctattctgggttacatatgaa

SEQ ID NO: 619561 - DNA, 544 bp, Homo sapiens
tctggccaaatttctccactttctttccctctttttcctgctctgtactttagatacagtactaccagaatagtagtttttctacaaaacaaatattctataatatataaatagtattgggggagcacaggggagtttgatctctaggagaaagagacttgcactggccacaatcgcaaatatcccccaaataaaaaaggggggaaatgaacaactgttattagaaattttgtatctaatcaatyatggaataaatgaaaaacatctttattacacctgagattttatagcaatgcttagaaatatattgaaattccatttttctccatgagacagtctctaggtctgacttgtttagaataaatgtttgattcttttactttcactgaaatcttatatatcaaacttatttcatttgctcaaagaattgccattttctcttctgcattttttttcattcaaatcccacctcaaaggaagaaattctgataaaataagaaattcctagagattattttaatatctattctgggttacatatgaa

SEQ ID NO: 619562 - DNA, 544 bp, Homo sapiens
tctggccaaatttctccactttctttccctctttttcctgctctgtactttagatacagtactaccagaatagtagtttttctacaaaacaaatattctataatatataaatagtattgggggagcacaggggagtttgatctctaggagaaagagacttgcactggccacaatcgcaaatatcccccaaataaaaaaggggggaaatgaacaactgttattagaaattttgtatctaatcaattatggaataaatgaaaaacatctttattacacctgagattttatagcaatgcttagaaatatattgaaattccatttttctccatgagacagtytctaggtctgacttgtttagaataaatgtttgattcttttactttcactgaaatcttatatatcaaacttatttcatttgctcaaagaattgccattttctcttctgcattttttttcattcaaatcccacctcaaaggaagaaattctgataaaataagaaattcctagagattattttaatatctattctgggttacatatgaa

SEQ ID NO: 619563 - DNA, 514 bp, Homo sapiens
tatttatctttctcttctaaagatatatagtttctttttagcacaacagtcaagacagcaccttgggctctcagagatggtaaattctactctcagttgctccattaactcaatatatgaccttggaagtttctctaaatcccttggtgcctcagtttccttttctatcaaatacatatgtctgaaataactaaatcacttcacactgcctttaaggaaaaaataaaacaggaaaagagaagagaataaaatatctgagatcaaagaaagttggcatctaaatgccacatatcaattgaattgtaacatgtatgaaacttaaatgggagtaaataacagtaacaaaaatgagttgaattttaatatgtattaaacttmaatgggagtaaataacagtaacttaaatgggagtaagtaatggtaactattatagattattgtaaagtacttagcagggggctctggcacatagtaagcctcagtaaactttagattttactcttgtttttattat

SEQ ID NO: 619564 - DNA, 514 bp, Homo sapiens
tatttatctttctcttctaaagatatatagtttctttttagcacaacagtcaagacagcaccttgggctctcagagatggtaaattctactctcagttgctccattaactcaatatatgaccttggaagtttctctaaatcccttggtgcctcagtttccttttctatcaaatacatatgtctgaaataactaaatcacttcacactgcctttaaggaaaaaataaaacaggaaaagagaagagaataaaatatctgagatcaaagaaagttggcatctaaatgccacatatcaattgaattgtaacatgtatgaaacttaaatgggagtaaataacagtaacaaaaatgagttgaattttaatatgtattaaacttaaatgggagtaaataacagtaacttaaatgggagtaagtaatggtaactattatagattattgtaaagtacttarcagggggctctggcacatagtaagcctcagtaaactttagattttactcttgtttttattat

SEQ ID NO: 619565 - DNA, 549 bp, Homo sapiens
gtcatcttacatgtcagtttcccagaagaaccttcctgacaatccaatctaaattagtttgtcactcacctttttgtagtctctatcatactatttttcttcatagagcctatcacagcttgtgttgtgtgtgtgtgttttaacaaccacacatgtctagtttaaacartcatacaactagtgcctaacaatttacgtggcagcgaaaatgctgcagtccccaccatcataatcattaaagatagactagtgttgtattaacacggatgatctgtatacagtatggacaataagcatgcataaggtcacagtagaagtttggataactggtatcagtcatagggtagtttgagaatatagtgaaagcaaagcagagagggaaagtatagaagaaaagggaggactatggtatgtgggcaaccctggggatcaaagtgaaaataaagaagatgcagtaattcacagaaaatcaaacccaaggaataaaaaactagattcaggcatgttttaatatactggaacatctagcccagtgtttcaggatggatg

SEQ ID NO: 619566 - DNA, 265 bp, Homo sapiens
cacacctggctaattttgttgtatttttagtagagacaggtttcactatgttggccagactggtctsaaactcctgacctcagacaatccacctgccttggcctcccaaaatgctgggattacaggcgtgagccaccatgcccagcccactgggaatatttaagtcctatttgttgcagtaagagcttgtgtgtcagacacagaagctatcattttttatcctatcactgttaactatgtgatagtgcataggtttaatttcaag

SEQ ID NO: 619567 - DNA, 265 bp, Homo sapiens
cacacctggctaattttgttgtatttttagtagagacaggtttcactatgttggccagactggtctgaaactcctgacctcagacaatccacctgccttggcctcccaaaatgctgggattacaggcgtgagccaccatgcccagcccactgggaatatttaaktcctatttgttgcagtaagagcttgtgtgtcagacacagaagctatcattttttatcctatcactgttaactatgtgatagtgcataggtttaatttcaag

SEQ ID NO: 619568 - DNA, 557 bp, Homo sapiens
aaattgtgagattttttttctgagttgatattttgagtgtgaataatttttataacckttaattaaaaggtaagatcttttaagtgctgacttatacatcatagtcttaactgcttttctgagatctttgatatctagaacaaaggtgaattatattggaagagacatttgaagcattttttgcagctgaaattatctaatgacaagtatttattaatattgtgagctttttccagaggtctttcttctcaaagcatcagcttggaatcctgccatctagcaggactctatttattcaaagagggtgcttactgtcaggactgagtgctctacatactctcctgggaattcagagccttacagttcttgtatgaatccttttctctatttcttacctaagatgtatctactcctaaaaccattcatttgtacctctctttaatcccaaaactgaccttttttgtgggaaaagcccctgttgcctgagaaacattttctacttgggaaggggtcaggcaaaacctaaacttcatttggagttgagagtcacactgatt

SEQ ID NO: 619569 - DNA, 557 bp, Homo sapiens
aaattgtgagattttttttctgagttgatattttgagtgtgaataatttttataaccgttaattaaaaggtaagatcttttaagtgctgacttatacatcatagtcttaactgcttttctgagatctttgatatctagaacaaaggtgaattatattggaagagacatttgaagcattttttgcagctgaaattatctaatgacaagtatttattaatattgtgagstttttccagaggtctttcttctcaaagcatcagcttggaatcctgccatctagcaggactctatttattcaaagagggtgcttactgtcaggactgagtgctctacatactctcctgggaattcagagccttacagttcttgtatgaatccttttctctatttcttacctaagatgtatctactcctaaaaccattcatttgtacctctctttaatcccaaaactgaccttttttgtgggaaaagcccctgttgcctgagaaacattttctacttgggaaggggtcaggcaaaacctaaacttcatttggagttgagagtcacactgatt

SEQ ID NO: 619570 - DNA, 439 bp, Homo sapiens
gtatccaccactatagaattatagggagtagtttaactatcttctatgctccattcctgcccccctccccaggcaaccactgattttattttttattgtctccataggtttgcctttttcagaatgtcatatcattggatatgcagccttttcagtttggcttctctcatttagtaatatgcatttaagctttcttcatgtctttccatgatttggcagctcatttctttttagcactgaatattccattggctgaatgtaccacagattattaatccatccatctactgaaaagcgtcttggttacttccaagttttggcaattacaagtaaagctgctacaaacacttgtgtgcaggtttttgtgtggacataagttttcaactcctttagataaataccacagaaagtgattgytggattgcatggtaagagtatg

SEQ ID NO: 619571 - DNA, 606 bp, Homo sapiens
aggctaggggagggatagcattaggagaaatacctaatgtaaatgatgggttgatgggtgcagcaaaccactacggcacatgtatacctatgtaacaaacctgaacattctgcacatgtaccccagaactttaaagtataataataataacaaaaatagagacaaaataaaatgtaatacaagtttaaaaagaaatttactcaaaaataggggctcatcaaaattcttcctraaagttaatacatttcaatatgctcttagagaatttcaaaattacatcctccataccatttgcccacttatcatctaatcaattcaatgtatcccttgctttttaagagctatcaatatcttcctgtatgaaagctttattttcaataaatgcaatttgccaaaagctttcatatttgaaatatgggtgctcaaaaattataatctttagtagttgaaatttggatgctccaggattttgtttaaagatttccaacaattttgaaaaacatacaatcagaaatgtgaggactcatttacaaaatatttaatactttgctaggataactaagtaaatttgcaaagaggttattcaatggttaattatttctcaaa

SEQ ID NO: 619572 - DNA, 654 bp, Homo sapiens
cttcaacccagaacttgtgacaccccacacttgttctacttctactttttcttttatcacattctctttctctctctctttgtgtgtgtgtgtgtgtgtgtgtggtgtgtgtgtgtgttttatgcttagtgtttattatctgtctctctccactagaagttaagctccagagggcataaaatttctgtcttgttttcttgtttagcaatgtatcactaactatggagtccaggacatggtgtattcacaataaaatatgctgctagtgaaacatggttattatggaagaacacattttatgataatcactattacacttaggcgataacactgttgaggggtttaagtaatatcttaattactgacattaaataccatttcaaaatattgctgattgatgcctattaaagtgacaacttgtcatactgcaccacatgcttcaagtataaatagatttgggaggcaacagaaatatcttttcattaattttctatgtacaagtgacttacattagtaaacagaatttaaaaagtctstggagaagcaagttcttctcctcattcgcagaattaggtatgttggtcctacccatgggcgaaagaatgtgtctcaggtctttattcctgttttgatccctgctcccttgctttaatc

SEQ ID NO: 619573 - DNA, 568 bp, Homo sapiens
atttatagaaaagctagaaaactgcagttataagtccttatctatcagtagttaccctgaatgtaaatggagtaaattctccagtcaaaaacatagcatgacaaatgggggggaaaaaaaatgacccaactacatgctgcctacaagagactcatttcacttgtaaggacccacaaattgaaaatgaagaactgaaaaaagatatttcagaaaaatggaaaccaaaagaaagagtagctatccatatttcrgataaaatggattttaattcaaaaatgacgttaaaaagacaaaggaggtcactatagtatgataaagtggtcaattcaacaagaggatataacaatatatgcagcaagcatcagaggatctaaacacataaagaaaatatcaatagatacgaagggagagagagactgcaatatgataatagtaggcaatttcagtgcctcacttttagcaatgaacagattatccaaacataaaatcagaaaatgatcatgaaacttaaaatgtattctagagcaaatggacctaaagacacatatacagaaaattttatttaaca

SEQ ID NO: 619574 - DNA, 568 bp, Homo sapiens
atttatagaaaagctagaaaactgcagttataagtccttatctatcagtagttaccctgaatgtaaatggagtaaattctccagtcaaaaacatagcatgacaaatgggggggaaaaaaaatgacccaactacatgctgcctacaagagactcatttcacttgtaaggacccacaaattgaaaatgaagaactgaaaaaagatatttcagaaaaatggaaaccaaaagaaagagtagctatccatatttcggataaaatggattttaattcaaaaatgacgttaaaaagacaaaggaggtcactmtagtatgataaagtggtcaattcaacaagaggatataacaatatatgcagcaagcatcagaggatctaaacacataaagaaaatatcaatagatacgaagggagagagagactgcaatatgataatagtaggcaatttcagtgcctcacttttagcaatgaacagattatccaaacataaaatcagaaaatgatcatgaaacttaaaatgtattctagagcaaatggacctaaagacacatatacagaaaattttatttaaca

SEQ ID NO: 619575 - DNA, 496 bp, Homo sapiens
taatgattatacaatgaaactgccaagttttgtatgcttaatcaccaatactcaaggaaatttcaattgggactgaatgttttaaagtgtccatagttttcattgttgttaaagttgtttttatggtgttttatataataattgtgttaaatatcaaggaagaaaaaatrtcaagaaaggtatgcatatgaaaataatagattttttaagctttaagtacatcaagatcagttcatctgttaacattttccatatgccagtcagtatgctaagcaattatcatactattgagatatattatctcatttaatatcccagcagagcagattttatagttgagactgagacttaaaatttaaataactgtgattatgcaaggttaaacagctagtatttatagtgaagtagtatattagttggttctcacgctgctatgaagaaatacccaagactggataatttataaaggatagaggtttaattgactcacagtttc

SEQ ID NO: 619576 - DNA, 584 bp, Homo sapiens
ggggtctcaccatgttggccaggctggtcttgaactcctgacctcaggtaatctgcccacctcgaccttccaaagtgctgggattacaggtatgagacatcactcctggccctgactccactcttatatagccctctctggctacccccatgcccttattatcatttcctatttataggccagtttctgccaccagatccagggactctgaaggatacaggcactgagtcttattcataataatgataataatgccctgtggcccttaagctgaggctttgcagtagcaatcactaagcactgagtggctacaggccaagcttggctaaccacataatgtgggttatccctattcatcttcacagcaatcctcagagaaaaggcccatgttttcccccattttaccttgtggaatctaaagctcagagaggttagacaggttttcaaggttacacagttggaaagtggcaggrtcaggagtcatactttggccaggtgagcagctaagtcactactcttaagcatgtgctgtacatctcccttcagtgttctagtaccacagtgcctgaatatgagctccatga

SEQ ID NO: 619577 - DNA, 569 bp, Homo sapiens
ctgttccttgccgctcccagcttctgatggtttgctggcaatccttggtgtcccttggcctctgctgcatcaccccagtctctgccttcatcttcacatggtacttagcctatgtgcatgtctttgtgttcagatttcccctttttatatgtacaacaatcgaattagggggccaccctatgccaataagacctcatcttaattatatctgcaacaacctcattttccaaataagggcacattttgaggtactaggggctaggacttcaacatatgatttttggtggaagggacacaattcgacccwtaacaccatggaagcctctattctaactagtggaccacaaaggctttttaggtctcagcatttgtgctggcttagggccagtttccaagtaatccctaaaggcctgggcatttccatttccctaagcacacatgcatagttacatggcttaagatccctttggggaaaacgagaagatttatgatatagttatggtggtattgctgggtgcttcctccagagtaccctgcaccccctttttcaagggcttcagctctgagaa

SEQ ID NO: 619578 - DNA, 540 bp, Homo sapiens
gctaacatggtgaaaccccgtctatactaaaaataataaaaaaaaattagctcggcgtggtagcgggtgcctgtagtcccagctactggggaggctgagacaggagaatggcgtgaacccaggaggtggagcttgcagtaagccgagatcgcacccctgcactccagcctgggtgacagaacgagactccgtctcaaaaaaataaataaataaaataaaataaaataaaataaaataaaatgtttctagaacttgccaaattatccttcaaaacattgtctgagaatagcggattcctcatattcttatcgacattggatgttcaaaatataatcttatgtgatctgatattttgcctattttaaaakttttcattaaattcaccaatttttcttggagtgaaaataaaattttgtagaagactttggaagacagcaagccgggttgatcctttattaaaaacatgactagataaacattcattctggaatctagaccacatatatttgaaatgtttgctttgggatatattgagtattt

SEQ ID NO: 619579 - DNA, 598 bp, Homo sapiens
ctcttgaaccctgttttctgttgtttaagatgtttattaagaccatatgtgcacagctgaacatagaccccttatcaggagttttttattttgccctttgccttgtgatctttgctttgccctttgccttgtgatctttattggcctcmgaagcatgtgatctttgttctcctttttgccctttgaagcatgtgatctttgtgacctacaccctgttcatacaccctctccccttttgaagtccttaataaaaacctgctggttttgcagctcaggtggacatcacagacctacagatatgtgatgtcacccctggtggcccagctgtaaaattcctctctttgtactctttctctttatttctcagatcggctgacatttagggaaaatagaaagaacctatgttgaaatattgggggtggttcccctgatagactaatatccaggatctacaaggaacttaaacaaatcaataagaaaactataaataaccccattaaaaagtaggcagaagatttaaacagacacttctcaaaagaaggcataagagcaaccaatacacatatgaaaaaatgctcaatagcgctaatcatcagag

SEQ ID NO: 619580 - DNA, 555 bp, Homo sapiens
tgatcttccatctaatattctccacatcagcaacaaggttgttttgctttcttatcatttgtgtgttcactggagtagtgcttttattttccttcaagaacttcacctttgcattcacaacttggctaactgacaagaggcctagcttttggcccatctcgactttcgatatgccttcctcactaagctaaatcatttccagcttttgatttaaaatggggracatgcaactcttctttcacttgaccactcaggggctattgtagggttattaatttgcctaaattgaatattattgtgtttcaaggaaaagaaaggtccaaggaaaaggagacagataggggaatggctagttgatggagcagtgagaacacacacaacatttattgatcaactttgccatcttaggcacaatttgtggtgccccaaaacgattatgacagtgacatcaaagatcactgatcacagactgggcatggtggctcatacctgtaatcccagcaccctgggaggctgaggtgggaggatcacttgagcccatgagtttgagaccag

SEQ ID NO: 619581 - DNA, 520 bp, Homo sapiens
ctgggcaatgtaaattgaaaactgttttgtatatgtttttgtctatggttcctggctcataactcccagaacccttgttatttcccaaatgactaaaacaagaagaatatattttattaaagtatttgggcttttgtccattcccaaagcagctttggaacagctcagagtgataaaggtgagagagagtcttttgttataatgttggggcactttaggccacaaaagcaggcatcaaaaaacagaatcttggccgggtgtggtggctcacacctgtaatcccagcactttgggagaccaaggcgggtggaacacctgaggtcaggaggtcgagatcagcctggccaacrtggtgaaaccccgtctctactaaaaatacaaaattagccaggcgtggtggtgcatgcctgtaatcccagctacttgggatgctgacgcaggagaatttcttgaacccgagaggtgcaggttgcagtgagccgagactgcaccattgcactccagcctgggcaaaaagagt

SEQ ID NO: 619582 - DNA, 566 bp, Homo sapiens
ccatcaatgaattcaagtttttcacacaatgtctgagatgtgggtgattcttcactaaatcttcattacatttacaggcgacactttctgtgacagcacaggatctgaagtctgactgccccaaatcaaatccccactccacacttagctgtgtgtcctggggcaagtggctcaatctttttgagcctcattttccttatatgtgaaggatggagattaatgaacccacttcaaaaggttgggggaactgagctaacacaatcatcccacagtatccacgggggattgattccaggacactaccacctcccctactacccccaacaaataccaaaacccacggatgctcaagtscctgatataaaattgtgccatatatttgcatgtaacctattcacatcctcctgtatactttaaatcatctctagattacttacaatacctgatgcaatgctatgtaagtagttgttatactggaccaagcacagtgactcatgccagtaatcccagcactttgggaggtcgaggcagaaggatcacttgagcccaggggttaaagaccagct

SEQ ID NO: 619583 - DNA, 564 bp, Homo sapiens
aagcttgtaggtgtcagtagagaaaaaaacaactttatgraaacctgcagcattgcaggggttaggggtgatggggagggctgagcagatgggccctttccagttcaggaaccttggtcccgagcagaaatatgatgatgagagttcctcatctttccctggctgcctccctggtagttggtgccacgtctccagaagtggtttgtagtgaattgtttctttggaggctggaagtggacgatgcacaggtgacctctgtgacaagtgcttaaaggcagatgtcactggccatgtttgttgtagtattaggatttggacattggctagagatgcagccgccaacatctttagtcaagaggtgaggagcagagagagacaaaagaaaaggaagagaatgtaggagggagaggaaagtctgagagtctgttagagagggtttagagagatggggatggagagaatgcatcagaaagagatcagcaggctggacatggtaggtcacgcctgtaatcccaacactttgggaggccaaggcgggaagatcgcctgaggtcaggagttcct

SEQ ID NO: 619584 - DNA, 564 bp, Homo sapiens
aagcttgtaggtgtcagtagagaaaaaaacaactttatggaaacctgcagcattgcaggggttaggggtgatggggagggctgagcagatgggccctttccagttcaggaaccttggtcccgagcagaaatatgatgatgagagttcctcatcyttccctggctgcctccctggtagttggtgccacgtctccagaagtggtttgtagtgaattgtttctttggaggctggaagtggacgatgcacaggtgacctctgtgacaagtgcttaaaggcagatgtcactggccatgtttgttgtagtattaggatttggacattggctagagatgcagccgccaacatctttagtcaagaggtgaggagcagagagagacaaaagaaaaggaagagaatgtaggagggagaggaaagtctgagagtctgttagagagggtttagagagatggggatggagagaatgcatcagaaagagatcagcaggctggacatggtaggtcacgcctgtaatcccaacactttgggaggccaaggcgggaagatcgcctgaggtcaggagttcct

SEQ ID NO: 619585 - DNA, 628 bp, Homo sapiens
ctaaggtctcagcctctctaagccagagaatgtgaaaaactggataaagaagacccatgggcacttggtggtggggaggcatctccttttttggagaaaacagagcctaacactctccaatcwacccaaccctctccaatctacccaaccctcatcttccaactcttctccatcataggacccaaaagggggaaacatgcctggacccacagagtgcgtgagagaaagcaactggtgatttatgaagagatcagcgaccctcaggaagatgacgagtaactccgtaagtgaacctttggctcatctcccacatccttgcagatgtgctattctgttatggtactggtatcccatcttatcagttgttccccaaatcattcccttctcataattttctagggtacagcattgaggctgaatgatgaaatttcccatgtttttttttgtgggtgggggagtctccttttgttcccccaggctggagtgcagtggcatgatctcggctcactgcaagctccgcctcccgtgttcacgccattctcctgcctcagcctccccagtagctggggctacaagcacccgccaccacgaccgggtaattttttttcttgtatttttagtagagaca

SEQ ID NO: 619586 - DNA, 583 bp, Homo sapiens
cattttacactcaaggggatgggtattaagctaaccgcctgaagaaagyagtatatataccaggtagtattaggagttctcttgtaagaaaaatgcgttccttctcttccagcatttatttattaaaataatttattcatattagtatggacttatgtacatttatatttttagttgttacataaaacttttctttctcaagtcatttcagcttttactgctcaaagttcgttcagattggctcctgtgtcaatttgacatgacccacagtttatttatttgagtacttccttactttctggcactacaagatgcttcaggctcatcttgtattttgactattccaggcttagaaacagctatatattcatgtaaccattatatacaataataatgtaaacaacttaaattctaaatgatagagaacaataaagcagcagaaattagtaaagacaaaagaaaaagttaatgaattagaaagcagaaaaattatagaacttataaataaatctaaaagccagtactttgaaaaatatcttttgttggttgaaattccttgttgaaagaaaattctctttgaaaa

SEQ ID NO: 619587 - DNA, 473 bp, Homo sapiens
tagttgaaaccagttcagcaattaaaaataatataaatcactacattggggaagtattaattctgattttttttctgtgctcttacatacttctgagatttggtaaaaataaaagatgatttccacatttttctttagttattgaagctgaacaactcttatttttataagacataagtgtttattataatgttcaatgraaacgtcattgtttatattaattatattcagtataaagacaaagctaaccaaacttgaattcacatgatgtcaaacatttggatgaaaacttcacataatcagctaaatgtttcaaaagatgtaatcctcgacactgtgtagaaagattcagatgactagctgaagttcgtaatatttatttaaatatttttatatactatgcactcaagcttttactagcaccctagtacttaaaagtatgtagttttaagaatattcttaaaatattggag

SEQ ID NO: 619588 - DNA, 473 bp, Homo sapiens
tagttgaaaccagttcagcaattaaaaataatataaatcactacattggggaagtattaattctgattttttttctgtgctcttacatacttctgagatttggtaaaaataaaagatgatttccacatttttctttagttattgaagctgaacaactcttatttttataagacataagtgtttattataatgttcaatgaaaacgtcattgtttatattaattatattcagtataaagacaaagctaaccaaacttgarttcacatgatgtcaaacatttggatgaaaacttcacataatcagctaaatgtttcaaaagatgtaatcctcgacactgtgtagaaagattcagatgactagctgaagttcgtaatatttatttaaatatttttatatactatgcactcaagcttttactagcaccctagtacttaaaagtatgtagttttaagaatattcttaaaatattggag

SEQ ID NO: 619589 - DNA, 590 bp, Homo sapiens
ctgccattgcactccagcctggttgacaagaaagaaactctgcctcaaaaaaaaaaaaaaaaatagaaaatgtctgttagttccatttgatctaaagtcccatttaaatttatcgtttctttgttgatttatttttctgtctggatgatctgttcaattctcagagtggggtgttgaagtcctyatctattattgtgttggagtctatgtctccctttatatctaataatatttgctttatatatctgcatgctccaatgttggctacatatatatatattgacatttgttatattctcttgctgaattgatcctattaccactaaatagtggattttcagccccttttttacaatttttgatttctgtctgtcttacatgacataaatattgctactcctgctcaattttggcttctgtttgtatggactgcctttttccaactcttcattttcagtgtatcggtgtctcttgaggtgaaatgagtttcttatgggtgggctatgtttgaatttttttaaaaaattattcattcagccagtctatatcttttgattgagatatttaatcttcttacattcaagattgtt

SEQ ID NO: 619590 - DNA, 386 bp, Homo sapiens
taggggtctctagttggccatctcgctgacatcagactcacaagatcttctaatatatagtttcaagcctttttgaaattttagaaatagttttctttggttgtaatgtttaatatgtattctgtcctattgctttggatttcatcttcagtgacttttgttatgtatatattgagtcttttttgcaagtcatctgactagcactttctctcaaatacttttaatcactttcattatttattttycaatcatgttctttccatatctctttctctttgtcactttgttatttttatttgctttagtgttattttcaatttggtcttcaattgtgaagtaactttttaattcttttattatcttcctcttcaaatctttcttgtctc

SEQ ID NO: 619591 - DNA, 518 bp, Homo sapiens
catattaaataattgtagaaatgatacatataatatacaatggtattctcttttctgggggaggatgacccctactgaatgcctgaaaccatggatagtgctgaatcctacatatattatgttttttttttccattaatacatacctaaaataaagtttaaygtataaattaggcacagtaaataataaaaaactaataaaataatagtaactaataataaaataggaaaatgtgaacaatatactgtgctaaacattatgtgaatgtggcgtctctctctctctcaaaatatcttcctgtgctgcccttagccttcttcctgtgatgatgtgagatgatacaatgcctacgtgaggaagtgagataaatggcagcattgtgatgaagcattaggctactgttgaccttctgtagtcctgaatctgtataaccatcctttgtcctttacttgcagtaaatggcttggtgtcactcagtgtagtggatcctttgctgaagtcttcattcagcttagcct

SEQ ID NO: 619592 - DNA, 518 bp, Homo sapiens
catattaaataattgtagaaatgatacatataatatacaatggtattctcttttctgggggaggatgacccctactgaatgcctgaaaccatggatagtgctgaatcctacatatattatgttttttttttccattaatacatacctaaaataaagtttaatgtataaattaggcacagtaaataataaaaaactaataaaataatagtaactaataataaaataggaaaatgtgaacaatatactgtgctaaacattatgtgaatgtggcgtctctctctctctcaaaatatcttcytgtgctgcccttagccttcttcctgtgatgatgtgagatgatacaatgcctacgtgaggaagtgagataaatggcagcattgtgatgaagcattaggctactgttgaccttctgtagtcctgaatctgtataaccatcctttgtcctttacttgcagtaaatggcttggtgtcactcagtgtagtggatcctttgctgaagtcttcattcagcttagcct

SEQ ID NO: 619593 - DNA, 419 bp, Homo sapiens
ttataaaaaatgtttctaaaatgcttatcttagattccaattgctacctgcccttttatgcttaccttggctcactctcctcatttaataatttgtaggttaagtggaaatcttcaaaattgtcaaatatattgagttcatttcctcacacttttccaaaattttagtcaatgtgtgttagaaatccatcaaagggttagtttccaccacaactatttattttgaaaaagtraaaaatcaggacaataaacacccttatgtccttaattgcaccaattattaacatgccacatttacacatgctgtctttcttatatcccttaacacttcaacatatatatatatatatatatatatatatatatatatgttggcatatatatatatatgttggcatatatatatgttggcatatatat

SEQ ID NO: 619594 - DNA, 625 bp, Homo sapiens
tctcttggctctctaaattgactcaggtccaggtaagctcagaatcttctcccatgatctactccttcatgttcctcattggggatgtgtgtttagggacggacgatccccctttcccacttgcacagcttgggcgctcgcagtatttagagtttctcctggatcctgcaggggcaatctgcttctttcagagggtctgtgggttctctcatctttcctgctttattcctgaagtagttctggggcacaagtttatgatgtgagtgagtctccacacactgctgtgtccatccacatgggagctgcaatctagtcctgcctgccattcagcatgatccctcggtcttcagttatcataacacctttaaagactttgtctrataaccccaataaatgtgttaccctgatgtccttcccttgagagtgtgtcacattttcctgattccttgtatgtcaagtaacttggactatatctggccaatatgacagtgaatgtcatattgtagattatgggctttgctacaatattttagagtatatcagtgttcttgttttaacaaataatcaacacagttaggatccagttgcaattgctatttcaccttctatatgtggtgattcaaat

SEQ ID NO: 619595 - DNA, 418 bp, Homo sapiens
acagatcagaacagaattgaaggagatagagacacaraaaacccttcaaaaaatcaatgaatctaggagctagttttttgaaaagatcaacaaaattgatagaccactagcaagactaataaagaagaaaaaagagaagaatcaaatagacacaataaaaaatgataaaggggatatcaccactgatgccacagaaatacaaactaccatcagatgatactataagcacctctatgcaaataaactaaaaaatttagaagaaatggataaattcctggacacatacaccctcccgagactaaaccaggaagaagttgaatctctgaatagaccaataacaggttctaaaattgaggcgataattaatagtctaccaaccaaaaaaagtccaggaccagatggattcatagctgaattc

SEQ ID NO: 619596 - DNA, 418 bp, Homo sapiens
acagatcagaacagaattgaaggagatagagacacaaaaaacccttcaaaaaatcaatgaatctaggagctagttttttgaaaagatcaacaaaattgatagaccactagcaagactaataaagaagaaaaaagagaagaatcaaatagacacaataaaaaatgataaaggggatatcaccactgatgccacagaaatacaaactaccatcagatratactataagcacctctatgcaaataaactaaaaaatttagaagaaatggataaattcctggacacatacaccctcccgagactaaaccaggaagaagttgaatctctgaatagaccaataacaggttctaaaattgaggcgataattaatagtctaccaaccaaaaaaagtccaggaccagatggattcatagctgaattc

SEQ ID NO: 619597 - DNA, 533 bp, Homo sapiens
gtttagccattttagacctctcatatacaattttataatttttgagtatggtttataactttgaaagtcaccatgtcagtaagtgttagaaagcctgaacagaccaataacaaataaagagattgamgtagaaattaaaaatctctcaacaaagaaaagtccaggatcagatgctttcatggctgaattctaccaaacattcaaagaagaattattaccaattctttgtaagcttttccaaaaaaaagaactagagggaattcttccaaactcattttatgaggttagcatcactccgataccaaagccagacaaagacaccacaagaaaaaaaaaatgcaaggcaatatctctgatgaatataaatggaagggtccttaataaaatgctagaaaactaattcaacaacacatcaaaaagattatacattatgacgaattgggatttatcactggaatgttgattttgtttaatatatgctaatcaatcaatgtgatgcattatatcaacagaatgaaagattaaaaccacat

SEQ ID NO: 619598 - DNA, 491 bp, Homo sapiens
ttttaacaaaataattttggaaactgttagaggttttggaacaacataaagtaagagcttgcgtctggattgttattagccacatcaccttctctagatcatttgaaaattaccaatgaaaagtagttgaaactcagagtttgtgcagtgtgctctttctctccagagctgttgtttctgcagaaataaaggaaaaatttgaccttgactgagttcctggaggccatgcctaaactaatttattcccagtggagctgcgcaaggaggagttggtgagtctgctagccagacctatcactgcgatactttcttcagaatgttttgccatctggaaaatgcatgattcaactgcrctggcacaagtacctcatttgtaggaaatagaagaacaataatattaattgaacaaacttcaaaataaatacagaatatttgcataggaatgctaaccagttggtgaaatgtgaataggtctaaatggctttcatctc

SEQ ID NO: 619599 - DNA, 580 bp, Homo sapiens
aatagcttaggatcacatttaccatcctagctagagaaggacacatgcaccccaagaatacattttctataagggccctagttctttaactttatttggtctgtgtgtctgtattagtctgttctcacactgttataaaaaatacctgagactgggtaatttataaagaaaataggtttaattggctcatggttctgcaggctgtataggaagcttagtgacttctgcttctggggaggcctcagtaaacttagaatcattgcagaagactaagggaaaccaggtacattttacatggctggagcaggagaaagagagggagagcgagaaagtgctacacacttttaaaagaccagatctcataagaaccctataactagtcagtaccaaggggagagtgctaaaccattcatgaaaactctgcccccatgatccaattacctcccaccaggccccacctccaacactgggkattacaatttgacatgagatttggtggagatatagatccaaaccatatcagtgtctatattctagctctcctcaggatgatatatttctacatctctatacagaaatc

SEQ ID NO: 619600 - DNA, 619 bp, Homo sapiens
aatttttatcgtttggtatcaatttgtaatttttatcatttaatgccattctcaaaagaaaaagaaagattgtgagagagaaaatattaataaggttcagctgcaaccatgattgcactaaaaagtacacaaaaagcaacaagaaattcccaacagaacacatgccagggcacagcttcttttgttctcgttactttgacaataaattttaatattttccagagatttggatggatatgataagcaactatgtttatwgtaatttgattacatctgttaaattaaaaacagctaagaagttcatgtattctttgctatttggagaataatgagcaactaaagagactggcatctatggaaattccaaacaaatttggtcccatttagttcttacaataattgaaatgagggcaagattacatattctatgagatcatcttgcctgaactatcttactcaattattctcttcctgatattgagttagttctattgcatcattaaaactttttatgatgctacattagttatgtactttatccacatcttgaaatttatttgtttttttgtggactatacaatttgagttcctgcaattctacgtgcatcatcagtattca

SEQ ID NO: 619601 - DNA, 568 bp, Homo sapiens
aatcctgttttatacaatattatcatactagtctaactcacaaaattataaccattttggtggtggaacaaatcttgccaagcaagatccaggttaatgggtttagacatattaaaataaagatagcatgtggtacaaatacttctattaattgctagttgaccaggcacacattctcttggaaaacsagcaaggctaatcccttgattaaatttatttgatgaaacacaaagagtaaaactttagttatctgaaaaccatttggagattagtttaagacaataccattaaaatattatagggcttactatctgctagacataatgctagtactggagaaaataagatggatctctccctgaaggagaccatagttatgctgacaaatgatgccagaacattgtggtagattcaacaatggatacagggcacagtgatggagggcataggaatagaatgggtacattctggggaacaactgcatgaggttacagagagatgggggactgaacaatgagaaaggagatgtgagaaacaaaaaggtaagggaaacgaagacgagaagaac

SEQ ID NO: 619602 - DNA, 541 bp, Homo sapiens
gctgatacatagagtgagagtatcaccatcaaacttttcactgaggcaccccatctcttacctctgaattcttattatttcctgtgtgaccacatatcagtggaactgaggcaaagtaccagagcctacctacaatacaactcagtgcacttctttttaaagataaaaaatgtggtgcaataaatgtaaatgttttaacatttgtttcttatactgtaaaggattgtcttttccctctgaagggcatacatcaccakttggagactgtgattatgaaaactgaaaacaatggaaaagtattaaaaacagagtgacatatttagacttcaattaaaagaattggtctgtaactaagtttcttagacagctttaagtatgtgttttaattttgtcattttggctgaataggaaactctctaatatgtagtttagatttatttaatttattaattgctattataacagtatttatctttttcaacactattagaatgtgcagcaatacagagagctctttagagtctattacagttttaaaaaa

SEQ ID NO: 619603 - DNA, 541 bp, Homo sapiens
gctgatacatagagtgagagtatcaccatcaaacttttcactgaggcaccccatctcttacctctgaattcttattatttcctgtgtgaccacatatcagtggaactgaggcaaagtaccagagcctacctacaatacaactcagtgcacttctttttaaagataaaaaatgtggtgcaataaatgtaaatgttttaacatttgtttcttatactgtaaaggattgtcttttccctctgaagggcatacatcaccatttggagactgtgattatgaaaactgaaaacaatggaaaagtattaaaaacagagtgacatrtttagacttcaattaaaagaattggtctgtaactaagtttcttagacagctttaagtatgtgttttaattttgtcattttggctgaataggaaactctctaatatgtagtttagatttatttaatttattaattgctattataacagtatttatctttttcaacactattagaatgtgcagcaatacagagagctctttagagtctattacagttttaaaaaa

SEQ ID NO: 619604 - DNA, 560 bp, Homo sapiens
tggctgattatgtggactcaataattctagtctttttggaagcctttttggctcaatttttgagtgtaggataaattccagataaatataaatactactagacctctgagttctggacaaagaaagcatgactctatgttttacacatagtgttgatggttgctctttataaagactggttaacatttcttttcatttgttaggacatttggacttctaaacttgctgaatggaggggacttgagtagatacaaacagggaaaacttaatcctggcatgcaaattgactactgaaagcaggatcragaaagaggaagaaaagagtaaggaggataaatgcatacaaaatctagaacttactgtgagcaggagccctttcaaactgcaagtgaaccctgcataaagtcacagtttagagatataagaaggggtacctgtgctgatggtcagagagaggccacgaccacttgggtgtgacacagtaatgataccttggcaatgagcactgccaggcaaacaatactcaatgggtgcctaagaggaatttaggctgagctgac

SEQ ID NO: 619605 - DNA, 616 bp, Homo sapiens
tttaggataatgctttaaataaataactcagtttgatagttttaattcaaattcattttgatatttgattcaaatttatttcactttgataattttccacttgcttgtggtagttttaaaatatgtctttactttttggtcttaatttttactttctcttgaattgtatttattgcctaagtaacatcatagtaacaatacaataaatcaaatagaagaaaaatttactcaccgtctcctcatgctgacgtatcagctgctttcatttttctattttcttgtctagtgtttccacacataaacattataaccaaaacagagacacttctgtgctctgctctttttcagttggcattgtatcatgttttatgagtcttcatcctttcccctctaccactcctaaaaacaagaaacccttggccttccacattccatgttggakgcccaggcttataaacctctgccctgggcattgatttttatgcatcttcctttcatgatggggctgtatgttccacctatgagaacatgcatctctgtggatgtcttctccaattagaagggaatgagaagggagtgactttccattctcctcttaaaagtgcaaagaaactgt

SEQ ID NO: 619606 - DNA, 595 bp, Homo sapiens
aaataaaggatttgttttgtaccaacaactttggaaaatatacttttgggctactagaaaatttactaacttcattgtcggggttaaagttagatgcttactgaaagaaattcatcaagatctgccattaacactacagttatgtccctcagtacatacaggaagttggttctagtacacctgcatatactaaaatctgcacatactcaaggccagttgtcagccctgaggaaactgagtacacaaaaagttggtccttccaatatgcctgctttgtatcctaagaacactgtatttttcaatccatgtttggttaacaaaaatctgyctataagtggacccttgcagttcaaacccatgttgtttgatggtaaactatatttgtaaataattagtgagtaggaattaaccacgtggcaaggtttttttattgcaatgtaaaaaatgttcagcacacttttataaaatagcttaatattgtagctgtacatctaaagggaaactgataagcacagatatcactatagttgtgaatcgaactgaataatgattagaagaacaaacattagagtgaataaactcagcagaaaggaca

SEQ ID NO: 619607 - DNA, 595 bp, Homo sapiens
aaataaaggatttgttttgtaccaacaactttggaaaatatacttttgggctactagaaaatttactaacttcattgtcggggttaaagttagatgcttactgaaagaaattcatcaagatctgccattaacactacagttatgtccctcagtacatacaggaagttggttctagtacacctgcatatactaaaatctgcacatactcaaggccagttgtcagccctgaggaaactgagtacacaaaaagttggtccttccaatatgcctgctttgtatcctaagaacactgtatttttcaatccatgtttggttaacaaaaatctgcctrtaagtggacccttgcagttcaaacccatgttgtttgatggtaaactatatttgtaaataattagtgagtaggaattaaccacgtggcaaggtttttttattgcaatgtaaaaaatgttcagcacacttttataaaatagcttaatattgtagctgtacatctaaagggaaactgataagcacagatatcactatagttgtgaatcgaactgaataatgattagaagaacaaacattagagtgaataaactcagcagaaaggaca

SEQ ID NO: 619608 - DNA, 595 bp, Homo sapiens
aaataaaggatttgttttgtaccaacaactttggaaaatatacttttgggctactagaaaatttactaacttcattgtcggggttaaagttagatgcttactgaaagaaattcatcaagatctgccattaacactacagttatgtccctcagtacatacaggaagttggttctagtacacctgcatatactaaaatctgcacatactcaaggccagttgtcagccctgaggaaactgagtacacaaaaagttggtccttccaatatgcctgctttgtatcctaagaacactgtatttttcaatccatgtttggttaacaaaaatctgcctataagtggacccttgcagttcaaacccatgttgtttgatggtaaactatatttgtaaataattagtgagtaggaattaaccaygtggcaaggtttttttattgcaatgtaaaaaatgttcagcacacttttataaaatagcttaatattgtagctgtacatctaaagggaaactgataagcacagatatcactatagttgtgaatcgaactgaataatgattagaagaacaaacattagagtgaataaactcagcagaaaggaca

SEQ ID NO: 619609 - DNA, 584 bp, Homo sapiens
tttcagtgatgatttcatgggtttattcatgtgttcaaacttgatttgtatactttaaatatgtacagtttgttgtatgtcaattgtacctcaaaaaagctgtttttaaaatcagcagaaattttgcattatactccttttatttgtgctcttaattgaattaccaaaaaaggaaaaaaagtatagtactctacctaaagttatactgcatttcattcctattgttgtaacaccrtttggctcattctaaggtaaaacattaacattgcaaagggataaaatacttgcccttctcttttaaagtttaagatgaagaagtttcattctaaaagttcagtttagaaaataatgcatcataaaattctcagtatttatattgactgtgagaagaacatattaaaaaactggttttcatagaaaacataataaattctgtccttggcaagacatgtaattaaaagcttaaaaaaataccaccagcaggcattaatttcatatgtcagatcatgcaataggaagtaattgattttttttaagttggatgattgaaataggatatttagaaagagcagcatgaaataaag

SEQ ID NO: 619610 - DNA, 582 bp, Homo sapiens
ctacgtactttttgtgtgtgtataggtttattttcataattgttctctatccccaagtcataaaggtatttacatttttwaaaaatgttttttgagttttggtttcatggttatatttttaatcaatctcggcatttattttttgcaaactgtgaggtaagtttccaattttattcttttcctcatggctggtcaattctcccacaaagtttatgggattctctatccttgctgtgttagttgagtgacacatctgtcacaattcaaaattctttttatacatgatttatttctgtgctctctgttcagatttgtattttttgttatctttggtttatgcattttatttataaagttgtaaaatgctggagtaatttccatttaacaatatagtaacttagattattacaatttgaatagagattattttaagtgtagctatctcatttaagtgtgtcaaattggcaataggttttcatgataagagtttaattatattcatatttaaagttatgtatgactagtattttagagatcttactagggatacacagaagaaaaaagaaaacttagacttgaaga

SEQ ID NO: 619611 - DNA, 633 bp, Homo sapiens
taacagcgatgaaagtgagcatccttgttgtgtttcagatcttaaaggaaagacttttgatttttccccattaaatacaattttagctgtgggttggtcatatatggcctttattacttttaggtatattctttctatacctagtttatgagggttttcatcataaaaggaaggtaaattttattaaatgctttttcatatctgcacctattgaattgatcatatgttttttgttcttgctgctgttaatgtaatgtttcatggggggttttttatttgtttgtgttgtaacatccttgtatccctgagatgaatcccatgtaatcatggtaaatgatcttttaaatgtgctgtcgaatttggtttgccagtattttgttgaggattgttgcatctgtgttcatcagggatattggtctgtagttttctcttttagttgcgtatttgtctggttttggtaccagggcaatcctgacgtcacagaaggagtttggaagaattccctccacttcaattttttgaaaagcttgagtagaattggtgttagttctttaaacttttggtaaaattcagcartgaggccatcagtttctggactttcctttgatgcaaaactttattacagcttcaatc

SEQ ID NO: 619612 - DNA, 399 bp, Homo sapiens
gaacaaggctagctgatacatagatctagttctcaactgctggccacactgctttcagtaagtgagaaacaagatacacttagctcatatttcagcccagtacaagcctcatcagtctggtgacactcaawaaaacagggttccagttattccttcaatcacctctgaggctgaagccctgctgtgaaacccgtctgctgtcttttcagtaggaatcctggccctcctcatctcagctacccacagcaaagcctattgggctaccctaaatttgagaaatgaggatgaagacagtgaagtcatttcaaacttaaggggaaaataatttcccattagaaaggtatacaaagaaaagtcttttctacaaataagtcattttaactatttaacattgttaaa

SEQ ID NO: 619613 - DNA, 631 bp, Homo sapiens
tctctctggctatgctcatgatggggagaggcctgtgttctgctatcctagactttgtataaggaaactaggatggcaatctgattggaagggaaggtctgcgagatttgcagggaagctgcattaagaacagacacaccattttctttagattaaacatgtattagagttgactttgggagaggttgggcagtggagtttaagctgtctgagggtaccccttagtgctactgcagagcctaaacatttctttctcattttctaggaaactttctcttttttttgtctcaagaacttgatagatagtagaaaaaaaatagctaagttattacataaaaaaacccaatataatcatattaacagctgaccaaagggcccaagtatcttgatccaaagaagtgactaattacagccaccttaggcatatggtaygccaagaatgggggcagtagtcttggtaatttgtaattcttggttcaagatgtgatcttccctaactttatgtatgaggcaacccaaacaatgaaaagagagtgcttacttatgtgtcacttttccccctaaagtcacagtgtgatcctttggcatctggaacaagtaaacttcctcataataatgaaaatttgctttg

SEQ ID NO: 619614 - DNA, 631 bp, Homo sapiens
tctctctggctatgctcatgatggggagaggcctgtgttctgctatcctagactttgtataaggaaactaggatggcaatctgattggaagggaaggtctgcgagatttgcagggaagctgcattaagaacagacacaccattttctttagattaaacatgtattagagttgactttgggagaggttgggcagtggagtttaagctgtctgagggtaccccttagtgctactgcagagcctaaacatttctttctcattttctaggaaactttctcttttttttgtctcaagaacttgatagatagtagaaaaaaaatagctaagttattacataaaaaaacccaatataatcatattaacagctgaccaaagggcccaagtatcttgatccaaagaagtgactaattacagccaccttaggcatatggtatgccaagaatgggggcagtagtcttggtaatttgtaattcttggttcaagatgtgatcttccctaactttatgtatgaggcaacccaaacaaygaaaagagagtgcttacttatgtgtcacttttccccctaaagtcacagtgtgatcctttggcatctggaacaagtaaacttcctcataataatgaaaatttgctttg

SEQ ID NO: 619615 - DNA, 573 bp, Homo sapiens
tggaattctcaaagtttttattttgttttgctttgtttttagagccgtcattgactacagctaagacccttaggctgaggcacttttctcagtgggtgtgaggccatagaaaatttaaaactgatttggcagccaaacttggagaaaataggaacacagatggcaaataataagttttgtaagttatcacatgatgttgccttgaataatcacttttaccttgatctcaagttgataggtcaaaggattgcagttttgcttttactttacttcaaagtggacagcacattttcctagactatatccttaaagcaaaaataaagtcttcaacctagaaaacagaaatctattttycatataatggaaattatgtctgagaaagtctttactgctctgttttccagtttttaagtcaaaaaatggtctatttgcttcctatgccaagtacacattataaaaattaaaaccttcttcgatttcacactatatcaatatgctaaacgtctagaaggagatagatcaggctgttccttgagtctgggtaccaggatgaaatagtgtggcatagatatt

SEQ ID NO: 619616 - DNA, 453 bp, Homo sapiens
tttggcagccaaacttggagaaaataggaacacagatggcaaataataagttttgtaagttatcacatgatgttgccttgaataatcacttttaccttgatctcaagttgataggtcaaaggattgcagttttgcttttactttacttcaaagtggacagcacattttcctagactatatccttaaagcaaaaataaagtcttcaacctagaaaacagaaatctattttccatataatggaaattatgtctgagaaagtctttactgctctgttttccagtttttaagtcaaaaaatggtctatttgcttcctatgccaagtacacattataaaarttaaaaccttcttcgatttcacactatatcaatatgctaaacgtctagaaggagatagatcaggctgttccttgagtctgggtaccaggatgaaatagtgtggcatagatatttgat

SEQ ID NO: 619617 - DNA, 570 bp, Homo sapiens
tttaaataaggtttgggtatcatattagatgaaaatgcactgaaacagtagactaaaagatggctaactggaaaaagcaggttatagtataaacaattacacaaatacacacatatattcatatatttrtatgtatgtaaacgcataacatgcaaaatatagatatgcatacaaactgtgtatatatataaaaactatacgtttataaaatgtatttatatatatatgaaaaatttgagaagacatgcattagagtttctacatggtattctgtggttggtggcaatatggcatttattcattgtacttttctaattttcaacaatgcaaattagtattttcataaaattttttcaaaagtattgaaggatgaggaggaggaagaaaaggatagaaagaaaatgaaaagcaataggagacagggagggggaagaatgggaggagaaaacgatgtggaggaagaggagaagtaggaagggaggtgctgaaaggaaatccaaggaccaccaggtagaaggagggtaaagattcaaggacaaaggacagccatgctatgtgatcaatgtgagt

SEQ ID NO: 619618 - DNA, 570 bp, Homo sapiens
tttaaataaggtttgggtatcatattagatgaaaatgcactgaaacagtagactaaaagatggctaactggaaaaagcaggttatagtataaacaattacacaaatacacacatatattcatatatttatatgtatgtaaacgcataacatgcaaaatatagatatgcatacaaactgtgtatatatataaaaactatacgtttataaaatgtatttatatatatatgaaaaatttgagaagacatgcattagagtttctacatggtattctgtggttggtggcaatatgrcatttattcattgtacttttctaattttcaacaatgcaaattagtattttcataaaattttttcaaaagtattgaaggatgaggaggaggaagaaaaggatagaaagaaaatgaaaagcaataggagacagggagggggaagaatgggaggagaaaacgatgtggaggaagaggagaagtaggaagggaggtgctgaaaggaaatccaaggaccaccaggtagaaggagggtaaagattcaaggacaaaggacagccatgctatgtgatcaatgtgagt

SEQ ID NO: 619619 - DNA, 410 bp, Homo sapiens
aatcattaagatgaatctgaactttgtcttatgatattcttattctttatagttttaaatattgatttagactccacaactttgaactacctaattgtttttaatggtacaaagcaatatttacrttcatactgtccaggaaagaaaggcttctggacaagtttatcttgttaataaaattgcatgtagcatatttaattttcataaatcacatgctgttttatggaagaacttataatactctatagaagtcgaagatgctgaactcaattaagttttaatagatgtcatcagctgcccctgaagaccttcaacaatttttttctgactcttttccttactgggccaacctgaaaaagtaggcttagtgctatactaatcctccctgcaatttgtcagaattaggaagc

SEQ ID NO: 619620 - DNA, 410 bp, Homo sapiens
aatcattaagatgaatctgaactttgtcttatgatattcttattctttatagttttaaatattgatttagactccacaactttgaactacctaattgtttttaatggtacaaagcaatatttacattcatactgtccaggaaagaarggcttctggacaagtttatcttgttaataaaattgcatgtagcatatttaattttcataaatcacatgctgttttatggaagaacttataatactctatagaagtcgaagatgctgaactcaattaagttttaatagatgtcatcagctgcccctgaagaccttcaacaatttttttctgactcttttccttactgggccaacctgaaaaagtaggcttagtgctatactaatcctccctgcaatttgtcagaattaggaagc

SEQ ID NO: 619621 - DNA, 410 bp, Homo sapiens
aatcattaagatgaatctgaactttgtcttatgatattcttattctttatagttttaaatattgatttagactccacaactttgaactacctaattgtttttaatggtacaaagcaatatttacattcatactgtccaggaaagaaaggcttctggacaagtttatcttgttaataaaattgcatgtagcatatttaattttcataaatcacatgctgttttatggaagaacttataatactctatagaagtcgaagatgctgaactcaattaagttttaatagatgycatcagctgcccctgaagaccttcaacaatttttttctgactcttttccttactgggccaacctgaaaaagtaggcttagtgctatactaatcctccctgcaatttgtcagaattaggaagc

SEQ ID NO: 619622 - DNA, 410 bp, Homo sapiens
aatcattaagatgaatctgaactttgtcttatgatattcttattctttatagttttaaatattgatttagactccacaactttgaactacctaattgtttttaatggtacaaagcaatatttacattcatactgtccaggaaagaaaggcttctggacaagtttatcttgttaataaaattgcatgtagcatatttaattttcataaatcacatgctgttttatggaagaacttataatactctatagaagtcgaagatgctgaactcaattaagttttaatagatgtcatcagctgcccctgaagaccttcaacaatttttttctgactctttyccttactgggccaacctgaaaaagtaggcttagtgctatactaatcctccctgcaatttgtcagaattaggaagc

SEQ ID NO: 619623 - DNA, 588 bp, Homo sapiens
tgaattcttctaaatgtcactaagacttggataagcccagtttttcttgtgcataaaaagaattctaggttgcgcagggggcatttttagctaaaccctccccagaatcacaacccccctaaaaaaaataaactraaatacaaatttataattcccttcccacaagtagcaaagtcaagggtcttcattaaagattatgggagttatgcccccactatgtcagggcacttctcagaataactgcatttcctcagttttctccatggtttctaagtaacaatgctgcacaactggatactgtactaagttcactctcagggctatttgttgccctctggagctgtgtgcacatgtagaagttgggtccacctttactgctggaaaacacatttatgtaatcagctctttcaataaatgtcacatattttagatagaattacaaagagaaagagttgcagaactttaaccctttaagaaaagtagattttttttgtcttcattatttaaaatgtaaccctaggactttggttagccataaaagaatcggaatttataggaagacagaagaaacaatgagataaaatgagt

SEQ ID NO: 619624 - DNA, 588 bp, Homo sapiens
tgaattcttctaaatgtcactaagacttggataagcccagtttttcttgtgcataaaaagaattctaggttgcgcagggggcatttttagctaaaccctccccagaatcacaacccccctaaaaaaaataaactaaaatacaaatttataattcccttcccacaagtagcaaagtcaagggtcttcattaaagattatgggagttatgcccccactatgtcagggcacttctcagaataactgcatttcctcagttttctccatggtttctaagtaacaatgctgcacaactggatrctgtactaagttcactctcagggctatttgttgccctctggagctgtgtgcacatgtagaagttgggtccacctttactgctggaaaacacatttatgtaatcagctctttcaataaatgtcacatattttagatagaattacaaagagaaagagttgcagaactttaaccctttaagaaaagtagattttttttgtcttcattatttaaaatgtaaccctaggactttggttagccataaaagaatcggaatttataggaagacagaagaaacaatgagataaaatgagt

SEQ ID NO: 619625 - DNA, 614 bp, Homo sapiens
gaatgccacttactgttgtttytgaagtgacctgaaggacagttgagagccaacctaatgtaggaatgtctcttgtctcttttcccagcacgctctccagaagggaaaatccccaaacaagtcttcaaatatgagcttttcagctatccatgatagcctataatttcaagctttttaaggtcattctgggagagatgtttaagatgagagagttctttttccttttgaaaaaagaaaccttttggtttccaaacatttcataaacctctggaattctttggagtgagccaaagtggaaaaagtactgaaactgctgggaaaaattagtagtagctgtgaaaagagcatttatcagtaatccagacatcgaagacatttagactttgttgaacaggcagtttgtggtgagaaatgactggtttaggggcattgctagtcaggcaacctgggctagaactggctgggttgtgttggtttcctagggctgttgtaatcaagtactgcaaaggaggtgccttaaaacagtgtaaatttattatttcacagttctggaggctataagtccaaaccaagttttctgcagggccatgctttctctgaaggctgtagaggag

SEQ ID NO: 619626 - DNA, 565 bp, Homo sapiens
gacccatcagtaggagcaataagtgccttcacaagaaaattgattgctgtgttttagttaggcttgtttatctctggatccctgattggattttcattttcccctggaaactccagtttatttggcaaatatattacccagagtagtccagggttttgttgttrtcgttgtagttggttttaaccattttccaataaaacattgcagagtcaagcaaaaggtggcagtaatgaatgtaaagatggagacaaaggaagagaatgatgagccaactagagtaatagttactgaagtaaaagcagaactttttattctgaagagtataattttttttacaagaaagatgacaagtttaaagagaaggatgtaggtacccttttcttaaaatctgtagcaaatcagaagcacagcttttactaggagcagacaccaatttaggcaatgtactgctgaatattctgattccacccaattgttgtgtacttgaatagcaaaaacaatgtacttattttctgtgtttcagatctaccaatttatgagaaaaatgccatgatctcagttaaga

SEQ ID NO: 619627 - DNA, 565 bp, Homo sapiens
gacccatcagtaggagcaataagtgccttcacaagaaaattgattgctgtgttttagttaggcttgtttatctctggatccctgattggattttcattttcccctggaaactccagtttatttggcaaatatattacccagagtagtccagggttttgttgttgtcgttgtagttggttttaaccattttccaataaaacattgcagagtcaagcaaaaggtggcagtaatgaatgtaaagatggagacaaaggaagagaatgatgagccaactagagtaatagttactgaagtaaaagcagaactttttattctgaagagtataattttttttacaagaaagatgacaagtttaaagagaaggatgtaggtacccttttcttaaaatctgtagcaaatcagaagcacagcttttactaggagcagacaccaatttaggcaatgtactgctgaatattctgattccacccaattgttgtgtrcttgaatagcaaaaacaatgtacttattttctgtgtttcagatctaccaatttatgagaaaaatgccatgatctcagttaaga

SEQ ID NO: 619628 - DNA, 487 bp, Homo sapiens
caaaacagagcatggtggtattctatggtgactaccttgagtggtcaggtggtgagctgatcacccatacccaagtaatgaggaattgaccctctgtaactctgtgttgcactttgttatatagaggctcaaagctgcagagttctatgtttgggccccagtatcttagatgaaaaaattctttcttttatgtcatggctttagtctttttctccttagagcttcctaaagagatgagactgttgtgggtatgggaaggcttaggagccatcccctttattttcttctttccttcactcattggaattagaaagtaaaataactgaaataaaaaattaaatttattggaggtgtacaacagcactattggggagacagcttaaaggagattggggarcagagttatatttaaatgaagtttttgtatttctatgaaattaaattggtattaacctgaactagattgtcataaattaaggtgataatg

SEQ ID NO: 619629 - DNA, 589 bp, Homo sapiens
tctctaaagaagatgtacaaataactgattagcccctaaaaagctaatcaacataatcagccattagataacttaaaatggaaacygcactgagacattactcagttggatcttcacatccactgggattgttataataaaaatggtggacaataacaagtgctttcaaggatgtgaaaaatttggaactctaatacattgttaatggaaatgtaaagggtgcaactgctgtgaaaaagttttccagttcctcagaaagttaatatagagttacagtattgtccagtaattttacctttaagtatatatgcaagagaaataaaacatcttcacacacaaacttgtataggaatgttaatagcagcatttatcataatgataaaaagtagaaacaatccatatgtccatcaactgttggaataaataatagtggtgtatatatatatataaatatatatatatataaaacagagtattattccactgtaagatgaagttctgatgtatgttacaacatggaatgaaactgggaaacattcctgtgaaagaagcctgacaaaatagactgtgaaagaagcctgaaaaaaca

SEQ ID NO: 619630 - DNA, 545 bp, Homo sapiens
atacaagtgattttattatttttaattcaaataaatattatctaccaaagtctctgaaattgattaatttcagatgaatattctcagataagtaaaagtaaaaattgtatcctaatctacagcagcctggacacatttggactttagagttattcatggaattataaataacacaagtgtaagcagcacagtgcagctagttaaatatgataatatgtaattatactttccgtgacattttctcaatggtacacaatacmtctaaacaacgggtctatgttttgtttttttttttctgtatctgtatctgtgtctatcattgttaaggaagtacattcaatttttctccagtctaggaaaatagtattatttttctaaattacttgtgataatctatatagagactaagaatattttcttcataatatgaaatgccattttggctttttagtcttcacagggatattttcagttcacagaatagatatttttgaacaaaatcaagcacatgattttaaatattatttgtatagtggtctgtgtgt

SEQ ID NO: 619631 - DNA, 375 bp, Homo sapiens
catgcctatttttataccagtgtcatgctgttttggtaactatagcctcgtagtatagtttgaagtcagataatgtgatgcctccagatttgttctttttacttagcattgctttgactatgtgggcttttgttttttgttccatataaattttagaaatactttttctagttctatgaagaatgatgatggtactttgatgggaattgcattggatctgtagattgcttttggcagtatratcattttcacaatattgattctacccatccatgagcatgggagatgtttccatttctttgtgtcatcaatgatttctttcagcagtgttgagtagttttccttgtagagatccttcacctccttggttagata

SEQ ID NO: 619632 - DNA, 650 bp, Homo sapiens
tgaattcccaggtgttgtgggagggactcagtgggaggtaattgaatcatgggggtgggtcttttccatgctgtgatagtgaataggtctcatgagatctgatggtcttaaaaatgggagtttttcagcacaagctttcttttcttatctgccaccatatgagatatgcctttaaccttctgccatgattatgaggcctccccagccagttggaactgtaagtccattaaacttgcttcttttgtaaaatgcccagtcttgggtatgtctttatcagcagcatgaaaacagaccaatacaacggataaatatactcaattatttttytaggtcagcatttctcaaagtttaatagaactccagttggccagtatataaataaacacactattaaaaagtcccctgtggttacataaatttagattacgctgaattatacagagattcagttttttattgtatcgcttttaaagttttaaataagattatgtaagcaacttatatgtatttgtcttagttttaggttccacccaccctctctctctcaaagcagtccaagtcaagggttccaactgaaagtgatttatttgctaagtgatcccaggaaggaaaaaaaaaaaagaaaaagaaaaagaaaaaaaaaaaacaag

SEQ ID NO: 619633 - DNA, 590 bp, Homo sapiens
tctgagtaactgggattacaggtgcctgccaccatgtccagctaatttctgtatttttagtagagacagagtcttgccatgttggccagcctggtcttgaactcctgacctcaagtgatccacctgccttggcctcccaaagtgctgggawtacaggcatgagtcactgtgcccagcctgatattatcttatgtttggaaaaacctaaacactccaccaaaaatctatgcaaactcataaataaaattagtaaagttgcaaggatataaaatcaacatagaaatcaggagcatatttatatgacaacagtgaacactctgaaaaagaaatcaagaaagtaatcccatttacaatagctacaaataaaataaaagagctaggaataaatttaaccaaagaagtgaagatatttacaatgaaaactataaaacattggtgtggagccaagatggccaaataggaacagctccagtctacagctcccagcgtgagcaacgcagaagacagaagacgggtgatttctgcatttccaactgaggtaccgggttcatctcactggggaaagtcagaaagtgggtgcaggacagtgg

SEQ ID NO: 619634 - DNA, 358 bp, Homo sapiens
agaatttgcccaaggacacagaactggcaattaacagagacagagccagaatttgtttgttttgctcccactgctctttctgcagtagcaatggggcaaatggagaaaaagagacctcaaaagtcagatgtttcagacatttaaaagytggggatcaaactgcttttgcaaaaattataactaggaaattacgacagtgaaagagatctgacctaacctactccatcttgcttctaacctccaaactgtccttgttcattttggggcatcagccatattagctttgggaggaacttgatttataatttaactttgaaacaaagacaataacagcattttcccaaaacaaacccccttc

SEQ ID NO: 619635 - DNA, 358 bp, Homo sapiens
agaatttgcccaaggacacagaactggcaattaacagagacagagccagaatttgtttgttttgctcccactgctctttctgcagtagcaatggggcaaatggagaaaaagagacctcaaaagtcagatgtttcagacatttaaaagctggggatsaaactgcttttgcaaaaattataactaggaaattacgacagtgaaagagatctgacctaacctactccatcttgcttctaacctccaaactgtccttgttcattttggggcatcagccatattagctttgggaggaacttgatttataatttaactttgaaacaaagacaataacagcattttcccaaaacaaacccccttc

SEQ ID NO: 619636 - DNA, 455 bp, Homo sapiens
ttcctcttactgctgggctcatttatttttatcataacaacctcttccttggaaaaagactatgactactaggcccctgactgtacttcaggtctattattgccccttaccaagtagttgactatctgaggacaagcacaatttggtgccagagtagttgtgacacatttgagattaactttgatacccattatttatgtacctaacgggggctcctcccactcacagctcctacagagtgattattttaacatataactcagtcagttcactctgaataccttaattggcttagagatggacatgtaactacgagtggaccatccaaaaattgtsttggaaagaaaagcaatggcaaagagactcatagtttgggaatatgaactggaagacacagatggcaatttcagatgttggggtttcaaagtcatgtaatcttgaagctgaggctgctg

SEQ ID NO: 619637 - DNA, 542 bp, Homo sapiens
cttagtccttctgtgttctttctatacctttcaggaaaggtggaaataaaagaactcagaaccatgtaattcttatcttcaaagcaaggggacaagacagataaaaagagtgccttaagtaaacactgaaaatttgtttaaaagtatcatctaaaagacaagtcagaaaaaatgcttttacttccaggtttggcagatgttaagaagtttcgcagttatcaaattcagaaaaagcttcaattttgtattgataatcatgaaaaagccaagaatgtttaatattccaccactacattatgttgtttttatttattctacccatatactttatcccaacttctataaaggtttaagaacaataaaggaaaataggaagaagattcttgtgagacaggtctgaaaaaggttagcaaatagcctaaagtacawtaaattctcaataaaatgaccttcccttcctccgatagggcatcttgattctatcttagggattcctagtaagtctagtagaaggcagctggctaatccttcccaaaaaagaa

SEQ ID NO: 619638 - DNA, 562 bp, Homo sapiens
tttcatccatctccatccttakcccaacaaacatgtcttcattaattctatcactctgtgatcttgagcaagttacttaacagatgcaggtctcaattttctggttttctcaggagctcagtaaatagtttcagaggctgggcaggtaataaaataaatgaatgatgtggggagagctagacgttaaagtcctgtagcaaaccttatagtgcgcctcccagagagcctattcaaatggcttcatttattcattttaagttttagatgtttagtttaagtccacacttggactagatactctctaaattatcttcaagataaaattccatgaattatctgtaagccgtcatacagattgtattttcttctactcatgtcgttctctgagactcaatggggatcaggagacctgtcccaactggcttcatgtaaaatatttatttaagattttctgcatctgtagtcaatgagatggaatccttttctcccacagaaccctccttgagctagtaaagtctgtacttgaatccatgctcttttgtctgaggcagatcagattggg

SEQ ID NO: 619639 - DNA, 641 bp, Homo sapiens
aaagcagtgacccagacagcccttagggagcttacagtgtgtgtgaggacaggcaaatgcttacaagagaaggtggcaggtagtgtggccgagggcagtacagtgttgtgggagggcctagagaaggcacctaaactggctggagtcaggcagaggtcaaggatggccccctttagttttaagggaggagcacagttaggcagttggagtgcagttgggtcgtgtgagatgaagattttcaggcagaagaaaccacctgttggaagctgtggaggcgggaagcaaaatggcccatccaggcaactgcaaatagtttcagtgtaattggagaaacattggaggaggaggagagggggaaatgagactgagagggatatgggaaccacatcatggaggccctgaatgccacaggaaggaatttcagcttcctccagaagctaatatttaaccactgagggaatttaatgagaagctgtgtacagaactgatacttctggatcaatgtggacagsagaatagaagtgtgcaaattcagagccaggggagctgttagaaacagaagttacacagtctcatgcttggtccaccctggtgataaaaatgagagaaacaggccaggagggactacagaggccaggagg

SEQ ID NO: 619640 - DNA, 549 bp, Homo sapiens
gatttaatggagacaactcaaaattgcacattaattctgataattataaattagaagtgaatctgtgacttttcttgtcattaaggccaaccacatgactttttttccctttctaagttggtagtagtcgtactarccatcacagcagtaaggaggtacagctaatttagtgaagattaccagtcattggggcttaatggtttattaagagagaaaatatattaatatatcatattaatataaccgcatatattaatatatcatattaatataattgtatatattaatatatcatattaatataattgtatatattaatatatcatattaatataattgtatatattaatatatcatattaatataattagaacatattaatgttctaatgagagggaaagaaaatagcaataatgtagaatttagtatataatttcatgtatcatcacatatttcatctgagctatttttgctaccttttgctgtctgtgccagaagttctacaagttctggaacacagctgcccacatgaaaagctggtggtatcac

SEQ ID NO: 619641 - DNA, 532 bp, Homo sapiens
gaattcaaaccatctaggaattttacccatcatttctttattccctacctgtacaggtaaataggagttaaactacagaatcacttacctagttattgrtagagaaaaaaaactgtctatctttctgttttttttttttttcaaaggaagctgtggtacaatatgaacaatatgagcaagaaatgaaacatctccagcaactgatagaaggagctcacagagagattgaggataaacctgttgccaccagtaacatacaggagctgcaggctcagatttctcggcatgaggtgagaggaatgtaggcgaaataccgagggcaggaaactggcttgattagagtatatgtttggtttctagagaatggaagagaacagtttcccctgtcctgcacttaatgtgttcaactcttgagaggcctctttggctatctaagcattgtgagtgccgtttttgttgattcagtaacacgtgcgttccccttgattccataacctctctacacgttgttcgtattatatcctttgggacc

SEQ ID NO: 619642 - DNA, 532 bp, Homo sapiens
gaattcaaaccatctaggaattttacccatcatttctttattccctacctgtacaggtaaataggagttaaactacagaatcacttacctagttattggtagagaaaaaaaactgtctatctttctgttttttttttttttcaaaggaagctgtggtacaatatgaacaatatgagcaagaaatgaaacatctccagcaactgataraaggagctcacagagagattgaggataaacctgttgccaccagtaacatacaggagctgcaggctcagatttctcggcatgaggtgagaggaatgtaggcgaaataccgagggcaggaaactggcttgattagagtatatgtttggtttctagagaatggaagagaacagtttcccctgtcctgcacttaatgtgttcaactcttgagaggcctctttggctatctaagcattgtgagtgccgtttttgttgattcagtaacacgtgcgttccccttgattccataacctctctacacgttgttcgtattatatcctttgggacc

SEQ ID NO: 619643 - DNA, 532 bp, Homo sapiens
gaattcaaaccatctaggaattttacccatcatttctttattccctacctgtacaggtaaataggagttaaactacagaatcacttacctagttattggtagagaaaaaaaactgtctatctttctgttttttttttttttcaaaggaagctgtggtacaatatgaacaatatgagcaagaaatgaaacatctccagcaactgatagaaggagctcacagagagattgaggataaacctgttgccaccagtaacatacaggagctgcaggctcagatttctcggcatgaggtgagaggaatgtaggcraaataccgagggcaggaaactggcttgattagagtatatgtttggtttctagagaatggaagagaacagtttcccctgtcctgcacttaatgtgttcaactcttgagaggcctctttggctatctaagcattgtgagtgccgtttttgttgattcagtaacacgtgcgttccccttgattccataacctctctacacgttgttcgtattatatcctttgggacc

SEQ ID NO: 619644 - DNA, 532 bp, Homo sapiens
gaattcaaaccatctaggaattttacccatcatttctttattccctacctgtacaggtaaataggagttaaactacagaatcacttacctagttattggtagagaaaaaaaactgtctatctttctgttttttttttttttcaaaggaagctgtggtacaatatgaacaatatgagcaagaaatgaaacatctccagcaactgatagaaggagctcacagagagattgaggataaacctgttgccaccagtaacatacaggagctgcaggctcagatttctcggcatgaggtgagaggaatgtaggcgaaataccgagggcaggaaactggcttgattagagtatatgtttggtttctagagaatggaaragaacagtttcccctgtcctgcacttaatgtgttcaactcttgagaggcctctttggctatctaagcattgtgagtgccgtttttgttgattcagtaacacgtgcgttccccttgattccataacctctctacacgttgttcgtattatatcctttgggacc

SEQ ID NO: 619645 - DNA, 599 bp, Homo sapiens
ctgacacataaaattgaccatcgcaagaccccacatccatttccccgagggatagttatctgtctcatttgtcagctaggggacttgttctggagaaaattatgtccatattatggaacacagattctgattcaatataagaaagaactttctagcattcagggtggttgagaatgaaatgagcttctgggggaatgcattctctcttattggtaatgcacaaacagaagggaaacaaacccttgcataggagtstgtcaaggagaataaagcaacagctgcaggccttaaacagcataccggaccagaggtttcttccaagcacatgagtctatggttctgtgattttgtggaagtgctccataaatgtaggtggtgttataatttgaaatcacacaggaccaggcacttaatatattttctccaggcaatagcatcccagtcattctctcccactacagtgctcatgtgatgacactctcactcaacaatcatcaagtgctccccatcacctagtgatgacactccaactcattggcctgacatacaagcccttcttctaataaccccaaacctgtcttcacagcctgattctctac

SEQ ID NO: 619646 - DNA, 578 bp, Homo sapiens
tgcccgcctcggcctcccaaagtgctgggattacaggtgtgagccactgcgcccggcctaaagacgtatttttaagaggttactctctaattttaaaataaaaatatttatgatcaatttatgagacactccactaacattcttaaagctataatcctcatttttaaactttccagacaaagacaacttttaaccctccttcataactgctgagagatattagaggttttgctacttttccttcttccttctttcccctcccattcttcattgatacaatttgagttttgatcccactttatcttttcccatccttttyagttctggttatttgtagcttgtttttgagccacagctttagttaataaaatcatttctcaacagttaattctattttctcctgttctattattaccttatccttgacattcttcttgacattgatgactttttaaagtgagcagatggtcacataggcatccccaggtgtttttccatttccaatttcccgctttcctctttatttttgagagtgttcaccgcagagtgggttcctgtgaggtttatcacttaagggt

SEQ ID NO: 619647 - DNA, 578 bp, Homo sapiens
tgcccgcctcggcctcccaaagtgctgggattacaggtgtgagccactgcgcccggcctaaagacgtatttttaagaggttactctctaattttaaaataaaaatatttatgatcaatttatgagacactccactaacattcttaaagctataatcctcatttttaaactttccagacaaagacaacttttaaccctccttcataactgctgagagatattagaggttttgctacttttccttcttccttctttcccctcccattcttcattgatacaatttgagttttgatcccactttatcttttcccatccttttcagttctggttatttgtagcttgtttttgagccacagctttagttaataaaatcawttctcaacagttaattctattttctcctgttctattattaccttatccttgacattcttcttgacattgatgactttttaaagtgagcagatggtcacataggcatccccaggtgtttttccatttccaatttcccgctttcctctttatttttgagagtgttcaccgcagagtgggttcctgtgaggtttatcacttaagggt

SEQ ID NO: 619648 - DNA, 495 bp, Homo sapiens
ctttacatgtattcattcatttcatcttcacgacacaactatgagaaagttgctgttaatatccccatttcacagataagagtgtggaggtggggaggtcaaggaactyatctgagctctcttggccagctagggagcaggcgggggtggagctgggacctggaggtggtgggctggctgcggagctcgctttaaccacgatgcctgatgcctggctgccccttgtcactgcaggtcactgtgggcttagaatcccaaagtctgagagggaaatcttgccccattccctgttcagtacaagaatggccataattaaacttaacaaatagctgtttattttctgtttgtttaaaatcaagctttattagttaacaaggcaacctatggtttaaagtataattgaagaaaacttaatttacgaaaaaaaaaaaaaaaaaaaaaaaaaacaatgggctgggagcagtggctcacacctgtaatcccagcactttgaga

SEQ ID NO: 619649 - DNA, 571 bp, Homo sapiens
tcccagggggcttgtgaaacatcatcaaggacaaagactaggagacacagagatgcactgctcagctccccattccaggaaggatccacccacctgcagggagagtggtcagmacacagcctgcatgatcagctccttcggggtctacctctgctgcggagtccccattgacccaaacatgctttcctgtgaagctctcacctggtgactaagtgagtgggggtacaaaggcctggcctttctggtccaaaaggatgcaactctaatagccactacttgctccagagcaccccataagattggcaaaatttttttgaggctgcattacaattttatcactccttctgcccccatttcactggaacacccagtagaggattagattccataggaagaccaagtgaacacagtatttaccaaatccataaggattatgccccacgtcaccaagtccatctgcaggctggaggtgatggcagaagaggctgctacagaacttggcttgctgactgcaatggggatgattagatcctgaaacaatagaggaagtggggcaagactgcccaaagcc

SEQ ID NO: 619650 - DNA, 571 bp, Homo sapiens
tcccagggggcttgtgaaacatcatcaaggacaaagactaggagacacagagatgcactgctcagctccccattccaggaaggatccacccacctgcagggagagtggtcagcacacagcctgcatgatcagctccttcggggtctacctctgctgcrgagtccccattgacccaaacatgctttcctgtgaagctctcacctggtgactaagtgagtgggggtacaaaggcctggcctttctggtccaaaaggatgcaactctaatagccactacttgctccagagcaccccataagattggcaaaatttttttgaggctgcattacaattttatcactccttctgcccccatttcactggaacacccagtagaggattagattccataggaagaccaagtgaacacagtatttaccaaatccataaggattatgccccacgtcaccaagtccatctgcaggctggaggtgatggcagaagaggctgctacagaacttggcttgctgactgcaatggggatgattagatcctgaaacaatagaggaagtggggcaagactgcccaaagcc

SEQ ID NO: 619651 - DNA, 571 bp, Homo sapiens
tcccagggggcttgtgaaacatcatcaaggacaaagactaggagacacagagatgcactgctcagctccccattccaggaaggatccacccacctgcagggagagtggtcagcacacagcctgcatgatcagctccttcggggtctacctctgctgcggagtccccattgacccaaacatgctttcctgtgaagctctcacctggtgactaagtgagtgggggtacaaaggcctggcctttctggtccaaaaggatgcaactctaatagccactacttgctccagagcaccccataagattggcaaaatttttttgaggctgcattacaattttatcactccttctgcccccatttcactggaacacccagtagaggattagattccataggaagaccaagtgaacacagtatttaccaaatccataaggattatgccccaygtcaccaagtccatctgcaggctggaggtgatggcagaagaggctgctacagaacttggcttgctgactgcaatggggatgattagatcctgaaacaatagaggaagtggggcaagactgcccaaagcc

SEQ ID NO: 619652 - DNA, 476 bp, Homo sapiens
gacctcatgtgatccgccagtctcagcctcccgaagtgctgggattacaggtgtgagccaccgtgcccaacccgatgtttgttctctaaatcattacatttgatttaatttaatactatagtagtcagagcttattctacaaccttcatttcagttatatttagtaaatctaacaaaatccagtaattatttcctaatataagctaataatcatatcaacttaaattaattttttgaagtacattgaaattttatgataactttaacttttgatcatgaacatagaggaacctctctccgatatacttcagatgttcaccaaaaaatgaccagaatttaaccagcaaatactgtatctacatagcatcacctcatattcttaaagtactccactatttccagggaatgaatgaatcttaactgtatacatttactaaacatccaatgagtkgctgctatgtgcacagcactgtgct

SEQ ID NO: 619653 - DNA, 597 bp, Homo sapiens
ccttaggattgaggtagttccaaattaaattcactgtttaatctagcatgagctgaattgatattcttgccacattttctatttgagaattaagctattgatcaggaargtgagatcagctatcccaaactgtacttcaaagagtccttccaaggaaaggttgtctcctaagtgatgctgtagcaatcctaaggaaagatgtaatttttgaaaatatttgttttggtggatatcttataatcagaatatataatatattcagaatgtataatatatgtaatataaaatatatgctgtgtattctgattttttatttaagacatataaatgtattgtgtataaatgatcatgtttaatgttgagggctaggagatctttttaaaaaatcattgagaacaatttaaacctgtatcccaaaatgtgacatgttacaccaagggttggccaactgcagcctataggcccatgggtattatttctccataatcgtttgtcgatctctgtgttacaccatacttggtgatggggatgcaaaataatcaaggattctgctcccatacagcttacaatgaagggtttctccttagggaattgacc

SEQ ID NO: 619654 - DNA, 597 bp, Homo sapiens
ccttaggattgaggtagttccaaattaaattcactgtttaatctagcatgagctgaattgatattcttgccacattttctatttgagaattaagctattgatcaggaaagtgagatcagctatcccaaactgtacttcaaagagtccttccaaggaaaggttgtctcctaagtgatgctgtagcaatcctaaggaaagatgtaatttttgaaaatatttgttttggtggatatcttataatcagaatatataatatattcagaatgtataatatatgtaatataaaatatatgctgtrtattctgattttttatttaagacatataaatgtattgtgtataaatgatcatgtttaatgttgagggctaggagatctttttaaaaaatcattgagaacaatttaaacctgtatcccaaaatgtgacatgttacaccaagggttggccaactgcagcctataggcccatgggtattatttctccataatcgtttgtcgatctctgtgttacaccatacttggtgatggggatgcaaaataatcaaggattctgctcccatacagcttacaatgaagggtttctccttagggaattgacc

SEQ ID NO: 619655 - DNA, 597 bp, Homo sapiens
ccttaggattgaggtagttccaaattaaattcactgtttaatctagcatgagctgaattgatattcttgccacattttctatttgagaattaagctattgatcaggaaagtgagatcagctatcccaaactgtacttcaaagagtccttccaaggaaaggttgtctcctaagtgatgctgtagcaatcctaaggaaagatgtaatttttgaaaatatttgttttggtggatatcttataatcagaatatataatatattcagaatgtataatatatgtaatataaaatatatgctgtgtattctgattttttatttaagacatataaatgtattgtgtataaatgatcatgtttaatgttgagggctaggagatcttttwaaaaaatcattgagaacaatttaaacctgtatcccaaaatgtgacatgttacaccaagggttggccaactgcagcctataggcccatgggtattatttctccataatcgtttgtcgatctctgtgttacaccatacttggtgatggggatgcaaaataatcaaggattctgctcccatacagcttacaatgaagggtttctccttagggaattgacc

SEQ ID NO: 619656 - DNA, 439 bp, Homo sapiens
ttcaacattactctctcaatagctgaaagaacaactatacatgaaaaaacaaccaccaggcgcggtggctcactcctgtaatcccagcacttcaggaggctgaggagggcagatcacctgaggtcgggagttcaagaccagcctgaccaacatggagaaaccccatctctactaaaaatacaaaaattagccaggtatggtggcrcatgcctgtaatcccagctaattgggaggctgaggcaggagaatcgcttgaacccgggaggcagaggttgcggtgagccaagatcgcgccattgtactccagcctgggcaaaaagactgaaactctgtctccaaaaagaaaaaaaaggaaaagaaaaaacagtaaggatacacaaaatctgaacaacactatcaagttatggaagcttacagatttcttaaagcacatagttct

SEQ ID NO: 619657 - DNA, 439 bp, Homo sapiens
ttcaacattactctctcaatagctgaaagaacaactatacatgaaaaaacaaccaccaggcgcggtggctcactcctgtaatcccagcacttcaggaggctgaggagggcagatcacctgaggtcgggagttcaagaccagcctgaccaacatggagaaaccccatctctactaaaaatacaaaaattagccaggtatggtggcgcatgcctgtaatcccagctaattgggaggctraggcaggagaatcgcttgaacccgggaggcagaggttgcggtgagccaagatcgcgccattgtactccagcctgggcaaaaagactgaaactctgtctccaaaaagaaaaaaaaggaaaagaaaaaacagtaaggatacacaaaatctgaacaacactatcaagttatggaagcttacagatttcttaaagcacatagttct

SEQ ID NO: 619658 - DNA, 583 bp, Homo sapiens
ttaaataaaatgacatgtaatataagaggatgggtttggagaaaaaaaagtactctgggcatgctataaaatggggaaaaagtgtcacatacccaacaaaatacacacagaaaacrcacataccttagaggcagctctcaatcttcaaaccatttctacttgacaaatggcagagccttagattaaagacttccttttcgacttgaagataatggaagctgatcaggtttgtatcctgtttttgttttttttttttcctggaaatacataatcttaaagcataggaggaaggtatcaagatccttgctctaggcagctgctggctgaaacaagagcatgatatacttcaaagtatgtagagagacaaataaggctttggagaacaagacgtgcctgtttttaaaaaaatatatgcggtgataccgtattatcagcttacatctggataccaatgttattgctctagttacagagactcacttggaacagcaaagggcaggagggatgcaccatcctgtgcactcatgagcttaatgacggaggagcaggtagagtacacaaaacaagcttatggaccactaga

SEQ ID NO: 619659 - DNA, 573 bp, Homo sapiens
agtccaaaagcagtggcttaaatgggatagaagtttcgttgtctctctttaataacaggccagagatctgcaaacagtgcagtgtggaggggtagctgtagttccttttatcctgtggcttatcccttcctcagaatgctgtttaaatccccatgaagcaaactgatttaccatctcattttcattctaatcccygggaatgaaaaagaggaaaataagaacttaatcaaatttattttaaggatgtaatgcaacagggaagttttgcaggtcacttctacttgcatctcactggtgagaacttgggcacatgaccacctataactaaaaggaggctcttgctggtcatccatgggccctgtcaaaacttgacagaaggggtcctattaaaggaagataatggggaacaatcagcagactccaccaatgtggccaaggatgacaggagagttaaacatttaatttgttactttcaggtcatgcaacagatgtttctttgtcccaactgtgacgctctcttcttatctatcatggccacctagaaaatactatatactggcaggcacggctgcc

SEQ ID NO: 619660 - DNA, 602 bp, Homo sapiens
atacataagtgagcaaagacaaagtccctaccctcaagacacttacattctagttggggaagtaaatcatacacaaacaatatatgataagtacaggactatgtcatgtaaatacctggggtaagtgtattctaggcagcacttaagagtagatccaaattttttgaactcttgtatatatctttcctagcctaaactcasatatctagaattaactgctatgatgggttaactagaattaacaactattaccacatatctagaattaactactatgatgagtcaactagagcatccattcatttctctgttctcatcatcccatttaatcacttaagtatgcttaatattatataatatgctgtctaacattgtagatgtattagtttcatgtgacatacattcattacgtatttgatttttaatattttatttatatcctaggattgatattgcatatatatgtaatatatctgtatacctaggtacaaaaatgcaatttattgagtgcttactatatgccagtcgctgtgctaagcacatgcattatttcatttaatccttacaacaaccatgtgagtagacagtaggtagaaactgag

SEQ ID NO: 619661 - DNA, 602 bp, Homo sapiens
atacataagtgagcaaagacaaagtccctaccctcaagacacttacattctagttggggaagtaaatcatacacaaacaatatatgataagtacaggactatgtcatgtaaatacctggggtaagtgtattctaggcagcacttaagagtagatccaaattttttgaactcttgtatatatctttcctagcctaaactcagatatctagaattaactgctatgatgggttaactagaattaacaactattaccacatakctagaattaactactatgatgagtcaactagagcatccattcatttctctgttctcatcatcccatttaatcacttaagtatgcttaatattatataatatgctgtctaacattgtagatgtattagtttcatgtgacatacattcattacgtatttgatttttaatattttatttatatcctaggattgatattgcatatatatgtaatatatctgtatacctaggtacaaaaatgcaatttattgagtgcttactatatgccagtcgctgtgctaagcacatgcattatttcatttaatccttacaacaaccatgtgagtagacagtaggtagaaactgag

SEQ ID NO: 619662 - DNA, 497 bp, Homo sapiens
tttttaatcaaggtataattacatacagtaaaygcacagatactaagcatatagttcaacgagttttgacacttgtattcatctgagtaaccaatgctgtaatcaagatataggacacttatatcaacctagaatgtttcctcttgccctttctggtcaacctccctctcctccaaaaagtaactactattctagtatttaacctcttagattactttttgcctgattttaatggaatcaggatggaatcatggaagtggtttcctttgctgctgacttcttttgctaaacataatgcttttgagatgcattcacatttggtatcattattatttaaaaattttgaagtatttacaatgtgccatcaagtttgagaatcaaaattcattctaatctttttcaccttcagctgcatattatgataacctagtgactgttaaaaatatcagtacttagccaggcatggtggttcacccctgtgatcccagcactttggg

SEQ ID NO: 619663 - DNA, 559 bp, Homo sapiens
tgatactacaatgtaataaaataattaggaagtaacctcgtgtatttatcacctgtgtttttaatgtaatttaattgcaagactatgtaatttaattgtaacactatataatttacttttaataatgactgcatttctgagatcatgacactgcactccagcctgggtgacagagcaagaccctatctaaataaataaataaacaaataaaggctgtgtttaacaacttgcttacaaaattcttgaaattttttatttattattattattattattataattattttactttaagttctcagatacatgtgcagaatgtgcaggttygttaaataggtatacatgtgccatggtagtttgctgtacctattaacccatcatctaggttttaagccctgtatgcattaggtatttgtcctaatgctctccttccccttgccactatgccccaacgggcctatttttatttttttatcaatacatagttagaaacatttatggtatacatgtgatattttgatgcatgcattcagtgtgtaatgatcaagtcagagtaatt

SEQ ID NO: 619664 - DNA, 559 bp, Homo sapiens
tgatactacaatgtaataaaataattaggaagtaacctcgtgtatttatcacctgtgtttttaatgtaatttaattgcaagactatgtaatttaattgtaacactatataatttacttttaataatgactgcatttctgagatcatgacactgcactccagcctgggtgacagagcaagaccctatctaaataaataaataaacaaataaaggctgtgtttaacaacttgcttacaaaattcttgaaattttttatttattattattattattattataattattttactttaagttctcagatacatgtgcagaatgtgcaggtttgttaaataggtatacatgtgccatggtagtttgctgtacctattaacccatcatctaggttttaagccctgtatgcattaggtatttgtcctaatgctctccttccccttgccactatgccccaacgggcctatttttatttttttatcaatacatagttagamacatttatggtatacatgtgatattttgatgcatgcattcagtgtgtaatgatcaagtcagagtaatt

SEQ ID NO: 619665 - DNA, 610 bp, Homo sapiens
  misc_feature 295: n = A,T,C or G
tgagcaggtattcaagatatcagcttagcagtcttcaaacactatggacttttgatcactctagagctgataaattgcatcttatatgattgtgaaaagaaaagattgctaacagcttttaaatcaaacttgaaccctcgaagaagatgccaaattccaaataccatcacatcaaacccacacaagaagctgcaactcttttctttcttttctcctggcaccagctattttcctgaccaggcctaggtttctggagcaggaatatttattggtccttcccttggtggattcaggntttcaaggggtctgaaattacagaaattttggaggctctatataaggaaaataatgcacaagtatgtatctaaaactagctataaaaataaatacgttttagaataagtaaatcacaaaytttaaaaagctaaaaattgcaccaccttgcacaattcagaaaaaaaacacttgaaaaaatgccaatgaactacacacacctcttctctcctacattttttgccgtatatgctttcattacccataatataacaatgattttatattttttcaataaaaatagaaataattgagtttcttttagcataattagtca

SEQ ID NO: 619666 - DNA, 438 bp, Homo sapiens
aaatattaatgtacttgttattgttaattttttatatgtataatgttatgaacattcaaggtagcaatgtgttcgaagagaatatatatttttgagtggctcagagaataaaatgttttccatatttggaaagaggcttatgattatctatgtattatccagaaaacttgtggctgtaaagatacatctcaaatttggcttacaccaaaagccaaaacacttggaacacagtgtcacctacattgtaaattagtagatcagaaatcttaggctaatttctaatcttctcttccgtcttttcacctgtgaaaacagatttaaaaaactttaatatactactatcctgtgaagaaaatgtggccacaatcasagatatgggcctcacctatgagagagtaactacacaattccaaatttcctttccattcccttcccttc

SEQ ID NO: 619667 - DNA, 595 bp, Homo sapiens
gtggccacaatcagagatatgggcctcacctatgagagagtaactacacaattccaaatttcctttccattcccttcccttcccttcttatgaacctattgaactgccagttagtatgaaagttaaagtgtgagaaaccacaaaaatgtctcaaaccccttyataccaagctctagaaattacttggaaatgaagataaccacaaaacgaggacaacattttgaagtttctcaagcccacttgtccacagaaaggactgattgtgaaggtattcttaatgttgcctctcaagtttcctctttaaaggaaaagaaactaaatctagcttgtggctttagaaagcccaagagtttcttgctttgtaataaacgtcttcaagaagcatttctgcactctgggtttctgtagaaaaaggtggtgtctgtgactttaaatgtgaggcatatccagtgttagactaattcagtcattaattctgcccctttgaaaatgtaagaaaaggatctaaagtaacagcatagtatctgtcctcaagagaaagaacctggtctgtacaattgcctcatagaagcttctttttagtgcttttgaattc

SEQ ID NO: 619668 - DNA, 608 bp, Homo sapiens
tatatttatgactgagtcagttctgcctcaaattatttttttgtctgtgactatcacagtgakaagggaaaattcctgcatccatatccacttaacttaagaatctcaccatcacacttaatgtgttgtttctaattccctcacatagaagcatctggagctaaagaattgtcctaaggctcagttccactggaaaagtgtgtttctaccccagatgagacttaaacccagaatgtttagttcagcatcccagagtttaatccatttgggccttaggaccccaggaccctccaaaaccatgcattgagaaaacacagacagctatctaaagtcagggcaaatcaatggggcagtggcttggaacgagtttcctgttggagctctggcactagcacgtgctctcagtaacaaaatcacaggtcatccctaggcaacggattagctggtcagtgaactgaactttgtttcatcaccgagttttatctgaaatgtcaaggaagaaaaagtcacagagaaagaaggaggcagggcagggagagagagagaaaaatggtttctaagagctctcaatattaacttactaaggggtgcatcctatgtaaattatc

SEQ ID NO: 619669 - DNA, 604 bp, Homo sapiens
taaaatgcatttgtattctattaaagcctttggcttatcaactgcagagtgctcctttacaaggtcattagtaaccagcatcacacagtggccaacargcatcagctgcacaaaaacagacaggggcccaaacaccacaatcacttcctgtacctgttcttgtttgcttgctgagccctcgaaattgggagttgctgaaatacataaaagcgtaacagcttgagtcaatatttgccggcctaagcgagtgattttgtttagtgaggtgactgaaccccttgaataaatacatctccttgtatgtaggagaacaaccccaggcaggcccttcgaggagggctaagggcagaactagaactgcccttggggtggaacttggggtggggggcagcggcgctgagtcttccaaggatcttgctctggttctttccctgcaattctctgcatctagctgcactctcctgcttctagacgaaaggttcgcatcatcatcacctgggaggcttgatcaaaagctgatggctgggcacagagctctgattcaggaaggggggggtgggcctaagaatctgcatttttacaagttcctaggtaatgctgatgc

SEQ ID NO: 619670 - DNA, 604 bp, Homo sapiens
taaaatgcatttgtattctattaaagcctttggcttatcaactgcagagtgctcctttacaaggtcattagtaaccagcatcacacagtggccaacaggcatcagctgcacaaaaacagacaggggcccaaacaccacaatcacttcctgtacctgttcttgtttgcttgctgagccctcgaaattgggagttgctgaaatacataaaagcgtaacagcttgagtcaatatttgccggcctaagcgagtgattttgtttagtgaggtgactgaaccccttgaataaatacatctccttgtatgtaggagaacaaccccaggcaggcccttcgaggagggctaagggcagaactagaactgcccttggggtggaacttggggtggggggcagcggcgctgagtcttccaaggatcttgctctggttctttccctgcaattctctgcatctagctgcactctcctgcttctagackaaaggttcgcatcatcatcacctgggaggcttgatcaaaagctgatggctgggcacagagctctgattcaggaaggggggggtgggcctaagaatctgcatttttacaagttcctaggtaatgctgatgc

SEQ ID NO: 619671 - DNA, 575 bp, Homo sapiens
ctattaactgagagtggtggtatccctaggttagaaaatgctttgtcaagcacaatttttctcagatttccaggcttctctggccttccttcctgatatggatctctttccaggtaggtgttctctgatctccacacacggtcttctctgctttaagcctctycctagctcatcaatcacccatgtataaagccaagtgctagccttctacatttaccctttttcagcctttaattttctaaacccatctcatgtgtcagctcagcacaggagagagcaatgggaaacagagatttatatggcaccgtgtactttatatttaataactgatctgtcatggcatttatctgcataaaaaggtgggtaatccatgagtggcttggcagccgcagactccagtgacttatgcttcctgttccctatctcatgaagatggacagcttggtagataccagctctcacatgttcagaaatcttcaaatatatccctgaatctcttatttggaaaaatgtgaagtaacctcaccaggaaacagtgacttatagcaacacaatatatgatgacgtggtagaaa

SEQ ID NO: 619672 - DNA, 575 bp, Homo sapiens
ctattaactgagagtggtggtatccctaggttagaaaatgctttgtcaagcacaatttttctcagatttccaggcttctctggccttccttcctgatatggatctctttccaggtaggtgttctctgatctccacacacggtcttctctgctttaagcctctccctagctcatcaatcacccatgtataaagccaagtgctagccttctacatttaccctttttcagcctttaattttctaaacccatctcatgtgtcagctcagcacaggagagagcaatgggaawcagagatttatatggcaccgtgtactttatatttaataactgatctgtcatggcatttatctgcataaaaaggtgggtaatccatgagtggcttggcagccgcagactccagtgacttatgcttcctgttccctatctcatgaagatggacagcttggtagataccagctctcacatgttcagaaatcttcaaatatatccctgaatctcttatttggaaaaatgtgaagtaacctcaccaggaaacagtgacttatagcaacacaatatatgatgacgtggtagaaa

SEQ ID NO: 619673 - DNA, 617 bp, Homo sapiens
cttcctgttccctatctcatgaagatggacagcttggtagataccagctctcacatgttcagaaatcttcaaatatatccctgaatctcttatttggaaaaatgtraagtaacctcaccaggaaacagtgacttatagcaacacaatatatgatgacgtggtagaaaataatagaagctgtatagctagcaggcttttagtacagatccaatagcttgcaggaggttttccatacagcagcttttgaggcctggaccatcctgtgatatgtagattaattttattccctactgcaaaggctcagagttacaaagctactaagtggcaaagctagaacatgcccaacttcaaagccctggttctttccattatactttatttttctccaggtggtttacaaccatgaacttgggaggacaaagcaaggtaaaactgacattttggttaaataggtattgtgtcatttatatgccagttatcaactttgtaacataaaatgagagacttatagatgataaagtaaacaaaagctggcctgaccctcaaggcttcagattattattattattctatcaatagtctatgaatgtgtcatatattatctgtctgctaccatc

SEQ ID NO: 619674 - DNA, 617 bp, Homo sapiens
cttcctgttccctatctcatgaagatggacagcttggtagataccagctctcacatgttcagaaatcttcaaatatatccctgaatctcttatttggaaaaatgtgaagtaacctcaccaggaaacagtgacttatagcaacacaatatatgatgacgtggtagaaaataatagaagctgtatagctagcaggcttttagtacagatccaatagcttgcaggaggttttccatacagcagcttttgaggcctggaccatcctgtgatatgtagattaattttattccctactgcaaaggctcagagttacaaagctactaagtggcaaagctagaacatgcccaacttcaaagccctggttctttccattatactttrtttttctccaggtggtttacaaccatgaacttgggaggacaaagcaaggtaaaactgacattttggttaaataggtattgtgtcatttatatgccagttatcaactttgtaacataaaatgagagacttatagatgataaagtaaacaaaagctggcctgaccctcaaggcttcagattattattattattctatcaatagtctatgaatgtgtcatatattatctgtctgctaccatc

SEQ ID NO: 619675 - DNA, 461 bp, Homo sapiens
tacaaagaatcattagcaagtattatgaacaaatatatgccaacaaattggaaaacttagaagaaatggatacattcctggacacatacaacctatcaagattgaatcacaggcatggtggcttatgcctgtgccctagcactctgagaggctgaggtgggtggatcacttgaggtcaggagttcaaaaccagcctgggcaacatggtgaaacctcacctctacaaaaaatattagccaattgtggtggcatgtgcttgtagtcccagctacctgagagactgaggtgggaggattgattgagcctgggaggttaatgctgcagtgagctgtgatcatgccactgcactccagcctgggtgacagagtgagamcctatgtcaaaaaaaggaaaaaaagtttgaactatgaagaaatagaaaaccgcaacaaaccaatgatgagtaataagattgaagccat

SEQ ID NO: 619676 - DNA, 406 bp, Homo sapiens
tgcttccaaagaatattcagctatttctactgctattgggaaaaagagtcaacgcttcccagttatgaaacaagaataaaaatagattcataacttgccaactgattaagataaaagtagaggatcataacatgaagaaataccttgaaatggaggtagacacctaggaatatttattcaaaggtataactcaaacaagagataaactcacagggacagccttattgcctaattgtgttccatttagttccagagcttttttggacgatagactggatttttctgcatataaaagtgagaccaagaagatgggattctagaccccctgccccaatttaaccagagaagctytacttttctttttcatatattgagatctcatgaaatttatttgaacaaagaattc

SEQ ID NO: 619677 - DNA, 538 bp, Homo sapiens
atatacatacatgatcaagtgggatttatcctagggatgtaaggatggttcaatatacacaaatcaacaaacatgatacatcacatgaacacaataaaggacaaaaatatgatgatctcaatagattgatttaaaattcatgtgaagttgatttttttatatagtgagagataggagtccagttttgttcttctgcatatgraaattcaatttttccagcatcatttattgaagagttgtcctttccccagtgtatgcccttggcctcttttttgaaaactagacattgtaaatagaaaaaattgtttctggattctctagtcagttccattggtctacatgtctgtttttatatgattttcatgctgttttggttactatagccttgtaatatattttgaagtctgttaatgtgatacctccagctttctatttttttgctcaggattgctttggttatgtaggctaattttaggattgtgaagaatgtcattggtatttaaatagggattgctttgaatctgtagattgcataggt

SEQ ID NO: 619678 - DNA, 561 bp, Homo sapiens
tatacatacatgatcaagtgggatttatcctagggatgtaaggatggttcaatatacacaaatcaacaaacatgatacatcacatgaacacaataaaggacaaaaatatgatgatctcaatagattgatttaaaattcatgtgaagttgatttttttatatagtgagagataggagtccagttttgttcttctgcatatgaaaattcaatttttccagcatcatttattgaagagttgtcctttccccagtgtatgcccttgrcctcttttttgaaaactagacattgtaaatagaaaaaattgtttctggattctctagtcagttccattggtctacatgtctgtttttatatgattttcatgctgttttggttactatagccttgtaatatattttgaagtctgttaatgtgatacctccagctttctatttttttgctcaggattgctttggttatgtaggctaattttaggattgtgaagaatgtcattggtatttaaatagggattgctttgaatctgtagattgcataggtagtatggtcattttaacaatatta

SEQ ID NO: 619679 - DNA, 551 bp, Homo sapiens
gagcaagatcctatctcaaaaaaaaaaaaaaaaaaaaaaaatcacatgtgggaaatagctatagcacaataaaaataaatgtattaagtatgaacaacaaaaaagctagtaaaggttgaacaacaactatccttaggaaagtggaaataatgtrttaataaatatgaaagcaggctaggcacggtgactcacatctgtaatcccagcactttgggaggctgaggcaggcagatcacctgaggtcaggagttccagaccagcctggccaacatggtgaaatcttgtctctcctacaaatacaaaaattagccaggcttggttgcgcactcctgtaattccagctacttgggaggctgaggcaggaggatctcttgaacctgagaggcagaggttgcagtgagccaagatcatgccactgcactccaactggggcaacagagtgacactccatctcaaaataaataaataagaaagcagaaactaataaattagaaaacagaaacatagaactaatttataaatcaaagcactatgccttgaaaagagggaga

SEQ ID NO: 619680 - DNA, 571 bp, Homo sapiens
agcattttgagatgccaaggtggcaggatcacttgagaccaggagttcgcaaccagcctggacaacatagggagactccatctccacacacgccaaaaaaaaattttaaatagccaggtatagtggtacttcttgtaatcccatctacttgggaggctaaggtgggagaatcacccaacctcaggagttcagggcttcagcaagccatgatcatatcactgcactccagcctcagcaacagagcaagatcctatctcaaaaaaaaaaaaaaaaaaaaaaaatcacatgtgggaaatagctatagcacaataaaaataaatgtattaagtatgaacaacaaaaaagctagtaaaggttgaacaacaactatccttaggaaagtggaaataatgtattaataaatatgaaagcaggctagscacggtgactcacatctgtaatcccagcactttgggaggctgaggcaggcagatcacctgaggtcaggagttccagaccagcctggccaacatggtgaaatcttgtctctcctacaaatacaaaaattagccaggcttggttgcgcactcct

SEQ ID NO: 619681 - DNA, 551 bp, Homo sapiens
gagcaagatcctatctcaaaaaaaaaaaaaaaaaaaaaaaatcacatgtgggaaatagctatagcacaataaaaataaatgtattaagtatgaacaacaaaaaagctagtaaaggttgaacaacaactatccttaggaaagtggaaataatgtattaataaatatgaaagcaggctaggcacggtgactcacatctgtaatcccagcactttgggaggctgaggcaggcagatcacctgaggtcaggagttccagaccagcctggccaacatggtgaaatcttgtctctcctacaaatacaaaaaytagccaggcttggttgcgcactcctgtaattccagctacttgggaggctgaggcaggaggatctcttgaacctgagaggcagaggttgcagtgagccaagatcatgccactgcactccaactggggcaacagagtgacactccatctcaaaataaataaataagaaagcagaaactaataaattagaaaacagaaacatagaactaatttataaatcaaagcactatgccttgaaaagagggaga

SEQ ID NO: 619682 - DNA, 551 bp, Homo sapiens
gagcaagatcctatctcaaaaaaaaaaaaaaaaaaaaaaaatcacatgtgggaaatagctatagcacaataaaaataaatgtattaagtatgaacaacaaaaaagctagtaaaggttgaacaacaactatccttaggaaagtggaaataatgtattaataaatatgaaagcaggctaggcacggtgactcacatctgtaatcccagcactttgggaggctgaggcaggcagatcacctgaggtcaggagttccagaccagcctggccaacatggtgaaatcttgtctctcctacaaatacaaaaattagccaggcttggttgcgcactcctgtaattccagctacttgggaggctgaggcaggagratctcttgaacctgagaggcagaggttgcagtgagccaagatcatgccactgcactccaactggggcaacagagtgacactccatctcaaaataaataaataagaaagcagaaactaataaattagaaaacagaaacatagaactaatttataaatcaaagcactatgccttgaaaagagggaga

SEQ ID NO: 619683 - DNA, 630 bp, Homo sapiens
aatttattctaaacttcagtcactcataatatacccttttattcctccttcttctgtgatattgggagtgtatagttgtcattgtgacaaaccctttgctgtcagtatctatagtggatggggagaaaaggagggctttgccaatcatcgtctccagtgcatttcccactgtcagtgtcattgtctaatgctgtttgcatccacacagcctaagggaaccgttyaagtgagtgactccctcccttcacttcagcccatcacttaagcatttctctcccttgaaaaaagacaagtggtgcttctaagacttgagtaattctgaatataattgaggactagatgttcctgttttatatcctacagggctggcatctctaatgctgaaagtacaacaaagtgcagtggtagtcactgagcgttcagccatgctgggtcatcaaaataaaaggagatcgacttcccattcctatcaatggcatcatctctaccagatatattacctggaaaaacaatgcatttgcttaaacatccacagtgagccacacttgttgggtgttgtggggaaatgatgcagaagcatccttgtttattaaggatccaattttgatagggtgatgcatatttttcctc

SEQ ID NO: 619684 - DNA, 630 bp, Homo sapiens
aatttattctaaacttcagtcactcataatatacccttttattcctccttcttctgtgatattgggagtgtatagttgtcattgtgacaaaccctttgctgtcagtatctatagtggatggggagaaaaggagggctttgccaatcatcgtctccagtgcatttcccactgtcagtgtcattgtctaatgctgtttgcatccacacagcctaagggaaccgtttaagtgagtgactccctcccttcacttcagcccatcacttragcatttctctcccttgaaaaaagacaagtggtgcttctaagacttgagtaattctgaatataattgaggactagatgttcctgttttatatcctacagggctggcatctctaatgctgaaagtacaacaaagtgcagtggtagtcactgagcgttcagccatgctgggtcatcaaaataaaaggagatcgacttcccattcctatcaatggcatcatctctaccagatatattacctggaaaaacaatgcatttgcttaaacatccacagtgagccacacttgttgggtgttgtggggaaatgatgcagaagcatccttgtttattaaggatccaattttgatagggtgatgcatatttttcctc

SEQ ID NO: 619685 - DNA, 565 bp, Homo sapiens
cttcccattcctatcaatggcatcatctctaccagatatattacctggaaaaacaatgcatttgcttaaacatccacagtgagccacacttgttgggtgttgtggggaaatgatgcagaagcatccttgtttattaaggatccaatwttgatagggtgatgcatatttttcctcccaagtctgcacatggtcatgcattaaatattaatgagcatcttctctctatcaggctttgggggatatgttcacctcttgggaggtgaacatgataaataagatcctttctctcatgtagcattctccccaatctgtgtatttttatatcttctttggataggaactagctctgtcacctaggctagagtgcagtggtgcaaacatgactcactgcagccttgacctcatggactcaagtgatcctcaagtgatcctcttgcctccacaacatccagctaacttttaaaaaaatttttgaagagaaggttttgccatgttgcctcagcctcctgaagtggtgggattacaggtgtgagccactgcacctggccacgttttctttccattc

SEQ ID NO: 619686 - DNA, 532 bp, Homo sapiens
acttgagtaattctgaatataattgaggactagatgttcctgttttatatcctacagggctggcatctctaatgctgaaagtacaacaaagtgcagtggtagtcactgagcgttcagccatgctgggtcatcaaaataaaaggagatcgacttcccattcctatcaatggcatcatctctaccagatatattacctggaaaaacaatgcatttgcttaaacatccacagtgagccacacttgttgggtgttgtggggaaatgatgcagaagcatccttgtttattaaggatccaattttgatagggtgatgcatatttttcctcccaagtctgcacatggtcatgyattaaatattaatgagcatcttctctctatcaggctttgggggatatgttcacctcttgggaggtgaacatgataaataagatcctttctctcatgtagcattctccccaatctgtgtatttttatatcttctttggataggaactagctctgtcacctaggctagagtgcagtggtgcaaacatg

SEQ ID NO: 619687 - DNA, 532 bp, Homo sapiens
acttgagtaattctgaatataattgaggactagatgttcctgttttatatcctacagggctggcatctctaatgctgaaagtacaacaaagtgcagtggtagtcactgagcgttcagccatgctgggtcatcaaaataaaaggagatcgacttcccattcctatcaatggcatcatctctaccagatatattacctggaaaaacaatgcatttgcttaaacatccacagtgagccacacttgttgggtgttgtggggaaatgatgcagaagcatccttgtttattaaggatccaattttgatagggtgatgcatatttttcctcccaagtctgcacatggtcatgcattaaatattaatgagcatcttctctctatcaggctttgggggatatgttcacctcttgggaggtgaacatgataaataagatcctttctctcatgtagcattctccccaatctgtgtatttttatatcttctttggataggractagctctgtcacctaggctagagtgcagtggtgcaaacatg

SEQ ID NO: 619688 - DNA, 532 bp, Homo sapiens
acttgagtaattctgaatataattgaggactagatgttcctgttttatatcctacagggctggcatctctaatgctgaaagtacaacaaagtgcagtggtagtcactgagcgttcagccatgctgggtcatcaaaataaaaggagatcgacttcccattcctatcaatggcatcatctctaccagatatattacctggaaaaacaatgcatttgcttaaacatccacagtgagccacacttgttgggtgttgtggggaaatgatgcagaagcatccttgtttattaaggatccaattttgatagggtgatgcatatttttcctcccaagtctgcacatggtcatgcattaaatattaatgagcatcttctctctatcaggctttgggggatatgttcacctcttgggaggtgaacatgataaataagatcctttctctcatgtagcattctccccaatctgtgtatttttatatcttctttggataggaactagctctgtcacctaggctagagtgcartggtgcaaacatg

SEQ ID NO: 619689 - DNA, 565 bp, Homo sapiens
cttcccattcctatcaatggcatcatctctaccagatatattacctggaaaaacaatgcatttgcttaaacatccacagtgagccacacttgttgggtgttgtggggaaatgatgcagaagcatccttgtttattaaggatccaattttgatagggtgatgcatatttttcctcccaagtctgcacatggtcatgcattaaatattaatgagcatcttctctctatcaggctttgggggatatgttcacctcttgggaggtgaacatgataaataagatcctttctctcatgtagcattctccccaatctgtgtatttttatatcttctttggataggaactagctctgtcacctaggctagagtgcagtggtgcaaacatgactcactgcagccttgacctcatggactcaagtgatcctcaagtgatcctcttgcctccacaacatccagctaacttttaaaaaawtttttgaagagaaggttttgccatgttgcctcagcctcctgaagtggtgggattacaggtgtgagccactgcacctggccacgttttctttccattc

SEQ ID NO: 619690 - DNA, 586 bp, Homo sapiens
aggtaggtgtctgtgtgggctggggaggaggatgggagcagtgcttctagatgtttccactttctcctcattagataataatgaatgggtgatttccctagtcactgcagtgtgaggaaatctacaaaattaatttcacaatacrctttacaggataggtggagaaacacatgaagcacaactgcagtgggttataaaaaacggcctttcgagttgagcaataaattcgttcaagcagccattctgaaggacaaactggctctgtatttaagaggggcattccagcacttctctagccactgggttgacaatgactcaccaaagcctctggtagccaccacaggacgcccagagcatatgttttaaagctgaacaccaaactgcggacttcgggagtaagtgaactgactggtttttattttgttttactgcttttaacattacagtaactgttacaggttccagcaggctaactgggtggaaatgagtttggtttcacttagtctctctaaagagaaagcaagtcggtagactaatacctaataaaagcaaagttgccaacaattgaaattgcctgggctgctct

SEQ ID NO: 619691 - DNA, 350 bp, Homo sapiens
aatgacatcaagagacctatcaagacctgtatccaggaaaaggtaaatctgagctgaaattgtagcccttgtaarttacctacgtgacataccagatagtgttcatgatccatttagtattctgttctaaaaatgagacaatatccatttattcacttgttcatttatttagtgtttgttcagcccttactgcatattccaggcactattctgactgtggcaggagtgaacaaacaggcatggttcttacttgcatgtaattacagtcttatagtgaaaacaagtgttaaacaacaaaatctcccaattattttaaaattatgaacttgattcgatactatgtggccata

SEQ ID NO: 619692 - DNA, 621 bp, Homo sapiens
acctacgtgacataccagatagtgttcatgatccatttagtaytctgttctaaaaatgagacaatatccatttattcacttgttcatttatttagtgtttgttcagcccttactgcatattccaggcactattctgactgtggcaggagtgaacaaacaggcatggttcttacttgcatgtaattacagtcttatagtgaaaacaagtgttaaacaacaaaatctcccaattattttaaaattatgaacttgattcgatactatgtggccatataattgttcctaatttggttggagaagggaggcagttagggaagccttccctgagttagtgccatttaacctgatttatgatagatgataagtaatttgtcaggggaaaaatactccaggaataaagaacaggtacaaaggtcaggttctgggaagagcttgtcttggtccaggaactaaaaaatgttagagtggctggatctgggaaagagacaaagagttattaaatgaggcagcaggcttcagcaggtgccacattgctcagggccttgtaggccatgctaaggatttgggatgttaatgtcagtacaaacaattgagtcataagcagaaagtaaaagcatgatt

SEQ ID NO: 619693 - DNA, 596 bp, Homo sapiens
ccttgtaagttacctacgtgacataccagatagtgttcatgatccatttagtattctgttctaaaaatgagacaatatccatttattcacttgttcatttatttagtgtttgttcagcccttactgcatattccaggcactattctgactgtggcaggagtgaacaaacaggcatggttcttacttgcatgtaattacagtcttatagtgaaaacaagtgttaaacaacaaaatctcccaattattttaaaattatraacttgattcgatactatgtggccatataattgttcctaatttggttggagaagggaggcagttagggaagccttccctgagttagtgccatttaacctgatttatgatagatgataagtaatttgtcaggggaaaaatactccaggaataaagaacaggtacaaaggtcaggttctgggaagagcttgtcttggtccaggaactaaaaaatgttagagtggctggatctgggaaagagacaaagagttattaaatgaggcagcaggcttcagcaggtgccacattgctcagggccttgtaggccatgctaaggatttgggatgttaatgtcagtacaa

SEQ ID NO: 619694 - DNA, 621 bp, Homo sapiens
acctacgtgacataccagatagtgttcatgatccatttagtattctgttctaaaaatgagacaatatccatttattcacttgttcatttatttagtgtttgttcagcccttactgcatattccaggcactattctgactgtggcaggagtgaacaaacaggcatggttcttacttgcatgtaattacagtcttatagtgaaaacaagtgttaaacaacaaaatctcccaattattttaaaattatgaacttgattcgatactatgtggccatataattgttcctaatttggttggagaagggaggcagttagggaagccttccctgagttagtgccatttaacctgawttatgatagatgataagtaatttgtcaggggaaaaatactccaggaataaagaacaggtacaaaggtcaggttctgggaagagcttgtcttggtccaggaactaaaaaatgttagagtggctggatctgggaaagagacaaagagttattaaatgaggcagcaggcttcagcaggtgccacattgctcagggccttgtaggccatgctaaggatttgggatgttaatgtcagtacaaacaattgagtcataagcagaaagtaaaagcatgatt

SEQ ID NO: 619695 - DNA, 445 bp, Homo sapiens
ggttcttacttgcatgtaattacagtcttatagtgaaaacaagtgttaaacaacaaaatctcccaattattttaaaattatgaacttgattcgatactatgtggccatataattgttcctaatttggttggagaagggaggcagttagggaagccttccctgagttagtgccatttaacctgatttatgatagatgataagtaatttgtcaggggaaaaatactccaggaataaagaacaggtacaaaggtcaggttctgggaagagcttgtcttggtccaggarctaaaaaatgttagagtggctggatctgggaaagagacaaagagttattaaatgaggcagcaggcttcagcaggtgccacattgctcagggccttgtaggccatgctaaggatttgggatgttaatgtcagtacaaacaattgagtcataagcagaaagt

SEQ ID NO: 619696 - DNA, 621 bp, Homo sapiens
ttgtcttggtccaggaactaaaaaatgttagagtggctggatctgggaaagagacaaagagttattaaatgaggcagcaggcttcagcaggtgccacattgctcagggccttgtaggccatgctaaggatttgggatgttaatgtcagtacaaacaattgagtcataagcagaaagtaaaagcatgattccatcaaatgttattctctaaacagtaattttataaatacaggttaaatgtgtgtggtcccagctactcaggaggtcccagctactcagtattccttttcaacaaatattaggtgcctactattagccaggtacagcccttagctactttgaatgaagcatatattacaaactggcagaatttcttaaacaaagaatctaaagttgtttatacaccataatctcggtattttataaatttcttgaaattatttttatttacactgctttgcagaattttaactggctttgaaataaacaatgacaatagtcctccatgttactagtttcaaattttcccaatacctactaagacattacttaatccacagatttactgtcaatagtttgtmtcaaattgtgataacatatttgaaattaatatttcaaatta

SEQ ID NO: 619697 - DNA, 557 bp, Homo sapiens
tttgcatttatctgctcatctatgaagatgagcttcttttcatataattatgagtcattatttttgttttgccttcttttgtttatgcattttgcttgttctatgtcttatttttcctgttgatttttgggagttcatatatattctaaatgtatatttattcactcatatatatgttgyaaatattacagtttatgatttgtcaccttatgatatcatccaaatagagaagctttatattttgatgtagtcatatgttcatttttcctccttaatgtttgtttttcttggttctatgacctaccaaaagtaacaaaaattctcatttatttttaatctaaatgttttaagtattttcctggaattcaccttgaattgatttctattggagataggtatccaatctaatttgcctcatatggataaccacttgttctattactgctgtaacaaatttctacaaactaagtgacctaaaataacacaaacttgtcatcttacagtgtacacaagtcagaaatcaggcatgaattttagtgaactaaaatcaagttgtc

SEQ ID NO: 619698 - DNA, 568 bp, Homo sapiens
aagctttatattttgatgtagtcatatgttcatttttcctccttaatgtttgtttttcttggtyctatgacctaccaaaagtaacaaaaattctcatttatttttaatctaaatgttttaagtattttcctggaattcaccttgaattgatttctattggagataggtatccaatctaatttgcctcatatggataaccacttgttctattactgctgtaacaaatttctacaaactaagtgacctaaaataacacaaacttgtcatcttacagtgtacacaagtcagaaatcaggcatgaattttagtgaactaaaatcaagttgtcgacaggcatgtttctttatggcggctagggtagaatccatatcctggccttttctatcttctagagaacatcagcattccttttctcattgcctctcctctctctttttaaagctggcaatgtcacatttctctgaccattctttcattgtcacatctctctctggactcagctaagaaaggttctccatttttaagaactcatgtgattagactgggcccatctggataacccaggaag

SEQ ID NO: 619699 - DNA, 577 bp, Homo sapiens
acatactcacaactttattctataatgtaatattctataaagtagctgtatcagtttatactttaaccagtaatggacaagattttctgttacttcccatctttgttaattattacttttagactctaacttttatcaggctcatggatgtaaaaagcatctcagggtggttttaatttgcatttatctgctcatctatgaagatgagcttcttttcatataattatgagtcattatttttgttttgccttcttttgtttatgcattttgcttgttctatgtcttatttttcctgttgatttttgggagttcatatatattctaaatgtatatttattcactcatatatatgttgcaaatattacagtttatgatttgtcaccttatgatatcatccaaatagagaagctttatattttgatgtagtcatatgttcatttttcctccttaatgtttgtttttcttggttctatgacctacmaaaagtaacaaaaattctcatttatttttaatctaaatgttttaagtattttcctggaattcaccttgaattgatttctattggagataggtatcc

SEQ ID NO: 619700 - DNA, 609 bp, Homo sapiens
ttctattggagataggtatccaatctaatttgcctcatatggataaccacttgttctattactgctgtaacaaatttctacaaactaagtgacctaaaataacacaaacttgtcatcttacagtgtacacaagtcagaaatcaggcatgaattttagtgaactaaaatcaagttgtcgacaggcatgtttctttatggyggctagggtagaatccatatcctggccttttctatcttctagagaacatcagcattccttttctcattgcctctcctctctctttttaaagctggcaatgtcacatttctctgaccattctttcattgtcacatctctctctggactcagctaagaaaggttctccatttttaagaactcatgtgattagactgggcccatctggataacccaggaagatctctccatctcggtttgcatccttaatcacatctgataagcctttattgcattcagtgtaacatattcacaggttccagggttaggcatgggcatctttgagggccattattctccctaccacattatttgcctagcatctttcattacattgtccatctatttacttactgatttctaatgacatccaa

SEQ ID NO: 619701 - DNA, 609 bp, Homo sapiens
ttctattggagataggtatccaatctaatttgcctcatatggataaccacttgttctattactgctgtaacaaatttctacaaactaagtgacctaaaataacacaaacttgtcatcttacagtgtacacaagtcagaaatcaggcatgaattttagtgaactaaaatcaagttgtcgacaggcatgtttctttatggcggctagggtagaatccatatcctggccttttctatcttctagagaacatcagcattccttttctcattgcctctcctctctctttttaaagctggcaatgtcacatttctctgaccattctttcattgtcacatctctctctggactcagctaagaaaggttctccatttttaagaactcatgtgattagactgggcccatctggrtaacccaggaagatctctccatctcggtttgcatccttaatcacatctgataagcctttattgcattcagtgtaacatattcacaggttccagggttaggcatgggcatctttgagggccattattctccctaccacattatttgcctagcatctttcattacattgtccatctatttacttactgatttctaatgacatccaa

SEQ ID NO: 619702 - DNA, 590 bp, Homo sapiens
tgtaacatattcacaggttccagggttaggcatgggcatctttgagggccattattctccctaccacattatttgcctagcatctttcattacattgtccatctatttacttactgatttctaatgacatccaaatcagttacaacattttatgtaagcattgtttttatttttatgttattccactagtctatttttctactcatgaattatggtacatgagtttatttttgcaactttaagctcaataacatgttttaagatttcctcaactttctttttscacttcttcagaagttgactcttttggccctttggtcttctatacacattttagaaatgctttgttgaggactaagaggaatgctaagattttgataggaatttcattgaattttgagtatattggcatgctacaatggttagtgttttatacatgaaaataatatatcccttcctcttttcctagtatcatgagatgtttgttaggcagacatgaatattgagttgtatcaaatgtgtttttctgcattattgtggtggtgatgtgatttagctcctttaattagttaatgtaatgaattacattt

SEQ ID NO: 619703 - DNA, 590 bp, Homo sapiens
tgtaacatattcacaggttccagggttaggcatgggcatctttgagggccattattctccctaccacattatttgcctagcatctttcattacattgtccatctatttacttactgatttctaatgacatccaaatcagttacaacattttatgtaagcattgtttttatttttatgttattccactagtctatttttctactcatgaattatggtacatgagtttatttttgcaactttaagctcaataacatgttttaagatttcctcaactttctttttccrcttcttcagaagttgactcttttggccctttggtcttctatacacattttagaaatgctttgttgaggactaagaggaatgctaagattttgataggaatttcattgaattttgagtatattggcatgctacaatggttagtgttttatacatgaaaataatatatcccttcctcttttcctagtatcatgagatgtttgttaggcagacatgaatattgagttgtatcaaatgtgtttttctgcattattgtggtggtgatgtgatttagctcctttaattagttaatgtaatgaattacattt

SEQ ID NO: 619704 - DNA, 602 bp, Homo sapiens
atttttctactcatgaattatggtacatgagtttatttttgcaactttaagctcaataacatgttttaagatttcctcaactttctttttccacttcttcagaagttgactcttttggccctttggtcttctatacacattttagaaatgctttgttgaggactaagaggaatgctaagattttgataggaatttcattgaattttgagtatattggcatgctacaatggttagtgytttatacatgaaaataatatatcccttcctcttttcctagtatcatgagatgtttgttaggcagacatgaatattgagttgtatcaaatgtgtttttctgcattattgtggtggtgatgtgatttagctcctttaattagttaatgtaatgaattacatttgtagattgctctaactattgaaacaagcttgaatttctggaataagcccaatgtgatatttattcaacaaatattcattgagtatacctagtatgtaacatgctttaagaatacaccagtgaaccaaacagaaatatctgacattacagaacttaacattccagtatttggagacagacgataaaaaagtgaacatgtatattt

SEQ ID NO: 619705 - DNA, 590 bp, Homo sapiens
tgtaacatattcacaggttccagggttaggcatgggcatctttgagggccattattctccctaccacattatttgcctagcatctttcattacattgtccatctatttacttactgatttctaatgacatccaaatcagttacaacattttatgtaagcattgtttttatttttatgttattccactagtctatttttctactcatgaattatggtacatgagtttatttttgcaactttaagctcaataacatgttttaagatttcctcaactttctttttccacttcttcagaagttgactcttttggccctttggtcttctatacacattttagaaatgctttgttgaggactaagaggaatgctaagattttgataggaatttcattgaattttgagtatattggcatgctacaatggttagtgttttatacatgaaaataatatatcccttcctcttttcctagtatcatgagatgtttgttaggcagacatgaatattgagttgtatcaaatgtgkttttctgcattattgtggtggtgatgtgatttagctcctttaattagttaatgtaatgaattacattt

SEQ ID NO: 619706 - DNA, 606 bp, Homo sapiens
tacaacattttatgtaagcattgtttttatttttatgttattccactagtctatttttctactcatgaattatggtacatgagtttatttttgcaactttaagctcaataacatgttttaagatttcctcaactttctttttccacttcttcagaagttgactcttttggccctttggtcttctatacacattttagaaatgctttgttgaggactaagaggaatgctaagattttgataggaatttcattgaattttgagtatattggcatgctacaatggttagtgttttatacatgaaaataatatatcccttcctcttttcctagtatcatgagatgtttgttaggcagacatgaatattgagttgtatcaaatgtgtttttctgcattattgtggtrgtgatgtgatttagctcctttaattagttaatgtaatgaattacatttgtagattgctctaactattgaaacaagcttgaatttctggaataagcccaatgtgatatttattcaacaaatattcattgagtatacctagtatgtaacatgctttaagaatacaccagtgaaccaaacagaaatatctgacattacagaacttaa

SEQ ID NO: 619707 - DNA, 503 bp, Homo sapiens
aacatgaccaaacccaatgggatacagcataaagcaatatttaaagtgatgcttatagcaataaatgcctacatcgtaaaagtataaacattttacataatcttacagttcttctcaagaaactacaaaacaagaaaaaaacaaagccaaagttaaaagaaggaaagaaataataaagaccagagcagaactaaatgcaatagagactaagaagcaacacaaattatcaacaaatgaaaatttggggtttttaaaaaaattacataaagtcgataaactgctagctatactaaccaaaaataaagactcaaacaatatcagaaatgaaaaatgagacattataactgatgccacagaaatacaaaagattatcagggactattatgaacaactacacactaataaactgaaaaaactacaggaaattgataaattcctggatatatacaacctaccaagattaamgcaagaagaaacagaaaacctgaaccgaattatgagta

SEQ ID NO: 619708 - DNA, 637 bp, Homo sapiens
aggaaaacaatgaaaacagatagatagatttaaaaacaataaagatataaaaggaagaagtaaaccatttatatttgcaaacgtcatgattagttacatagcaaatcctgaggaatctacaacaaaactatggaactaatatatttatttaatgaggttgcatgatacaaggttaatatataccaccagcaaacaaaatgaagaaaaacaatgccatttaaaatactgtccttacacataaaatgtctttgaataaatttaatagatatgcaaaacttctgcattaaaacatacaaaacattgctgcactaaattaaagaccatctatgtaaatatctaaagaatgagttttacaagattcacggrttggaagactcagtattggtaaaacatcaactttacacaaactgatccatatattcaatacaaattcaatgtaaatccaaatgctagaagagtttttatagacattgacaagctaaatctatgctttatgtggaaatgcgagatctaaaataaccaaagctatcttgaaaaataaaccaaagttggaagattacctcatgacatcatgaggtaatataaagctacactaattaagacagtgcagtagtggcataagtattggcacaaaagt

SEQ ID NO: 619709 - DNA, 604 bp, Homo sapiens
tttttccatttatttttgttctctgtggtggtaatctgtatattttatttacagctctcttcccatttatgaatcctcttttttcaccatgtcctatctgtaaactgatttatttattcattttgtatattttttatttttaattttttgtgtacatagtaggtgtatgtatttatggggtacaagagatattttgatgcaggcaygcagtcagtaataatcacatcatggaaaatggggtatctgttcacttgaccatttatcttttatgttacaaaccatccatttatgcccttttagttatttttaaatgtaaagttaaatgagtttgactttagtcacagttgtgatatcaaatactacatattattcattctttcaaactattttttgtgctcattaactgtccccactccctctcaacccccattacccataccagcctctggtaatcatccttctactctttatctccatgtgttcaattgttttgatttttatatcccacaaataagtaagaacatataatacttgtctttctgtgctgtctctctgtgtgttcacttaacataatacctccagttccatccatgttgttgtaagt

SEQ ID NO: 619710 - DNA, 602 bp, Homo sapiens
tattttaaaatgcattttacttttttaaatatttgagaaaatgtaaaatacatacacttcaggattctacataagatcttgattttagtgtttgtctgttatatacttttgtgtgggctttctattattgatgctggcaaagcttgtccaaatgtggctttctactagtaaatgaaggcaacataaagtgttatgcatgactcacttggctgacacactttcttatttgtttgaataaaaagaaaaacccttcagcgagattaaaatgttgattagagtgaaatctaaggatttctgaattccaaatttatgtgatcctttcttctaatcctttctttaactgcctccaagctttgaacaccataaaatgtactttaaaaagcraacaataccaaataattattttattttaatattgatgaataatgatatttctaatatcatataaatcagaaaaattagtttttttaattcaacaactcattctgttaagcttgctatttttttcttcacctataaagcatgaataatatcctcccttggttacctctttggattagtggaatgatgaaataatccatatataattttaaaacccataa

SEQ ID NO: 619711 - DNA, 586 bp, Homo sapiens
ctggcatcatactgaatggaaagaaactgaaagcctttcttctaagatctggaacatgacaaagatgcccacttttaactgttattcaacatagtactggaatttctatttagaggaatcagacaagagaaagaaataaagacatccaaactgaaaaggaagaagtcaaattacccttgtttggaaatgatatgatcttatatttggaaaaacctaaagacttmataagaaaatattggagctgataaacatattcagtaaatttgcaggatacaaaatcaacatatacaaatcagtagcatttctgtatgccaacagtgatctgaaaaagaaataaaaaacataatcctatttacaatagccataattaaaattaaatacctagaagtcatttaaaacaaagggtgaaagatctctgtaatgaaaactataaaacagtgatgaaagaaattgaagaggacaccaaaaaattaacagagattccatgttcatggattagcagtctaccaaagcagtctaaagatttaattcaatccctatcaaaataccaatggcattcttcacagaaatagaaaaaaaatcctaa

SEQ ID NO: 619712 - DNA, 528 bp, Homo sapiens
aaaagattttttaattaagaaatttaatatcaaaagtaaacaagatatttctaaataatatataaggaaataagtgaagcagaagagaaactagaaaatatttttaattaaataatattaaaaatgtagtctcaaactttctaaggtacaacaaagcagtgctttgtaataaatgtagatagatttaaacactcaaatgcaaagcaaaccctaaatacatagaaaaaataaaataagaataaagaaaattaagaaatgtggttccatgaaagaacaataaaattgataagctcatagctggatagatcacaaattaccagttttattaatgaaaggaaggaacattataaaaaatagcacaggcattaaaatgattattaaaaaatttgaaaaataatttcctactttgaatttaacaacttatatgaaaaaaattcttaaaaacacaacatgcaaaactgacacaatattagtgagaaaatgaaagtatccctrtgtctcttaaggaaattgaatgtgttacaaagt

SEQ ID NO: 619713 - DNA, 423 bp, Homo sapiens
aacttaatactctgattagtgagataactcaaataaaagaagcataataattgaatatgagaaggtaatagcaatgcccttttgatttataggtggattttttaaggcataagtgtttagagtctctgaggtagttaattaacaaaaatcattgataacaatgatttgtaaacattgtttggaaaacaatgtctttaaaaaccaatacttaagattagagtgtattaggccatggaattataggtttttaatcataaaataagctcttagttaagggtgatctaaaattgtgaagatgaagaggaataatcaaccataactattaaaaaaaaactttccacctcaatgactttaggcccaagtttctaygaatatttatccaactgtaccccattctacttctgctgcctctcattatgaatt

SEQ ID NO: 619714 - DNA, 565 bp, Homo sapiens
tttgttaagaaaagcaaaagctggttaatgatttgtagttttgaacacaaaaagaaagttggcaaatctatatataagcttcttaccctttacattccagacatttttttgctcaaatggtatatttattgatatagtatcatgctgttctatatcttyttgtttataaataagttatctttacaaaattatccaattttgatgctagtgagataaaatttacccatacatttattatcatagcagacaatatcctatggattgttatccatatatacatgcaactggatatacattgttcagataacactgtattataattttccatgttgctgcatagttttcatagccatcacttaaaatagattattaaaaataaaagttgtttaaagaaaatattggcaatggagacaattggcaatttttttaaaaaaaagaaatgttgcccaggctggtctgaaactcctggcctcaagtgatcttccctcgttggccttttgagtagccaggactactggtaatttttaagaattgttagttatctgaacatatctgtacattttgc

SEQ ID NO: 619715 - DNA, 565 bp, Homo sapiens
tttgttaagaaaagcaaaagctggttaatgatttgtagttttgaacacaaaaagaaagttggcaaatctatatataagcttcttaccctttacattccagacatttttttgctcaaatggtatatttattgatatagtatcatgctgttctatatcttcttrtttataaataagttatctttacaaaattatccaattttgatgctagtgagataaaatttacccatacatttattatcatagcagacaatatcctatggattgttatccatatatacatgcaactggatatacattgttcagataacactgtattataattttccatgttgctgcatagttttcatagccatcacttaaaatagattattaaaaataaaagttgtttaaagaaaatattggcaatggagacaattggcaatttttttaaaaaaaagaaatgttgcccaggctggtctgaaactcctggcctcaagtgatcttccctcgttggccttttgagtagccaggactactggtaatttttaagaattgttagttatctgaacatatctgtacattttgc

SEQ ID NO: 619716 - DNA, 545 bp, Homo sapiens
agctctgcctcctttctttgtttctacctgacttcaagtggtccagccctgccattatcccaagtgtttctggagaggtgagactggaatcagcttcctaggaagcattttggcatactagggaagctggatgtccacctctggttctctttttctactatggaaaccataaacccaggggaattctctttgtgtagtgctgtgccaactttgggkaggagaaggggtagtgcaggctaagtccatttctcctccttttctaatgtttttattcaattttgtggcccttgcaggagtctcagtctcattcccaaatattggggttttcacaaaagtgttcttctctgtcaatagctgctgcttgtactttctgtggaggagggtagtgaagcctgagacctactattctgccatcttgctgatgtcactgtgtttcagcttcttaacttgactcctgagctctttcagggatattttcattcatggatagttgtctaattgtgcatggttgtttatgtgtgtgtgtgtgtgtgcgcgtaggggga

SEQ ID NO: 619717 - DNA, 536 bp, Homo sapiens
tgatctgcctgcctcggcctccaaaattgctgagattacaagtgtgaaccactgcacccagcctctctctgctttaatcatacaaggtgagcaacactatagtcagccacctatctcagtcctaggcataccataatctagtagccattgggtcacaacccctgatgaccacctggtccctgcctctccagagtcccccatcccccagtgtcaatggggatggtgcgactctggacacttgtatgagttcatggaaagaaatcctcctctcttctggcaagagagagagggctgcttctgccatcccagagggttaagggtaccctgagaagtyaggattccagggttttctgtttaaatcatgggctaactgtgtcttaaccaaggtatacaataatcatcataaataattgcactactcgggacccataggctagacatatgaggctactatgagtgtttcaaagtcatggatccagttgtttgaagagctataagtgcctcaaatgagaattggagggaaatgtttttaactt

SEQ ID NO: 619718 - DNA, 536 bp, Homo sapiens
tgatctgcctgcctcggcctccaaaattgctgagattacaagtgtgaaccactgcacccagcctctctctgctttaatcatacaaggtgagcaacactatagtcagccacctatctcagtcctaggcataccataatctagtagccattgggtcacaacccctgatgaccacctggtccctgcctctccagagtcccccatcccccagtgtcaatggggatggtgcgactctggacacttgtatgagttcatggaaagaaatcctcctctcttctggcaagagagagagggctgcttctgccatcccagagggttaagggtaccctgagaagtcaggattccagggttttctgtttaaatcatgggctaaytgtgtcttaaccaaggtatacaataatcatcataaataattgcactactcgggacccataggctagacatatgaggctactatgagtgtttcaaagtcatggatccagttgtttgaagagctataagtgcctcaaatgagaattggagggaaatgtttttaactt

SEQ ID NO: 619719 - DNA, 533 bp, Homo sapiens
agctctgcctcctttctttgtttctacctgacttcaagtggtccagccctgccattatcccaagtgtttctggagaggtgagactggaatcagcttcctaggaagcattttggcatactagggaagctggatgtccacctctggttctctttttctactatggaaaccataaacccaggggaattctctttgtgtagtgctgtgccaactttgggtaggagaaggggtagtgcaggctaagtccatttctcctccttttctaatgtttttattcaattttgtggcccttgcaggagtctcagtctcattcccaaatattggggttttcacaaaagtgttcttctctgtcaatagctgctrcttgtactttctgtggaggagggtagtgaagcctgagacctactattctgccatcttgctgatgtcactgtgtttcagcttcttaacttgactcctgagctctttcagggatattttcattcatggatagttgtctaattgtgcatggttgtttatgtgtgtgtgtgtgtgtg

SEQ ID NO: 619720 - DNA, 533 bp, Homo sapiens
agctctgcctcctttctttgtttctacctgacttcaagtggtccagccctgccattatcccaagtgtttctggagaggtgagactggaatcagcttcctaggaagcattttggcatactagggaagctggatgtccacctctggttctctttttctactatggaaaccataaacccaggggaattctctttgtgtagtgctgtgccaactttgggtaggagaaggggtagtgcaggctaagtccatttctcctccttttctaatgtttttattcaattttgtggcccttgcaggagtctcagtctcattcccaaatattggggttttcacaaaagtgttcttctctgtcaatagctgctgcttgtactttctgtggaggagggtagtgaagcctgagacctactattctgccatcttgctgatgtcactgtgtttcagcttcttaacttgactcctgagctctttcagggatattttcattcatggatagytgtctaattgtgcatggttgtttatgtgtgtgtgtgtgtgtg

SEQ ID NO: 619721 - DNA, 505 bp, Homo sapiens
tttgtaataataaaatcttagcaagttggaaatagaaggaaactccttaatctgctagagcastcacaaataatctttacactcatggtgaaatactaaaagcttcttttcctttctgaaatcatatcagaaacaagatgaatatatctactattaccattttctgtctgacatttttactgaagagcctggctagccattgcaattaaaacaaaaacaaattgcttataaaaggagaaataaaaatataacccttattattcatagaaagtccaaaataacacatagataaattattaaaatgaataattgaatatactgagattgtcaagtacaagatcaatacacaaaattaattatacattgtacatatcactaataactaattagaaaacaaaaaatattcagttttcaaaaacaccaactatcttgaaatatagctaagaaaaatttgtgatctctcttctcagaaaagtaaaaatgttaagagaaattaaagaaggtc

SEQ ID NO: 619722 - DNA, 546 bp, Homo sapiens
cccccccccccactcaaacacacgtacaatctccaaactttaggactactacacscataataggcatttaggacttttacaaaagtagttttcaatttcagttggctttctccacttttgaagatcatctagatattaaataagcagccactagctttctatgacaatagcatgatacttactaaataggcttaaaagccacaaaacccaaccaaatcaaaccacaacaatactagcaacaatagtaaaaacaccaaacaccaaccctgaaagttctaagaacggaatgtgtaatggcatgtctgagaacacctggagagatctcttcttcaagggttggactacaagcaaacgtccctgaagcccatggcccaaggttgtgggtaacaatttgaagagccttggaggtgtgcatgtttcctactccttgcaaggaagagatttgcaatagaatggggtagacactttctgttcattttatagtctgtcctgtacagtcctgggtgcttcctctgtgtgatgctctagaactatgatttgacctgt

SEQ ID NO: 619723 - DNA, 586 bp, Homo sapiens
tctgcacaactactcaagtctggcatcatagcaaaatcaggcatagacaaaatgtaaataaatggatgcagctgtgttccagtaaaaatttatttacaaaacaggtgtggggctgaatttggccatggaccatagtttgtttactttcctcttagaaccttggagaccttgtgggtaaaatggggagatggataatagtttctgcctaatgtgttggaatccagttagaaaataaagacaaacattttattttaaaacatactatatgtggaagtgattatatgtgggagttgatagaactccaatgtcttgggagattacgtggccttcaaaaccttaggcatccaatttgcatccaattttctggtcgaaagtaaaaatcttcacatggattttctggctatccaatagtttcaatgggaaggggtttgtgtgagtcagctgtcattgagtatgagagttgcaggttaaatttcctcagaaacgcatgaraagtaggagtggtgagaactgggaagtaggaaggaggaaagctgtttggccataggtacctggactatgctaacctgcctcttctggaataaat

SEQ ID NO: 619724 - DNA, 492 bp, Homo sapiens
attgtttctttttaaatttattgcaaatgtttattaactagatatcttatcagcattgttttctcttgggyttttgttttcttatctcatgtataaaacagagatacattgcaaaggtttttttgtggaaattaaatatgtaatgtttgtaaagttcttggcatggtgtctgagacatagcaagcacttgatgaatgctttctattctattattaatatcattattatcattacactgtctaaaaactgtgggagacataaagagctaccaataaataatttatatttagttggtaaggtagggcttatgcttatgaagtttcccatatgatttggtgacaccatatgagccatatgtgggctacatttctagttctatgtaaactgctaatattggactgggaaagtcagactttagcctagtgggtagaccagagaatggagattttgagaataggggcagaggttgagtacacagaaagtattcaggtt

SEQ ID NO: 619725 - DNA, 502 bp, Homo sapiens
catctgtggttctagaatctgcttgtaagcatcaggttgcatggaagaaatggagactaagaggttaactcattcaagctttctcaatcagaaaatggcagagcaaggacttgaattcttcctctcactcaaattcatattcccagacagaccatctcayaggatggagtggtgtgaatggaaagaaaagaggggttgtgaacatcagatcaaagagcttatgttagcgttttgtccatggaactatgagatataaatctaacagttttgtgattctacttctgagctttgctttgacaggactcaaatataccaataaagataaaaaaatccatcttgtttttttttttggattcaaaatacatgtaatttgaggtgatgtcagaagaaatagtaaattagaattaaggatcatcttttaaaagttttttaaaggagaaagagattttgctcctctctgcccattctattgtgtctgttgtttttgactttaaagagaaag

SEQ ID NO: 619726 - DNA, 544 bp, Homo sapiens
aatattattgttgtgccttttccttgaaaagttggtctgcaaatttttgtgttttaattgaaacaaatagtctttttacatttattgtaattactgctatatttgaatttatatctagcattttattttgtgctattaatctgagctttatctgtttattttcttcttttttgagtttattgttcattttatctttttctttactacactccatttctaatctcttagtgattacttctgcaattagtacatgcatacctaatttatcaaaatctacaatcaatcagtatcttgttttcaaacaaaatattaactccatttgctctactcttacattatatgctgtagttattgkgtatcttatttttgtttattcttaatctcacaatgactttatcatttttatttaatgtggtttatatctgtttaattttacctatatattcatctttttttgttctttattcttcctgtatctctaacctgccatctggaatcatgttccttctgcttgaaatcctttagaatttctttcttctggtga

SEQ ID NO: 619727 - DNA, 519 bp, Homo sapiens
catgtcttttactacctttgtattccttacaacttattatagagcagaatttgacctggagaagtatgaaagtggtcctgcggcctcaggtaagtggggaggactgttgcatagataatcagcagtggagaagaggtgatcatttatgcagaacacatgtagacttcaacacctttgagcaagatcaagaaaggtatgctaatgctgtctttgacgttttrcagtgactttgggataggaataaggctagcaaagacagaaggttgaagttttacaatttcaggtctctagagaggtcactttctttgaccccattagcatttgcttcaaattcttttttggaggtagaggtggtaaaagagcaaatattttgagaaagaaaattaagagactgtcacaagaaggcatttctaaatgtgattatatacatgtttcaaggaatagagttttgtggtcaatataccagatcaagccaagttaactcattgttggtgccattattatactaatgtatattgt

SEQ ID NO: 619728 - DNA, 519 bp, Homo sapiens
catgtcttttactacctttgtattccttacaacttattatagagcagaatttgacctggagaagtatgaaagtggtcctgcggcctcaggtaagtggggaggactgttgcatagataatcagcagtggagaagaggtgatcatttatgcagaacacatgtagacttcaacacctttgagcaagatcaagaaaggtatgctaatgctgtctttgacgttttgcagtgactttgggatrggaataaggctagcaaagacagaaggttgaagttttacaatttcaggtctctagagaggtcactttctttgaccccattagcatttgcttcaaattcttttttggaggtagaggtggtaaaagagcaaatattttgagaaagaaaattaagagactgtcacaagaaggcatttctaaatgtgattatatacatgtttcaaggaatagagttttgtggtcaatataccagatcaagccaagttaactcattgttggtgccattattatactaatgtatattgt

SEQ ID NO: 619729 - DNA, 519 bp, Homo sapiens
catgtcttttactacctttgtattccttacaacttattatagagcagaatttgacctggagaagtatgaaagtggtcctgcggcctcaggtaagtggggaggactgttgcatagataatcagcagtggagaagaggtgatcatttatgcagaacacatgtagacttcaacacctttgagcaagatcaagaaaggtatgctaatgctgtctttgacgttttgcagtgactttgggataggaataaggctagcaaagacagaaggttgaagttttacaatttcaggtctctagagaggtcactttctttgaccccattagcatttgcttcaaattcttttttggargtagaggtggtaaaagagcaaatattttgagaaagaaaattaagagactgtcacaagaaggcatttctaaatgtgattatatacatgtttcaaggaatagagttttgtggtcaatataccagatcaagccaagttaactcattgttggtgccattattatactaatgtatattgt

SEQ ID NO: 619730 - DNA, 623 bp, Homo sapiens
ttacatgaagtaagagtaagaattatttgtaaaacattttttcagcatgtgtagtgcgtgcatgctgaaaaaagtttcttattgtgaaccatagtcaaagaagtttgaaagttaatccttccacggaggacttattagaaagacagattttttttttcttctggttgtatatacagaaggtatacagactgactcaaactttacttaggggagaatctatcctgattgttcctacagctttacagatggctggaaatgcaaagaactgcaattcttcattctttgcacatttgctgagaaattaagtaagaaacaatggatttcttccctagtcctctcattccctrtccatgccctctgaactttctacaagatgggttcctctgcatgtaaaagcctcatctttaaaatgggatgacttagggacagagcttctctacaattctctctttttaaaaactctggtggagaagaacgttacagtccttttactcactctatgctaggggacatgaatgacacctgattagtaaatactggaagaataaccagtcatgcttatttcagctttatccattctcctttcatttagaaatgtgcctttctgcagaggacatgagttc

SEQ ID NO: 619731 - DNA, 623 bp, Homo sapiens
ttacatgaagtaagagtaagaattatttgtaaaacattttttcagcatgtgtagtgcgtgcatgctgaaaaaagtttcttattgtgaaccatagtcaaagaagtttgaaagttaatccttccacggaggacttattagaaagacagattttttttttcttctggttgtatatacagaaggtatacagactgactcaaactttacttaggggagaatctatcctgattgttcctacagctttacagatggctggaaatgcaaagaactgcaattcttcattctttgcacatttgctgagaaattaagtaagaaacaatggatttcttccctagtcctctcattccctgtccwtgccctctgaactttctacaagatgggttcctctgcatgtaaaagcctcatctttaaaatgggatgacttagggacagagcttctctacaattctctctttttaaaaactctggtggagaagaacgttacagtccttttactcactctatgctaggggacatgaatgacacctgattagtaaatactggaagaataaccagtcatgcttatttcagctttatccattctcctttcatttagaaatgtgcctttctgcagaggacatgagttc

SEQ ID NO: 619732 - DNA, 575 bp, Homo sapiens
ttttaatttttagctcccacaagtaagtgaaaacataggatgtttgtctttcgtttctggcttatttcacttaaaataatgatcttcagttccattaacgttattgcaaatgattggatctcactcttcttttatagctgaatagtattcaattgtgaatatgtaccacaacttctttacccatttttctgttaatggacacttaagttgcttccaaatcttgtctatggtgaatagttctgcaataaacwtgaaagtacagatatctctttaacatactgatttcctttctttggcgtatgtacctaggagtgagattgctggatcatatggtagttctattttttattttctcaaaaacctccaaactgttctttatagtgattgtactaattcacattcccactaacagtgtaaaagggctcccttttctccacatccttgccagtattcattgttgcctgtcttttggataaaagccatgttaactagagtgagatgagatatcctattgcaattttgatttgaatttctgtgatgattaatgatggtgaacaccttttcatacacctgtt

SEQ ID NO: 619733 - DNA, 597 bp, Homo sapiens
ttacaattcaatgaactaggtaaaaaatacacactaagctcaaagataacagaggaagaaaataattttaaaatgtggtrtatgcatacagtgacatattgttcagccttaaaatgaagaaaaacataacatttgttataacatggatgaatcttgatgacattatgctaagtaaaataagccaaacacagaaagacaaatactgtataatcacactgatatgttgaatctaaaatagtcaaacttatagaagtagagagtagaaggtgattgccagaagctggtgggaggggaaaatggagaggtgttagtcaaaggatacaatgtttcagttatacaagataaatacattttggggatctactatacagcctagtgcttagagcaagcaatactgtatcctgtatttccaattttctaaaagatattatgctaagtgttcttaccacacagacaaaaataacttaaaaaagagttggaaggaaattttgagaggtgatgagtacgtctgccgtcttggttgtggtgatggtttgatgggtgtatttttatccctaaactcattgaaacatatatatatatatatatatatatata

SEQ ID NO: 619734 - DNA, 559 bp, Homo sapiens
tacgggtccagtttactttggtcagccaggcacacctcctagccagtgatggtcctggggtggctcacacattataaagcaccatttctgatgttttttccggggtgtggggcgggggtgggatggaratgctgagaagaccaagatggagaaaagaaggcatttctttactgcaccctcaaaagccttcccaaagttacttcccacacctcatctccctatgcttaattttggtggcacacatggcgtggagagggtgtttcctccaaggaatttaccatggccattccgttttctccctcctcccctcactttaatggcagctcatattttgaatggcttactctaaattccttcaaggtaatatggccacattcacatgtgataaatgtgtaaatcatcccacttctttcctgttagaatggttgcaatttaaaaagaaaataagaaatattggcaggcaaggaagtagagtatctggaactccaattctctcctggtaaaaatataaatggcaaaattgttttttataatattttgatatattcttaaaaagtta

SEQ ID NO: 619735 - DNA, 589 bp, Homo sapiens
actgaattaatgaattggtgagtgaatgagtgaamaaacaagccatttaaggaagaaatcagctggaactctgatccactctctacacatcaaaccatgctatgctgacagttaaagtgacatgccttctttaccacagagcagggagtctcatcccaagcccacagagagaagtctcaggatggacacattgggcccctgtccccttcaactcacatgtgaagccccacctttgagagtgaacatttgcctgatcatacctccctgagctcatcccacactgcctcacggggactaaaggaacctgcaaccacagagccttagaaccatggggcccttggggttgtgaagtaactgccagtatggggaaaagtcagtgaaagaaggaacttggagccaggagatgtggtctcaagtcctggatctagtgcctgctagcaattcatgtgccctctctgatcctcggtttcttcatctgtaaaatgaggctagcaaggtcttttctatggcattatgaggacaagatgaagcaatgtacataaatgcgctttctaaaccatgcacaccctcaacttataggccaaagaac

SEQ ID NO: 619736 - DNA, 393 bp, Homo sapiens
tgtacctgtgcgtggatgcagatggtgaaacagatagtgactgcagctggtactggagctgtaggagaaagttcttcattttctgagcatcccaggacaatctctgaattgcctgttggctttgcttttgatatgaagtgtgggtaatgtttcatgtggaaaccaggccatgacttgttgtggggaccatttataattgggatgaagcctgraaaatgagttggagtgaaggaatttgacagaaatgaaatgacttgaggatagagacaaaaatatcctcaatgtgatagttttgtctgttggtttgcatgtcattatttctccacttccctccacttgctttttctgcaataggcgcagtgcatgctatgaattaaaggaggaagaggaaag

SEQ ID NO: 619737 - DNA, 564 bp, Homo sapiens
gctcccccaaaccctacctccaaatatcattacattggggactggggtttcaacatatgaatttgtggacaggaacattcagtccatagcagatgaacatcagttcctgtgcttattggccatttgcatgttcattctttaagctcttactcaggaacctgaaaccctagtgaacagtggttcccaaaatgtggtcccctcccgacacacgcacccatcagcagcatcagcatcagcagggatcttattagaaatgcaaattttcaagccctaccccaggttatctgaattagaaacacagggagtggggcccaacaatctcgttttaagctttccagacrattctgatgtaggcataagtctgagaatcagtgttataagacaacatttcttacagagtattctctaatattttaatatgtgacatttgactttaaaaattccttggttatatgagtttaggaaacaatggactacgcaaacaaacaaaaaatccttaagacttgtttatattctttaatatgcttatgagcaacgtgtatttccaagaaggagatctagtat

SEQ ID NO: 619738 - DNA, 553 bp, Homo sapiens
gtgttagtaagtgacaaagctgagatttgaacccaggcagtctggctccagagttcatgccactgagactgctacttctctattatacgaagaaacaagatctctaatactccttgaagaatgtgtgactcaaaaagacgagtctttgcaggtcaaaacataacatgtgctcctctgcttggtgttagcatgtccacatggtttagcagctgctgctaagcactgcggcttgcccagaarcagagcctttcagaacataggactggaactgttcattagctaattaggccgttctcaactaatctgggagatgagcatcaatttacttctgttttgctgctctcaacgatcctgttaccatcaaactgcaaatcatccccttcccccttttttttttcattgtctacctatctaatggggagattcataactcctagtacctctagctcctgaaatcctattccttgaaaattctctccatctttttttaagtgtatctttaactgttattatgttaaacatatataatgttggatataaagcttcaacttct

SEQ ID NO: 619739 - DNA, 629 bp, Homo sapiens
ggaaatgtaattctcaatcaagagagaatttctgaaatcctcctaacaccactgacaagccaactccttggacacacacatatacatgcactcaagatttagctttttcctttaaaggcttgtattttttcacaaaaccaccccatcactggatcatatttttcaataatattcttccatatgtagtcaagtattaatagaataattcaaagtttccagttatgctactttccttttgtttaaataatctctattttcatattgcaaattctggagctgtaaaaaaaagaaaaatggacatggatcaaacaaataaagaataattacaaagaaaartataggtgatgctgtttataatattatttgtcctaggtattaaatacttacaatgtgcaaggctccatgctaaccagattcactttccttatttctcaaaataagcccatgtggcaagtgctattataaaccccattttacaggaagagaagcaagactgaaagggactaagtaacttccctgatggtcacataggtggtgggtgacatagcaaaagatcaatcctaggtcaccctgacttcaaaacccattatcttagccactttaattcatctcgctgatatcattaatag

SEQ ID NO: 619740 - DNA, 629 bp, Homo sapiens
ggaaatgtaattctcaatcaagagagaatttctgaaatcctcctaacaccactgacaagccaactccttggacacacacatatacatgcactcaagatttagctttttcctttaaaggcttgtattttttcacaaaaccaccccatcactggatcatatttttcaataatattcttccatatgtagtcaagtattaatagaataattcaaagtttccagttatgctactttccttttgtttaaataatctctattttcatattgcaaattctggagctgtaaaaaaaagaaaaatggacatggatcaaacaaataaagaataattacaaagaaaaatataggtgatgctgtttataatattatttgtcctaggtattaaatacttacaatgtgcaaggctccatgctaaccagattcactttccttatttctcaaaataagcccatgtggcaagtgctattataaaccccattttacaggaagagaagcaagactgaaaggractaagtaacttccctgatggtcacataggtggtgggtgacatagcaaaagatcaatcctaggtcaccctgacttcaaaacccattatcttagccactttaattcatctcgctgatatcattaatag

SEQ ID NO: 619741 - DNA, 543 bp, Homo sapiens
gaagaggagtctacagcctttttggcttcttgcactttgcataatgcttttgagattcatccatgttgctgcatatatctgtagttcatttctctttatttctgcctagtattcagttgtatggatgatcacaatttgtttattcaccaatcgagggwcatttcagttgttttcagtttggggcaattatgaatgtagctgtgataaataactattcattgctgggtcaaatggtaagtatatgtataactctgtaaggagctgccaaactgttttccaaaatgggtgtattattttgcattcccgtcagcaatatatgagagttacagttgctccacgttctaagcagcatttaatattatcaggctttttattgttttggtttggtttgtttttagccttctaataagtgtgtagtaataactattgtggttttaatttgcatttctctaatgattaataatgtcccatcttttcatgtgcttatttattctccttatctctcattgctgaagtgacctgttcacttcttttggccatttt

SEQ ID NO: 619742 - DNA, 628 bp, Homo sapiens
agcatttaatattatcaggctttttattgttttggtttggtttgtttttagccttctaataagtgtgtagtaataactattgtggttttaatttgcatttctctaatgattaataatgtcccatcttttcatgtgcttatttattctccttatctctcattgctgaagtgacctgttcacttcttttggccattttttaattaggttgcttgttttattatttagttgtagatgatttttaaattttttgctattatagataatgcttcartgaacaacattgtatgtgaaaatattgccctcactttgggtctatacttataataatttcctaaagctactaaatcaaagagagtgaacatcttcaccatccttatatgcccatagtccaacagctcttcaaaaccattgcaccaattcactgtcctactggtggcagtttaataggcatgacaggccattgtgttgtcttaattggaatttgtttgattataatgctatggaactttttttcatatgattattaaacagtctgtgtttcttcttttgtgagtcatcatcccttgccttttttgatactggattgacatagaaatttgccatggctgtatctctacaggattagttc

SEQ ID NO: 619743 - DNA, 551 bp, Homo sapiens
gtgtcttaagcgcagcattattggcatttctgagtcacataattctttgtcataggggatgcscttgcactgtaggatattcagcagcatccctggcctgtagccactagacaccagatatacttcccccactcagctgtgacaatcaaaaatgtttccaaacattgctaaatgacccttggggcccaaatcacctcccagttgagactcctggtgtagaataattaaatagattgctctagctcataggactcatcaacatcatgaccaggaatgcaggaaccccagtggaatgcatttgcctcactatgtacactttcattttctccctcatatctagtaagtcacagcctttgagagttggagtgaactcagagctgcacctctatttttctgatggtctcataggcctgcacagggctccatgccttaagataaaagaaactgaagggacagcagagtctgaagggacaacccaagctgaaaagaaaaagtgacctcaacctgacataatcagcttaaggcttatcaactagatttcaaataaatag

SEQ ID NO: 619744 - DNA, 561 bp, Homo sapiens
atccatttattccatttcaattaaaatctaatctttttagtgaaatgtgacaaggtgatcctaaaaatcatatgatgaataaagagccaatagccaagacaatttggggagaattaatataccaaaactacaaagttataaaaactaaattagtgagacatgggtgagagggatatacaaatagaccagtggaataaaataaagtgcccagaaacagcagataagaattgcctactcactaaatggtgttgagtcaaaggactaatcatagcagagaaaaaatagataaaattagagcccacctcacactatacacaaaaattaattccagatagattaaaagagccaaatgtgatatgcaaaactgtaaaaaatgttatttaaaaaatataaatgacttcttttttatctcagtatgtggaaggaattttttaatgagagaagatgaacaaaaatcatcaaaaaaatgcagatacattttaccayactaaaattaataactctgtatgacaaaaagcaccataaacaaagtgaaaaagacaagtcatgtgggggagaaga

SEQ ID NO: 619745 - DNA, 422 bp, Homo sapiens
cttttcaggctcaggcagatgaagagctcagctccaggccaggcccccagggctccggtgacagcagaaccagcatcaccacccttgccccagctttctgtgcttcaagaaggaaatgaacaaatggcaggtgtgcaggccacgtcgtgctgctcaaattagccatgttgctaaggaaacaagtcaaccattcaaaggaaggagcattgrgtaaaggagataaatcaataagtgaacctatttttatcatttccctaatgattgtcttgaaactgctagactagaaagagagttggagcaacacaggtcctcattaatgggctcagagggaacgaggagtgaaggggtgtttgaggagattgccagtaaagtttatgaaatgaggcctctagtgagcagtgagctggtacaggagggaaggc

SEQ ID NO: 619746 - DNA, 552 bp, Homo sapiens
atcttgaaagcaggagttttgctcatgtctctactggcagtgcttagcagagcccatggtatatagtaggagcttagtcaatgttcaatgcaggtaagaatgaacatgaggcattcactaaggagccattacaaagacagggctttgctcacccactctggcctgagccatggctcctgctcactcccacccttgcaggctgtctccgaggcaccactcccatttcttcccgacagcaaaacttcacaccccaaagcaatggctctgctacatccccaaagtgaagagcctagacggcaaataacacccacccaccagtcaagctagtgmccctcaacctggcagactggacaaagacatgacttagaaaggtcaaagggagctccgagtcgccacggcctcaaagaccatcacccttcatggcaaccacaatcagggacaagatggaagtctgtccaggactctgactctctgttctagaattcagtgacactcattacactctgtgcctgacactgtgcatattttagggaagaatatctatccctggta

SEQ ID NO: 619747 - DNA, 413 bp, Homo sapiens
ttgtctttcttggtttcttctcctctgctttatcactctcccattcccttcctgcctgtgagttctgggaggagtttgctctttgctgggggacaagctaatgacagaccccatggggattcacacggaaaagaagagattacaaacactgtgtctgtgctgcgtggcagccagggaagaagraagggcaggcacaggcccattttcttccctcctctttcctaagggacttctgatacgagaggaagaggtggggagtagaggggagaggatgaaggatgctcagtgcttgtgtgtatttgtggttatgaacttcccaatgcttacgtccttattctccttaaagaaatgagtcacacatctaacgtattccccctaaaaagagcagacaaactgcctaaaattcacgtgtg

SEQ ID NO: 619748 - DNA, 661 bp, Homo sapiens
cagaaaatatggctgaggtcttctccaacgcccaaaagaagctgcatttgactacatcttttggcccgtcttggaggtgcctcccaggcgggggtaagctgcttgctttggtgaaaaggctcattgggaaatgtcaccctccccagagaagtgggtgtttagccactgagccaagcacagaatggaaaaccagaagtggcagcttccagacctggctgagagtcccatggcctctgcctaacaccacacgcatctccacacagtactcatcctcctcttgaggtggctgacctatggtccagcaccctggggaatcttagccttgaactttttcttctgcccctactctacagattgctgtctttccaccccaggttccctgcccccagccacctcatgataccaacccccttcatacacacacacagacagagagagaaaatggacttacccactgaggacsacgatgaagtccatgacattccagccattgcggaggtaagagcccttatggaagatgaaccccagggccacaattttgatcccagcttcaaagcaaaagatcccaatgaaataaggttctgtcttctcctgtggggatgaggagcagaagcaccagtgagaagaggactgtgctttatgagacacaggcaaaagcaca

SEQ ID NO: 619749 - DNA, 604 bp, Homo sapiens
taatcttctacagaatgaacttccaaaacctttgagtttatgaattagatgaaaatattgagctattattgacattagtttaacaatcattctttacttcctttataaagagtattcaccrtaacattataaggaacatctgtcttcattgttaaactttaaataaggaacaaaataagacagccttctattactgtcattacccaacattttcctggaagtcctgtttagggcaataagataagaaaaagaaacatatactaggtgaattagaaagaaacaaatacaataacacttgtttgtagttaatacagttttctacctatataatctaaaaaaaaatctaccaacatgattttaactaataaacttttacacgattgctggatataacatcaacgaataaaaactaacattcctatacattagcaacattctattagaaataaaaaaattaaatcattcacaagagtaataaaattacaagatacagaagaaaaattataacaaagatgcgcaagtcataagtggaaaaaatctccaaaactataatagggtataaaatatatcccaaataagtggagaaatattggtaagattcaac

SEQ ID NO: 619750 - DNA, 604 bp, Homo sapiens
taatcttctacagaatgaacttccaaaacctttgagtttatgaattagatgaaaatattgagctattattgacattagtttaacaatcattctttacttcctttataaagagtattcaccgtaacattataaggaacatctgtcttcattgttaaactttaaataaggaacaaaataagacagccttctattactgtcattacccaacattttcctggaagtcctgtttagggcaataagataagaaaaagaaacatatactaggtgaattagaaagaaacaaatacaataacacttgtttgtagttaatacagttttctacctatataatctaaaaaaaaatctaccaacatgattttaactaayaaacttttacacgattgctggatataacatcaacgaataaaaactaacattcctatacattagcaacattctattagaaataaaaaaattaaatcattcacaagagtaataaaattacaagatacagaagaaaaattataacaaagatgcgcaagtcataagtggaaaaaatctccaaaactataatagggtataaaatatatcccaaataagtggagaaatattggtaagattcaac

SEQ ID NO: 619751 - DNA, 587 bp, Homo sapiens
taaacagttcctttaattctcaattcttgtaaatctatagagttcgcatttatgccatatccacctctgctttgaaaacatacctgggrattttcaccccacctccctcttccacatacactcatgcacaagcacaagaatgcacgagtttaactgccttcaaatgagagctccaggcccaggagaacggtctgacttagaaagcaccttgccataatttctttccctgtatcaccctgagtgaatgcaatgccaggagacaaataaagtcccaaaccaaaccacccagggatttcgaagctttcttcactccctctggcttttcctcctctttggtgatatcaaagccaattcaggccccactcagttctgtccatatggagcttctgtcaatgggtgggggtggcaagaagaagcctttcaggaaacagaaaccatcccaacaccaatgtcttacatctggaacacagtgtatattcaatatatatctgttgagtgaaccaatggtgcatctcaatatagaaaaaagacagagtgcatacatgagaaaaaattccctcccacccaaggcacaatcccaactcagc

SEQ ID NO: 619752 - DNA, 498 bp, Homo sapiens
acattagtctcttgatttctttttcaggttgtttgctgttggcaaataaatggaaatgctactgatttttgttgttgattttgtaccctgcaccttttctgaatttatcagttctaacagttttcttgtggagtctttaggtttttccaaatataagataatattatctgcaaacaagggtaatttgacttgtgtttaatttgcatrtcttttatttctttttttttgtctgattgttctagctagaacttccagtactatgttaaatagcagtgacaaatgcaagcattcttactttcaaaaaaagtgcagatgctcactttcagagtgagcattattttccaagtaagattttgtttctgatcttagatgaaaggctgtcactttttccctattcacagtttaaaagctatgagtgttttattgtgttacatatttcttctataccaattttttagggtttttaccatgaatgcatattggattttatcaaatttt

SEQ ID NO: 619753 - DNA, 485 bp, Homo sapiens
gaattcaattcctaaaaattcctaaatcatgttcccctcccacccccactccgagagacaggatgcattatggaaagggcaataggcagaggggccaggagggggtgggagatgggacagtgagtactagtttgggaccaacactaaattatctaagtaatctttctaaactgcttaatttgctaatatataaagcaaaggtcacctgtcattagaagctcaaatctatgtgtggttttaagattagaaggaatctttcaatgttgtctgagctctcttcaatctttagatagaatggttgctgaaaaattttcaccactcttkattattattaattttaaatattccaatgctgaatgcctcttgatgaaatcacaatgataacacgattggccctctttgtttttctcatttttgagatgagataaatgttgggaaaggaaatacttacacgtgtgtcattctgtctttctttgtagctggac

SEQ ID NO: 619754 - DNA, 597 bp, Homo sapiens
ttattaaaacaatggaatcagttataaatagtgcagaaaagattaataaagtaattgaaggtaaataaatttaaaacaaatagaaacaagatgggtgacaaaataaacaaacctctatgacttttccaaaggcaacctttaaaaacaatggtaggcacgttctcactcataggcgggaattgaacaatgagaacacttggacacaggaaggggaacatcacacaccggggcttgtcgtgggtgggaggagcggggagggatagcattagcagatatacctaatgtaaatgacgagttaatgggtgcagcacaccaacatggcacatccatacatatgtaacaaacctgcacattgtgcacatgtaccctagaacttaaagtattaaaaaaaaaggtagattttcaaagctatttactaaagtgaacaraaacaaactttgtattatttggagaaccataatttagtccagttgggaagaaattgaggttcaaggatttacatgtactggtagagtatttctgaaatgataggatcagaagtattattgaatttagaattttttttagttttggaatatttgcgtatacacaatgaga

SEQ ID NO: 619755 - DNA, 597 bp, Homo sapiens
ttattaaaacaatggaatcagttataaatagtgcagaaaagattaataaagtaattgaaggtaaataaatttaaaacaaatagaaacaagatgggtgacaaaataaacaaacctctatgacttttccaaaggcaacctttaaaaacaatggtaggcacgttctcactcataggcgggaattgaacaatgagaacacttggacacaggaaggggaacatcacacaccggggcttgtcgtgggtgggaggagcggggagggatagcattagcagatatacctaatgtaaatgacgagttaatgggtgcagcacaccaacatggcacatccatacatatgtaacaaacctgcacattgtgcacatgtaccctagaacttaaagtattaaaaaaaaaggtagattttcaaagctatttactaaagtgaacaaaaacaaactttgtattatttggagaaccataatttagtccagttgggaagaarttgaggttcaaggatttacatgtactggtagagtatttctgaaatgataggatcagaagtattattgaatttagaattttttttagttttggaatatttgcgtatacacaatgaga

SEQ ID NO: 619756 - DNA, 440 bp, Homo sapiens
agccaaccaatagaatcagagaaaatatttgcaaaccatatatctgatataaggggctaatctccaaaatattaagaaactcctacatcttagtagcaaagaaactaataacatgatttaaaaatgggttaaggacttgaatagacatttctccaaacagtacatacaaatgtccaaaaggcatatgaaaaaatgctcctcatcagtaatcaagaartgcaaatcaaaacctcaatgagatatcacttgtcttgttttaagctataatgataacaatatgctgatatgatagcctctgttcgttttaattaattaatttaggaagacgggatatttaggttaacataaattggaggttatctttgacatctgaagattaaagaacaccttaatgagtaaatttgcttattttgcccctactgttggcatcaggtacacat

SEQ ID NO: 619757 - DNA, 526 bp, Homo sapiens
attggcaaacatgcactaatctcattaagcttactgggatttcatctgtactcaaattcctactacgtgtacaatcaacaaaaattctccaaccttgtatatcttctcacctcrcagcctgcctataatcagaaaatcaattctatattcatattatatattaattaaaggcatcactaattattgctaatggttcctggatgagaaaagaagcagtaaagattaaagttcccaacagctatgggagagaattcaggacagtgattaagaatgtgtattctaggccaggtgcgatggctcacgcctgtaatcccagcactttgggaggccgaagcgggtggatcacttgaggtcaggagttcaagacctgcctggccaacatggtgaagcctcatctctactaaaaatacaaaattagccgggcgtagtgacacgtgcctgtaatcccagttactagaaggctgaggcaggagaactgcttgagcccaggaggtagaggttgcagtgagccaagattgtgccactg

SEQ ID NO: 619758 - DNA, 468 bp, Homo sapiens
ggctggttttggcttgtagactgtggtttgcagacctctgctctggagtataattcagtggtattaaaagaaatatttaaaaaataacatatagcgtattcctgagactaaaataaatgcctttctttacatttatatttgaactgcataaaacatgcttttaatccatacaaattccataagcaaattgtcatttaaaaattgaaacccaatgttctgtgttattgtataaaattattgcccatgagtgtttattactgttagtctattagattgtcgttctgcacatatgtgggtgagcacacacacacacacacacacacacacacacacacacggttttgcrtgtggttttggtcttgaaatctttattgcactaccatctacaatgtgctcaagctctgattattatgcagtaaatattttgcagtaaatatttttgagatactaacctctgaatttgatggt

SEQ ID NO: 619759 - DNA, 530 bp, Homo sapiens
ttttaatttagatgcagcttactawaatattaattatgtccaagatgattttttgaatacagaatactagaattccaatagaaggataatagagaaagatgtgctagccctgatgttgatatagccactttggtatacagaactgttttatatttttggctccttcgatatttctgaaaaagattaatttagaaatttggggagtgtctaaaacttaaactttcaaaaacataaaacattacttgacccagaatctcctaaaatactccagctagttttctaaagttagctctccatgatattgatttcttccatttaatatttctgaaatatagcgtttaaagatcattacacaataaaaataagctaccaccaaactaatgaaatactatagcatattttaaacagattgacaggaaaagataacttccctgaaagtattatgaagtttcttgattgaaagtgaacttgcttcattcttctattcttggattaattcctttgccattaatttcttactcatagtaata

SEQ ID NO: 619760 - DNA, 483 bp, Homo sapiens
aaacacaatcagaaatgataaagggaacgttaccactgaccccacggaaatacaaaaaaccttcagagactatcgtgaacacctgtatacaaagtagaaaatctagaagaaatggataatttcctggaaacatacaacctccaaagattgaaccaagaagaaaaaacggaattcctggacaaaccaataaggagttccaaaacttaatcagtattaaaaagcctaccaacaaggaaaagcccaggactagatagattcacagccgaattctaccagatgtgtaaagaagagctggtataatttctactgaaactgttacaaaaaaattgaagaggaggactcctcccttactcattttatgaggccagaatcatcctgataccaaaacctggcagagacacaacaacaaaacaaaagaaaacttcaggsaaatatacttgatgctaatagatgtgaaaattttcaacaaaatactagcaaacc

SEQ ID NO: 619761 - DNA, 612 bp, Homo sapiens
ggagatgaacatgagacagggataattaggatgggagttaggtagaggaacattgggtagatgtctgatagatgcccttttcaacctgacagctactattctatgattgaagtacatttctttgcttgactcagctcagctcagttcaratagttatttgatctgtgcagtttaataactgcaggggtaacattatactgcaaacaggaggatagttcttgggttttcatgccccacttcctgccagtctggctgatcccacttgcatgctagctttttaccctcagaatctcaggaatttttccccctaagtctaaggaatttttccccctattcaaattctttgctgttgaatagtgaactctgagatgtggcatgtcttcttatctccagagagatcttattctccatatcattgttgccacataatgaaatgctttcagtggtgttttaggtgtctgtggtcacatattgcggctgccagcatttgctaaggagtgaagggaactcccccaaggcaggagttattgacaaataataaattacaggatttcaattataatcattcaattgcttgtccctcccttttcctacccagtaggctggaaaggc

SEQ ID NO: 619762 - DNA, 612 bp, Homo sapiens
ggagatgaacatgagacagggataattaggatgggagttaggtagaggaacattgggtagatgtctgatagatgcccttttcaacctgacagctactattctatgattgaagtacatttctttgcttgactcagctcagctcagttcaaatagttatttgatctgtgcagtttaataactgcaggggtaacattatactgcaaacaggaggatagttcttgggttttcatgccccacttcctgccagtctggctgatcccacttgcatgctagctttttaccctcagaatctcaggaatttttccccctaagtctaaggaatttttccccctattcaaattctttgctgttgaatagtgaactctgagatgtggcatgtcttcttatctccagagagatcttattctccatatcattgttgccacataatgaaatgctttcagtggtgttttaggtgtctgtggtcacatattgcggctgccagcatttgctaaggagtgaagrgaactcccccaaggcaggagttattgacaaataataaattacaggatttcaattataatcattcaattgcttgtccctcccttttcctacccagtaggctggaaaggc

SEQ ID NO: 619763 - DNA, 588 bp, Homo sapiens
cctgcattgagatgaacatgttattttaatttttttagtatattaatgtgacaaattttaaagataggttatgtgatttttaatagtttttgcatcctgttatcaatctgaattaattatatatgattatatatgtaattatatataatatgtatataattattaagcatgtattttgtagacaacatgttgaatcttttttgtagtttttatcaactataaatgtctctgttatttcattagtttaggctatttacatttttgaaattatgttattttaattatgttcatttaactaacatagtatttctgccatcctgtttcatactttgccttttctataggttgtttaaattttttttaaaggcaatgattggctgattttttstattaacagataaactccaattaaataaataaacaacccatatttgactatatattgtttattaaaaacacacctaaaacaaatgacaaagtaaagattaaaagagaaggatgtaaaagatatggcaggcaaacactaatgcagttaacagcagattaaaatagaattaaaggtaaagtgttttggtaattaaaggcata

SEQ ID NO: 619764 - DNA, 545 bp, Homo sapiens
ttacataaattgtaactattacatgttaatatcttccatgttggaatttatcatctattattttgaagttaataactgagtcttttttttttttttgagatggagtcttgctctgtagcccaggctggagtgcagtggtgcgatctctgctcactgcaagctctgcctcccaggttcacgccattctcctgcctcagcctcccgagtagctgggactacaggggcrtgcaaccacgcccggctaattttttgtatttttagtagagatggggtttcaccgtattagccaggatggtcttgatctccttaccttgtgattcacccacttcggcctcccaaagtgctgggattacaggcatgagccaccgcgcctagctgagtcctttttaagtagatggaataaaatgctggcattttatttttgattcttaatcatggctattttgtcaactccctatgtagatgatttccctttctatacttttttttccatttgataggataatttattaattcgtgtcctagtataattttattttctgctt

SEQ ID NO: 619765 - DNA, 552 bp, Homo sapiens
gtgtcatctacagtttctttcagcagtagtttgtagtcctctttgtagagatctttcactttcctggttaagtacattcctggaggttttttttttttttttttttttttgcagctattgtaaaagggattgagttgtttatttgactctcagcttagtcattggtggtggatagcagtgctacttatttgtgtacattgattttgtaacctaaaactttactgaatttatttatcatacctaggagtcttttggaggagtctttggggttttctaggtatgcgatcatattatcagtaaacagaaatagagggcattcaaattggaaaagagaaagaatctatatccttttcctgattaatctggcaaggacttctagtactgtrttgaatagaagtaatgcaagtggatatccttgtcttgttctagtttttatagggaatgctttcaacttttcccccattcagtatgatgttggctataaatttgtcatatatggctattattattttggggtatgtcccttctatgcccagtttgttgaggattatt

SEQ ID NO: 619766 - DNA, 602 bp, Homo sapiens
agcaaacacacatgtagcatccactatgtgttacataatgtccraacatataataatttctttatttcttacaatagttccatgagataggtaatattattatccatattggaagtttaagagaactatgtcacacagaagaagctaagcaacttgccaagggggcacaactaacgtggcagagctagtcagtttggctttggaatccatgtttttactaccaagactatattactatgaattattaagttttttgagtttgtggtaagtcaaaaggtgacttagctaaaatgatgaaacataaggtcagaagctagattaattcccagagtgggcctattcagggacaatctgagactttggtctcctacgataattctagagaatatcaactagctcttagtactgttttgtctatgaaacctaagatgagaacataatatttgagaattagatgaacttttagattctttagcccaatctcatgtcattgttatataatgtctgtgagtctctcctatagcttcaatttattgttcagtgaaaaagatctaagttttggttaataattttagagaagagataggaaataaacagaatta

SEQ ID NO: 619767 - DNA, 602 bp, Homo sapiens
agcaaacacacatgtagcatccactatgtgttacataatgtccgaacatawaataatttctttatttcttacaatagttccatgagataggtaatattattatccatattggaagtttaagagaactatgtcacacagaagaagctaagcaacttgccaagggggcacaactaacgtggcagagctagtcagtttggctttggaatccatgtttttactaccaagactatattactatgaattattaagttttttgagtttgtggtaagtcaaaaggtgacttagctaaaatgatgaaacataaggtcagaagctagattaattcccagagtgggcctattcagggacaatctgagactttggtctcctacgataattctagagaatatcaactagctcttagtactgttttgtctatgaaacctaagatgagaacataatatttgagaattagatgaacttttagattctttagcccaatctcatgtcattgttatataatgtctgtgagtctctcctatagcttcaatttattgttcagtgaaaaagatctaagttttggttaataattttagagaagagataggaaataaacagaatta

SEQ ID NO: 619768 - DNA, 602 bp, Homo sapiens
agcaaacacacatgtagcatccactatgtgttacataatgtccgaacatataataatttctttatttcttacaatagttccatgagataggtaatattattatccatattggaagtttaagagaactatgtcacacagaagaagctaagcaacttgccaagggggcacaactaacgtggcagagctagtcagtttggctttggaatccatgtttttactaccaasactatattactatgaattattaagttttttgagtttgtggtaagtcaaaaggtgacttagctaaaatgatgaaacataaggtcagaagctagattaattcccagagtgggcctattcagggacaatctgagactttggtctcctacgataattctagagaatatcaactagctcttagtactgttttgtctatgaaacctaagatgagaacataatatttgagaattagatgaacttttagattctttagcccaatctcatgtcattgttatataatgtctgtgagtctctcctatagcttcaatttattgttcagtgaaaaagatctaagttttggttaataattttagagaagagataggaaataaacagaatta

SEQ ID NO: 619769 - DNA, 571 bp, Homo sapiens
ctaccaagtgttttgtttattactaatcatgtaatgcttttgatatgkgtgggtaagccaaggtgaaatgattaagagagaaccttgagcagcctatgttaacatcaaagctttgggtgtcagaattaggtactaagggctaacatataaataaagtttaatagttactttcagtccttagatcaattaaaatgtgtttatttgacttatggtttaatactagttgcagagcagataaatgtttctaagaagtgttaagtaagcttaagggacaaaagagtggtatattttacatttgtgaacatatgggtgttattaatacattagattgaagatagattttttttgagacaaggtcttgctttgtcacccaggctggagtacagtggcaaacataggtcactgcagccttcaactccttagctcaagtgatcctcttgcctcagcctcctgagaagctggggttacaggcatgcaccaccatacctggctaacgttttttttagagatggggtcttgctaatttcccagggctggtttcatattcctccctcagcaatccttcccaatt

SEQ ID NO: 619770 - DNA, 570 bp, Homo sapiens
gttttgatttgcatttccctgatcattagtgatcttagacatttttccatgtgccttttaaccatttatatatcttcttttgagaagtgtctattcatgtccttagcccaatttttgataggattgctttttttttcttggtgatttgtttgagttctttatagattctagatattagtcatttgtcagatgtatacattgcaaagattatctcccactctgtgggttgtctttttattctgttgattgtttcttttgctgtgcagaagctttttagtttaattaaggcccatctatttatctttgttttkgtggcatctgctttgggtttttggtcataaaatctttgtttaagccattgtcgagaagggtttttccaatgctatcatctagaatctttatggtttcaggtcttagatttaaatctttaatacatcttgagttgatttttgtataaggtcagagatgaggatccagtttcattcttctacgtgtggcttgccaattatcccagcaccaattattgaatagggtgtcctttccccgttttatgcttttgtttggtttgtc

SEQ ID NO: 619771 - DNA, 570 bp, Homo sapiens
gttttgatttgcatttccctgatcattagtgatcttagacatttttccatgtgccttttaaccatttatatatcttcttttgagaagtgtctattcatgtccttagcccaatttttgataggattgctttttttttcttggtgatttgtttgagttctttatagattctagatattagtcatttgtcagatgtatacattgcaaagattatctcccactctgtgggttgtctttttaytctgttgattgtttcttttgctgtgcagaagctttttagtttaattaaggcccatctatttatctttgttttggtggcatctgctttgggtttttggtcataaaatctttgtttaagccattgtcgagaagggtttttccaatgctatcatctagaatctttatggtttcaggtcttagatttaaatctttaatacatcttgagttgatttttgtataaggtcagagatgaggatccagtttcattcttctacgtgtggcttgccaattatcccagcaccaattattgaatagggtgtcctttccccgttttatgcttttgtttggtttgtc

SEQ ID NO: 619772 - DNA, 519 bp, Homo sapiens
cttcgagaccagcctgaccaacatggtgaaaccccgtttctactaaaaatacaaaaattagctgggcatggtggcgcatgcctgtaatcccagctactcaggaggctgaggcaggagaattgcttgaactcaggagtcggaggttgcagtgaaccgagatygcaccactgcactccagcctgggcaacagggcaagactctgtctcaaaaaaaaaaaaaaaaaaaaaattatgataatatttttctaggttttgtagtgtttctgttattgatcagctttttatatttttaaatctgttgtgatttcttttctaattctaaagaaatcacttttgtacctgactttgtattaggcattttgtactctttttttttcttcttcgtgtagtcttttttatttaagatggtgccaaaagccaggtacagtggctcatgcctgtaatcccagcactttgggaggccaaggcaggcagatcacttgaggtcaggagttcgagacctcctggccaacatggtaaa

SEQ ID NO: 619773 - DNA, 591 bp, Homo sapiens
tcccttttctctgcaacctcaccagcatctgtaattttttgattttaaaaaacagccattctgacttgtgtgagatgggtatctcactgtagttttgatttgcatttctgtaataattastgacgttgagcattttttcatatgcttgttgactgccattgctctttttaaatcgcctttttaaaaaacataaaatctgtatgtgcagtgatttacacatttatacatttttcattctgaaattataacatagtaatgaatacttctatagatttactatgtgccaagtactatttcaagcactttatacatatcaaactcatttaatatttaaaattaccgttatcaggtaggtaatattgtcttcattttacagatgagataactgaactatggagaaattaagtgatttgtaaaaggttaccaaatactattaagtgaaagtcacatagcattctaattattgtatattagtgcattaaatctattcaatcattgatgacattgaccctccttggttgacgtggttctgggtacagaattcagtaacaatgaaagatgtttttttctacagtttcttcttcatttctc

SEQ ID NO: 619774 - DNA, 610 bp, Homo sapiens
tctttttttttttttgagatggagtcttgctctcttgccaggctggagtgcagtggcgtgatctccgctccctgcaatctctgcctactgggttcaagtgattctcctgcctcagcctcccaggtagctgggattacaggtgtgcaccaccatgcccagttaatttttgtgtttttagtagagacggggtttcaccatgttggccaggatggtcttgacctcttaktctcgagatctgcctgcttcggcctcccaaagtgctgggattagaggcatgagccaccgtgcctggccaaggccgactaattgtttcatccaactacaacttgggagccagagttaactggtgcatagtgacagtaccagcattttctctagtatataaagaaaaatagtacaaatgccagaagtctacatgattctctggtctctccaaaggataatgggttctagcagtttgctagaactccccctgatgcaatggaattctagaagaagaagtggttagatcttcctacatgaatgagagaaggtgtcacagagatgctagtatttaggctgatatttcaagtatgagcaaaaattttctgtaggtgtaatagagcaaaaa

SEQ ID NO: 619775 - DNA, 608 bp, Homo sapiens
tccctctctcttccttcttctccagccatgtaagatgcctgctttcccttcatcttccaccatgagtgtaagtctcctgagacattcccagtagcagaagctgctttgcttcctgtacagcctgcagaattgtgagccaactaaacctgttttctttataaattatccagtcttagttatttctttataggagcaagagaatggactaaaacattggcaataatagatgttcttttttatgtactcttgttctttccttttttccctacttctgtaactggmcttcaggtgtggtgacttgttttgaatagaataattgaaacaactttagctcctggagcttcaatgcaagaaaacatcttttcatatccatgagccaatgtgccaagtttgaaatttcctgctctttctgttttttgttcttttcaacacatttacctgggtgacaaaataatctgtaccctaaatccccatgacactcatttcttttgtcttctggtcttaaaacagtttattaaatcacgctggttgtaattattatcccaccaaattcttatctgtttcaaggacataaacatttatttcaggctagaataaatattaaaata

SEQ ID NO: 619776 - DNA, 608 bp, Homo sapiens
tccctctctcttccttcttctccagccatgtaagatgcctgctttcccttcatcttccaccatgagtgtaagtctcctgagacattcccagtagcagaagctgctttgcttcctgtacagcctgcagaattgtgagccaactaaacctgttttctttataaattatccagtcttagttatttctttataggagcaagagaatggactaaaacattggcaataatagatgttcttttttatgtactcttgttctttccttttttccctacttctgtaactggacttcaggwgtggtgacttgttttgaatagaataattgaaacaactttagctcctggagcttcaatgcaagaaaacatcttttcatatccatgagccaatgtgccaagtttgaaatttcctgctctttctgttttttgttcttttcaacacatttacctgggtgacaaaataatctgtaccctaaatccccatgacactcatttcttttgtcttctggtcttaaaacagtttattaaatcacgctggttgtaattattatcccaccaaattcttatctgtttcaaggacataaacatttatttcaggctagaataaatattaaaata

SEQ ID NO: 619777 - DNA, 608 bp, Homo sapiens
tccctctctcttccttcttctccagccatgtaagatgcctgctttcccttcatcttccaccatgagtgtaagtctcctgagacattcccagtagcagaagctgctttgcttcctgtacagcctgcagaattgtgagccaactaaacctgttttctttataaattatccagtcttagttatttctttataggagcaagagaatggactaaaacattggcaataatagatgttcttttttatgtactcttgttctttccttttttccctacttctgtaactggacttcaggtgtggtgacttgttttgaatagaataattgaaacaactttagctcctggagcttcaatgcargaaaacatcttttcatatccatgagccaatgtgccaagtttgaaatttcctgctctttctgttttttgttcttttcaacacatttacctgggtgacaaaataatctgtaccctaaatccccatgacactcatttcttttgtcttctggtcttaaaacagtttattaaatcacgctggttgtaattattatcccaccaaattcttatctgtttcaaggacataaacatttatttcaggctagaataaatattaaaata

SEQ ID NO: 619778 - DNA, 608 bp, Homo sapiens
tccctctctcttccttcttctccagccatgtaagatgcctgctttcccttcatcttccaccatgagtgtaagtctcctgagacattcccagtagcagaagctgctttgcttcctgtacagcctgcagaattgtgagccaactaaacctgttttctttataaattatccagtcttagttatttctttataggagcaagagaatggactaaaacattggcaataatagatgttcttttttatgtactcttgttctttccttttttccctacttctgtaactggacttcaggtgtggtgacttgttttgaatagaataattgaaacaactttagctcctggagcttcaatgcaagaaaacatcttttcatatccatgagccaatgtgccaagtttgaaatttcctgctcyttctgttttttgttcttttcaacacatttacctgggtgacaaaataatctgtaccctaaatccccatgacactcatttcttttgtcttctggtcttaaaacagtttattaaatcacgctggttgtaattattatcccaccaaattcttatctgtttcaaggacataaacatttatttcaggctagaataaatattaaaata

SEQ ID NO: 619779 - DNA, 615 bp, Homo sapiens
cccagctacagtgaatttagaagtctgacarcacagccttctcctgtaagaattaacacctccctaaggacccttttaccctcgttcccccaatttggtgtctctgtgccaaggggaaggagacactagaactctaattttccaattttcaaaaatttctagcagcaatgcttctggattaagacattctttgtgaaactgatttggcttcaggcgaatctttctcaaggtggcctgggattcctctttgaatctatctgatttgttatctgcgaggagtcaaattctcagggttcctgggacaccacccacattccaattttcctctggcaacagatcttgaagacaaagacagacaggctagaaattgggactctttttctcttgattatacttctcatccaatttatacccagtcctgtaattcttttcgtgaaatgtctctcaaatcctgtcttctcatccccactatcaataccttatttcctgctctcttcattcttgccctgctgcagtggttacctttttaaaacacagatccgaacttcttacacccctttcaccactctccactgcctccagaaaaaacacaactcaaggctcttcaaaatatga

SEQ ID NO: 619780 - DNA, 615 bp, Homo sapiens
cccagctacagtgaatttagaagtctgacagcacagccttctcctgtaagaattaacacctccctaaggacccttttaccctcgttcccccaatttggtgtctctgtgccaaggggaaggagacactagaactctaattttccaattttcaaaaatttctagcagcaatgcttctggattaagacattctttgtgaaactgatttggcttcaggcgaatctttctcaaggtggcctgggattccyctttgaatctatctgatttgttatctgcgaggagtcaaattctcagggttcctgggacaccacccacattccaattttcctctggcaacagatcttgaagacaaagacagacaggctagaaattgggactctttttctcttgattatacttctcatccaatttatacccagtcctgtaattcttttcgtgaaatgtctctcaaatcctgtcttctcatccccactatcaataccttatttcctgctctcttcattcttgccctgctgcagtggttacctttttaaaacacagatccgaacttcttacacccctttcaccactctccactgcctccagaaaaaacacaactcaaggctcttcaaaatatga

SEQ ID NO: 619781 - DNA, 615 bp, Homo sapiens
cccagctacagtgaatttagaagtctgacagcacagccttctcctgtaagaattaacacctccctaaggacccttttaccctcgttcccccaatttggtgtctctgtgccaaggggaaggagacactagaactctaattttccaattttcaaaaatttctagcagcaatgcttctggattaagacattctttgtgaaactgatttggcttcaggcgaatctttctcaaggtggcctgggattcctctttgaatctatctgatttgttatctgcgaggagtcaaattctcagggttcctgggacaccacccacattccaattttcctctggcaacagatcttgaagacaaagacagacaggctagaaatygggactctttttctcttgattatacttctcatccaatttatacccagtcctgtaattcttttcgtgaaatgtctctcaaatcctgtcttctcatccccactatcaataccttatttcctgctctcttcattcttgccctgctgcagtggttacctttttaaaacacagatccgaacttcttacacccctttcaccactctccactgcctccagaaaaaacacaactcaaggctcttcaaaatatga

SEQ ID NO: 619782 - DNA, 556 bp, Homo sapiens
gtcagggagctatattcaggcatccagcccagccagttgtcttcaaggaacagggaatcaccttcaaggagactttatagactgcaagaaccactggagtctaatatggaccctccacagaaacatttgcaaggccaggaagctctggcagattagggctggcggtgaggcacgcacacagcgaagctcagcaggtggtgtgcacacatccacccaaagatcacacaaacacaaaacaacagggttctctctgagctggccactgcttcagggcagaggagggaaatggcccaggcaacacccagcttcttgggttgggtgaagtctccttaagaaattgttttagaagtggcttccctcttctggaagtgtacaaactgccttaggccccaggctgcagattcactatgatgtatggcctgtctaacctcttgaagaaamggattggagataagagaaaagcaactcttagacttcaagcaggttgctgctggagggccaaatgcaagtgtcaactttgttctaggaaaacaaggagggtctccttccacagagg

SEQ ID NO: 619783 - DNA, 516 bp, Homo sapiens
aaacaaggagggtctccttccacagaggcagtttctcccccctcagatgaggaaggaatagtgtatggcagaggccctgaaactatcagctgagcaacttcctgtgtggcttggggggtggaggggattgcagtaaaagagaaggccctcccttattgagatgtgtagtaacttatgcaggattccaccaagataccaaaatcactcccgtgctagggtttgggagggacgcagggagggaatcgctcagccagccagaagcctgacaaatcaccctgcgtctattgcagggcatcaatttgctggttggacagtggctgcttttgaagtttctttgtccaaatgcctggaaaacaaaaaacaacaaaaaygaaacaaacaaacaaaaaaacaacatgcaactgctagtgaagaaagtaaagaggaaatctaggggccagggaagtgaccattcttagccaggaagtaaacttttcatggtgaagcatgatatgcaggagttggatttgggggttt

SEQ ID NO: 619784 - DNA, 544 bp, Homo sapiens
acttatctgctcatggtcaccactgggcccagttttctgcctctgctgaatccctattctccgttttcttataaagagggagcctcatctgctctgctctgatgaatccctagcgcctggcctagggtctggcatgttgtagggtctcattaatagccactgagtagttcattcaataaactccacatcttgaagccattcctttactcctctaaatgtgggctatgctcttgattctcactctacatgtctaaaaagcacccacaaatagaaggcttctgcacacagttcaacttttactgaaggtctgctgataccacacagctaacaattctaaatcaaggatttgagatcctgatcctcacagtcctttcagccatcccattgccagaggttctttctttcttgccatttcaccccggaaggggccagcccttatccatttctcagctctccttacwcctgctctcctccacactcactcttcccaaatgcagctcccaattcccttggcagatccagaccccacaagaagctgaaccca

SEQ ID NO: 619785 - DNA, 507 bp, Homo sapiens
tcaaactgtgtccttccttactccagagagggagcaagaaaaaaaacctggatgctttgaagggatctgcmactatttaaaaggggattaggattctgtttcagctgcatgtggaactaggtaagcttcagtggcctcagaactccaggcccctcacggagatcaccctgaacaatgcccagtttttcatgcaggttttgtcctatgaccagttaactacatgttcaataaataaatgtcaaagaaataaatgcgtgaaaaggcaaccagttcatcatcttatgattaggttttcttgattagggatgtgtttagtacagctgaatgaacaagttcacccagctgctggtgacagaaacccaactcaaactagctgatgaaaaacagaactatacagatcaatgaatctctccccctttttcagcctcatagaactgaaaaaaacaaacctaaatacagtcacccaagtgatgtcaggaatctctcatggtattggtctctgctttc

SEQ ID NO: 619786 - DNA, 507 bp, Homo sapiens
tcaaactgtgtccttccttactccagagagggagcaagaaaaaaaacctggatgctttgaagggatctgccactatttaaaaggggattaggattctgtttcagctgcatgtggaactaggtaagcttcagtggcctcagaactccaggcccctcacggagatcaccctgaacaatgcccagtttttcatgcaggttttgtcctatgaccagttaactacatgttcaataaataaatgtcaaagaaataaatgcgtgaaaaggcaaccagttcatcatcttatgattaggttttcttgattagggatgtgtttagtacagctgaatgaacaagttcacccagctgctggtgacagaaacccaactcaaactagctgatgaaaaacagaactatacagatcaatgaatctctccccctttttcagyctcatagaactgaaaaaaacaaacctaaatacagtcacccaagtgatgtcaggaatctctcatggtattggtctctgctttc

SEQ ID NO: 619787 - DNA, 424 bp, Homo sapiens
gaattcattaatagtgattcaatgaagggactgcaaaattcagagggacacatgatctaaacctcataaaaaggatcactgagggaaaccaaatagaaatatgtttagtaaaatgtagctgaagcttttgctggatattggactagaatctggaaaaagasacaaattttcagtcagatccaagtttctgtttaaattggaggaaggcttgctgtgcgtgacacaagcctaccaagacaactgccatggccttctagtccattagtacataaccccacaagcagcaaacaaggctcagcatatgagcatgaggccagtcttgtgtgccaagttagcgagaaggttccttggagtggtgaacccatgtaattaattgtattcttattcctaaggactgatcttgctagacagagccaagtctgca

SEQ ID NO: 619788 - DNA, 541 bp, Homo sapiens
agtggtgaacccatgtaattaattgtattcttattcctaaggactgatcttgctagacagagccaagtctgcaccacctaagcctaaattgggtaagaattcagtagccagcaaatcttagttattaaatagtcactgaatccccattacaagtgatttaaatgcccattcacagtttcaataatgtcatcccagagttattctaatcatctcctaatggatttactagttttctaatttcttttactcccttttatgcatctgaccccaagtcaaaattgttatcatcaacaatacttattatcagcattctcaaaagctttgatgccatcaaaacccttaaatgaaattaaaagatcaaatcatgggctttaaagttatctragagccactgttcctcttcttccacgtttccatcttacttgttaaccagccaagccaagctccttagcacagaattgcatcaagagttataaaagtggccaaggatcagtgtttgtctctgtgaccaggccaactctgggagtgtgtcctaaggaaa

SEQ ID NO: 619789 - DNA, 594 bp, Homo sapiens
ttctttcaaatctaaattctatgatcattaaatcttaaattatcaataagcctaatttttgtgtgttttaacatgaaaatttctacatgaaatttctcattatcatattaaaaactgatctaagctcaacaatttaaattaataagcacttattgttttgttttgtttgttgttgttgtttctagagacagagtctcgctgtgttgccaaggctggtcacaaactcctgggctgaagtgatcctgccacctcgggctcctgtgtagcttggactaaaggtgtacaccaccgtgtccagcaaacatttatttaataatttaatggcacattaatgggacttattaaaagtgaatggtatacaaagacagacattgactatcattatactatcttctttattacrtgggcctttttaaatatctttctaattgaaaaataaatgcatattgattattgaaaatttacaaaataaactaaagacaaaaatattaccaccaattccaacaatcattaattatatataacatatatagtattaatatattaactaatatatatataattaatataatatatatttatgtattatctata

SEQ ID NO: 619790 - DNA, 432 bp, Homo sapiens
agcttggttggggatattctcatggatgataacctgaaatgtattttccaagttgcttccattctcttcatctctttcagaggcacaaaggagttgttgacttggtctctttacatgatcccatacttcttggaggtttcattcattattttaattttttttattcttgttaactatcttatttcagaaattagtcttcaagctctgagattctttcctcagcttggtctattctgctgttaatacttgtgattgcattatataattcttgtggtgtgtttctcaactccatcaggtcagttacattcttttcyatactggctatttttttctgtcagctatcattttattgtgattcttagctcccttagattgggtttcaacgttctcctaagtttcaatgatctttgttcctatctatattctgaattc

SEQ ID NO: 619791 - DNA, 507 bp, Homo sapiens
ttttgtgttcaatgctgtctgtacccattgcttgatttctgccctagttcaagctttagcatttcatggttgatttaatgcaatatcctaagagctgatctccctgcctttgagtgcctcttgtttagttctacyttaacgctcaatctgtcatgctggtctcctttagttcctaaagtgtgcctcctcaccgtcattaaatggagcccagcctccttatacaagggcctccacttttctaaaatctcctgctacccactttcataaaggctcagtcctgggccgagaagtaagaaagaaatcctgaatactcttcaacagtcatctaaattttttcataacatgagtgcaggctatactgtgggaaattagcaagagcttagccaagataaaaactaaactccatgaagatgaagatagcaactttcttacaaatctagcactttatacataatacactttatatagttaatgatttcaagtttgaccagcctgaacattgacagt

SEQ ID NO: 619792 - DNA, 562 bp, Homo sapiens
aagcccagatgatctatgaacacttcctttccaatttggatgcctctgtctgtttatttttaaacctaaaatagatttcaacatttctataaaagataaagtcaatagaggaagtgattaaagatgggggtgggtgaaactatccatggaacccatgtactggcattagcctagtattcaaatagcagcttctgttacctccatccaccaggatgctccaataaagatacaagagttacctgtatggttgagtttgagaattaatgagatcccagtggagcagaaagacaggaaatgctctgtttggggctaaaaagttggaaaacccaaagtgactcttttccagtgtgttaacagttcctacctgcagagatgctacctggacacacagacagaggcacaaacctcccggagtggrtgagaaatctgcgtgatgggcatgcagtgcacagaggacaacatgaccaatgacctcttcatcacagctatctactatagagggcacaaaaatgaaatggtggacaaaaatacaaggcccaacattacaaactaaacaatggtt

SEQ ID NO: 619793 - DNA, 531 bp, Homo sapiens
gctacacacccaatctcccttgttctaaagctcattaaccagaaaacctccaagcggagatatatgcawattcataaaagcaaggatcccatactggagcatataggtgacatcatcattggacctggtgtgttttttggggggtggggtagggacagggtcttgctctgttgctcaggctggaattcagtggtgcaagtgattctcctacctcagcttcccaagtgactgggactacaggcatgtgccaccatgcacagctaaatctttaatttgttgtagagaggaggtctcccctacgttgaccatgctggtctcaaactcctggactcaagcgatccacctgccttggcctcccaaagtgctgggattacaggcataagccaccgtgcccagtcccaatccctggtcttgatattgatgtttcacgatcccttaaacatctgggcaggcatgtaagaatgtgggtcactaaacaagtattagcatcttcacaacgagaaagaggtcttttgcaaggtactctacagt

SEQ ID NO: 619794 - DNA, 531 bp, Homo sapiens
gctacacacccaatctcccttgttctaaagctcattaaccagaaaacctccaagcggagatatatgcaaattcataaaagcaaggatccmatactggagcatataggtgacatcatcattggacctggtgtgttttttggggggtggggtagggacagggtcttgctctgttgctcaggctggaattcagtggtgcaagtgattctcctacctcagcttcccaagtgactgggactacaggcatgtgccaccatgcacagctaaatctttaatttgttgtagagaggaggtctcccctacgttgaccatgctggtctcaaactcctggactcaagcgatccacctgccttggcctcccaaagtgctgggattacaggcataagccaccgtgcccagtcccaatccctggtcttgatattgatgtttcacgatcccttaaacatctgggcaggcatgtaagaatgtgggtcactaaacaagtattagcatcttcacaacgagaaagaggtcttttgcaaggtactctacagt

SEQ ID NO: 619795 - DNA, 541 bp, Homo sapiens
tgttgtatttgttactatatctgggggaaaatactcagatgtagaaaagtggaatcctgtaaaacgttaagaaatacatcccctcaaagacttctgctttaagtgacagcattttgagggtttttgtttctcatttttccccgggggtggggggtgtgatcacagctggtgtcacagtggcggtccacrtgcacacaccgggagccgcctctataccgttatctgattagtgtaacaaggcctggttcatctggtcactggctgacagttttaaagcagctagccccagagtggcaaatgccaaggtcagagcacccagctgcttcctgctccattgctgctggtgtaaatatcctcaactctgggtacacaagaggtgtgaacagaaattacttaaggctggctgtggtggctcacttctgtagtcccaagactttgggaggctgacgtggaaggaagcttgaagccaagaatttgagaccagcctgggcaacatggcaagaacctgtttctacaaaagcattttaaagaactatctggc

SEQ ID NO: 619796 - DNA, 513 bp, Homo sapiens
ttattcttctcttccaattaatcttatgtgactggtcttttaaccttcaacatctcaatcacctcctctatcttggggcagctcaacacgggggcatcagtctgaggtagaaagggccttcctgcatctgacaagcaacacatctgaacctccttctgcgaggtgaggagaaaggaaggtcaaacaatgtaagaaaagctatctcwatgtacttagaaaatagaaaatgaaatggtttgaccttttctgtggcactgtacagagctaacccagaaagaagctgccttagattattacaaacagacaattggcatacaatttaatactcacctttcaaatttagaagtagatttttcttgtccctcttgcacctggttatgggggggataaaaatatccacccacccattccctgcacacacacattatcctaatgctttgaagagcaggcaatggacatactccgtctctgagggcacccagcaactggccccagaaaacactcagaaaaagg

SEQ ID NO: 619797 - DNA, 484 bp, Homo sapiens
atggtataaaccataaagaatgagaatttactagataggattgctaagaacatcggaaaatgaagtaaaggttggggaatccttatttgacagcctactcaaagtaaggcattgtagaagacacaaaacattaagacttaaattgcttccagakaaaagacattaaaggttcatataaaaatgtaacagcataggcagaattttatgttctgaaaactaacatcacttcctcagcacatgccacagctccccgagcggtgtaccccaatttcttcttcagccccagagactgagaaccaagtcttctgcagtcccccagctcagtctaacaaagaggtactgagagttgtggctaactgaatttaacctactctatgccaggcaacgtgctaagaattaaggtagaagatacacacgtggtttctgcactcaagggatttgtttgcagtctgatgaagtaaatcttattattctatttagtgaa

SEQ ID NO: 619798 - DNA, 484 bp, Homo sapiens
atggtataaaccataaagaatgagaatttactagataggattgctaagaacatcggaaaatgaagtaaaggttggggaatccttatttgacagcctactcaaagtaaggcattgtagaagacacaaaacattaagacttaaattgcttccagataaaagacattaaaggttcatataaaaatgtaacagcataggcagaattttatgttctgaaaactaacatcacttcctcagcacatgccacagctccccgwgcggtgtaccccaatttcttcttcagccccagagactgagaaccaagtcttctgcagtcccccagctcagtctaacaaagaggtactgagagttgtggctaactgaatttaacctactctatgccaggcaacgtgctaagaattaaggtagaagatacacacgtggtttctgcactcaagggatttgtttgcagtctgatgaagtaaatcttattattctatttagtgaa

SEQ ID NO: 619799 - DNA, 484 bp, Homo sapiens
atggtataaaccataaagaatgagaatttactagataggattgctaagaacatcggaaaatgaagtaaaggttggggaatccttatttgacagcctactcaaagtaaggcattgtagaagacacaaaacattaagacttaaattgcttccagataaaagacattaaaggttcatataaaaatgtaacagcataggcagaattttatgttctgaaaactaacatcacttcctcagcacatgccacagctccccgagcggtgtaccccaatttcttcttcagccccagagactgagaaccaagtcttctgcagtcccccagctcagtctaacaaagaggtactgagagttgtggctaactgaatttaacctactctatgccaggcaaygtgctaagaattaaggtagaagatacacacgtggtttctgcactcaagggatttgtttgcagtctgatgaagtaaatcttattattctatttagtgaa

SEQ ID NO: 619800 - DNA, 491 bp, Homo sapiens
ccccttttttgactgaagagtggaaggcaacttasagtgtttcaccatcagtgcctgagtcagtcagaggcattatgctaatgagcccacagctgaaaataaagaagttaggaaaagggacacacagcattcaagccctccaaaaggcattgaggaagtcaagagatctcacttactaccaggccaggccagaagtgactctcaacgtacagcgcattcctaaatggcactggggagacgggaagctttgcagctcagaggaccctttgcaggtccttctgcatatactgctgaggcccttatccttttcctctgatgttgctgatctctagatcaagaataggcaggtgaaagaacacgtgccttggcacctgtgcccagtgcctggagaatttgctggatctgccgctctgttaccctttctctttccctagtgcaccccccagagctggttccaaccaaaatggtagcacacacatacatgcacacca

SEQ ID NO: 619801 - DNA, 575 bp, Homo sapiens
taaagctcaagctcacaagtaagattaacccagaaggctctgaatgatgtgactactgcctaactgctcttcttcctcctcattttactccatctttgtcccatctcaaacgtatttatatttcaaataagacaacagtgaatgcctcatagtacaatgacataaccaaatgctatttcttttactggaatccctttctcctcccttgtctagctaacttctatttattctgcaaagcaaaattctgaatttgatatatgctttgaggggtttcttttcatttttgtgtcagtagcagaaataggtttgcccaaatataattctactcttctctctgatcaccctcaattcaacagttcatatgaaaaaactggagaactgggctgggtgcagtggctcacaccagtaatcccakcactttgggaggccagggcgggtggattccttgagctcaggagtttgaaaccagcctaggcaacatagtgaaacactgtctctaaaacaaaaacacacaaaaaattagctgagtgtgatggtacatgcctgtaatgccagctactcaagagtctgaggca

SEQ ID NO: 619802 - DNA, 538 bp, Homo sapiens
tgtgcattttatgagatgtacaagatacatatagtaccatggtgaaatcctgcctctgtaaactgccctaagcccactgatgtatatctccattaaagttccctggaatggccaaactaggttttttaatctgaataatggaggttatattyattgtcttcatttccctctttctcagtttctttgcttccttgtgttttagtacagtttcatccttcttttgtcaaggaaaagatatgaaacaaatcttcaggctcacacttaccagctgcatttgagtgtttattctcagattcattaatggccagacagagaggctggctaggaaagaaagtaaagtatgagaaacttcagccacttgaagtccaaaatgaatgtgaagcatctctgaaactataatctgtgtcaaaggaaaatcagactataattaaaaggaagaaagaaataggccattatccacaacattttgtttaccatgtaaaagaggaacacaggctttccaggaaataagtaaattgtgggtaatttaagaacagac

SEQ ID NO: 619803 - DNA, 516 bp, Homo sapiens
atatatttgctatatatgactctctgacgatctcaaaaataggcaaattcaccagctgtgtgtgctgacttgtgaaaggaataagagaggcccttagctccatggtccattatcagtactgctatgcatgtgacttagctgcatagtttaccttgcaagagagggcagggcagtaggcttcaagtcacagagcaagatcagcctgaatactttccttttgtaaacgtgcactggatacaactttacccaatccaatttgagctgcaaaattggacagtaaatttcagaagagcagcagcttyacctgtcagattgttaacttaccatttgcctcagctcctcctgaaccagatgaacaatttttcctgtcatgctttttacatttctgttcccaatctaagcatgaaagagggggtgttagagcgggtaaaatgaaaaacgatagtgggacagcaggcattctagaaatcagcatgtatgagccctttattcatataacccattgtcattgggtat

SEQ ID NO: 619804 - DNA, 516 bp, Homo sapiens
atatatttgctatatatgactctctgacgatctcaaaaataggcaaattcaccagctgtgtgtgctgacttgtgaaaggaataagagaggcccttagctccatggtccattatcagtactgctatgcatgtgacttagctgcatagtttaccttgcaagagagggcagggcagtaggcttcaagtcacagagcaagatcagcctgaatactttccttttgtaaacgtgcactggatacaactttacccaatccaatttgagctgcaaaattggacagtaaatttcagaagagcagcagcttcacctgtcagattgttaacttaccatttgcctcagctcctcctgaaccagatgaacaatttttcctgtcatgctttttacatttctgttcccaatctaagcatgaaagagggggtgttagagcgggtaaaatgaaaaasgatagtgggacagcaggcattctagaaatcagcatgtatgagccctttattcatataacccattgtcattgggtat

SEQ ID NO: 619805 - DNA, 526 bp, Homo sapiens
atatatcaactccatttatatgaaatgtcaaagaaaagcaaatctatagggacagaaaggagattagtagctgcctgggagtgggagaaagaattaaatgcaaatgggaatgagggaccttttttggagtgatggaaatgttctgaaactggcttgtggtgacaatcacacagctctgtaactgtgctgaaaacattagttgtacatttaatgtggataaattttatggtatataaattatagcacaacaatgttgttgaaaatacagacygaaaaagtcccaaataagatcatttttacaccatctcttctgctaaacatcccagccactatcgtctcttgcctggattattttaatagtctaactggaatctctgtttttagccttgactccttagaatttactctttatacggctagcagaaaaacaaattgcatcatgtctttgctcaaacagatccagtggttcccccagataaacccagagtccttccatggccaacaaagccctgcaatgctccacgag

SEQ ID NO: 619806 - DNA, 526 bp, Homo sapiens
atatatcaactccatttatatgaaatgtcaaagaaaagcaaatctatagggacagaaaggagattagtagctgcctgggagtgggagaaagaattaaatgcaaatgggaatgagggaccttttttggagtgatggaaatgttctgaaactggcttgtggtgacaatcacacagctctgtaactgtgctgaaaacattagttgtacatttaatgtggataaattttatggtatataaattatagcacaacaatgttgttgaaaatacagaccgaaaaagtcccaaataagatcatttttacaccatctcttctgctaaacatcccagccacyatcgtctcttgcctggattattttaatagtctaactggaatctctgtttttagccttgactccttagaatttactctttatacggctagcagaaaaacaaattgcatcatgtctttgctcaaacagatccagtggttcccccagataaacccagagtccttccatggccaacaaagccctgcaatgctccacgag

SEQ ID NO: 619807 - DNA, 493 bp, Homo sapiens
cagggactggatcttatgttccttctactagttctaattcagcaactgtgtgttgagcacagaccatgggaaagccctcttgtagatgctaaaggaaatatagagattaataagacatagttcctgctccaagaactcctgatctttttttgagrgatgagaagtttacaaatatctacaattcagggaagaataaaatgaatgccaaaagaaaggcctcgaggtttggaaaagccataaaattagatctggttcaaaggacaaggaaggtttcttggagaaagtagcatctgagatggatgctgatgatggcagaaggaagaaagaggaggcagagtgttgctctccaggcgcaaagaagagcctaagcaaagccactggaagaggaaagttaggatccatcaagtattctgttttggccccaagaatacttagtacggcatcttattcagagtaggtacttgatatggtttggctgtgtccccacccaaat

SEQ ID NO: 619808 - DNA, 493 bp, Homo sapiens
cagggactggatcttatgttccttctactagttctaattcagcaactgtgtgttgagcacagaccatgggaaagccctcttgtagatgctaaaggaaatatagagattaataagacatagttcctgctccaagaactcctgatctttttttgagggatgagaagtttacaaatatctacaattcagggaagaataaaatgaatgccaaaagaaaggcctcraggtttggaaaagccataaaattagatctggttcaaaggacaaggaaggtttcttggagaaagtagcatctgagatggatgctgatgatggcagaaggaagaaagaggaggcagagtgttgctctccaggcgcaaagaagagcctaagcaaagccactggaagaggaaagttaggatccatcaagtattctgttttggccccaagaatacttagtacggcatcttattcagagtaggtacttgatatggtttggctgtgtccccacccaaat

SEQ ID NO: 619809 - DNA, 493 bp, Homo sapiens
cagggactggatcttatgttccttctactagttctaattcagcaactgtgtgttgagcacagaccatgggaaagccctcttgtagatgctaaaggaaatatagagattaataagacatagttcctgctccaagaactcctgatctttttttgagggatgagaagtttacaaatatctacaattcagggaagaataaaatgaatgccaaaagaaaggcctcgaggtttggaaaagccataaaattagatctggttcaaaggacaaggaaggtttcttggagaaagtagcatctgagatggatgctgatgatggcagaaggaagaaagaggaggcagagtgttgctctccaggcgcaaagaagagcctaagcaaagccactggaagaggaaagttaggatccatcaagtattctgktttggccccaagaatacttagtacggcatcttattcagagtaggtacttgatatggtttggctgtgtccccacccaaat

SEQ ID NO: 619810 - DNA, 472 bp, Homo sapiens
cacctgtatggtatgtggtggagccagtgtacaatccaggcagagctaaggctcctagcaaccacacaagtttcttccccagagagagcaagagagagagagagagatcagatgatggcccctccctctttcatccactgcctatgatgggtttagttctccaatattctactctctcatctacctccccacccacccaaccttcaaccttccatccagtcttcagagaaagggaagtcactcttccttcatacaacacctggtgactccaagtaagataacctctgtctggccatgcggtcttttgtttccttattctrcacggtggaacttctttcaaatatttcattcagcagttccaccttgatgagacaaatcacaagttttggaaagaagcagattataaatccagtcttaacaattactctaggcagcacagtgtgacagaaagtcaacatacatcacttgtatt

SEQ ID NO: 619811 - DNA, 599 bp, Homo sapiens
ctacttttcctgaggacggcagcatttctacagagtgtatttctatacttctagatacccacccagcacaacttctgaggaggcagactcacattactgctctcaaggagccttccgtgatggtgtaggtcttgattctgctaaccggcagtcgctgggtagtgaggctcacacaggtcctcttatctgagacttcactccctacacctggtgaggaaaaaaaaacaacagacaattaaaaataaagcaattatccagatcacaggaacaatcatctgttaaattactctgagaatgttgtgagaatttaaggccatttgctttttgggggaagagaggactgataggcatcccgaatctcttgcccgtcacagattcttagtaaatatttgactaatttaaaaactcaatcaacagaattgtttcaggaatttcatgctgagagraaataacaagatgttatcccgtctctgtgtatattttcacttagacatttgggacggctagcaaatgccccagtgacacgcattcattcatttatacaatggtgcctgttgtgtcccacatgttttactaagcagacattactcctgttttca

SEQ ID NO: 619812 - DNA, 565 bp, Homo sapiens
tattttcacttagacatttgggacggctagcaaatgccccagtgacacgcattcattcatttatacaatggtgcctgttgtgtcccacatgttttactaagcagacattactcctgttttcatagagcatatcttcycatgagggagccaggcagcagacaggcaaacagaaaagatcatttcaaatagtgcaacatgttacagtaccataagtgagatgacagagtaatgcgtgaagagtactctaggcaaggcaacattcagtgagggaaggaagcatgcttttgacagactaaataaaggtgttctcctttttaaatggtcaaatgtctctctctgtcagctgcctaagatgctgaaaggaaagatggccaaaggaaggaaagtggccccagaccctgccgtcgtgaggaagcaggaggctaagaaagtgatgaaaccgctgtgtgagaaaaggcctaagagttttcttaggcaggcattggacaggacatccagcccaaaagggacctccgctgctttgtgaaatggccccgctatatctggttccagctgcaaagagcta

SEQ ID NO: 619813 - DNA, 565 bp, Homo sapiens
tattttcacttagacatttgggacggctagcaaatgccccagtgacacgcattcattcatttatacaatggtgcctgttgtgtcccacatgttttactaagcagacattactcctgttttcatagagcatatcttctcatgagggagccaggcagcagacaggcaaacagaaaagatcatttcaaatagtgcaacatgttacagtaccataagtgagatgacagagtaatgcgtgaagagtactctaggcaaggcaacattcagtgagggaaggaagcatgcttttgacwgactaaataaaggtgttctcctttttaaatggtcaaatgtctctctctgtcagctgcctaagatgctgaaaggaaagatggccaaaggaaggaaagtggccccagaccctgccgtcgtgaggaagcaggaggctaagaaagtgatgaaaccgctgtgtgagaaaaggcctaagagttttcttaggcaggcattggacaggacatccagcccaaaagggacctccgctgctttgtgaaatggccccgctatatctggttccagctgcaaagagcta

SEQ ID NO: 619814 - DNA, 565 bp, Homo sapiens
tattttcacttagacatttgggacggctagcaaatgccccagtgacacgcattcattcatttatacaatggtgcctgttgtgtcccacatgttttactaagcagacattactcctgttttcatagagcatatcttctcatgagggagccaggcagcagacaggcaaacagaaaagatcatttcaaatagtgcaacatgttacagtaccataagtgagatgacagagtaatgcgtgaagagtactctaggcaaggcaacattcagtgagggaaggaagcatgcttttgacagastaaataaaggtgttctcctttttaaatggtcaaatgtctctctctgtcagctgcctaagatgctgaaaggaaagatggccaaaggaaggaaagtggccccagaccctgccgtcgtgaggaagcaggaggctaagaaagtgatgaaaccgctgtgtgagaaaaggcctaagagttttcttaggcaggcattggacaggacatccagcccaaaagggacctccgctgctttgtgaaatggccccgctatatctggttccagctgcaaagagcta

SEQ ID NO: 619815 - DNA, 565 bp, Homo sapiens
tattttcacttagacatttgggacggctagcaaatgccccagtgacacgcattcattcatttatacaatggtgcctgttgtgtcccacatgttttactaagcagacattactcctgttttcatagagcatatcttctcatgagggagccaggcagcagacaggcaaacagaaaagatcatttcaaatagtgcaacatgttacagtaccataagtgagatgacagagtaatgcgtgaagagtactctaggcaaggcaacattcagtgagggaaggaagcatgcttttgacagactaaataaaggtgttcycctttttaaatggtcaaatgtctctctctgtcagctgcctaagatgctgaaaggaaagatggccaaaggaaggaaagtggccccagaccctgccgtcgtgaggaagcaggaggctaagaaagtgatgaaaccgctgtgtgagaaaaggcctaagagttttcttaggcaggcattggacaggacatccagcccaaaagggacctccgctgctttgtgaaatggccccgctatatctggttccagctgcaaagagcta

SEQ ID NO: 619816 - DNA, 556 bp, Homo sapiens
tgggaagaaaaaagacaccagtctctatgacggcaaaccaaccactctttcaggragctaaaactagtaagcagaagagtattttttcagacgactgccacttgtgccataaagtgtactagaaacaaaaccctctgtggtacagaatccaaagcatttatggatttcctaagttggacattggccagactaaatctgcctaccaaagatagatgtaccagccagaaactgaagtccagtgtcagtggtcaaaagccatcctaaggagtctttccttgagaagccacctatggtagtggggacgatgaactgtaaaaccagattaaccaggatctttgtgggctcaagggatccactcacctcagtctcccaaagtgctggtattacaggcatgagccaccacatctggcctattttattattataaataacaatgaatgatttttatggaatcagccaggtctattattctctgctctcccatacttggcctcctccctatatctgaaatatcaggaggaagaagcatgcacatcactgcacatgattgatatca

SEQ ID NO: 619817 - DNA, 585 bp, Homo sapiens
gttggtggagtcatgcagcatttgtccttctgtgtccgcttattttacttagcacagtgttctctaagttcatctatactgctgcttatgttaagatttcattcttttttaagtctggataatattctattgtacataaatgctacattttctttattcattcatctatcaatggacatttaggttgttctctatcttgccyattgtaaataatgctgcaatgaacatgggaatccaactatctcttcaaaatcctgatttcaattcttttggatacatacccaaatgtgggattactgaatcatgtggtatttctatttttaatttaaatttttaaatttttaattttttgaggaatcttgtattgttttccataacagctaaacaattttacattttaaccaacagtgtacaagggttccaatttcttcacatcctcgtcagcactcgttatctattttttcttgatcatagacatcctaacaggtgtgacatgataccatgatacctcactgtggtttttatttgaatttccccaatgttaataatattgattgtcttattatacatctattagtaatttgt

SEQ ID NO: 619818 - DNA, 504 bp, Homo sapiens
tcttctttggttaggtgtctgttcagattttttaccctggttgtttaatcaggttgtttgttttcttatcgctgagctttaagagttccttctatatttggggtaacaagtcctctttcagatatatcttttgaaaatatttctcccactctgtagcttacttctcattctcttgacagtgtctttcacagaacaaaaatatttaattttaatgaagtccaatgtatcaacttttctttcatgtatacagtgcatttggtgacatatctaaagaaccatctccaaacccaaacacatctagattttttcctatgttatcttctaggtgtttaatagttttgtattttacayttaggcctatgatgcattttgagttcatttttgtaagaggtaaaagatctgtttctaaatttattttatgttgatgtcttgtttcagaaccatttgttgaaaagactattgaattgcctttacttatttgtcaaagaccagttgaccatattt

SEQ ID NO: 619819 - DNA, 543 bp, Homo sapiens
ttaattttaatgaagtccaatgtatcaacttttctttcatgtatacagtgcatttggtgacatatctaaagaaccatctccaaacccaaacacatctagattttttcctatgttatcttctaggtgtttaatagttttgtattttacacttaggcctatgatgcattttgagttcatttttgtaagaggtaaaagatctgtttctaaatttattttatgttgatgtcttgtttcagaaccatttkttgaaaagactattgaattgcctttacttatttgtcaaagaccagttgaccatatttgtgtgggtcaatttctgagctctctgttttgtttgaccaatctatttgtctgttgttttaccaataccgcactgtcttgattgctgtagtcactgagttttcagaagtcaccatagcaggggtcctagtgagtatgacccatgcagtatctcaaattcaagcttgtgcctctgatgagtgctgtgcggatacacctgtagacaaaatatgatttgagaattattcctgattaaagcctctt

SEQ ID NO: 619820 - DNA, 543 bp, Homo sapiens
ttaattttaatgaagtccaatgtatcaacttttctttcatgtatacagtgcatttggtgacatatctaaagaaccatctccaaacccaaacacatctagattttttcctatgttatcttctaggtgtttaatagttttgtattttacacttaggcctatgatgcattttgagttcatttttgtaagaggtaaaagatctgtttctaaatttattttatgttgatgtcttgtttcagaaccatttgttgaaaagactattgaattgcctttacttatttgtcaaagaccagttgaccatatttgtgtgggtcaatttctgagctctctgttttgtttgaccaatctatttgtctgttgttttaccaataccgcactgtcttgattgctgtagtcactgagttttcagaagtcaccatagcaggggtcctagtgastatgacccatgcagtatctcaaattcaagcttgtgcctctgatgagtgctgtgcggatacacctgtagacaaaatatgatttgagaattattcctgattaaagcctctt

SEQ ID NO: 619821 - DNA, 543 bp, Homo sapiens
ttaattttaatgaagtccaatgtatcaacttttctttcatgtatacagtgcatttggtgacatatctaaagaaccatctccaaacccaaacacatctagattttttcctatgttatcttctaggtgtttaatagttttgtattttacacttaggcctatgatgcattttgagttcatttttgtaagaggtaaaagatctgtttctaaatttattttatgttgatgtcttgtttcagaaccatttgttgaaaagactattgaattgcctttacttatttgtcaaagaccagttgaccatatttgtgtgggtcaatttctgagctctctgttttgtttgaccaatctatttgtctgttgttttaccaataccgcactgtcttgattgctgtagtcactgagttttcagaagtcaccatagcaggggtcctagtgagtatgacccatgcagtatctmaaattcaagcttgtgcctctgatgagtgctgtgcggatacacctgtagacaaaatatgatttgagaattattcctgattaaagcctctt

SEQ ID NO: 619822 - DNA, 593 bp, Homo sapiens
tggtaacatcagtgatcaggtaagccaggttccttgtcttagtttatctgctccctcacatgtttccataagttctgatgctaggctatgcaagtagaagttcaaaatgtctgttcagtttaaaggtttgcctttcaaaggggaaattgggaaagacaaacagggaaagaattagggatacaccctcatctggcatgcagaagataaacatggggatttcatratttgctttcaccataaagccctatacttaaactctttaaaactgtagcaggcttaaaatataaaagaaagtatttttaccatttttactgttcattgccaataattgctatggaaaagaccatacacttagaatcaccgtgggaaattacaaggacagaatttcctttccaaaggcccacgaagaaggatttttttcagtatcccgtaaaaggctatattttttatttgaacatagactaaagttttatgataagaaaatttctacagacaggtttatgcccaaggagaaaatatccatgcacaatcacagaactcaaaaatgattggattattcctgatagctcaaagcaatggttggaaaagctgaa

SEQ ID NO: 619823 - DNA, 593 bp, Homo sapiens
tggtaacatcagtgatcaggtaagccaggttccttgtcttagtttatctgctccctcacatgtttccataagttctgatgctaggctatgcaagtagaagttcaaaatgtctgttcagtttaaaggtttgcctttcaaaggggaaattgggaaagacaaacagggaaagaattagggatacaccctcatctggcatgcagaagataaacatggggatttcataatttgctttcaccataaagccctatacttaaactctttaaaactgtagcaggcttaaaatataaaagaaagtatttttaccatttttactgttcattgccaataattgctatggaaaagaccatacacttagaatcaccgtgggaaattacaaggacagaatttcctttccaaaggcccacgaagaaggatttttttcagtatcccgtaaaaggctatattttttatttgaacatagactaaagttttatgataagaaaatttctacagacaggtttatgcccaaggagaaaatatccatgcacaatcacagaactcaaamatgattggattattcctgatagctcaaagcaatggttggaaaagctgaa

SEQ ID NO: 619824 - DNA, 381 bp, Homo sapiens
atgcaaaatacttagaagagttcctggcatgtattaaacactcaatatttattggttcatgttatcaatatagtgttaatattatgcaaaatcttacgtatgtgagaatgaaagttcttaaaagaatactttagagtaatgttacttgaggaaaattagtaacttaattcagtaaagggagaacaaaacaatttcttttgcttaaataactggacacctgaatgggagtttttcctgatttaccaggaaacttaaacttttcawcttttgtgtttgaggtctggtttttgaaaacaaaatcctagccaggaagagtctgttcctatatgatttgtttctatttgaagagggaatgtggaagtggagtgtgggacaggaacc

SEQ ID NO: 619825 - DNA, 572 bp, Homo sapiens
tctttacctcacaacagaacatatgggacatcacagccaccctggtttccatgttctctgttcaaagtcccagccagactgaaactggaatctctcaagccccactcaacattcctgggggacaggggtaaacatttgtataggatggtagaaggggtagttttcagaaaattggaaggagaaacaagcagacaaacaataggtgtctgacaaaagtaacttatcaaagaccaaacaaacgcgcaagcaaaaatgaaaacaaaacaaagaggaycaagagggcacattctgaaactcaaattgagatcatcagattcagcaagtaacagacagccactgttaaagcaaactccccctttccttctgtcaataaaattgaggcaatgtggagatttgtttattccagaaagaatcaaaagtgacaataccttttctgtaatgttttgaagggtgagggcaaggaagggtgcaggggcagagtggaggtggcctcaaaagctttaaccctaaacccaagctctgatttgcagatacttcaccctaaaagttaatccatgattccatcaaactag

SEQ ID NO: 619826 - DNA, 572 bp, Homo sapiens
tctttacctcacaacagaacatatgggacatcacagccaccctggtttccatgttctctgttcaaagtcccagccagactgaaactggaatctctcaagccccactcaacattcctgggggacaggggtaaacatttgtataggatggtagaaggggtagttttcagaaaattggaaggagaaacaagcagacaaacaataggtgtctgacaaaagtaacttatcaaagaccaaacaaacgcgcaagcaaaaatgaaaacaaaacaaagaggatcaagagggcacattctgaaactcaaattgagatcatcagattcagcaagtaacagacagccactgttaaagcaaactccccctttccttctgtcaataaaattgaggcaatgtggagatttgtttattccagaaagaatcaaaagtgacaataccttttctgtaatgttttgaagggtgagggcaaggaarggtgcaggggcagagtggaggtggcctcaaaagctttaaccctaaacccaagctctgatttgcagatacttcaccctaaaagttaatccatgattccatcaaactag

SEQ ID NO: 619827 - DNA, 485 bp, Homo sapiens
ttggtgatttctctgctgtcagtcaggacagaatgtctgtggtagaccaccctgaagctgaggttgggagcaggcagtggagcaggtgagaaataatttctattttgagagcastgaggggaggagagctaaagacagaggaggaagtctctgacctgcgtcttggcccccaagtttctcaccctttgctgctttctgacttaaaatcttactcattaaactttccatgggtgactctaaggttctgagctggagattcccctgggtgtaggaccaccagtgtacccacctaaccagcagcctggagaggggcccatctgcttgggataggccatgagagagaaatcggtggtctgagtgagctactgtatgagtggaaaagctgacctttgctccattcaccaccacataaggctcacattttgactctctcttcatgaaacttccccatctgaggcagggttccagcattttaattcagtgtg

SEQ ID NO: 619828 - DNA, 485 bp, Homo sapiens
ttggtgatttctctgctgtcagtcaggacagaatgtctgtggtagaccaccctgaagctgaggttgggagcaggcagtggagcaggtgagaaataatttctattttgagagcagtgaggggaggagagctaaagacagaggaggaagtctctgacctgcgtcttggcccccaagtttctcaccctttgctgctttctgacttaaaatcttactcattaaactttccatgggtgactctaaggttctgagctggagattcccctgggtgtaggaccaccagtgyacccacctaaccagcagcctggagaggggcccatctgcttgggataggccatgagagagaaatcggtggtctgagtgagctactgtatgagtggaaaagctgacctttgctccattcaccaccacataaggctcacattttgactctctcttcatgaaacttccccatctgaggcagggttccagcattttaattcagtgtg

SEQ ID NO: 619829 - DNA, 565 bp, Homo sapiens
aagtgaattgttgttagactctcacccagctgacagaattactaatataggagcatcagatactccaragagagttattcaaggaatcagaaataaagtcttagctgcaccactgacccactgcatcatctcagacaagtcacttaaatgaggactcaatttcccctctaaaaaaatggaagagatcatataaatcctgcctaccaaatatgatttcaaaatgaaataagacatgagaaagtgctttgtatgcagtaaaatattgtagagggtaaattgttattgttgttagtggctctgcaagtatgtagagtcagttaaggcttctcttgcatgttaaaataatatgcctctgttctaatcttcccttacaagtacactactttctctacccacctagcaggcaataatgggcagcaatatctgtaatgtttgcaaaagcatatgtggtaaaatttatattaataccagaaaaattattatttctaatgaagttgtttttcttgtggtgaaagtatgcatagactgaagtttcatacagctttcaacaactaggaggggtgtg

SEQ ID NO: 619830 - DNA, 565 bp, Homo sapiens
aagtgaattgttgttagactctcacccagctgacagaattactaatataggagcatcagatactccaaagagagttattcaaggaatcagaaataaagtcttagctgcaccactgacccactgcatcatctcagacaagtcacttaaatgaggactcaatttcccctctaaaaaaatggaagagatcatataaatcctgcctaccaaatatgatttcaaaatgaaataagacatgagaaagtgctttgtatgcagtaaaatattgtagagggtaaattgttattgttgttagtggctctgcaagtatgtagagtcagttaaggcttctcttgcatgttaaaataatatgcctctgttctaatcttcccttacaagtacactactttctctacccaccyagcaggcaataatgggcagcaatatctgtaatgtttgcaaaagcatatgtggtaaaatttatattaataccagaaaaattattatttctaatgaagttgtttttcttgtggtgaaagtatgcatagactgaagtttcatacagctttcaacaactaggaggggtgtg

SEQ ID NO: 619831 - DNA, 537 bp, Homo sapiens
ctaattgttgagcaattattacgtaacaggctttctgcaagtgccagggatccagagataacaagggaatctcctactctcaaagagtctgccatctagtgggagacgcaggaatgtaattgagtaggagaacacaatgagattcgttgcagaacagccatgagaacagaacaaagttctaagagagcataaaggggtggcacaacttaattttatcaaaaaaattcaggaaaacttatacagagaggaggagtttacaagtaactatgtagggagctgtcatrggtattccagttaaaggaaacatgtgaggagcataaaagaggctggcccattgggttggctgcacatgtatgtgtttgttaaggtttgggagtgtgtgagtgaatggtggaaggtgagtctgaaaggaaagcagtactagatcttgagcattcttatatatcacaatgaaagatttgaaatacatcctgtaggcattggaagttagcaaagaggttctcagtagggaaatggcatgattagattgaggcttta

SEQ ID NO: 619832 - DNA, 587 bp, Homo sapiens
atcagggactcatgatccatggttgtggaagcctcatgtcacactggatgtcacatgaggtgggatggaacacagtgaccaccccacctcatttcctttacagcttccgtggtgggccatggcagtgaacagccttcaggcatgtctacggtggaagatctgaattcaggctggtggcaggagacaacacaaccacgttttcttttatgcatgcatttggtttaattgacacattaaccacagacaaaggggtaaaggccacaaggcgwtaggttagtatgaacagggaaagggacattttttttttttaagaaaaataaaagcatcagtattgcaaagactttccatgatcctatacccacctcgaaagccccctctcaccacaggaagtgcactgaccattggaggcataaaagagatcctcaaagagcccgatcctcactctccctgcacagctcagcgggacctcagccatgagacttctcatcctggccctccttggcatctgctctctcactgcatacattgtggaaggtaagtggagaagctgtctgtgagataaagaatagggaggcaaggcaggtggg

SEQ ID NO: 619833 - DNA, 587 bp, Homo sapiens
atcagggactcatgatccatggttgtggaagcctcatgtcacactggatgtcacatgaggtgggatggaacacagtgaccaccccacctcatttcctttacagcttccgtggtgggccatggcagtgaacagccttcaggcatgtctacggtggaagatctgaattcaggctggtggcaggagacaacacaaccacgttttcttttatgcatgcatttggtttaattgacacattaaccacagacaaaggggtaaaggccacaaggcgataggttagtatgaacagggaaagggacattttttttttttaagaaaaataaaagcatcagtattgcaaagactttccatgatcctayacccacctcgaaagccccctctcaccacaggaagtgcactgaccattggaggcataaaagagatcctcaaagagcccgatcctcactctccctgcacagctcagcgggacctcagccatgagacttctcatcctggccctccttggcatctgctctctcactgcatacattgtggaaggtaagtggagaagctgtctgtgagataaagaatagggaggcaaggcaggtggg

SEQ ID NO: 619834 - DNA, 587 bp, Homo sapiens
atcagggactcatgatccatggttgtggaagcctcatgtcacactggatgtcacatgaggtgggatggaacacagtgaccaccccacctcatttcctttacagcttccgtggtgggccatggcagtgaacagccttcaggcatgtctacggtggaagatctgaattcaggctggtggcaggagacaacacaaccacgttttcttttatgcatgcatttggtttaattgacacattaaccacagacaaaggggtaaaggccacaaggcgataggttagtatgaacagggaaagggacattttttttttttaagaaaaataaaagcatcagtattgcaaagactttccatgatcctatacccacctcgaaagccccctctcaccacaggaagtgcactgaccattggaggcataaaagagatcctcaaagagccygatcctcactctccctgcacagctcagcgggacctcagccatgagacttctcatcctggccctccttggcatctgctctctcactgcatacattgtggaaggtaagtggagaagctgtctgtgagataaagaatagggaggcaaggcaggtggg

SEQ ID NO: 619835 - DNA, 549 bp, Homo sapiens
agtgatgtctccatacatgtataccatgggtaagatcaaattaggggaattagcatatctatcaccttagacatttctatttctttatggtgaaaacattcaaaatcctctcctagctactttgaaatatgcaatatattattgttagctattgctactctactgtgcaacagaatgccagaactaattcctcttacrtaactgtactttgtacctactgaacaacctctcttcatcctccccactccctcttcctccccagcttctggtaaccacgattctactctttagttttatgagatcaactttttagattccacatgcaagtgagattatgcagtatttgtctttttgcacctggcttatttcacttaacattatgttctccaggctaatccatattgctgcaaattataggatttcattctttttttatggctaaatatcattcaactgtgtaaatacaccacattttctttttccatttatacaatgatgaacacttagctcagtttcctgtcttgggctattgcaaataatgctgcaatt

SEQ ID NO: 619836 - DNA, 660 bp, Homo sapiens
ctgctgtttcttagctgaatgaccttggagaagttatttaactctgagtttggataccgagcctgtagagggaagattaataattcctaccctagggatttgttgaaaagataaaatgagaaactgtgtgtaaaaacatgtggctccatgcctagctcatagraggaactaagaaattgtgttcacttccactttgccataatttattgtgggcagcataacaactgcctcttctactctgtaggaaagagagcccaaaagagagtgttcttcaagaagctttgagttcaaatgggatgagagaagatttagaggaagagatcagagcctggagagggagcgtcactagcatagagggtaatggtcagccagagatcccaagtgaggatatggagtctgaggaacaggcaggacatagacctgtcttttgcagatgtctccaaggctgtggtttttgcaagtgatttttccaccttatccagagtgagttggaagagctcccgataacctccaaattcaaaacgtatggacatacacccatctctggagccagaaaggaggttttcaaactttaggcccaattcaggcatgaactatccctaaatatgtggggtaggaaaatgttcatcaaggcataagcactgcagggaaagttaaagg

SEQ ID NO: 619837 - DNA, 580 bp, Homo sapiens
ctttccaccttgattgtgaggcctccccagccatatggaactgtaagttcattaaacttatttttcttcacagtcttgggtatgtctttataagcagcatgaaaatggactaatacacaccccaaagcctatcaacatatttaggttgcccaatctcatctgtctgccacagtgatggccaggagtatgagcatgtgtagtacatctctccatgcttccctagaactgagaacttgaagagcccatcttggcatccttcttgggcagactgtcccacataccatcttttttccaatgctgttttccttattcgtgtggtacaagcacaggtcatagagtcagcttcaaaagcagaaactagctgaagaatgaaatgccaatagtttcccttcatgcccaaatccccaatctttacaatccttggacagccttcttcacttgcctgggcttcagggagggaagtctytcccatgggcaggaaggacagggtttctcttaattccttctgcatcctaaggtgacctccacttctctgggcctattatattggcaaaggagggaacagggattggtaggagag

SEQ ID NO: 619838 - DNA, 562 bp, Homo sapiens
tctgcatctaaagtgagtttcttatagacagcatatagttgagtcactttttttaatctattcttccctctgctacaataagatattattctacacacacactaggatggcaatagttttccttataaaagaaagaaaataacaagggttggcaaggatatgaagagattgaaacccttatatattcttggtagaaatgtaaaatgggacagccaccatggaaaataatttgctagtatctccaaaagttacacatagaattaccatataacccagcaatttcacttcgaagaatatacccaaaataattgaaaacaggtatacaaacaaatacatggacataaatgttcatagcagtaccatttacaatagccaagaggtaaaaacaacccaaatgtccatcaatagatgaataaatagataaggccaggtgcagtggctcatgtctataatcccagcaytctgggaggccaatgtgggtggatcacttgagcccaggaaattcaagatcaactgaggcaacatggtgaaaacccactgcaaaaaaatacaaaaattaggc

SEQ ID NO: 619839 - DNA, 628 bp, Homo sapiens
tatctttttccttcctttcactttcaacctatttgtgtctctgcatctaaagtgagtttcttatagacagcatatagttgagtcactttttttaatctattcttccctctgctacaataagatattattctacacacacactaggatggcaatagttttccttataaaagaaagaaaataacaagggttggcaaggatatgaagagattgaaacccttatatattcttggtagaaatgtaaaatgggacagccaccatggaaaataatttgctagtatctccaaaagttacacatagaattaccatataacccagcaatttcacttcgaagaatatacccaaaataattgaaaacaggtatacaaacaaatacatggacataaatgttcatagcagtaccatttacaatagccaagaggtaaaaacaacccaaatgtccatcaatagatgaataaatagataaggccaggtgcagtggctcatgtctataatcccagcactctgggaggccaatgtgggtggatcacttgagcccaggaattcaagatcaactgaggcaacatggtgaaaacccactrcaaaaaaatacaaaaattaggcatagtggcacacacctgtagtcctagct

SEQ ID NO: 619840 - DNA, 583 bp, Homo sapiens
aaatttttcttgtagtagctggtagcagaatcaaaggagtaattatgtgtgctgattggggtctgaggcctaaaagttaattcttttttgtctactgatctatggattgcatctgaatgcatcgatttaactgaaaatattttttaaactctcattctagttagcaatttcaacttccctcactaaaccattacttccaatatggagataaatagatgaatctgaaggttctttccaagatataattttaaaaaggaactttggcctggaaatccaaaggcctgggttccagttctggatctgccacttattagcatgtaattttaggcacatccacttaaccatgctgagmcctagtttcttatctgtaacacaggaataatgatatcttctgtgcctaatttacagagatgccatggtagggaagttgttattagaaagtgctttgtaaatctcaaggtactcaacaagcataagccattaggcaagatgaagcaaaatgctatgctgaaaagatcaagagtaggaaggagattttcatcagggctccaaacaccaagaattgaatcatgggggaagttca

SEQ ID NO: 619841 - DNA, 582 bp, Homo sapiens
tctcacgattagtgagaaagtacacccttcccaccccctgccatctaccaatcccatttacaaagacgccccatgtctttcaaaacagagcccgcaaattaccatgaaaatctgccccaacagactgtgctcaagtagaagtcagagcttttgttagcaggggtttgtgggggatggcaccatagcgaacacagttaagcctcactaattccctgaatgagggaaaggccaatcttgatttgtaagaagcttgaatttgaaaatatgtttaaagaaatgccatgttattatttctaaaaacctgcagtcaaactgctggctggggtctgtgctctgagctgcctagactctcaaggcctcaaacaaacagataaggactataattagcatattggtaatttgaatgcaaagtgcacttagagtggcgctttaaaaacgtgtgttagcgtactctcctagcaggctgtcacttttctatgtttatagtattaatttgcctagcaacttgccccctttcctttttggcagtaaactttagcctcacatgtcagaattcrttaaattttccatattagcagctgg

SEQ ID NO: 619842 - DNA, 558 bp, Homo sapiens
attctcccatctcagtcccccaagtcactggaactacaggtgtgtgccaccacacctggccttttgtattttttgtggagacagggttttgccatgttgcccaggctgtagactttgttttttagagtatgtttagatttacagaaaatttaagcccacagtacagagttcccatctccccattattaacatcttacatttgtagggtacattagctacaattaattaaccaatattgataaattattattaactgaagcccatacttaattcaggtgcctttagtctttatctaattatctttttatctttcaggawcacatccaggacactacattacatttatttgtcacgtttccttgggtgctcttcattgtgacagtttttcagactttttttatgaccttgacagttgtgagaattattggtcagttactttgtagaacgtccatcagctgggatttgtttgatgttttcttttttgttattttattttttagtttttaaatattttatttcatttcctgcccacacatggatgtctgatattttcatgat

SEQ ID NO: 619843 - DNA, 610 bp, Homo sapiens
tcctggtgttgaaggatgaggcagatggggtgttctagagaactagagagtttattttggcttcaaagctggttactattataagagatagaaaactgggcaatagcaagctgcagcagaagggacggcctcaacagatgagcctgatgtattattttaagaactttcttccaaagccaagtcataacacctcattgctttgtacgaaataaaaacacactttctttacaggacttgctttccttgaaaatgataaagatcaattgcatgaataggkattttattttaatataaatatgtggagctcttaattaatttacacaataaaatatattgttatgtgccttgttggtatagctgtatcactatacaagtggcattctgtaactggtcctctggttccattaaaaaaatttggttgtggccaggcatggtggctcacgcctataatcccagcattttgagaggccaaggtaggcagattacttgaggtcaggagttcgagaccagcctggccagcatggtgaaaccctgtctctactaaaaatacaaaacttagccagatatggtggcatgcacctgtaatcccagctacttgggagactgagga

SEQ ID NO: 619844 - DNA, 458 bp, Homo sapiens
taaccatggagttaagaatccttcaaatacagagaatcaggtgtaaggcagcttaaggagctcttatttttaaccttttttcgccccccaatgaaatatacaccgcgtgttgatgctttggaacactgagaatgaacacagatggtaaatcaaatttagggaggagggatgtgctctataactactaaatgccgacttggaaacactagatggctcccttaatgtattttagatgggagttaaaaataggrctcctcatcagaattattgagaaagatgacaatcatttttcaagcaatgggtgcatccatatgggctattgctaatgaagagaaggaaaatgcagtgcagaccgaataaaacactcttatttattagaatctttggctatgtttctttctcattaaggctaataaacgccagtggagcctaatgacttgattgccattgaaagaatc

SEQ ID NO: 619845 - DNA, 540 bp, Homo sapiens
aactgttgattgtgtgcactgtaattattttcttccagtttgtggcttattttttcagttcatttatggtgtatctgattggtcaaaaaattgttttcgcatttgccaatttggcaatgtttacatcaatggtttgtgattcagtcttagaaaattatctactattaagcattacttgtaaaatatatctgtaatatttagcccttaacttttttaactagttccagcgtgcaaggtaatattcaggtcttgagtagaccccaaattattattattattattattatttttgagacagagtcttgctctgttgcccaggctgcagtgcagtggcggtatctcggctcactgcaagctctgcctcccgggtcacgccattctcctgcctcggcctcccgagaagctgggactacaggcgcccgccaccacgcccggctaattttttgcattttttagtagggacggggtttcacagtgttagccaggatggtctygatctcctgacctcgtgatccacctgcctcggcctcccaaagtgct

SEQ ID NO: 619846 - DNA, 290 bp, Homo sapiens
tgatgaatgtcaggatgctgtaaacattctcccaggtagcctctattttccttgtgtctcatacctctgtctaggctatggaagatcaattctgaggacaggctgtatacgcacatattgttttagtcagaaactaggatggagctaggtgctgtgactcacacgtakaatcacagcactttggaaggcccaagtgggaggatgacttgagttcaggagttgaagaccagcctggacaatatggtgaaacccatctttacaaagaatacaaaaaattaggcaggtatggt

SEQ ID NO: 619847 - DNA, 591 bp, Homo sapiens
ccgtctcaaacaaaaaacaaaaaaccaaaaaagaaaaaaattaaaaaagcaaaatgaaaccttttgtgctacacagmaacattggccactcatggggtaaaaatcttagggccaagccttgctttatagaaacttataagcaagaaaagtgtagaagtgtttatgtcttggtttcaaggtgactgcatagctaagacaagttgacttaaaggagatcaagactggagatgacaagagtgaaaccagggaaacatcatcttcaaataagtagacaaggctgccagtgacatccctcagtcctgattaagcctatttgatttcaccagtttttaacccatcatgtgtttgcctttcttctccccagtccctggccccacctcttctgccacaaacgtcagcatggtggtatcagccggccctttgtccagcgagaaggcagagatgaacattctagaaatgaatgagaaattgcgcccccagctggcagagaagaaacagcagttcagaaacctcaaagagaaatgttttgtaactcaactggccggcttcctggccaaccagcagaacaaatacagtaagatctataggctc

SEQ ID NO: 619848 - DNA, 419 bp, Homo sapiens
acaaaaaaccaaaaaagaaaaaaattaaaaaagcaaaatgaaaccttttgtgctacacagaaacattggccactcatggggtaaaaatctyagggccaagccttgctttatagaaacttataagcaagaaaagtgtagaagtgtttatgtcttggtttcaaggtgactgcatagctaagacaagttgacttaaaggagatcaagactggagatgacaagagtgaaaccagggaaacatcatcttcaaataagtagacaaggctgccagtgacatccctcagtcctgattaagcctatttgatttcaccagtttttaacccatcatgtgtttgcctttcttctccccagtccctggccccacctcttctgccacaaacgtcagcatggtggtatcagccggccctttgtccagcgagaag

SEQ ID NO: 619849 - DNA, 533 bp, Homo sapiens
tctgacacaggcacagaatgacctgttttctccaagaggctcaatcatgtttycaagaatcctctctgtaccatataagatcctgcagacaaataacatctagtctgttgttctaaatgtctgagactagtgaacttttattcagttcaagtttctgttgaggcccaatatgcaaagctctgttctagtgactctgagggaaacttggtgatagtagccagtacccgctctgaggggcttcaagaggagtctgctcctaatagaacctgtgctatctataagtgacagtatcaagagcagggagtaggggccgtgcatggtggctcactcctgtaatcccagccctttgggaggctgaggcgggtagagcacgaggtcaggagtttgagaccagcctgggcaacatggagaaaccccatctccactaaaaatacaaaaagtagatgggcatggtggcaggtgactgtaatcacccctgctcaggaggctgaggcaggagaatcctttgaacccaggaggctgaggttgcagtg

SEQ ID NO: 619850 - DNA, 533 bp, Homo sapiens
tctgacacaggcacagaatgacctgttttctccaagaggctcaatcatgttttcaagaatyctctctgtaccatataagatcctgcagacaaataacatctagtctgttgttctaaatgtctgagactagtgaacttttattcagttcaagtttctgttgaggcccaatatgcaaagctctgttctagtgactctgagggaaacttggtgatagtagccagtacccgctctgaggggcttcaagaggagtctgctcctaatagaacctgtgctatctataagtgacagtatcaagagcagggagtaggggccgtgcatggtggctcactcctgtaatcccagccctttgggaggctgaggcgggtagagcacgaggtcaggagtttgagaccagcctgggcaacatggagaaaccccatctccactaaaaatacaaaaagtagatgggcatggtggcaggtgactgtaatcacccctgctcaggaggctgaggcaggagaatcctttgaacccaggaggctgaggttgcagtg

SEQ ID NO: 619851 - DNA, 533 bp, Homo sapiens
tctgacacaggcacagaatgacctgttttctccaagaggctcaatcatgttttcaagaatcctctctgtaccatrtaagatcctgcagacaaataacatctagtctgttgttctaaatgtctgagactagtgaacttttattcagttcaagtttctgttgaggcccaatatgcaaagctctgttctagtgactctgagggaaacttggtgatagtagccagtacccgctctgaggggcttcaagaggagtctgctcctaatagaacctgtgctatctataagtgacagtatcaagagcagggagtaggggccgtgcatggtggctcactcctgtaatcccagccctttgggaggctgaggcgggtagagcacgaggtcaggagtttgagaccagcctgggcaacatggagaaaccccatctccactaaaaatacaaaaagtagatgggcatggtggcaggtgactgtaatcacccctgctcaggaggctgaggcaggagaatcctttgaacccaggaggctgaggttgcagtg

SEQ ID NO: 619852 - DNA, 533 bp, Homo sapiens
tctgacacaggcacagaatgacctgttttctccaagaggctcaatcatgttttcaagaatcctctctgtaccatataagatcctgcagacaaataacatctagtctgttgttctaaatgtctgagactagtgaacttttattcagttcaagtttctgttgaggcccaatatgcaaagctctgttctagtgactctgagggaaacttggtgatagtmgccagtacccgctctgaggggcttcaagaggagtctgctcctaatagaacctgtgctatctataagtgacagtatcaagagcagggagtaggggccgtgcatggtggctcactcctgtaatcccagccctttgggaggctgaggcgggtagagcacgaggtcaggagtttgagaccagcctgggcaacatggagaaaccccatctccactaaaaatacaaaaagtagatgggcatggtggcaggtgactgtaatcacccctgctcaggaggctgaggcaggagaatcctttgaacccaggaggctgaggttgcagtg

SEQ ID NO: 619853 - DNA, 415 bp, Homo sapiens
tgagtacctttctatgaaggtgataaggatccactgagtcttccatataaagatcatattcctgctccaagtggccattactgagctgagagatgtcattgctgcagtgaggacctataggcacatgtaggttgaatgaaactctagttctaactggaagcccagacatgrgatgggtcagtgagcatggctctcttcctagtctcaggccatgcctgtggcactctgattctactctcatgacattggacctgggcagatgtgacaaattcagagaactatgattttgactcaagggtttgtagatttcctttttcactctaatttcagtgtctaaagtcctcacaaccatgaacaatctgagtatttgatgagacagggctaaatattgcagtttttctcctagaaatcattt

SEQ ID NO: 619854 - DNA, 594 bp, Homo sapiens
tgaattaataaaaacatttccatttccctgtttattttctaatctcttccaccttgtaggctatgtttaccatatgtagcagaatgcatttactccatttcttggttctagatatttatattctttgtgagagtgtgtgtgtgtgtgtgtgtstgtgtgtgcctctggcatttaggaagggttgtgtagctcatgtttgatattgattaaaaatgtttcatagttttcccccctttgaactagacacacttctaatatttggtttatacattttaaattatgactttcaacgtcaaatatttccatatgacagtcagttacatgatgtgttttctttttcctacctcctttacctgccacttctcataatggtatttgaacctaaacatatgccagtgaaattctgtggttgtcatcttgcccacaccttggtttttggtttagatccacaattaaatatattaatgctcatgagctgttcaaaagtgaatgtcacagtcatcacttgctgagtggtactcatccttaacagagtcctcatgagggaatcaggtctcgctgagtttagcatgtttaataatcttcctcgtggtc

SEQ ID NO: 619855 - DNA, 624 bp, Homo sapiens
gaaacaaaatcacctgagggccacagtgttccctagccctggcgtttaggggcagggttatgggtgggatttttgactctctaagttaacscctagggctttgaagtgtctgttgagaaattcagctgttatcatcctaggtggacttgctctctcctgtcctcctacttcaaatgcagaacttcaatcgtgtacaaaagaagactgagtcatataatagaacacacccttattcattggctggcttcaccaatcatctcatggctgaacttttaaaaatacaatcttagccacatacctatgaaatgtatatgtgtgtgtatacatatgtgaatttgtttctgagattatggaggctgaaattcccaagatggaaggaaagctggatacccaggaaagcatttgtttcccattaggcctcttaattctctcctgacctttgattgattgcatgagtcccacccccgttaaggggggcaatctgcttcacttagtctgcccatcccgatgttaatcatatgtgaaacactctctggaacacaaccagaatcacatttggccgaatgtcccggcaccctggtgctcagtcacagtgacacgtgcaagtaactatcacacttgtcc

SEQ ID NO: 619856 - DNA, 364 bp, Homo sapiens
aaaacaaaatgatctcaatttgcagatggtgtgatcctatgyatagaaaatcccaaacaatacatacaaaggcaaacacacatacatgcacacagacaccagacacacacacacacacacacacacacacacacacacacacacacactatcagagttaataagtgaattcagcaaactttcagcaaacaatccattgtgatggcaatgagctatctgagaagtaaactgacacaatgatttcatttataatagcacctgtaaggataatatgcctgggaataaatttgttcaagaaggtgcagtacttgtacacagacaactacagaacattgctcgaggagattcaggaagacctaaatcaa

SEQ ID NO: 619857 - DNA, 413 bp, Homo sapiens
tgaattcagcaaactttcagcaaacaatccattgtgatggcaatgagctatctgagaagtaaaytgacacaatgatttcatttataatagcacctgtaaggataatatgcctgggaataaatttgttcaagaaggtgcagtacttgtacacagacaactacagaacattgctcgaggagattcaggaagacctaaatcaatggacagacatcttgtgtccatgggttggaagttgtaacatggttaagataaaaatacaactcaaagcaacccacagattcaatacaatcctatcaaaaagtggcctttttacaggaatgcctaacaagaacttcatattcctaaaaaatagtgtgtccccccaaaacaaaagcaatcttgaaatgcaagaagaaacattttctattccaaag

SEQ ID NO: 619858 - DNA, 546 bp, Homo sapiens
gtgaattcagcaaactttcagcaaacaatccattgtgatggcaatgagctatctgagaagtaaactgacacaatgatttcatttataatagcacytgtaaggataatatgcctgggaataaatttgttcaagaaggtgcagtacttgtacacagacaactacagaacattgctcgaggagattcaggaagacctaaatcaatggacagacatcttgtgtccatgggttggaagttgtaacatggttaagataaaaatacaactcaaagcaacccacagattcaatacaatcctatcaaaaagtggcctttttacaggaatgcctaacaagaacttcatattcctaaaaaatagtgtgtccccccaaaacaaaagcaatcttgaaatgcaagaagaaacattttctattccaaaggtctttaactgctctaagcagtacttggtagtcttcaatatataggctttcacatctcttttgttcttcttttgtttctgcacaggatctcactctttcacccaggctggagtacagtggcacaatcacagc

SEQ ID NO: 619859 - DNA, 546 bp, Homo sapiens
gtgaattcagcaaactttcagcaaacaatccattgtgatggcaatgagctatctgagaagtaaactgacacaatgatttcatttataatagcacctgtaagrataatatgcctgggaataaatttgttcaagaaggtgcagtacttgtacacagacaactacagaacattgctcgaggagattcaggaagacctaaatcaatggacagacatcttgtgtccatgggttggaagttgtaacatggttaagataaaaatacaactcaaagcaacccacagattcaatacaatcctatcaaaaagtggcctttttacaggaatgcctaacaagaacttcatattcctaaaaaatagtgtgtccccccaaaacaaaagcaatcttgaaatgcaagaagaaacattttctattccaaaggtctttaactgctctaagcagtacttggtagtcttcaatatataggctttcacatctcttttgttcttcttttgtttctgcacaggatctcactctttcacccaggctggagtacagtggcacaatcacagc

SEQ ID NO: 619860 - DNA, 545 bp, Homo sapiens
tgaattcagcaaactttcagcaaacaatccattgtgatggcaatgagctatctgagaagtaaactgacacaatgatttcatttataatagcacctgtaaggataatatgcctgggaataaatttgttcaagaaggtgcagtacttgtacacagacaactacagaacattgctcgaggagattcaggaagacctaaatcaatggacagacatcttgtgtccatgggttggaagttgtaacatggttaagataaaaatacaactcaaagcaacccacagattcaatacaatcctatcaaaaagtggcctttttacaggaatgcctaacaagaacttcatattcctaaaaaatagtgtgtccccccaaaacaaaagcaatcttgaaatgcaagaagaaacattttctattccaaaggtctttaactgctctaagcagtacttggtagtcttcaatatataggctttcacatctcttttkttcttcttttgtttctgcacaggatctcactctttcacccaggctggagtacagtggcacaatcacagc

SEQ ID NO: 619861 - DNA, 523 bp, Homo sapiens
ttcatttgcacctcagaaaatgaggcaaaatccagtttgggcttagggccagagaagagcccctgaggcctccctctggaaaacatactctctcagtttaccagagtttcctgtaccaaggggaaatttccgcaaacagtagtgttatattctttttgccttccctcttttccctttgcccagggaggccagatgattgtgagaacaggacttgggacttcytgggtgtcttgcccccttcctccatgtgataaataatggctgacaccaagcaagtgggattgggaggcagggaatctttcattttcttcttcatatacttctatgcatttgtttggttggttttggcaagattttctcaccagaaatggagatttgttggatttaaaataaaaagtaatcagccatgttttacatttctataaaacactcaaaccaggccatactcccctgctgtgcctcaaaatcaaccataaactgtcgaggtcaggaggcagggccctgacacttaagcacagtgtgt

SEQ ID NO: 619862 - DNA, 523 bp, Homo sapiens
ttcatttgcacctcagaaaatgaggcaaaatccagtttgggcttagggccagagaagagcccctgaggcctccctctggaaaacatactctctcagtttaccagagtttcctgtaccaaggggaaatttccgcaaacagtagtgttatattctttttgccttccctcttttccctttgcccagggaggccagatgattgtgagaacaggacttgggacttcttgggtgtcttgcccccttcctccatgtgataaataatggctgacaccaagcaagtgggattgggaggcagggaatctttcattttcttcttcatatacttctaygcatttgtttggttggttttggcaagattttctcaccagaaatggagatttgttggatttaaaataaaaagtaatcagccatgttttacatttctataaaacactcaaaccaggccatactcccctgctgtgcctcaaaatcaaccataaactgtcgaggtcaggaggcagggccctgacacttaagcacagtgtgt

SEQ ID NO: 619863 - DNA, 619 bp, Homo sapiens
aattggccaacagcacccaaatgtgacagctgactccagggagggaaggtgagccccacaccctgtgctcttaccgggactggtggtttcctcctgttcagcctcattcttgctttggccacaagtctcgtrgcccaggtcctggaggtccacctggacctgtttactgtcctgcttcagcaagggttcacctgcgtgggaagagacagcaggtgttacagaatgtctgaatttcccacatatgccctcagcctcaatggcacataccctaaccttgtggggcagggagggcagatccacagtacgagagaagcttctttgaactggtgggagaagagaccaccagctccaggaagcagaatttctttccacaggaggagcctgcatttgccattgataatctccccttcagataacctaggccttagttgggacaaggtatctgtaagtcagggattgtgtactctcatctctagcagccccattgaagctggcaagtgctttatcagcaggggttcaataaatgttgaatggagctgaactaatttagagtcccaagacacctagacctgcactgtccaataaggtagttagtagccacatatggccactttatact

SEQ ID NO: 619864 - DNA, 619 bp, Homo sapiens
aattggccaacagcacccaaatgtgacagctgactccagggagggaaggtgagccccacaccctgtgctcttaccgggactggtggtttcctcctgttcagcctcattcttgctttggccacaagtctcgtggcccaggtcctggaggtccacctggacctgtttactgtcctgcttcagcaagggttcacctgcgtgggaagagacagcaggtgttacagaatgtctgaatttcccacatatgccctcagcctcaatggcacataccctaaccttgtggggcagggagggcagatccacagtrcgagagaagcttctttgaactggtgggagaagagaccaccagctccaggaagcagaatttctttccacaggaggagcctgcatttgccattgataatctccccttcagataacctaggccttagttgggacaaggtatctgtaagtcagggattgtgtactctcatctctagcagccccattgaagctggcaagtgctttatcagcaggggttcaataaatgttgaatggagctgaactaatttagagtcccaagacacctagacctgcactgtccaataaggtagttagtagccacatatggccactttatact

SEQ ID NO: 619865 - DNA, 480 bp, Homo sapiens
ttatgtataacagttcccagtttgctcaggaaattctcagattataaagagacattacaaatgaacaagtgaagagaagaaccttggtggttccaacatagtatggccattgttttatactcaaaatatagaaagacaacctcagaataagaaaacttttggaatkgaataaatcaagtttatcattaaaatgcaaagaaaaaaactctccaaatgttgctgatcttctgttttaaactactgttagaccggagaagcggagagcaggggaatccgccaaagagttttggatgaaaattaatcagccctgtctaccgtagtcacaccccactgcccttgagacccaatccttcggaaggagtgtccaagaggtataaagcaaaacgaaaaaacagttcgcaaattccagagttcgttttctctcattaaaaatataaatatcaggctaacacatgttgacacacaataacagggacacag

SEQ ID NO: 619866 - DNA, 490 bp, Homo sapiens
gtgcaactgcactctagcctgggtgacagaggaagactccatcgcaaaaaaaaaaaaaaaaaaaaaaaaaaaaaaatccacgatgctacaaagaaacattggatcagccattgcattgacagggtggagaaccagggtccagccttgctttatggaaatatatcagcaaagtaaagaagaaaagtttccrtcctgatttcagggtgactgtgcagctaagcaagctgacttaaaggagatccagatgaaagctgagagcagtgaagcctggggaacaatatttccaaatacaaaggcaaggctgccagcttcctgaaacaggcatagaaactccatggacattgttcagggacagatgacttaatcacagatgacaagagatactgaatcgaagctaggaggcctgacagatactgcctgtgcacctcctgcactcaggtgactatgagattgtcacacttgcctggggtcgagtaacttgatactgggg

SEQ ID NO: 619867 - DNA, 520 bp, Homo sapiens
acagtcagcccaatgtgcaacagagacatgaacatctaggcatgggtcaccgttcaactraaaactctcatgttttatctttaacagaatgccctggcatggtttcctgatccatcaggcaatgcatttctgatctggagggccaccatcaagatgtggccaaatattgaaaagaccttttgcttcccctatcactggaggcttgtgcagcctctctctggactttggcagctgtctcccccatcctgccagatctgattcccaggcacaggcttggtgtcctgtcacagtttgcatttcaaacctaattctttctcttagaagcagacaaacttgtcccacagtcctctatgcatcagaagatttcaagcctccaagtggcttctgctgtgttattcagggacattctatccatggggagtgctccagtctgaagcacttcctaccacgaaacgccaccacataaagtgccttctccaacatcacacggcgaggggcttcatctcattttggaaagcag

SEQ ID NO: 619868 - DNA, 520 bp, Homo sapiens
acagtcagcccaatgtgcaacagagacatgaacatctaggcatgggtcaccgttcaactgaaaactctcatgttttatctttaacagaatgccctggcatggtttcctgatccatcaggcaatgcatttctgatctggagggccaccatcaagatgtggccaaatattgaaaagaccttttgcttcccmtatcactggaggcttgtgcagcctctctctggactttggcagctgtctcccccatcctgccagatctgattcccaggcacaggcttggtgtcctgtcacagtttgcatttcaaacctaattctttctcttagaagcagacaaacttgtcccacagtcctctatgcatcagaagatttcaagcctccaagtggcttctgctgtgttattcagggacattctatccatggggagtgctccagtctgaagcacttcctaccacgaaacgccaccacataaagtgccttctccaacatcacacggcgaggggcttcatctcattttggaaagcag

SEQ ID NO: 619869 - DNA, 559 bp, Homo sapiens
ttttgcttcccctatcactggaggcttgtgcagcctctctctggactttggcagctgtctcccccatcctgccagatctgattcccaggcacaggcttggtgtcctgtcacagtttgcatttcaaacctaattctttctcttagaagcagacaaacttgtcccacagtcctctatgcatcagaagatttcaagcctccaagtggcttctgctgtgttattcagggacattctatccatggggagtgctccagtctgaagcacttcctaccacgaaacrccaccacataaagtgccttctccaacatcacacggcgaggggcttcatctcattttggaaagcagttttaagtgttcccacatttgaatgcttcagacccttgcaagagacaatttgccatggagagagagaaactcaggaaagacaagtcattcactcactgacagttactaagaacattgccgaaaagacagcctgggaaccttcattcttagtccagagctcttttcactctaacaagcctgctcctatcgcagcctccttcctgtcctttaaaacta

SEQ ID NO: 619870 - DNA, 559 bp, Homo sapiens
ttttgcttcccctatcactggaggcttgtgcagcctctctctggactttggcagctgtctcccccatcctgccagatctgattcccaggcacaggcttggtgtcctgtcacagtttgcatttcaaacctaattctttctcttagaagcagacaaacttgtcccacagtcctctatgcatcagaagatttcaagcctccaagtggcttctgctgtgttattcagggacattctatccatggggagtgctccagtctgaagcacttcctaccacgaaacgccaccacataaagtgccttctccaacatcacacggcgaggggcttcatctcattttggaaagcagttttaagtgttcccacatttgaatgcttcagacccttgcaagagacaatttgccatggagagagagaaactcaggaargacaagtcattcactcactgacagttactaagaacattgccgaaaagacagcctgggaaccttcattcttagtccagagctcttttcactctaacaagcctgctcctatcgcagcctccttcctgtcctttaaaacta

SEQ ID NO: 619871 - DNA, 585 bp, Homo sapiens
tggcgtgaattgaaaagatgaaagaagaaaagagtgacagggtcgagaaggcaacattgattgagtgaaagaatgagaagacgcagtcagtcagaaggtgattctcactaagggtaagtggggtggygatggcacaccattttgagtatactgaatgctgctgtgtggttcccactcctttggtgaattttgtgttatgcaaatttcacatcaacaattacttgtttgaaaaagagaaaacaaggctctaagaaacaactgcaacacataacttattattatccttgttctctgataaatatttgtgtgtcatgagcctgccatggcaatttctgcccttcccctggcccagcttcgttcttacttctccccgccgagctgctgtacttcagagatctacacacctacccgcctgcctccccccacggggtcccctcacctgagctcctcagcttgcttgagctgctctgcaagcttctcctccttgaactgtcgctcattcctcagcataaattttatgacgtctttacactcttcatactctgagaaaagacagacacacctgcctcagtggaaggctggaca

SEQ ID NO: 619872 - DNA, 585 bp, Homo sapiens
tggcgtgaattgaaaagatgaaagaagaaaagagtgacagggtcgagaaggcaacattgattgagtgaaagaatgagaagacgcagtcagtcagaaggtgattctcactaagggtaagtggggtggtgatggcacaccattytgagtatactgaatgctgctgtgtggttcccactcctttggtgaattttgtgttatgcaaatttcacatcaacaattacttgtttgaaaaagagaaaacaaggctctaagaaacaactgcaacacataacttattattatccttgttctctgataaatatttgtgtgtcatgagcctgccatggcaatttctgcccttcccctggcccagcttcgttcttacttctccccgccgagctgctgtacttcagagatctacacacctacccgcctgcctccccccacggggtcccctcacctgagctcctcagcttgcttgagctgctctgcaagcttctcctccttgaactgtcgctcattcctcagcataaattttatgacgtctttacactcttcatactctgagaaaagacagacacacctgcctcagtggaaggctggaca

SEQ ID NO: 619873 - DNA, 585 bp, Homo sapiens
tggcgtgaattgaaaagatgaaagaagaaaagagtgacagggtcgagaaggcaacattgattgagtgaaagaatgagaagacgcagtcagtcagaaggtgattctcactaagggtaagtggggtggtgatggcacaccattttgwgtatactgaatgctgctgtgtggttcccactcctttggtgaattttgtgttatgcaaatttcacatcaacaattacttgtttgaaaaagagaaaacaaggctctaagaaacaactgcaacacataacttattattatccttgttctctgataaatatttgtgtgtcatgagcctgccatggcaatttctgcccttcccctggcccagcttcgttcttacttctccccgccgagctgctgtacttcagagatctacacacctacccgcctgcctccccccacggggtcccctcacctgagctcctcagcttgcttgagctgctctgcaagcttctcctccttgaactgtcgctcattcctcagcataaattttatgacgtctttacactcttcatactctgagaaaagacagacacacctgcctcagtggaaggctggaca

SEQ ID NO: 619874 - DNA, 435 bp, Homo sapiens
ggggtcccctcacctgagctcctcagcttgcttgagctgctctgcaagcttctcctccttgaactgtcgctcattcctcagcataaattttatgasgtctttacactcttcatactctgagaaaagacagacacacctgcctcagtggaaggctggacatgctgctgtggtcactgcctacagggcaggagccaggtccatcccaaggacaaaactgtccccagtaccaggctctaggcagggatttccacatctttactcttcagtctcctgactttctggcatcttatcctccaaaatttaaagacgaagaaagagaaactcaaggcacatcaaggaagttgacaagatgattcaaccacaacgaagtggactcagaactcacagcccctgaggtctgactctgaatgcggggccactttcccaagcctggca

SEQ ID NO: 619875 - DNA, 547 bp, Homo sapiens
agcatcaagatttagattagttgtgttaatttagaaacagcataagattagtttgtgttaatttagaaacatcagaatgaagaactaatagatagtgtttacactgtgccaattaatgttcaaggagattgacaggaaatacctcatgtaattcattgcagcaatttacagaggtaggtattattgtagtaccctctgaasagatgaggaaactgagggacagacaagacaagcaacttggatggagcccaggagacaggctgagggtccctgctttgcacactgcactgctgcttccacacattctcgggtgtgatctttcttcctctttaggaacaagagcctgtgcaccaggaagcaggacttcactctcaccaaggtactctctgctttttatttttatttttgtttgatttatctttttgtttgtttgttttttgacgagtcttgccctgtcacccatgctggagtgcaatagtgcaatcttggctcactgcaacatctgcctgctgggttcaaaggattcttctgcctcagccttccgatt

SEQ ID NO: 619876 - DNA, 632 bp, Homo sapiens
gtggtattttctatctgcttcttagaatattgttctcaagtttcatcctttctagcctgcgtcagtacttcaactttttatggccagataatattccactatatggttataccacattttgtttattcatcaactcatggtggtttaagatgtttccactttttaactattaggaataatgctgctgtgaacagctttgtacaggtttttgagtgaacatctgtttttcattttcttggttataaacctaggagtgcaattgctgcatcatatgtcactttatgtttcactttttgaggaactcacacactgtttactaacttcagtagctacatcattttagattcccaatagtaatatatgagaattccatattctccatcacttttgaaacatgtgttgtctttattkttttcttaagtcgtactgctgggtgtgaagtggtatctcattttggtttaaatttacattttcctaatgacgaaaaacattgaacatctttgcatgtgcttcttggccatttgtgtgtttcctttagagaaacctctactcacagctttttttccccattgttaaatgtggttgtcgtttattgctcagttatatgaattccttatatactctaggtacta

SEQ ID NO: 619877 - DNA, 608 bp, Homo sapiens
tttcactttttgaggaactcacacactgtttactaacttcagtagctacatcattttagattcccaatagtaatatatgagaattccatattctccatcacttttgaaacatgtgttgtctttattgttttcttaagtcrtactgctgggtgtgaagtggtatctcattttggtttaaatttacattttcctaatgacgaaaaacattgaacatctttgcatgtgcttcttggccatttgtgtgtttcctttagagaaacctctactcacagctttttttccccattgttaaatgtggttgtcgtttattgctcagttatatgaattccttatatactctaggtactagacctgtgtcaaacatacaatttggaaatagttctcccattatgtggattatcttttcacttccttgacagtgtcctttgaagcatacaagttttttattttaatgaagtccatttatctatttttccgttgtttgtgcctacttaaaaaatgtctaatccaaaatcacaaagatttgtacctaggtttccttcaagacatcgtcttttgaatgagaactttcctgggttttagaggagggtggacattgtttattgatg

SEQ ID NO: 619878 - DNA, 504 bp, Homo sapiens
ttatgttagaacattttgtctattctttgtcaattgttgtttatctacaattttaacatggataaaggagagttcagtgtcaatatattcttaacaactaattacggctcatgtccaccgccatgcgatcatatttaaatctgtcaactatcctgttacttaggtattatcctgttcctgatgagaaaacaaactcagaaagattgcaaaatttccctaggtcacaaaactagtgaggagaggagtaagaattagatatccgttccttttggccttcaaagctaaccttgtaccattagatcaaactgatttacatacttttgctggaattagtctcasagttgtggttctcacttgattttcccaaggaaacagtgtgccactttaatatcgtttcaaactttgaaatttaaaactctttttattatacttttttgtctttgttctattccgttgcttttggtttcttctcaacggatccctcttatttatatgctaaatatt

SEQ ID NO: 619879 - DNA, 504 bp, Homo sapiens
ttatgttagaacattttgtctattctttgtcaattgttgtttatctacaattttaacatggataaaggagagttcagtgtcaatatattcttaacaactaattacggctcatgtccaccgccatgcgatcatatttaaatctgtcaactatcctgttacttaggtattatcctgttcctgatgagaaaacaaactcagaaagattgcaaaatttccctaggtcacaaaactagtgaggagaggagtaagaattagatatccgttccttttggccttcaaagctaaccttgtaccattagatcaaactgatttacatacttttgctggaattagtctcacasttgtggttctcacttgattttcccaaggaaacagtgtgccactttaatatcgtttcaaactttgaaatttaaaactctttttattatacttttttgtctttgttctattccgttgcttttggtttcttctcaacggatccctcttatttatatgctaaatatt

SEQ ID NO: 619880 - DNA, 555 bp, Homo sapiens
ttggactgcctgttgtacactgctgaaaacaattttacgtttgtttatggaggcagggttagtctgatatgatttattctaacagacagaagcagaaatctgttatactcttttarttactgtgtctttataatattatggtagacagaatcctaagatgacccccagtgatctttgctcttatataatcacttcctcctgagtgtagacaaagctactgaggagatgtcactcctgtgattgtgttacaatttatggcaaaaacaagttaacagatgtaatcgagatcccaaatcggtccaatttaagatagacagattatctgatgagcttgacctagtgaaggtgagttccttggagggactgaggacttcctggagagatgtgaagtgcaggagggtttccatgcagggcgatcctcctctgctggctggaggaagcatgcagtgggaacatgggaggcctctaggagcagcgagaggcccctggctgacagccagcaagaaaacagagatctcagtcctacagtcacaaggaactgaactcagctgacaa

SEQ ID NO: 619881 - DNA, 571 bp, Homo sapiens
aggcatttattctcttattttatataaatcagttaatgtgcaggaacaaaacagactttgaagaaagacactcacagttgccacaggaaaacaccttcaacatcctcatgagtcatcatgggtgttctgttgggaggacttgataggaggctttcctcctcatgggctagtgcagatccaggggaaatgtcatcaagtcctccattcggaggrtagcagctgaggctgctgattcgttaggcctcctgcagctggagatgcaagtagtgcattttcatggccaccgcagggccctcagtttagcattcttcagagccagcatccaacaagccacagaagctctgagtatttccctttcttcagtcacccacataaatggcttcagggccttctggggaaggcctgaaggaagatttacagcatacacttgtggcagcattgaaggcttcactcttcctcaagggatccaatctcccctcagtcaagaagctccaggtatctgaactggatgccaggtcataaattcccactatggtgactccatcaggtctctgtcctcagaactagagct

SEQ ID NO: 619882 - DNA, 515 bp, Homo sapiens
aactggtgacacacagaacaacatggatgaatctcaaaaacatttggagtgcgatagaagccatacccaaaaaagtgtgagaaaaaaagataartaataatgcttccaagaaatgcacagcagacagcccagaggcaaagacccacaggacggcgggccggtcccaggctgtcgatcctaattaagaaacttctgctggattttgcccagctccatttccaaactattttgggtcagtgacttctttatcccttccatgttgcctcattttgaactagaatcactgtaagtgttattctatgtctgtcacatcattccacagtaggggcagataagctgtatagaatggctaaaattcaaaaaggtgaacacaccaaatgctgtcaaagatgaggagcaagcagaactttccatcgctagtggaaatcaaaagggtacagtcactttggaaaacttaagttcactcaaaatcctgcacagaagtacttacagcaattttattcatcattgccaaa

SEQ ID NO: 619883 - DNA, 474 bp, Homo sapiens
aggaaaagtcctggagagaacactgtcctctcctgaagtaaaatcacttctacctgaccacggcactgcagctcatgggcagcacatgctgtggatatttgttcattcatttaacaaatatttatttaatatctgttgcatgccaagcaaggccctgcgatgtttagggaccttgacatcttcccttcacatctgagtcataatacaaagaggactctctgaccccactgagctggcaatgcctcgggatttttacctgttggatctggcagctcttgatgtcagcccacaccatgtgaggctgctcttggtgcacccaatggggaagtttctacatcagggcctcggagaatccactggaagccctggacagtgggagtcagyggcatccccagtgtggaggccaagagcacacagtgcttaagctccaggcaccctcaggaggacggcaagggacaattggctggtgagagc

SEQ ID NO: 619884 - DNA, 410 bp, Homo sapiens
acacacagcaaactgcgatcatgaaaagagtgagctcaatagttttccataaaatatgctcaaaattcgatgcagtggccacgagagtacagcttttgaagtatggtcatcctatggtacgttagtaaatgataaggggaggaagaaatggaaaccyaaacatctactgcaatgaaaaccaacagcaatgacagtaggagtaattcagccttcgttgaaaacatgaaatcaaacacactccggtttccctgaatctgttgcctccaggtgttaacacagaattaagcatccacaattgctgaaagttacctggggcatggtgggttttgatcttcttccccttcttttcttccccttctccttcttttcttcgttgatcttcttccccttcttttcttccccttcccctt

SEQ ID NO: 619885 - DNA, 410 bp, Homo sapiens
acacacagcaaactgcgatcatgaaaagagtgagctcaatagttttccataaaatatgctcaaaattcgatgcagtggccacgagagtacagcttttgaagtatggtcatcctatggtacgttagtaaatgataaggggaggaagaaatggaaacccaaacatctactgcaatgaaaaccaacagcaatgacagtaggagtaattcagccttcgttgaaaacatgaaatcaaacacactcyggtttccctgaatctgttgcctccaggtgttaacacagaattaagcatccacaattgctgaaagttacctggggcatggtgggttttgatcttcttccccttcttttcttccccttctccttcttttcttcgttgatcttcttccccttcttttcttccccttcccctt

SEQ ID NO: 619886 - DNA, 553 bp, Homo sapiens
taggagactgtgagagatatatttcaggaggcctgaaggctggtcatgatagaaattcctcggtttttctcccagaaactgtgggtaaaatgtccctattctagtagatcgttatcccaatatcatttgtcccgagtttgtgcaaacagttatgccatatttttccaatcaatttaaagcaaataccctcaaatgatttctaggagaaaaactgcaatatttagccctgtctcatcaaatactcagattgttcatggttgtgaggactttagacactgaaattagagtgaaaaaggaaatctacaaacccttgagtcaaaatcatagttctctraatttgtcacatctgcccaggtccaatgtcatgagagtagaatcagagtgccacaggcatggcctgagactaggaagagagccatgctcactgacccatcccatgtctgggcttccagttagaactagagtttcattcaacctacatgtgcctataggtcctcactgcagcaatgacatctctcagctcagtaatggccacttggagcaggaatatgat

SEQ ID NO: 619887 - DNA, 501 bp, Homo sapiens
tttctttaagtgttgaagtgaaggaaatgaagaactcagcacggaccctgcttagactccggcagaacaggtggtcttgrcatgacgtcgctccaacatgcacgcaacttgccttttattctctcagctctttgtgccactagtacatggtcacctgggcatttctttagaaagggtgcagagactttcatttcgtgaaaatatagatgtcccagggaaaaataataatccaactggtataagtttatatcaaaccatatggaagtgattttttctggttagtcattttcacggggattagagagtagagaaaagtcaaagaaccagggattcccaaggacacgcttggcctggtcaatattactaggattggcccagatgccaccaaatccttttttcttcctacttattgaaaaccctgttaaatttgatatgtgaaatatcttttctctaaaattttagccttgcaaataaaattttgcataacatttttattgacaa

SEQ ID NO: 619888 - DNA, 501 bp, Homo sapiens
tttctttaagtgttgaagtgaaggaaatgaagaactcagcacggaccctgcttagactccggcagaacaggtggtcttggcatgacgtcgctccaacatgcacgcaacttgccttttattctctcagctctttgtgccactagtacatggtcacctgggcatttctttagaaagggtgcagagactttcatttcgtgaaaatatagatgtcccagggaaaaataataatccaactggtataagtttatatcaaaccatatggaagtgattttttctggttagtcattttcacggggattagagagtagagaaaagtcaaagaaccagggattcccaaggacacrcttggcctggtcaatattactaggattggcccagatgccaccaaatccttttttcttcctacttattgaaaaccctgttaaatttgatatgtgaaatatcttttctctaaaattttagccttgcaaataaaattttgcataacatttttattgacaa

SEQ ID NO: 619889 - DNA, 501 bp, Homo sapiens
tttctttaagtgttgaagtgaaggaaatgaagaactcagcacggaccctgcttagactccggcagaacaggtggtcttggcatgacgtcgctccaacatgcacgcaacttgccttttattctctcagctctttgtgccactagtacatggtcacctgggcatttctttagaaagggtgcagagactttcatttcgtgaaaatatagatgtcccagggaaaaataataatccaactggtataagtttatatcaaaccatatggaagtgattttttctggttagtcattttcacggggattagagagtagagaaaagtcaaagaaccagggattcccaaggacacgcttggcctggtcaatattactaggattggcccagatgccaccaaatccttttttcttcctacttattgaaaaccctgttaaatttgatatgtgwaatatcttttctctaaaattttagccttgcaaataaaattttgcataacatttttattgacaa

SEQ ID NO: 619890 - DNA, 610 bp, Homo sapiens
atttttttttttttttttttgagatggagttttgctcttgtttcccaggctagagtgcaatggcgtgatctcagctcaccacaacctctgcctcccaggttcaagcaattctccaacctcagcctcctgagtagctgggattacaggcatgcgccaccacgtccggctaatgttttttgtagttttagtagagacggggtttctccatgtcagtgaggctggtcttgaactcccaatctcaggtgattcacctgcctcggcctcccaaagtgctgggattataggcgtgagccattgcgcccggccgaacaaatgtactcttagacatttttttaatctttagattgagcatctttggatatcagataccagytgagtttaaataactagtttccattactagatgaaattttgatgagaacctttagaaggttagtaatttctttgtccaacccaaatgtagtttttatattactcatagtaaatgccattttacattttccttcaagatttgtcttgcttaacagtgctgtctgtcttccatgagtcatactgacccagtacaaggtcctcgtgggtgatcagatctcaccaaaattggtttctgatg

SEQ ID NO: 619891 - DNA, 558 bp, Homo sapiens
cattaaataaaattaaaagatctggaatggtgagtctgattagtcagggagcagacacctggtgtcttagacaaaacaaccattaaaaaaraggaggatggaaaatggaatgactcacttttactatatatgtatctcatatgaagtattttcttctgggtaaactagaaaataaaatgcaactattttggagcaatattataatatggaagctgagagataattatccttcagatatctttttctgtcaggctaaataatgtgtttcttcatctttccctaaaatcaggtctcataaaccttcagagtttccatttcatgtataggttgagactaaatttagaaaaatcaggtcccataatgttctaaacagagatggacacacacacaaaaagaaaatgtaaccattgaacaaaattagattatatttagaaacagaattttttttttttgagacagagtctcactctgtcgcccaagctagagtgcagtggtgccatctcggctcactgcaacctccgccacccggattcaagcaattctcctgcctcagcctcc

SEQ ID NO: 619892 - DNA, 500 bp, Homo sapiens
gtcttgtgacttggaagaagattgtcttattaccattacatttgaacttttgttttaaaattaatctgttagatcatatattcaccaaagctcatcttttcactagccagagaaagctgtatttcaaaataacctaaagtaaaatagtatttaattcaagaagttagtttttattatatcaggtggcctcttggttggttatagtttcgtgcattctgatgcctgcgggctttttatccttcctgtctccactgcatagctggggaaaacctagggattgcccggtgaatgccaacagagctttaacctrtgtgtccatggcttgccttccctgaagcctcaaagagaacagctgcgagtgcaaaaaccttatgagcaaaatttctgctccaggaacacttatctgggctgaggaaacatattctaagaatatctgttttgtaactaaagcttccatgtacttgtgtaacgctttgtgtaaaaccacgtactttgtatag

SEQ ID NO: 619893 - DNA, 623 bp, Homo sapiens
tttttaggaacaccaagccaactcaggcaaaatggagacatattttcaactacaggcctgtcctatgtccctaaaattgccttccatgaatgtaaccccaatcagagtatagtttaaggtagaacataagaatttgtccttcttactattgacccaagggataaacagcactartaaaattctgcttttttatagatactctcaaatctgtatctgaatttctaaatgcatttaagatgcccggggtctaaaaacatacaacacagttaacaacaaagaaaacgaacttaggagggctgagttagaaaacccctacagctgttaagacagtcttttgcaaaccaagagattaggaatttaatttgtacaagtatggaggggacttccagccacttgtctgagagagcttagtacagataagaaattaatgtgcctgaatgacttagacttaattcttataaacactctcacttctgaaatgggaccggagctttgcctttgagtggacatccaaaaaggaaaaaaaaaacaaaaaaaaaacctgggaataagagaattaacttaaaaactcataaaaagcaaggcattactgtacatctgataagactgaaaaccatatgaat

SEQ ID NO: 619894 - DNA, 620 bp, Homo sapiens
tcaacataattactaacagggagaagtaataaataagtacaaatcctgcagatttaattttaaacatacaaaactgttgttccttagaacaattcctgtactatccaaatgtttttgtatcaggtgctattaaatacaagtattcaaaagaatgactgtttaataagaatatcatattaatcaccatactaggcttattaattattttaaaaaattaagmgattgaattaattctaaaagaaatctgcttgctaactaggccgtattttctgctaactgataattaagcacagtaatatatcaatgaaaccaaagcaagtatggcattaatggttattctaagagctgttatttttattgccaacttgctgaaatttataggaatactgccccagtaaagctggatgacattttatatatcattgtggaaatgattaccaacattatggaatttggatagaacacccatatgattgaagcagattttagaagtggtaagccaattatgtaaaaattaagcaaagtaaattaattaaattaagtaaagcatttcaaattttacctagcttttttacttttgtgacaatttgtgctacaagtgaagatccacagcagtctga

SEQ ID NO: 619895 - DNA, 565 bp, Homo sapiens
aaaaaaaaaaaaatccaggtaattcttttcagaaaaggtaaagtgtatttacatacttayatatgattaaaatttctgtttctatactcattttattaaaataaatgtttgaacactaaagttaaaagcactttttaaagcaacaacaaaacaagaagtgatgaaggaaatactcaagtcatggaggaaaacctggctaagaaagaatcaacacattggattttgacatattgtcaataactacaagatcatgttccttggaagcaaaattatagtttacatctaaagtatatgctttttattgtttcatgtaaattgttttataacaagttgtgataagtcatgtataaccaacaataatatttttcataaaatacttgtcaaagtaagtttcacaaagacaaaatagagtagagctaagctaattcattggttatggacagtaaggtgcaagagagtggtacaagagtgcagactcacagtttaaattattctgttaccattagatgcaggcatatagggtctgcacatgttacaatcaaaaccaatgtctgctacattttcc

SEQ ID NO: 619896 - DNA, 565 bp, Homo sapiens
aaaaaaaaaaaaatccaggtaattcttttcagaaaaggtaaagtgtatttacatacttatatatgattaaaatttctgtttctatactcattttattaaaataaatgtttgaacactaaagttaaaagcactttttaaagcaacaacaaaacaagaagtgatgaaggaaatactcaagtcatggaggaaaacctggctaagaaagaatcaacacattggattttracatattgtcaataactacaagatcatgttccttggaagcaaaattatagtttacatctaaagtatatgctttttattgtttcatgtaaattgttttataacaagttgtgataagtcatgtataaccaacaataatatttttcataaaatacttgtcaaagtaagtttcacaaagacaaaatagagtagagctaagctaattcattggttatggacagtaaggtgcaagagagtggtacaagagtgcagactcacagtttaaattattctgttaccattagatgcaggcatatagggtctgcacatgttacaatcaaaaccaatgtctgctacattttcc

SEQ ID NO: 619897 - DNA, 565 bp, Homo sapiens
aaaaaaaaaaaaatccaggtaattcttttcagaaaaggtaaagtgtatttacatacttatatatgattaaaatttctgtttctatactcattttattaaaataaatgtttgaacactaaagttaaaagcactttttaaagcaacaacaaaacaagaagtgatgaaggaaatactcaagtcatggaggaaaacctggctaagaaagaatcaacacattggattttgacatattgtcaataactacaagatcatgttccttggaagcaaaattatagtttacatctaaagtatatgctttttattgtttcatgtaaattgttttataacaagttgtgataagtcatgtataaccaacaataatatttttcataaaatacttgtcaaagtaagtttcacaaagacaaaatagagtagagctaagctaattcattggttatggacagtaaggtgcaagwgagtggtacaagagtgcagactcacagtttaaattattctgttaccattagatgcaggcatatagggtctgcacatgttacaatcaaaaccaatgtctgctacattttcc

SEQ ID NO: 619898 - DNA, 565 bp, Homo sapiens
aaaaaaaaaaaaatccaggtaattcttttcagaaaaggtaaagtgtatttacatacttatatatgattaaaatttctgtttctatactcattttattaaaataaatgtttgaacactaaagttaaaagcactttttaaagcaacaacaaaacaagaagtgatgaaggaaatactcaagtcatggaggaaaacctggctaagaaagaatcaacacattggattttgacatattgtcaataactacaagatcatgttccttggaagcaaaattatagtttacatctaaagtatatgctttttattgtttcatgtaaattgttttataacaagttgtgataagtcatgtataaccaacaataatatttttcataaaatacttgtcaaagtaagtttcacaaagacaaaatagagtagagctaagctaattcattggttatggacagtaaggtgcaagagagtggtacaagagtgcagactcacagtttaaattattctsttaccattagatgcaggcatatagggtctgcacatgttacaatcaaaaccaatgtctgctacattttcc

SEQ ID NO: 619899 - DNA, 596 bp, Homo sapiens
cttttaaaacctgtaacactgagtcttcaaacttaaaagccctaagcctcacatgctcctcctaccttgcccttttctcctaactatccctagtaacagaaaaactttcatagagctaaggaggaaataaaaaggaatgagaacaactattagagaggaagcaaagcacattacataaggaagctaattattttatcatcatatattaaatatttcaaagacagcaaggaagctagttagggcaaacacaaaggtattcagaaaackgcaaatggcagtgctagcatatatgggctccaggcaatgcatctcacttgaagtagacatatctcatggaaagcgatgttgaatggtaattgggaaataaagtaaaaagttgtcttgcaatggaacaaataattagtagccagagtcccaagaatactgtactactgataaaataatactatcaatatatgttcactgcttaacttctaaagagtacaacaatataccaatgaaagcaaggaaacattcttgattttgaaattccacataattacgtagggagggcagaaggtgctatctaatacctagatatctagtatctagagctt

SEQ ID NO: 619900 - DNA, 588 bp, Homo sapiens
taagttctgacgaactgcatgcatccatctaaaaagaccatatttgtacattttttttaaaaaatggaatatactgagaactgctaccttttaaaacctgtaacactgagtcttcaaacttaaaagccctaagcctcacatgctcctcctaccttgcccttttctcctaactatccctagtaacagaaaaactttcatagagctaaggaggaaataaaaaggaatgagaacaactattagagaggaagcaaagcacattacataaggaagctaattattttatcatcatatattaaatatttcaaagacagcaaggaagctagttagggcaaacacaaaggtattcagaaaacggcaaatggcagtgctagcatatatgggctccaggcaatgcatctcacttgaagtagacatatctcatggaaagcgatgttgaatggtaattgggaaataaagtaaaaagttgtcttgcaatggaacarataattagtagccagagtcccaagaatactgtactactgataaaataatactatcaatatatgttcactgcttaacttctaaagagtacaacaatataccaatgaa

SEQ ID NO: 619901 - DNA, 627 bp, Homo sapiens
  misc_feature 524, 525, 526, 527, 528, 529, 530, 531, 532, 533, 534, 535,536, 537, 538, 539, 540, 541, 542, 543, 544, 545, 546, 547,548, 549, 550, 551, 552, 553, 554, 555, 556, 557, 558, 559,560, 561, 562, 563, 564, 565, 566, 567, 568, 569, 570: n = A,T,C or G
  misc_feature 571, 572, 573, 574, 575, 576, 577, 578, 579, 580, 581, 582,583, 584, 585, 586, 587, 588, 589, 590, 591, 592, 593, 594,595, 596, 597, 598, 599, 600, 601, 602, 603, 604, 605, 606,607, 608, 609, 610, 611, 612, 613, 614, 615, 616, 617: n = A,T,C or G
  misc_feature 618, 619, 620, 621, 622, 623: n = A,T,C or G
ttcagtgacagagttccctcatgtcttctacccaggttgaagtccagcaaaattgcgactgtcctctttacaacttgcgagaccacaytgcttctgcatttgcctgttgtatgagatttacacttgttttaaagcaacattttgtttcagttgggctggtggccatacccggcactagccagtcaatagtgagatggctcctcatggaggaggcttggcttgaggctgagggtctttaacccacatatacaagagagttgccactaagggatggaagccaggctaataaccaagtgccacacagagttcctatctgtcccttctcaccatttttggctggcaggttttgagcattttagggcttgggaagatagtaatactaaatctactaaatacattacccatccttacaggctttggccagctgctgagcaaattaacttcacaactgaaagtggccacactggcatttgtggtccccactcctcttagaatttgtgagcgtgggccactgagggtgaggnnnnnnnnnnnnnnnnnnnnnnnnnnnnnnnnnnnnnnnnnnnnnnnnnnnnnnnnnnnnnnnnnnnnnnnnnnnnnnnnnnnnnnnnnnnnnnnnnnnnatat

SEQ ID NO: 619902 - DNA, 450 bp, Homo sapiens
atttctataaagcaagtgggaaatttatggagatggaatgtcacagcagtattgcttagggctggagatgggagtggggattaactgccagtgcrcaagagagaacttgggtgagggaaacatatttaaattagatcgtggtgttgggtgcacacagtatcaatttaataaagcatcaaattgcagaccttttcagtgggcaaactttatggtgggttcacacccaatataggtgttaaaaataaattaatgttatggaaattcttgtcgggtttttaacaagccaagagatatgctgtgaaagcagcattaattcaaatggttgtcacaggtcacttaatcagatagttgtcctacaaatatagggtgaatgttattcacgaatttcctgaatctattgcaataatcacatttttttccattaaactcttgaggtagctaattttattt

SEQ ID NO: 619903 - DNA, 337 bp, Homo sapiens
tggatgtaatatactaaaaatcacaagatctaaaatcagtaatatcatgtttcaattagggaactrtagaaaatagaggaatgcaatggaaagcaagtaaaagtaataaacaacatcacagaaatcaataaaattaaaacactgaaatcatcagaaaatcaataaaaccaaaagctggttctttgatatgctcattacaatgaatgaattgatatgcaggctaaccaagaaaaagaagataacacaaatgaccaatttcagaaataaaagaggagccatctctactgaactgttaggcattaaaaggaatattatgaacagttctatgaccgcagtt

SEQ ID NO: 619904 - DNA, 551 bp, Homo sapiens
ttatgcattaacctaacataatcaaatatactatataaattaatatggtgcttatgtacctagaagcagaaaggggcaatcaactaacatttattgagcacctacggaggcccaatactgggttgggcatgttcatacaygcttttaggagcctactgagcagagtaatagacaatggcacatattttaatgcctttttaaagtccacataattaccttatgctgtacatttaatgtccactatatttatagatatagtgaccagattttaaagaaatcaagtaagcttcactattattgatacataattgaaaatacatcaacaaaatctccatctacatttcctgcttagaatcaatagaaaaaataccaaaaaaaattaatgtaaagcatgagttcttagggacattttatgatcttagaggatttctatttagactatgaagctaggaattctgaagttcacattcacccctctgtttattctcccctctctcaagggtataagttagcagaatatttgggaatctccaaatccctaacaaacaact

SEQ ID NO: 619905 - DNA, 636 bp, Homo sapiens
cccacattataatgaaacagcaagtaatgagggtacagaataaaaattcagatcatgaggtacatgaaagcctaaaagctaccagagaagaaaataaaagagttaaattcaaaggaacacccatcagaatggcacaaaacttcccaactccagatgctagaagagtataagtttccaattctacaggaaaatacttttcaaagtacaattctcaacctagctacacaagcaactatgtgtgaagacagaatacgttgtagacacaggaagaytcaaaattcagctccttcattctccttctaataaagttacttagagatatgcggaacagaatgaagatgtattacaaagaaaaggaagacttgggatctataaatcaacagatccaacaaaggacatcaggccagggaagtttaaggatgagaacaacacacccagaagccactggcacatatcagagcaggagaagggaatgtctagaaggagggtaggacttctcccagaaaaaaacagtactttaaaaaataatcttatatgatagttctatagtaggcaaaaacaaagaacgaatggagagtcactattactttcttgttattaaaaactccatgaaagacaaaagaaactcatagtata

SEQ ID NO: 619906 - DNA, 636 bp, Homo sapiens
cccacattataatgaaacagcaagtaatgagggtacagaataaaaattcagatcatgaggtacatgaaagcctaaaagctaccagagaagaaaataaaagagttaaattcaaaggaacacccatcagaatggcacaaaacttcccaactccagatgctagaagagtataagtttccaattctacaggaaaatacttttcaaagtacaattctcaacctagctacacaagcaactatgtgtgaagacagaatacgttgtagacacaggaagattcaaaattcagctccttcattctccttctaataaagttacttagagatatgcggaacagaatgargatgtattacaaagaaaaggaagacttgggatctataaatcaacagatccaacaaaggacatcaggccagggaagtttaaggatgagaacaacacacccagaagccactggcacatatcagagcaggagaagggaatgtctagaaggagggtaggacttctcccagaaaaaaacagtactttaaaaaataatcttatatgatagttctatagtaggcaaaaacaaagaacgaatggagagtcactattactttcttgttattaaaaactccatgaaagacaaaagaaactcatagtata

SEQ ID NO: 619907 - DNA, 636 bp, Homo sapiens
cccacattataatgaaacagcaagtaatgagggtacagaataaaaattcagatcatgaggtacatgaaagcctaaaagctaccagagaagaaaataaaagagttaaattcaaaggaacacccatcagaatggcacaaaacttcccaactccagatgctagaagagtataagtttccaattctacaggaaaatacttttcaaagtacaattctcaacctagctacacaagcaactatgtgtgaagacagaatacgttgtagacacaggaagattcaaaattcagctccttcattctccttctaataaagttacttagagatatgcggaacagaatgaagatgtattacaaagaaaaggaagacttgggatctataaatcaacagatccracaaaggacatcaggccagggaagtttaaggatgagaacaacacacccagaagccactggcacatatcagagcaggagaagggaatgtctagaaggagggtaggacttctcccagaaaaaaacagtactttaaaaaataatcttatatgatagttctatagtaggcaaaaacaaagaacgaatggagagtcactattactttcttgttattaaaaactccatgaaagacaaaagaaactcatagtata

SEQ ID NO: 619908 - DNA, 636 bp, Homo sapiens
cccacattataatgaaacagcaagtaatgagggtacagaataaaaattcagatcatgaggtacatgaaagcctaaaagctaccagagaagaaaataaaagagttaaattcaaaggaacacccatcagaatggcacaaaacttcccaactccagatgctagaagagtataagtttccaattctacaggaaaatacttttcaaagtacaattctcaacctagctacacaagcaactatgtgtgaagacagaatacgttgtagacacaggaagattcaaaattcagctccttcattctccttctaataaagttacttagagatatgcggaacagaatgaagatgtattacaaagaaaaggaagacttgggatctataaatcaacagatccaacaaaggacatcaggccagggaagtttaaggatgagaacaacacacccagaagccactggcacatatcagagcaggagaagggaatgtctagaargagggtaggacttctcccagaaaaaaacagtactttaaaaaataatcttatatgatagttctatagtaggcaaaaacaaagaacgaatggagagtcactattactttcttgttattaaaaactccatgaaagacaaaagaaactcatagtata

SEQ ID NO: 619909 - DNA, 482 bp, Homo sapiens
catggtcataaaaatcggctgggcatggtggctcacacctgtaatcccagcactttgggaggtcaaggtgggcagatcacctgagatcaggagttygagaccagctggccaacatggtgaaaccctgtctctactaaaaatacaaacattagccaggtgtggtggcaggtgcctgtaatcccagctactcgggaggctgaggcaggagaatcacttgagcccaggaggtcaaggccgcaatgagcagtcattgtaccactgcattccagcctgggtgacagagcaggatgctctttcaaaaataaacataaaagtaaatctaatgagctctaggatttctaatttgaagatagaagcaataaacaaaatgagaaaccaaaatacattcgttttgattaaagcagaagtcagccataactctgaacctaaaaaggaggtcacctgaagcagctgtgagtaagcagggtaagaaaggaagcgga

SEQ ID NO: 619910 - DNA, 486 bp, Homo sapiens
cattcatggtcataaaaatcggctgggcatggtggctcacacctgtaatcccagcactttgggaggtcaaggtgggcagatcacctgagatcaggagtttgagaccagctggccaacatggtgaaaccctgwctctactaaaaatacaaacattagccaggtgtggtggcaggtgcctgtaatcccagctactcgggaggctgaggcaggagaatcacttgagcccaggaggtcaaggccgcaatgagcagtcattgtaccactgcattccagcctgggtgacagagcaggatgctctttcaaaaataaacataaaagtaaatctaatgagctctaggatttctaatttgaagatagaagcaataaacaaaatgagaaaccaaaatacattcgttttgattaaagcagaagtcagccataactctgaacctaaaaaggaggtcacctgaagcagctgtgagtaagcagggtaagaaaggaagcgga

SEQ ID NO: 619911 - DNA, 482 bp, Homo sapiens
catggtcataaaaatcggctgggcatggtggctcacacctgtaatcccagcactttgggaggtcaaggtgggcagatcacctgagatcaggagtttgagaccagctggccaacatggtgaaaccctgtctctactaaaaatacaaacattagccaggtgtggtggcaggtgcctgtaatcccagctactcgggaggctgaggcaggagaatcacttgagcccaggaggtcaaggccgcaatgagcagtcattgtaccactgcaytccagcctgggtgacagagcaggatgctctttcaaaaataaacataaaagtaaatctaatgagctctaggatttctaatttgaagatagaagcaataaacaaaatgagaaaccaaaatacattcgttttgattaaagcagaagtcagccataactctgaacctaaaaaggaggtcacctgaagcagctgtgagtaagcagggtaagaaaggaagcgga

SEQ ID NO: 619912 - DNA, 482 bp, Homo sapiens
catggtcataaaaatcggctgggcatggtggctcacacctgtaatcccagcactttgggaggtcaaggtgggcagatcacctgagatcaggagtttgagaccagctggccaacatggtgaaaccctgtctctactaaaaatacaaacattagccaggtgtggtggcaggtgcctgtaatcccagctactcgggaggctgaggcaggagaatcacttgagcccaggaggtcaaggccgcaatgagcagtcattgtaccactgcattccagcctgggtgacagagcaggatgctctttcaaaaataaacataaaagtaaatctaatgagctctaggatttctaatttgaagatagaagcrataaacaaaatgagaaaccaaaatacattcgttttgattaaagcagaagtcagccataactctgaacctaaaaaggaggtcacctgaagcagctgtgagtaagcagggtaagaaaggaagcgga

SEQ ID NO: 619913 - DNA, 603 bp, Homo sapiens
acacccagaagccactggcacatatcagagcaggagaagggaatgtctagaaggagggtaggacttctcccagaaaaaaacagtactttaaaaaataatcttatatgatagttctatagtaggcaaaaacaaagaacgaatggagagtcactattactttcttgttattaaaaactccatgaaagacaaaagaaactcatagtatactgtttagatctgcagtgaacatttactgagtcataaccaacaccttattaattgaactaaacatagtaatacaactatattgggagaaggaaggaggtgtattttaagacctaaatcagaatttatttattcatagcagaaagtcaacaaaatctagcattgataaagcagtaaaccagttgattatttagagctatagcattaaccacaagaaaaaagacctgaaaagattaaaagtgattscctcagatgtggaggtagagtaagacaagagtttggttgttcattacaaggccttttttttttttttttgagatggaatcttgctctgttgcctgggctggagtgcagtggtgtgatctcagctcactgcaacctccggctcccatgttcaaa

SEQ ID NO: 619914 - DNA, 603 bp, Homo sapiens
acacccagaagccactggcacatatcagagcaggagaagggaatgtctagaaggagggtaggacttctcccagaaaaaaacagtactttaaaaaataatcttatatgatagttctatagtaggcaaaaacaaagaacgaatggagagtcactattactttcttgttattaaaaactccatgaaagacaaaagaaactcatagtatactgtttagatctgcagtgaacatttactgagtcataaccaacaccttattaattgaactaaacatagtaatacaactatattgggagaaggaaggaggtgtattttaagacctaaatcagaatttatttattcatagcagaaagtcaacaaaatctagcattgataaagcagtaaaccagttgattatttagagctatagcattaaccacaagaaaaaagacctgaaaagattaaaagtgattgcctcagatgtggaggtagagtaagacaagagtttggttgttcattacaaggccttttttttttttttttgagatggartcttgctctgttgcctgggctggagtgcagtggtgtgatctcagctcactgcaacctccggctcccatgttcaaa

SEQ ID NO: 619915 - DNA, 594 bp, Homo sapiens
tactgagtcataaccaacaccttattaattgaactaaacatagtaatacaactatattgggagaaggaaggaggtgtattttaagacctaaatcagaatttatttattcatagcagaaagtcaacaaaatctagcattgataaagcagtaaaccagttgattatttagagctatagcattaaccacaagaaaaaagacctgaaaagattaaaagtgattgcctcagatgtggaggtagagtaagacaagagtttggttgttcattacaaggccttttttttttttttttgagatggaatcttgctctgttgcctgggctggagtgcagtggtgtgatctcagctcactgcaacctccggctcccatgttcaaataattctcctggctcagcctcctgagtagctaggactagaggaatgagccaccacactcggctaatttttgtatttttagtagagatggggttttactgtgttggccaggctggcttgaactcctgccctcaagtgatccacccgcctyggcctcccaaagtgctgggatgacaggtgtgaggcaccacacccggcccattacaaggcttttaatgtcatt

SEQ ID NO: 619916 - DNA, 531 bp, Homo sapiens
ttatgcagtagatatatggtacttgcataaaaagaaatacctagaactatggacaaaaacagggaggacaaaaacaacacaaatatggacacagtcaactgactttgataaagaacaccacaaygtggaaggcagagtctgatcaatgaatagctttgagaaaaatgatatccggatgcaaaagcgagaaacaggacccttattttacacgatgtatgaaaatcaaccgccccccccatcaactgaaggccaaaacaaaataccataaaccacaaaatgttttttaaaaaattactgtgtttacttaagtaaaacacaggttgagcatatattttgggtcacttgaatctctgttaacctttgcaaagaggaaaagaaacaaacaccctggaagaaaaacctcactgacaattaaatgctttgttactgatgcatattttctaatatgggtgaccattatgacacgcataaaacgcaaaaaaaaaaaaaatatgggactacatcaacgtgaaaagtttctgcatggcaaag

SEQ ID NO: 619917 - DNA, 531 bp, Homo sapiens
ttatgcagtagatatatggtacttgcataaaaagaaatacctagaactatggacaaaaacagggaggacaaaaacaacacaaatatggacacagtcaactgactttgataaagaacaccacaatgtggaaggcagagtctgatcaatgaatagctttgagaaaaatgatatccggatgcaaaagcgagaaacaggacccttattttacacgatgtatgaaaatcaaccgccccccccatcaactgaaggccaaaacaaaataccataaaccacaaaatgttttttaaaaaattactgtgtttacttaagtaaaacacaggttgagcatatattttgggtcacttgaatctctgttaacctttgcaaagaggaaaagaaacaaacaccctggaagaaaaacctcaytgacaattaaatgctttgttactgatgcatattttctaatatgggtgaccattatgacacgcataaaacgcaaaaaaaaaaaaaatatgggactacatcaacgtgaaaagtttctgcatggcaaag

SEQ ID NO: 619918 - DNA, 581 bp, Homo sapiens
ccaaactctccgtggctctcctttgccctcagagtcaagcccatgcttctcactgtgggctccaggacctaggtggcctgaccartgcacaccctatcacgatctcctcctctgcccacttgctcacgctgtccagtcacacacactatttttgcaaatgccaagctcctgatcaccgctgggcctttgccactgcagttccgcctgccaggaccagtctttccctagaccttcccattcctgcctcttcctggcttggctgcctctttctggtgcttcaggtctcagatcaaatgtcacctcttcagagaggacttcattgaaatctctgcctaacacagcccgtatcaaggtcaacacttttctttttagacttaggttttgatataaagaagtttcataaaaatgacttgggcagctatcatctgtttaaaaggtctgactttgctgaaataatgtgggctttcctgttctttgagttttgataaaacaactgtaaaaccatctgcctttttaaaaaaaattgagattgatgtatactttctgttattactatttttttacattctgtctcccaggct

SEQ ID NO: 619919 - DNA, 581 bp, Homo sapiens
ccaaactctccgtggctctcctttgccctcagagtcaagcccatgcttctcactgtgggctccaggacctaggtggcctgaccagtgcacaccctatcacgatctcctcctctgcccacttgctcacgctgtccagtcacacacactatttttgcaaatgccaagctcctgatcaccgctgggcctttgccactgcagttccgcctgccaggaccagtctttccctagaccttcccattcctgcctcttcctggcttggctgcctctttctggtgcttcaggtctcagatcaaatgtcacctcttcagagaggacttcattgaaatctctgcctaacacagcccgtatcaaggtcaacacttttctttttagacttaggttttgatataaagaagtttcataaaaatgacttgggcagctatcatctgtttaaaaggtctgactttgytgaaataatgtgggctttcctgttctttgagttttgataaaacaactgtaaaaccatctgcctttttaaaaaaaattgagattgatgtatactttctgttattactatttttttacattctgtctcccaggct

SEQ ID NO: 619920 - DNA, 581 bp, Homo sapiens
ccaaactctccgtggctctcctttgccctcagagtcaagcccatgcttctcactgtgggctccaggacctaggtggcctgaccagtgcacaccctatcacgatctcctcctctgcccacttgctcacgctgtccagtcacacacactatttttgcaaatgccaagctcctgatcaccgctgggcctttgccactgcagttccgcctgccaggaccagtctttccctagaccttcccattcctgcctcttcctggcttggctgcctctttctggtgcttcaggtctcagatcaaatgtcacctcttcagagaggacttcattgaaatctctgcctaacacagcccgtatcaaggtcaacacttttctttttagacttaggttttgatataaagaagtttcataaaaatgacttgggcagctatcatctgtttaaaaggtctgactttgctgaaataatktgggctttcctgttctttgagttttgataaaacaactgtaaaaccatctgcctttttaaaaaaaattgagattgatgtatactttctgttattactatttttttacattctgtctcccaggct

SEQ ID NO: 619921 - DNA, 376 bp, Homo sapiens
gatgtatctactgccagccccatggggtcagaactacaggggaaggatggggactgtgggattccagaggaacaacagggagggcttcttggaggaatgcttgttcttgagctgagtttttttttttctctgtagctcagtctgaaatgcagtggcacaatcactgctcactgcagccttgaccttccatgctcaattgatcctcctacttcagggtgggactacaggcacatgccaccacacacagctaatttttgtattttttgtagagatggggttacatcakgttgttcaggctggtctcaaactcctgggttcaagtaatcctcctgtcttggcctctcagagtgctggaattacaggcatgaaccacctt

SEQ ID NO: 619922 - DNA, 376 bp, Homo sapiens
gatgtatctactgccagccccatggggtcagaactacaggggaaggatggggactgtgggattccagaggaacaacagggagggcttcttggaggaatgcttgttcttgagctgagtttttttttttctctgtagctcagtctgaaatgcagtggcacaatcactgctcactgcagccttgaccttccatgctcaattgatcctcctacttcagggtgggactacaggcacatgccaccacacacagctaatttttgtattttttgtagagatggggttacatcatgttgttcaggctggtctcaaactcctgggttcaagtaatcctcctgtcttggcctctcagagtgctggaattrcaggcatgaaccacctt

SEQ ID NO: 619923 - DNA, 517 bp, Homo sapiens
ccacaaccaggggaaagtacatctactgggaatktgtaagctgcacaattaccagagcttgcaaaaggctcaaagacaagtgaagcacaaccagtcagagtacaaagacactggtgaacagggggtagaattcagtagtgatcccagaaaggccaagtcttaagtatagggttaaactaatgctaggactgcagctaccaaaatgtggactagggaaccccagtgggtctgtaaagttaaaacaagtttaaataatactaagatttaatttgccttttttcactttaatttattcacaatgatacagtggtgtttatagaagctacatgttgtatcataatattacattgacattgtacaggttgtgcttctgtagtcttgtgttacaaaatgttcctagttttaatttctaaaatgctgaatagtccatagttaaaatcctcatgaacaaaaactatggcgtccccagtaattttaaagagtgttaaggttctaaaaccataaagtttgaaaatat

SEQ ID NO: 619924 - DNA, 521 bp, Homo sapiens
aaccaggggaaagtacatctactgggaatttgtaagctgcacaattaccagagcttgcaaaaggctcaaagacaagtgaagcacaaccagtcagagtacaaagacactggtgaacagggggtagaattcagtagtgatcccagaaaggccaagtcttaagtatagggttaaactaatgctaggactgcagctaccaaaatgtggactagggaaccccagtgggtctgtaaagttaaaacaagtttaaataatactaagatttaatttgccttttttcactttaatttattcacaatkatacagtggtgtttatagaagctacatgttgtatcataatattacattgacattgtacaggttgtgcttctgtagtcttgtgttacaaaatgttcctagttttaatttctaaaatgctgaatagtccatagttaaaatcctcatgaacaaaaactatggcgtccccagtaattttaaagagtgttaaggttctaaaaccataaagtttgaaaatatccacctta

SEQ ID NO: 619925 - DNA, 524 bp, Homo sapiens
gatgaggtgatgccccaccctgcttcagctcaccctctccgtgggctacayccactgtccaaccagttccaggtacttcagttggaaatgcagaaatcatctgtcttctgtgttgatagtgctggaagctgtagaccagagctgttcctatttggccatcttggtgcctccccatgttttttttttttttttttttctgatttcaacttgacagcagaactcaaccatgctgatggtgcagacacatgttggtgggaacttttcattgtttgattctgacatttatgataaatggattcacttactaaagttttgtagagagagtaataaccatgtaataacctagatcatatttcctttataaaatcaaacatacctggtggttttagagcaatattttttacctcagtcacttgtgtttattagacaagaatactaagtgtcaagatgtttgcattgcctttcatatttttatttaggggacagtgtaatgataaatgactttgaatatataaccagacaca

SEQ ID NO: 619926 - DNA, 524 bp, Homo sapiens
gatgaggtgatgccccaccctgcttcagctcaccctctccgtgggctacatccactgtccaaccagttccaggtacttcagttggaaatgcagaaatcatctgtcttctgtgttgatagtgctggaagctgtagaccagagctgttcctatttggccatcttggtgcctccccatgttttttttttttttttttttctgatttcaacttgacagcagaactcaaccatgctgatggtgcagacacatgttggtgggaacttttcattgtttgattctgacatttatgataaatggattcacttactaaagttttgtagagagagtaataaccatktaataacctagatcatatttcctttataaaatcaaacatacctggtggttttagagcaatattttttacctcagtcacttgtgtttattagacaagaatactaagtgtcaagatgtttgcattgcctttcatatttttatttaggggacagtgtaatgataaatgactttgaatatataaccagacaca

SEQ ID NO: 619927 - DNA, 479 bp, Homo sapiens
actgtccaaaacagtgtcgtataaaaggaaccacacataatttttaaaaacaggaataactagrtgtctgatagtgcactaattgtccaatcttaacttatgtaagtcgtactcatctgtaaaatgggaattcggtaattgttggatgggttaaaagaaatacattactaccttgaaagggatcttattcaatttccttaggtccaaaacattaagtattctaaaaaacaaaatctaatgatagcagctacttttatacagaatataaagtacaaagaagaaaagaaacatgttttatgcatatataactccatttttaattggctttatatactctgtgtttttcagtcacataccatgagcaactaattttaaaaaactacataaattaaccgtactagtcttctattttggatagtattaattacaatctttcattttgattcctaaattcacaaaaacctgtattaccctataaa

SEQ ID NO: 619928 - DNA, 544 bp, Homo sapiens
tatttctagatattgctgtatttctcaatgagactgcagtattctatactgtccaaaacagtgtcgtataaaaggaaccacacataatttttaaaaacaggaataactagatgtctgatagtgcactaattgtccaatcttaacttatgtaagtcgtactcatctgtaaaatgggaattcggtaattgttggatgggttaaaagaaatacattactaycttgaaagggatcttattcaatttccttaggtccaaaacattaagtattctaaaaaacaaaatctaatgatagcagctacttttatacagaatataaagtacaaagaagaaaagaaacatgttttatgcatatataactccatttttaattggctttatatactctgtgtttttcagtcacataccatgagcaactaattttaaaaaactacataaattaaccgtactagtcttctattttggatagtattaattacaatctttcattttgattcctaaattcacaaaaacctgtattaccctataaaataaatactagtgtagtt

SEQ ID NO: 619929 - DNA, 479 bp, Homo sapiens
actgtccaaaacagtgtcgtataaaaggaaccacacataatttttaaaaacaggaataactagatgtctgatagtgcactaattgtccaatcttaacttatgtaagtcgtactcatctgtaaaatgggaattcggtaattgttggatgggttaaaagaaatacattactaccttgaaagggatcttattcaatttcsttaggtccaaaacattaagtattctaaaaaacaaaatctaatgatagcagctacttttatacagaatataaagtacaaagaagaaaagaaacatgttttatgcatatataactccatttttaattggctttatatactctgtgtttttcagtcacataccatgagcaactaattttaaaaaactacataaattaaccgtactagtcttctattttggatagtattaattacaatctttcattttgattcctaaattcacaaaaacctgtattaccctataaa

SEQ ID NO: 619930 - DNA, 544 bp, Homo sapiens
tatttctagatattgctgtatttctcaatgagactgcagtattctatactgtccaaaacagtgtcgtataaaaggaaccacacataatttttaaaaacaggaataactagatgtctgatagtgcactaattgtccaatcttaacttatgtaagtcgtactcatctgtaaaatgggaattcggtaattgttggatgggttaaaagaaatacattactaccttgaaagggatcttattcaatttccttaggtccaaaacattaagyattctaaaaaacaaaatctaatgatagcagctacttttatacagaatataaagtacaaagaagaaaagaaacatgttttatgcatatataactccatttttaattggctttatatactctgtgtttttcagtcacataccatgagcaactaattttaaaaaactacataaattaaccgtactagtcttctattttggatagtattaattacaatctttcattttgattcctaaattcacaaaaacctgtattaccctataaaataaatactagtgtagtt

SEQ ID NO: 619931 - DNA, 435 bp, Homo sapiens
gctgcattccaaactggagaagcaaagagagagtaggcaaagactggaaacagaaatgcaatcatgtggttgtagactsaatgctgctctatgtgatcatgatcaaagtcactcatcagaaaaagatcaagagcttgctttccagggcacagtagataaatggtgtcatttacaggaaaatttgaatttttgtattctgattctttctctgcaactttccaaagctgagagtaagtccagagtcctcgaaactgagctccattacacaagagaggctctgaaagaaaaggctttggtttttgaacacgtgcaaagtgagctaaagcaaaaacagagttgaatgaaggacactgaaaaaatgtacaaaagtggatacagtacaatggaaaaatgcatagaaaagcaggaaagattttgtcaactaaacaaaatatg

SEQ ID NO: 619932 - DNA, 435 bp, Homo sapiens
gctgcattccaaactggagaagcaaagagagagtaggcaaagactggaaacagaaatgcaatcatgtggttgtagactgaatgctgctctatgtgatcatgatcaaagtcaytcatcagaaaaagatcaagagcttgctttccagggcacagtagataaatggtgtcatttacaggaaaatttgaatttttgtattctgattctttctctgcaactttccaaagctgagagtaagtccagagtcctcgaaactgagctccattacacaagagaggctctgaaagaaaaggctttggtttttgaacacgtgcaaagtgagctaaagcaaaaacagagttgaatgaaggacactgaaaaaatgtacaaaagtggatacagtacaatggaaaaatgcatagaaaagcaggaaagattttgtcaactaaacaaaatatg

SEQ ID NO: 619933 - DNA, 435 bp, Homo sapiens
gctgcattccaaactggagaagcaaagagagagtaggcaaagactggaaacagaaatgcaatcatgtggttgtagactgaatgctgctctatgtgatcatgatcaaagtcactcatcagaaaaagatcaagagcttgctttccagggcacagtagataaatggtgtcatttacaggaaaatttgaatktttgtattctgattctttctctgcaactttccaaagctgagagtaagtccagagtcctcgaaactgagctccattacacaagagaggctctgaaagaaaaggctttggtttttgaacacgtgcaaagtgagctaaagcaaaaacagagttgaatgaaggacactgaaaaaatgtacaaaagtggatacagtacaatggaaaaatgcatagaaaagcaggaaagattttgtcaactaaacaaaatatg

SEQ ID NO: 619934 - DNA, 435 bp, Homo sapiens
gctgcattccaaactggagaagcaaagagagagtaggcaaagactggaaacagaaatgcaatcatgtggttgtagactgaatgctgctctatgtgatcatgatcaaagtcactcatcagaaaaagatcaagagcttgctttccagggcacagtagataaatggtgtcatttacaggaaaatttgaatttttgtattctgattctttctctgcaactttccaaagctgagagtaagtccagagtcctcgaaactgagytccattacacaagagaggctctgaaagaaaaggctttggtttttgaacacgtgcaaagtgagctaaagcaaaaacagagttgaatgaaggacactgaaaaaatgtacaaaagtggatacagtacaatggaaaaatgcatagaaaagcaggaaagattttgtcaactaaacaaaatatg

SEQ ID NO: 619935 - DNA, 544 bp, Homo sapiens
tatttctagatattgctgtatttctcaatgagactgcagtattctatactgtccaaaacagtgtcgtataaaaggaaccacacataatttttaaaaacaggaataactagatgtctgatagtgcactaattgtccaatcttaacttatgtaagtcgtactcatctgtaaaatgggaattcggtaattgttggatgggttaaaagaaatacattactaccttgaaagggatcttattcaatttccttaggtccaaaacattaagtattctaaaaaacaaaatctaatgatagcagctacttttatacagaatataaagtacaaagaagaaaagaaacatgttttatgcatatataactccatttttaattggctttatatactctgtgtttttcagtcacataccatgagcaactaattttaaaaaactacakaaattaaccgtactagtcttctattttggatagtattaattacaatctttcattttgattcctaaattcacaaaaacctgtattaccctataaaataaatactagtgtagtt

SEQ ID NO: 619936 - DNA, 616 bp, Homo sapiens
aaatctaatgatagcagctacttttatacagaatataaagtacaaagaagaaaagaaacatgttttatgcatatataactccatttttaattggctttatatactctgtgtttttcagtcacataccatgagcaactaattttaaaaaactacataaattaaccgtactagtcttctattttggatagtattaattacaatctttcattttgattcctaaattcacaaaaacctgtattaccctataaaataaatactagtgtagttatcaacaaagaaktctgaaggagataatgttgatttgcttactatactgacattttactgacaatgatataacacagtgatgtctgaagggcaggggagaatggtataaaaatcactcatggttcacaacctattattgaaactgaggttagtatttatattacatggtatggcaatactagaaaagatttccttgtggagtatacagtttaagacctctgctgtacagctatacctccatgcttgcttccagtggccatgacactttattcaaatatgtaagttttattaagactgagttcttaaaaagaaaaaaccaagaaccttagatacaactagtgaagtattg

SEQ ID NO: 619937 - DNA, 201 bp, Homo sapiens
gccaacaactgttcatctgtagctagytaactaatataaagtgttttggggtactaattttagtggatggctttcttttgtatttttattataattaattttattaaaattttatagtggatggctttcttttgtattttccttattattaattttattaaaattttattataacgcacctatatcttaatctcttttatt

SEQ ID NO: 619938 - DNA, 201 bp, Homo sapiens
gccaacaactgttcatctgtagctagctaactaatataaagtgttttggggtactaattttagtggatggctttcttttgtatttttattataattaattttattaaaattttatagtggatggctttcttttgtattttccttattattaattttattaaaattttattataaygcacctatatcttaatctcttttatt

SEQ ID NO: 619939 - DNA, 619 bp, Homo sapiens
atttatattacatggtatggcaatactagaaaagatttccttgtggagtatacagtttaagacctctgctgtacagctatacctccatgcttgcttccagtggccatgacactttattcaaatatgtaagttttattaagactgagttcttaaaaagaaaaaaccaagaaccttagatacaactagtgaagtattgagacctgtccatatttaaaaccaagcacacgataccacttaaaaggttccmcagaaagcctctatcctgaaatgcttgaaagtgagcagtgctgactctcgattattaccaattgcattaaatatgacacttgttttgtttcttttggctataaggagaaaatgtcattttgtatatgagtgagcacagaggagagagaatgcggtaaagaacagaataggctaataattttttactaaatactccagttctcagctttttaaatcaacagacaaaatgaatcagctaaacctaaaatctttgtgaatagtataaattgtcttttaaattaaatgcatatatttttatgttttactttttcaagacaaaagcaggatattagtacaatataagatttatagaggagcaaatttcttcagatag

SEQ ID NO: 619940 - DNA, 619 bp, Homo sapiens
atttatattacatggtatggcaatactagaaaagatttccttgtggagtatacagtttaagacctctgctgtacagctatacctccatgcttgcttccagtggccatgacactttattcaaatatgtaagttttattaagactgagttcttaaaaagaaaaaaccaagaaccttagatacaactagtgaagtattgagacctgtccatatttaaaaccaagcacacgataccacttaaaaggttccacagaaagcctctatcctgaaatgcttgaaagtgagcagtgctgactctcrattattaccaattgcattaaatatgacacttgttttgtttcttttggctataaggagaaaatgtcattttgtatatgagtgagcacagaggagagagaatgcggtaaagaacagaataggctaataattttttactaaatactccagttctcagctttttaaatcaacagacaaaatgaatcagctaaacctaaaatctttgtgaatagtataaattgtcttttaaattaaatgcatatatttttatgttttactttttcaagacaaaagcaggatattagtacaatataagatttatagaggagcaaatttcttcagatag

SEQ ID NO: 619941 - DNA, 562 bp, Homo sapiens
aattacaatctttcattttgattcctaaattcacaaaaacctgtattaccctataaaataaatactagtgtagttatcaacaaagaagtctgaaggagataatgttgatttgcttactatactgacattttactgacaatgatataacacagtgatgtctgaagggcaggggagaatggtataaaaatcactcatggttcacaacctattattgaaactgaggttagtatttatattacatggtatggcaatactagaaaagatttccttgtggagtatacagtttaagacctctgctgtacagctatacctccatgcttgcttccagtggccatgacactttattcaaatatgtaagttttattaagactgagttcttaaaaagaaaaaaccaagaaccttagatacaactagtgaagtattgagacctgtccatatttaaaaccaagcacacgataccacttaaaaggttccacagaaagcctctatcctgaaatgcttgaaagtgagcagtgctgactctcgattattaccrattgcattaaatatgacacttgttttg

SEQ ID NO: 619942 - DNA, 624 bp, Homo sapiens
catgcttgcttccagtggccatgacactttattcaaatatgtaagttttattaagactgagttcttaaaaagaaaaaaccaagaaccttagatacaactagtgaagtattgagacctgtccatatttaaaaccaagcacacgataccacttaaaaggttccacagaaagcctctatcctgaaatgcttgaaagtgagcagtgctgactctcgattattaccaattgcattaaatatgacacttgttttgtttcttttggctataaggagaaaatgtcattttgtatatgagtgagcacagaggagagagaatgcggtaaagaacagaataggctaataattttttactaaatactccagttctcagctttttaaatcaacagacaaaatgaatcagctaaacctaaaatctttgtgaatagtataaattgtcttttaaattaaatgcatatatttttatgttttactttttcaagacaaaagcaggatattagtacaatataagatttatagaggagcaaatttcttsagataggaaacccttaaaagcagtatttaaagtgcttaaatactgtcacatatgtttaataatcataatacttaattgtgagaactgggagctcat

SEQ ID NO: 619943 - DNA, 239 bp, Homo sapiens
agcaatttatagtcatatgaaccctaatgactacaagtgttaataatgccaatattcatcattagggagtaagtaaagccatgacaaatccaaacattasgaaagtacgaaacattttaaaagtagggaggtagaaacttgtatagactgccatgaaagaaattatcaaaaagacactgttgagtgaaaaaataaattgcagaacagtatttgaggtatagcactataatataaaaaca

SEQ ID NO: 619944 - DNA, 533 bp, Homo sapiens
ttttattatccttatttgagatgagtgtgctgaggaataaaatggttaagtaasttgtccaaggtcgcttagctagcaagcctggctccagcgtccctgggttggaagcatattctgtactgctacatcagcataaaagttcatttttgctagtgtgtaacagtattcttcctgtcattaaaattaagtcagtttccttcactattcaacagttctcttatgaactcaacatttctacctcattcaccattgtatttagaggaaaatttattattattgttattacttttatttttgagacaagaacttgatccgtcactcaggttggactgcagtggtgtgatcacagctcactgcagcctagaactcttgggctcaagtgatcctcctgcttctgcctcccaaagtgccaggattacaggagtaagccaaagcgtccagccaggaaaaattatttgaggattacaggaaagctgacaaaaggctttgtgaaagctttgctttaaataatctgaataataaatacttgaaat

SEQ ID NO: 619945 - DNA, 533 bp, Homo sapiens
ttttattatccttatttgagatgagtgtgctgaggaataaaatggttaagtaagttgtccaaggtcgcttagctagcaagcctggctccagcgtccctgggttggaagcatattctgtactgctacatcagcataaaagttcatttttgctagtgtgtaacagtattcttcctgtcattaaaattaagtcagtttccttcactattcaacagttctcttatgaactcaacatttctacctcattcaccattgtatttagaggaaaatttattattattgttattacttttatttttgagacaagaacttgatccgtcactcaggttggastgcagtggtgtgatcacagctcactgcagcctagaactcttgggctcaagtgatcctcctgcttctgcctcccaaagtgccaggattacaggagtaagccaaagcgtccagccaggaaaaattatttgaggattacaggaaagctgacaaaaggctttgtgaaagctttgctttaaataatctgaataataaatacttgaaat

SEQ ID NO: 619946 - DNA, 591 bp, Homo sapiens
cattcaccattgtatttagaggaaaatttattattattgttattacttttatttttgagacaagaacttgatccgtcactcaggttggactgcagtggtgtgatcacagctcactgcagcctagaactcttgggctcaagtgatcctcctgcttctgcctcccaaagtgccaggattacaggagtaagccaaagcgtccagccaggaaaaattatttgaggattacaggaaagctgacaaaaggctttgtgaaagctttgctttaaataatctgaataataaatacttgaaatggaaataatttatctgacttcttacacaagaaataaacctatgggaaaatgtgttaaattccctgataatttcagacattaagtaccagagtatggtgttccctgccccctcacccttgttygtactaattaattactccttgaaaaaacctggcacctacctaagtagatgaattatgtatatttaaaattatccagatgctcaggaaaatacttaggtgtttccctcaccataagttaaataatatgtcatatcttcaactgatgtcccttatcatagtttgaaatgaacttattc

SEQ ID NO: 619947 - DNA, 511 bp, Homo sapiens
aataagatacaatagggaaaagatggtgtcttcaataagtagtggtaagaaaactagatatctatatgcaaaagaatgaaactggacctgatgcctrtcttacacatcatacataaaaagcaactcaaaatagattaaatacctaacacctgaaaccataaaactcctagaaggaaatataggagaaaaactccttaatatcctccttgacaatgattttttggatatcacaccaaaagctcaggtagcaaaagcaaaattaagcaagtgggactacatcaagcaaataagcttctgcatagcaataaaaaaaaaccaaacggggtaaaaaggtagcacagggattaggggaaaatattggcaaaccacacatctgataaggcgttaaaatccaaaacatataaggaactcacacaactcagtagcaaaaaaaaaaccccaaataactggattttaaaataggcaaggacctgaatagccatttttccaaagtcacacaaatggtcaaatg

SEQ ID NO: 619948 - DNA, 520 bp, Homo sapiens
ctcatgaactgcaattactgcaccaaaaagtaaataaaagtcaatgacactttaagaattaacactagaaraaagtattggggggttatttttcttctaccaactatcaatctacttaaaaggagaaatggataaccataaggaattctatattctatagctataaacaaccaaaaccagtaggccaaagaatgcaatgagaaacataagcaatcgataaatgcataaactttaaactgtagagagctggtaacattaaaatgcaaataccattataatcttagcatttaatcactctttcttcagtgaccattagttgtcggtttggtttcggtttttacttagggaaatgaatactttatggaaattacatccaatggacaaaagtgaagaaacgttaaagcaaattgtcctaaatttgcaaattaaaatgcctaaagtacctgataaattatatagaaattagtatcttattaaaatctatataactaaaactaaagcattttacttccaaacaacc

SEQ ID NO: 619949 - DNA, 520 bp, Homo sapiens
ctcatgaactgcaattactgcaccaaaaagtaaataaaagtcaatgacactttaagaattaacactagaaaaaagtattggggggttatttttcttctaccaactatcaatctacttaaaaggagaaatggataaccataaggaattctatattctatagctataaacaaccaaaaccagtaggccaaagaatgcaatgagaaacataagcaatcgataaatgcataaactttaaactgtagagagctggtaacattaaaatgcaaataccattataatcttagcatttaatcactctttcttcagtgaccattagttgtcggtttggtttcggtttttacttagggaaatgaatactttatggaaattacatccaatggacaaaagtgaagaaacgttaaagcaaattgtcctaaatttgcaaattaaaatgcctaaagtacctgataaattatatagaaaktagtatcttattaaaatctatataactaaaactaaagcattttacttccaaacaacc

SEQ ID NO: 619950 - DNA, 393 bp, Homo sapiens
attaaaataaccagaaataagaatgtgactactcttggggtaagagataggtaatggaataacagtattttggaaaagccacacaagcaatagactggtttmatttttaagtcacaaactcaacccacacacattgaagtccagcaatccaactcattctctccagcaaacactttatttttctccctccaggattaccctcaggtgttctttcttacccatcaaatctctaacctagctcaggtaatcactaggctgatttcactgagcagcaaccactgcaggtcagttacctcactttcataatttccaatcaacttgaatctgtacctatgtcttcttccctactattagtagggaggtgttgtcaaaagccatttctcttttctcatt

SEQ ID NO: 619951 - DNA, 393 bp, Homo sapiens
attaaaataaccagaaataagaatgtgactactcttggggtaagagataggtaatggaataacagtattttggaaaagccacacaagcaatagactggtttaatttttaagtcacaaactcaacccacacacattgaagtccagcaatccaactcattctctccagcaaacactttatttttctccctccaggattaccctcaggtgttctttcttacccatcaaatctctaacctagctcaggtaatcactakgctgatttcactgagcagcaaccactgcaggtcagttacctcactttcataatttccaatcaacttgaatctgtacctatgtcttcttccctactattagtagggaggtgttgtcaaaagccatttctcttttctcatt

SEQ ID NO: 619952 - DNA, 511 bp, Homo sapiens
aataagatacaatagggaaaagatggtgtcttcaataagtagtggtaagaaaactagatatctatatgcaaaagaatgaaactggacctgatgcctgtcttacacatcatacataaaaagcaactcaaaatagattaaatacctaacacctgaaaccataaaactcctagaaggaaatataggagaaaaactccttaatatcctccttgacaatgattttttggatatcacaccaaaagctcaggtagcaaaagcaaaawtaagcaagtgggactacatcaagcaaataagcttctgcatagcaataaaaaaaaaccaaacggggtaaaaaggtagcacagggattaggggaaaatattggcaaaccacacatctgataaggcgttaaaatccaaaacatataaggaactcacacaactcagtagcaaaaaaaaaaccccaaataactggattttaaaataggcaaggacctgaatagccatttttccaaagtcacacaaatggtcaaatg

SEQ ID NO: 619953 - DNA, 511 bp, Homo sapiens
aataagatacaatagggaaaagatggtgtcttcaataagtagtggtaagaaaactagatatctatatgcaaaagaatgaaactggacctgatgcctgtcttacacatcatacataaaaagcaactcaaaatagattaaatacctaacacctgaaaccataaaactcctagaaggaaatataggagaaaaactccttaatatcctccttgacaatgattttttggatatcacaccaaaagctcaggtagcaaaagcaaaattaagcaagtgggactacatcaagcaaataagcttctgcatagcaataaaaaaaaaccaaacggggtaaaaaggtagcacagggattaggggaaaatattggcaaaccacacatctgataaggsgttaaaatccaaaacatataaggaactcacacaactcagtagcaaaaaaaaaaccccaaataactggattttaaaataggcaaggacctgaatagccatttttccaaagtcacacaaatggtcaaatg

SEQ ID NO: 619954 - DNA, 487 bp, Homo sapiens
acatttgtttatgcttaggacacaacacagaagataattttctaagttaaagattgtatgattttatcttgacttcagaaactggtcatacttttttactttagtttctaagaacctcagagctgaacttgaaacaactttaataattccaatgagrcatttgttatttatcctttttaaaaaagacttttctaatttaaatcattttattattgctctaaatttgccaggttcattttagaattttataaactgttttaaaactaatttacattaagttggaataaagttaaccaaattaatacaaacatattttattgcacttctctttattgtgcttcacagataggaacattttttcttttatttacaaatgagatgtttgtgacaaccctggtgaagcaagtctattggtgccatttaacaaacagcctttgctcactttgtgtcttggtttcacactttggtaatcttcacaatttttaaa

SEQ ID NO: 619955 - DNA, 487 bp, Homo sapiens
acatttgtttatgcttaggacacaacacagaagataattttctaagttaaagattgtatgattttatcttgacttcagaaactggtcatacttttttactttagtttctaagaacctcagagctgaacttgaaacaactttaataattccaatgaggcatttgttatttatcctttttaaaaaagacttttctaatttaaatmattttattattgctctaaatttgccaggttcattttagaattttataaactgttttaaaactaatttacattaagttggaataaagttaaccaaattaatacaaacatattttattgcacttctctttattgtgcttcacagataggaacattttttcttttatttacaaatgagatgtttgtgacaaccctggtgaagcaagtctattggtgccatttaacaaacagcctttgctcactttgtgtcttggtttcacactttggtaatcttcacaatttttaaa

SEQ ID NO: 619956 - DNA, 487 bp, Homo sapiens
acatttgtttatgcttaggacacaacacagaagataattttctaagttaaagattgtatgattttatcttgacttcagaaactggtcatacttttttactttagtttctaagaacctcagagctgaacttgaaacaactttaataattccaatgaggcatttgttatttatcctttttaaaaaagacttttctaatttaaatcattttattattgctctaaatttgccaggttcatttwagaattttataaactgttttaaaactaatttacattaagttggaataaagttaaccaaattaatacaaacatattttattgcacttctctttattgtgcttcacagataggaacattttttcttttatttacaaatgagatgtttgtgacaaccctggtgaagcaagtctattggtgccatttaacaaacagcctttgctcactttgtgtcttggtttcacactttggtaatcttcacaatttttaaa

SEQ ID NO: 619957 - DNA, 359 bp, Homo sapiens
aaaagacttttctaatttaaatcattttattattgctctaaatttgccaggttcattttagaattttataaactgttttaaaactaatttacattaagttggaataaagttaaccaaattaatacaaacatattttattgcacttctctttattgtgcttcacagataggaacattttttcttttatttacaaatgagatgtttgtgacaaccctggtgaagcaagtctattggtgccatttaacaaacagcctktgctcactttgtgtcttggtttcacactttggtaatcttcacaatttttaaaatatttccttattattatatttgttacggtgatctgtgatcagtgatcatta

SEQ ID NO: 619958 - DNA, 359 bp, Homo sapiens
aaaagacttttctaatttaaatcattttattattgctctaaatttgccaggttcattttagaattttataaactgttttaaaactaatttacattaagttggaataaagttaaccaaattaatacaaacatattttattgcacttctctttattgtgcttcacagataggaacattttttcttttatttacaaatgagatgtttgtgacaaccctggtgaagcaagtctattggtgccatttaacaaacagcctttgctcactttgtgtcttggtttcacactttggtaatcttcacaatttttaaaatatttccttattattatattygttacggtgatctgtgatcagtgatcatta

SEQ ID NO: 619959 - DNA, 562 bp, Homo sapiens
aaccatttaatatatgaataaaagcagttcagaacattttaatgtacrctgcattttctgatagtaagattttaagttaaaataagattatacttcaaaaagcgtaccattttgaaaaaaaatcatatcactcctggcaatgccattttcatactagtccaacatattgcttatccatctgtgtttgtttgattttactgttattacattcatggtaatgctaaagtacatacatacacacacacacacacacacctaaggtgtgcaggctttcatccaagcttactggtattaattaaaaaatcaaccagaggtagggaaaaataaaacttattcaaaaatactattgcaatagggagaatattccaaactcaatctacaggtgtctcaggatcaaacaggaaaaggctttccttttctagggaaggacaagcagggctggcagaagcctccttggagagaaggacaggcagtggggtgagcaggtggcaaaaccaggatgctccaataaaaatagtttctctgggagtcccgctcatttttggagtgagctgttagcggg

SEQ ID NO: 619960 - DNA, 562 bp, Homo sapiens
aaccatttaatatatgaataaaagcagttcagaacattttaatgtacgctgcattttctgatagtaagattttargttaaaataagattatacttcaaaaagcgtaccattttgaaaaaaaatcatatcactcctggcaatgccattttcatactagtccaacatattgcttatccatctgtgtttgtttgattttactgttattacattcatggtaatgctaaagtacatacatacacacacacacacacacacctaaggtgtgcaggctttcatccaagcttactggtattaattaaaaaatcaaccagaggtagggaaaaataaaacttattcaaaaatactattgcaatagggagaatattccaaactcaatctacaggtgtctcaggatcaaacaggaaaaggctttccttttctagggaaggacaagcagggctggcagaagcctccttggagagaaggacaggcagtggggtgagcaggtggcaaaaccaggatgctccaataaaaatagtttctctgggagtcccgctcatttttggagtgagctgttagcggg

SEQ ID NO: 619961 - DNA, 562 bp, Homo sapiens
aaccatttaatatatgaataaaagcagttcagaacattttaatgtacgctgcattttctgatagtaagattttaagttaaaataagattatacttcaaaaagygtaccattttgaaaaaaaatcatatcactcctggcaatgccattttcatactagtccaacatattgcttatccatctgtgtttgtttgattttactgttattacattcatggtaatgctaaagtacatacatacacacacacacacacacacctaaggtgtgcaggctttcatccaagcttactggtattaattaaaaaatcaaccagaggtagggaaaaataaaacttattcaaaaatactattgcaatagggagaatattccaaactcaatctacaggtgtctcaggatcaaacaggaaaaggctttccttttctagggaaggacaagcagggctggcagaagcctccttggagagaaggacaggcagtggggtgagcaggtggcaaaaccaggatgctccaataaaaatagtttctctgggagtcccgctcatttttggagtgagctgttagcggg

SEQ ID NO: 619962 - DNA, 445 bp, Homo sapiens
ataatgtatcagagtttgggctcagccgtggtagctgctgttgacccagagggaccactgggatcctcacatctcagggcagcacatcgttggcagcaatggttggttctacgcaaacttttatgaaattaggtgaggcccttgcttagaattttttaaaagcttaatatgagtttatatctctttaaatatcagtttctaatattttttaaaggcctatgtttacaacaaatttgggagatacctatatgcactactaactagtgttcttttgtggtgctttagaaattctggcttacttgtatttttgctggccttctaatgatttcactcatcaatcagaagataytagtgtccacctccctgcttcctctccggtgatcttgtctattcttggccattttagagttgacttagcagccttcacaaaactgattggaatttc

SEQ ID NO: 619963 - DNA, 445 bp, Homo sapiens
ataatgtatcagagtttgggctcagccgtggtagctgctgttgacccagagggaccactgggatcctcacatctcagggcagcacatcgttggcagcaatggttggttctacgcaaacttttatgaaattaggtgaggcccttgcttagaattttttaaaagcttaatatgagtttatatctctttaaatatcagtttctaatattttttaaaggcctatgtttacaacaaatttgggagatacctatatgcactactaactagtgttcttttgtggtgctttagaaattctggcttacttgtatttttgctggccttctaatgatttcactcatcaatcagaagatactwgtgtccacctccctgcttcctctccggtgatcttgtctattcttggccattttagagttgacttagcagccttcacaaaactgattggaatttc

SEQ ID NO: 619964 - DNA, 526 bp, Homo sapiens
ggtgatcttgtctattcttggccattttagagttgacttagcagccttcacaaaactgattggaatttccactgggattaaattgataggtcatttttgggagacctttgcaatattgaactttccaatccrtgaactttacttatctgcccatttatcatgtttgtttttggtagattacaaaattatatgatcactccaaaaattaccttgccctttatagtaaaaccttccattgtaaactggcaatcactgatctgtgttcctctagcattgcttttttttcagaattttatacaaatggaatcgttcaggatgtagccttttgagtctggctactttcatatactgtatcaacagttattcctttttattgccaaatagtaatccattgtataaatactacatggtttgcttattggtttgtcattggaggaatatggactattttcactttttggtaaattataagtggattggaattcacaaagtgctttttgtcttagcatagtttttcatttcactt

SEQ ID NO: 619965 - DNA, 526 bp, Homo sapiens
ggtgatcttgtctattcttggccattttagagttgacttagcagccttcacaaaactgattggaatttccactgggattaaattgataggtcatttttgggagacctttgcaatattgaactttccaatccatgaactttacttatctgcccatttatyatgtttgtttttggtagattacaaaattatatgatcactccaaaaattaccttgccctttatagtaaaaccttccattgtaaactggcaatcactgatctgtgttcctctagcattgcttttttttcagaattttatacaaatggaatcgttcaggatgtagccttttgagtctggctactttcatatactgtatcaacagttattcctttttattgccaaatagtaatccattgtataaatactacatggtttgcttattggtttgtcattggaggaatatggactattttcactttttggtaaattataagtggattggaattcacaaagtgctttttgtcttagcatagtttttcatttcactt

SEQ ID NO: 619966 - DNA, 526 bp, Homo sapiens
ggtgatcttgtctattcttggccattttagagttgacttagcagccttcacaaaactgattggaatttccactgggattaaattgataggtcatttttgggagacctttgcaatattgaactttccaatccatgaactttacttatctgcccatttatcatgtttgtttttggtagattacaaaattatatgatcactccaaaaattaccttgccctttatagtaaaaccttccattgtaaactggcaatcactgatctgtgttcctctagcattgcttttttttcagaattttatacaaatggaatcgttcaggatgtagccttttgagtctggctactttcatrtactgtatcaacagttattcctttttattgccaaatagtaatccattgtataaatactacatggtttgcttattggtttgtcattggaggaatatggactattttcactttttggtaaattataagtggattggaattcacaaagtgctttttgtcttagcatagtttttcatttcactt

SEQ ID NO: 619967 - DNA, 513 bp, Homo sapiens
tccggtgatcttgtctattcttggccattttagagttgacttagcagccttcacaaaactggttggaatttccactgggattaaattgataggtcatttttgggagacctttgcaatattgaactttccaatccgtgaacttatctgcccatgtattatgtttgtttttggtagattacaaaattatatgatcactccaaaaattaccttgccctttatagtaaaaccttccattgtaaacttctggcaatcactgatctgtgttcctctagcattgcttttttttcagaattttatacaaatggaatcgttcaggctgtagcctttgagtctggctactttcatgtactgyatcaacagttattcctttttattgccaaatagtaatccattgtataaatactacatggtttgcttattggtttgtcattggaggaatatggactattttcactttttggtaaattataagtggattggaattcacaaagtgctttttgtctgagcataggt

SEQ ID NO: 619968 - DNA, 525 bp, Homo sapiens
atccatgaactttacttatctgcccatttatcatgtttgtttttggtagattacaaaattatatgatcactccaaaaattaccttgccctttatagtaaaaccttccattgtaaactggcaatcactgatctgtgttcctctagcattgcttttttttcagaattttatacaaatggaatcgttcaggatgtagccttttgagtctggctactttcatatactgtatcaacagttattcctttttattgccaaatagtaatccattgtataaatactacatggtttgcttattggtttgtcattggaggaatatggactattttcactttttggtaaattataagtggattggaattcacaaagtgctttttgtcttagcatagkttttcatttcacttgtgcaaatgcctaagggtaggattgctgagtcacatggtccatttacatttgactttatcagaacctgccaaattgtcttccaaagtgctgtgccacttctgtttctttaataaatacaggggtat

SEQ ID NO: 619969 - DNA, 420 bp, Homo sapiens
tgatggcctgtaaatattttttcttgcacttgcyttgttgggttttgatatcaaggttatttttattttaaccttgtaaaatgaactggggagtcttctttttttattctctgtttgtgttggtggcagagtttttttttttgtttggttggttggtttgtttctcttgtatgtttcatggaactttttggtgaaggcacttgggcctggaaatttctttatgggaagttttttcattactgattcaatatatttaatctatgtaagttttttttctactttttgagtcaattttgattttttttcctagaaattcatatctcaccaagtatggtggcttatgcttgtaatcccagcactttgggaggctcaggtgggaggaccacttgactacagtagttcaagaccagcctgggcaat

SEQ ID NO: 619970 - DNA, 420 bp, Homo sapiens
tgatggcctgtaaatattttttcttgcacttgccttgttgggttttgatatcaaggttatttttattttaaccttgtaaaatgaactsgggagtcttctttttttattctctgtttgtgttggtggcagagtttttttttttgtttggttggttggtttgtttctcttgtatgtttcatggaactttttggtgaaggcacttgggcctggaaatttctttatgggaagttttttcattactgattcaatatatttaatctatgtaagttttttttctactttttgagtcaattttgattttttttcctagaaattcatatctcaccaagtatggtggcttatgcttgtaatcccagcactttgggaggctcaggtgggaggaccacttgactacagtagttcaagaccagcctgggcaat

SEQ ID NO: 619971 - DNA, 420 bp, Homo sapiens
tgatggcctgtaaatattttttcttgcacttgccttgttgggttttgatatcaaggttatttttattttaaccttgtaaaatgaactggggagtcttctttttttattctctgtttgtgttggtggcagagtttttttttttgtttggttggttggtttgtttctcttgtatgtttcayggaactttttggtgaaggcacttgggcctggaaatttctttatgggaagttttttcattactgattcaatatatttaatctatgtaagttttttttctactttttgagtcaattttgattttttttcctagaaattcatatctcaccaagtatggtggcttatgcttgtaatcccagcactttgggaggctcaggtgggaggaccacttgactacagtagttcaagaccagcctgggcaat

SEQ ID NO: 619972 - DNA, 420 bp, Homo sapiens
tgatggcctgtaaatattttttcttgcacttgccttgttgggttttgatatcaaggttatttttattttaaccttgtaaaatgaactggggagtcttctttttttattctctgtttgtgttggtggcagagtttttttttttgtttggttggttggtttgtttctcttgtatgtttcatggaactttttggtgaaggcacttgggcctggaaatttctttatgggaagttttttcattactgrttcaatatatttaatctatgtaagttttttttctactttttgagtcaattttgattttttttcctagaaattcatatctcaccaagtatggtggcttatgcttgtaatcccagcactttgggaggctcaggtgggaggaccacttgactacagtagttcaagaccagcctgggcaat

SEQ ID NO: 619973 - DNA, 506 bp, Homo sapiens
gtgaaggcacttgggcctggaaatttctttatgggaagttttttcattactgattcaatatatttaatctatgtaagttttttttctactttttgagtcaattttgatttttttycctagaaattcatatctcaccaagtatggtggcttatgcttgtaatcccagcactttgggaggctcaggtgggaggaccacttgactacagtagttcaagaccagcctgggcaatatagtgagactccatctctacaaaaaaaataaaaattagcttggtgtggtggtgggtgcctgtagtgtgagctacttgggatgctgaggtgggaggatcatttgagcctggaaggtcgagactgcagtgagctgtgattgtgccactgcactccagcctgagcgacagaatgagaccttgtctcaaaaaaaaaaaagaaaaagatttgtcatctatgctttaaagtctgttggcataaaggtattcataattttacattatgaatttgtttatttg

SEQ ID NO: 619974 - DNA, 506 bp, Homo sapiens
gtgaaggcacttgggcctggaaatttctttatgggaagttttttcattactgattcaatatatttaatctatgtaagttttttttctactttttgagtcaattttgattttttttcctagaaattcatatctcaccaagtatggtggcttatgcttgtaatcccagcactttgggaggctcaggtgggaggaccacttgactacagtagttcaagaccagcctgggcaatatagtgagactccatctctacaaaaaaaataaaaattagcttggtgtggtggtgggtgcctgtagtgtgagctacttgggatgctgaggtgggaggatcatttgagcctggaaggtcgagactgcagtgagctgtgattgtgccactgcactccagcctgrgcgacagaatgagaccttgtctcaaaaaaaaaaaagaaaaagatttgtcatctatgctttaaagtctgttggcataaaggtattcataattttacattatgaatttgtttatttg

SEQ ID NO: 619975 - DNA, 506 bp, Homo sapiens
gtgaaggcacttgggcctggaaatttctttatgggaagttttttcattactgattcaatatatttaatctatgtaagttttttttctactttttgagtcaattttgattttttttcctagaaattcatatctcaccaagtatggtggcttatgcttgtaatcccagcactttgggaggctcaggtgggaggaccacttgactacagtagttcaagaccagcctgggcaatatagtgagactccatctctacaaaaaaaataaaaattagcttggtgtggtggtgggtgcctgtagtgtgagctacttgggatgctgaggtgggaggatcatttgagcctggaaggtcgagactgcagtgagctgtgattgtgccactgcactccagcctgagygacagaatgagaccttgtctcaaaaaaaaaaaagaaaaagatttgtcatctatgctttaaagtctgttggcataaaggtattcataattttacattatgaatttgtttatttg

SEQ ID NO: 619976 - DNA, 394 bp, Homo sapiens
ttcagcctcccaagtagctgggaccacaggcacgtgccaccatgcccagctaatttttgtatttttggtagagacggggttttgccatgttgcccaggctggtctcaaactcctgaatttgagcattcctcccacttcggtctcccaaagtgctgggattacargcgtgagccatcattcttggcctgcaagttatgacttcctttcagagtctttctatctgtagtacagtcctcctgtgcaagattgttttttgaatgctttttcttgacaaatcttgctaaaggtctgtgaattttataatgtatttttaaagaaccaggttttagcagggcatggtggctcatacctgtaatcccagcactttgagaggcaaaggtgggaggatcgcttg

SEQ ID NO: 619977 - DNA, 394 bp, Homo sapiens
ttcagcctcccaagtagctgggaccacaggcacgtgccaccatgcccagctaatttttgtatttttggtagagacggggttttgccatgttgcccaggctggtctcaaactcctgaatttgagcattcctcccacttcggtctcccaaagtgctgggattacaagcgtgagccatcrttcttggcctgcaagttatgacttcctttcagagtctttctatctgtagtacagtcctcctgtgcaagattgttttttgaatgctttttcttgacaaatcttgctaaaggtctgtgaattttataatgtatttttaaagaaccaggttttagcagggcatggtggctcatacctgtaatcccagcactttgagaggcaaaggtgggaggatcgcttg

SEQ ID NO: 619978 - DNA, 394 bp, Homo sapiens
ttcagcctcccaagtagctgggaccacaggcacgtgccaccatgcccagctaatttttgtatttttggtagagacggggttttgccatgttgcccaggctggtctcaaactcctgaatttgagcattcctcccacttcggtctcccaaagtgctgggattacaagcgtgagccatcattcttggcctgcaagttatgacttcctttcagagtctttctatctgtagtacagtcctcctgtgcaagattgttttttgaatgctttttcttgacaaatcttgctaaaggtctgtgaattttataatgtatttttaaagarccaggttttagcagggcatggtggctcatacctgtaatcccagcactttgagaggcaaaggtgggaggatcgcttg

SEQ ID NO: 619979 - DNA, 561 bp, Homo sapiens
ccaggtttatctaggacttgagcacaaagaaaaagtgggagcatctttgaacaagaaatatcttgaaaaactagttaagtggtatcatatatttgtgggatgggtgatttcaaaacccagtctaaaaggacaggaccttgctcattgacaatttattgtctgatgcaatgtttcttaatctttttgggtcttggattccyttgagaatcttttgaagtttatggactcttttcccagaagaacacactcatgtgtatgtaacacaattttgcattcaatcttagggactgcaggtgtctacattagttatatattggtgtaaaaaaaagagccccaaacttaaggcttaaaggaacaatagatgtttattatctcacagtttctgtggttcagaaagtcagtaacatcttaactggatacttctgacttggagtctcccaggaggttgcaatcaagatgttgttggggggaaaggggcaggttcagtggctcatgcctgtaatctctacactctgggaagcaaagccaggaggattacttgagcccaggagtttgagacca

SEQ ID NO: 619980 - DNA, 522 bp, Homo sapiens
tttattgtctgatgcaatgtttcttaatctttttgggtcttggattcctttgagaatcttttgaagtttatggactcttttcccagaagaacacactcatgtgtatgtaacacaattttgcattcaatcttagggactgcaggtgtctacattagttatatattggtgtaaaaaaaaragccccaaacttaaggcttaaaggaacaatagatgtttattatctcacagtttctgtggttcagaaagtcagtaacatcttaactggatacttctgacttggagtctcccaggaggttgcaatcaagatgttgttggggggaaaggggcaggttcagtggctcatgcctgtaatctctacactctgggaagcaaagccaggaggattacttgagcccaggagtttgagaccagcctgggcaacacagtgagaccctatgtattagtcagttctcacattgctataaatacatgagactggagaatttataaagaaaagaggtttaattgtctcacagttccaca

SEQ ID NO: 619981 - DNA, 607 bp, Homo sapiens
aatcttagggactgcaggtgtctacattagttatatattggtgtaaaaaaaagagccccaaacttaaggcttaaaggaacaatagatgtttattatctcacagtttctgtggttcagaaagtcagtaacatcttaactggatacttctgactyggagtctcccaggaggttgcaatcaagatgttgttggggggaaaggggcaggttcagtggctcatgcctgtaatctctacactctgggaagcaaagccaggaggattacttgagcccaggagtttgagaccagcctgggcaacacagtgagaccctatgtattagtcagttctcacattgctataaatacatgagactggagaatttataaagaaaagaggtttaattgtctcacagttccacaggctgttcagggagcataatgctggcatctgctcggcttctggggcaaccacaggaaactttcaatcatggtggaaggtgaaggggaagcaggcacgccttacatggccaaagcaggagcgagagagaggggggaggtgccacacacttttaaacaattagatactgtgagaactctaacgagcacagcaccaaaagggtgatgctaaat

SEQ ID NO: 619982 - DNA, 607 bp, Homo sapiens
aatcttagggactgcaggtgtctacattagttatatattggtgtaaaaaaaagagccccaaacttaaggcttaaaggaacaatagatgtttattatctcacagtttctgtggttcagaaagtcagtaacatcttaactggatacttctgacttrgagtctcccaggaggttgcaatcaagatgttgttggggggaaaggggcaggttcagtggctcatgcctgtaatctctacactctgggaagcaaagccaggaggattacttgagcccaggagtttgagaccagcctgggcaacacagtgagaccctatgtattagtcagttctcacattgctataaatacatgagactggagaatttataaagaaaagaggtttaattgtctcacagttccacaggctgttcagggagcataatgctggcatctgctcggcttctggggcaaccacaggaaactttcaatcatggtggaaggtgaaggggaagcaggcacgccttacatggccaaagcaggagcgagagagaggggggaggtgccacacacttttaaacaattagatactgtgagaactctaacgagcacagcaccaaaagggtgatgctaaat

SEQ ID NO: 619983 - DNA, 607 bp, Homo sapiens
aatcttagggactgcaggtgtctacattagttatatattggtgtaaaaaaaagagccccaaacttaaggcttaaaggaacaatagatgtttattatctcacagtttctgtggttcagaaagtcagtaacatcttaactggatacttctgacttggagtctcccaggaggttgcaatcaagatgttgttggggggaaaggggcaggttcagtggctcatgcctgtaatctctacactctgggaagcaaagccaggaggattacttgagcccaggagtttgagaccagcctgggcaacacagtgagaccctatgtattagtcagttctcacattgctataaatacatgagactggagaatttataaagaaaagrggtttaattgtctcacagttccacaggctgttcagggagcataatgctggcatctgctcggcttctggggcaaccacaggaaactttcaatcatggtggaaggtgaaggggaagcaggcacgccttacatggccaaagcaggagcgagagagaggggggaggtgccacacacttttaaacaattagatactgtgagaactctaacgagcacagcaccaaaagggtgatgctaaat

SEQ ID NO: 619984 - DNA, 572 bp, Homo sapiens
catgcctgtaatctctacactctgggaagcaaagccaggaggattacttgagcccaggagtttgagaccagcctgggcaacacagtgagaccctatgtattagtcagttctcacattgctataaatacatgagactggagaatttataaagaaaagaggtttaattgtctcacagttccacaggctgttcagggagcataatgctggcatctgctyggcttctggggcaaccacaggaaactttcaatcatggtggaaggtgaaggggaagcaggcacgccttacatggccaaagcaggagcgagagagaggggggaggtgccacacacttttaaacaattagatactgtgagaactctaacgagcacagcaccaaaagggtgatgctaaatcattcatgaaagatctattcctgtgatccagtcacctcccaccaggccccacctctaacattggggattataattgaacgtgagatttaggtgggtacacagaccccaaccatatcatcccgtctctataagaaataaaaaagttagccaggcatggtggtgtgtgctggtggtcccaga

SEQ ID NO: 619985 - DNA, 572 bp, Homo sapiens
catgcctgtaatctctacactctgggaagcaaagccaggaggattacttgagcccaggagtttgagaccagcctgggcaacacagtgagaccctatgtattagtcagttctcacattgctataaatacatgagactggagaatttataaagaaaagaggtttaattgtctcacagttccacaggctgttcagggagcataatgctggcatctgctcggcttctggggcaaccacaggaaactttcaatcatggtggaaggtgaaggggaagcaggcacgccttacatggccaaagcaggagcgagagagaggggggaggtgccacacacttttaaacaattagatactgtgagaactctaacgagcacagcaccaaaagggtgatgctaaatcattcatgaaagatcyattcctgtgatccagtcacctcccaccaggccccacctctaacattggggattataattgaacgtgagatttaggtgggtacacagaccccaaccatatcatcccgtctctataagaaataaaaaagttagccaggcatggtggtgtgtgctggtggtcccaga

SEQ ID NO: 619986 - DNA, 572 bp, Homo sapiens
catgcctgtaatctctacactctgggaagcaaagccaggaggattacttgagcccaggagtttgagaccagcctgggcaacacagtgagaccctatgtattagtcagttctcacattgctataaatacatgagactggagaatttataaagaaaagaggtttaattgtctcacagttccacaggctgttcagggagcataatgctggcatctgctcggcttctggggcaaccacaggaaactttcaatcatggtggaaggtgaaggggaagcaggcacgccttacatggccaaagcaggagcgagagagaggggggaggtgccacacacttttaaacaattagatactgtgagaactctaacgagcacagcaccaaaagggtgatgctaaatcattcatgaaagatctattcctgtgatccagtcacctcccaccaggccccacctctaacattggggattataattgaaygtgagatttaggtgggtacacagaccccaaccatatcatcccgtctctataagaaataaaaaagttagccaggcatggtggtgtgtgctggtggtcccaga

SEQ ID NO: 619987 - DNA, 553 bp, Homo sapiens
tttttctttttggctaaaatttttttctagttataaaactggtacatactcattgcagagaactgggggaaggagtaaaatattaagaaaaaaataaaaatcacttgccatcctgtcacmtagtattttctttctagttcttttcatgcagttatatataacattttgatctttctttttatgttacagaagtcatatttgcttattgcagagtaatccaaagagtacagaatgtctaaagttaaaaaagttatttaaaaaaaatgatccttgcctgggaggaactttctattgtaggttgagaggggagatagaggggctgtgggtcagaggatgccctggtcagggttgggtgcctgtgtctctttggaggcagcagaggtctgcacagcagggtattaccattatagggaaatgggggggtgggatgtgtggaaggggaattaaactgccaagaagaaaacaattatttttatgttgagaagcattattttcaggggtcagaagccctttgtggggcagagggaaattaaggaggtatttaataaacagg

SEQ ID NO: 619988 - DNA, 553 bp, Homo sapiens
tttttctttttggctaaaatttttttctagttataaaactggtacatactcattgcagagaactgggggaaggagtaaaatattaagaaaaaaataaaaatcacttgccatcctgtcacctagtattttctttctagttcttttcrtgcagttatatataacattttgatctttctttttatgttacagaagtcatatttgcttattgcagagtaatccaaagagtacagaatgtctaaagttaaaaaagttatttaaaaaaaatgatccttgcctgggaggaactttctattgtaggttgagaggggagatagaggggctgtgggtcagaggatgccctggtcagggttgggtgcctgtgtctctttggaggcagcagaggtctgcacagcagggtattaccattatagggaaatgggggggtgggatgtgtggaaggggaattaaactgccaagaagaaaacaattatttttatgttgagaagcattattttcaggggtcagaagccctttgtggggcagagggaaattaaggaggtatttaataaacagg

SEQ ID NO: 619989 - DNA, 553 bp, Homo sapiens
tttttctttttggctaaaatttttttctagttataaaactggtacatactcattgcagagaactgggggaaggagtaaaatattaagaaaaaaataaaaatcacttgccatcctgtcacctagtattttctttctagttcttttcatgcagttatatataacattttgatctttctttttatgttacagaagtcatatttgcttattgcagagtaatccaaagagtacagaatgtctaaagttaaaaaagttatttaaaaaaaatgatccttgcytgggaggaactttctattgtaggttgagaggggagatagaggggctgtgggtcagaggatgccctggtcagggttgggtgcctgtgtctctttggaggcagcagaggtctgcacagcagggtattaccattatagggaaatgggggggtgggatgtgtggaaggggaattaaactgccaagaagaaaacaattatttttatgttgagaagcattattttcaggggtcagaagccctttgtggggcagagggaaattaaggaggtatttaataaacagg

SEQ ID NO: 619990 - DNA, 574 bp, Homo sapiens
gtgcagctgaatgtgtgtggttaaagtgcagtccagtagttatttatttgtccggattgtttataacctgcttccagcctagacaagttgatttgaccctgctgacctggctcattcaggccacttaacactgtttacctttgggtggggaggacatgcatgatccgctggccragtgcctttgtaaggtctgtaaataggatgcattctggttaaactcattattgcatcacaaaagccagtatctgatgggtctcagctcttttcttttgcactggggaagactggaggagaatgaaacttccttgaaccagtgattgggtctctaccaaagagagaaacttaaagctagtgagagccttaagatatttcatttgagcacttggctggcaccatgtaggtagagacactttaaagtaacagtgctttgctacacctgatttgaatcatctgtggagcttcaaaaaaaatcctaattaatcctaagaccagttatgtcaggtggggtccaggcactgttattttttttaaagctccccaggtgattccagtgtaggtccaggactgagaagca

SEQ ID NO: 619991 - DNA, 574 bp, Homo sapiens
gtgcagctgaatgtgtgtggttaaagtgcagtccagtagttatttatttgtccggattgtttataacctgcttccagcctagacaagttgatttgaccctgctgacctggctcattcaggccacttaacactgtttacctttgggtggggaggacatgcatgatccgctggccgagtgcctttgtaaggtctgtaaataggatgcattctggttaaactcattattgcatcacaaaagccagtatctgatgggtctcagctcttttcttttgcactggggaagactggaggagaatgaaacttccttgaaccagtgattgggtctctaccaaagagagaaacttaaagctagtgagagccttaagatatttcatttragcacttggctggcaccatgtaggtagagacactttaaagtaacagtgctttgctacacctgatttgaatcatctgtggagcttcaaaaaaaatcctaattaatcctaagaccagttatgtcaggtggggtccaggcactgttattttttttaaagctccccaggtgattccagtgtaggtccaggactgagaagca

SEQ ID NO: 619992 - DNA, 574 bp, Homo sapiens
gtgcagctgaatgtgtgtggttaaagtgcagtccagtagttatttatttgtccggattgtttataacctgcttccagcctagacaagttgatttgaccctgctgacctggctcattcaggccacttaacactgtttacctttgggtggggaggacatgcatgatccgctggccgagtgcctttgtaaggtctgtaaataggatgcattctggttaaactcattattgcatcacaaaagccagtatctgatgggtctcagctcttttcttttgcactggggaagactggaggagaatgaaacttccttgaaccagtgattgggtctctaccaaagagagaaacttaaagctagtgagagccttaagatatttcatttgagcacttggctggcaccrtgtaggtagagacactttaaagtaacagtgctttgctacacctgatttgaatcatctgtggagcttcaaaaaaaatcctaattaatcctaagaccagttatgtcaggtggggtccaggcactgttattttttttaaagctccccaggtgattccagtgtaggtccaggactgagaagca

SEQ ID NO: 619993 - DNA, 574 bp, Homo sapiens
gtgcagctgaatgtgtgtggttaaagtgcagtccagtagttatttatttgtccggattgtttataacctgcttccagcctagacaagttgatttgaccctgctgacctggctcattcaggccacttaacactgtttacctttgggtggggaggacatgcatgatccgctggccgagtgcctttgtaaggtctgtaaataggatgcattctggttaaactcattattgcatcacaaaagccagtatctgatgggtctcagctcttttcttttgcactggggaagactggaggagaatgaaacttccttgaaccagtgattgggtctctaccaaagagagaaacttaaagctagtgagagccttaagatatttcatttgagcacttggctggcaccatgtaggtagagacactttaaagtaacagtgctttgctacacctgatttgaatcatctgtggagcttcaaaaaaaatcctaattaatcctaagaccagttatgtcaggtggggtccaggcactgttattttttttaaagctccccaggtgattccagtktaggtccaggactgagaagca

SEQ ID NO: 619994 - DNA, 496 bp, Homo sapiens
ctaatgctatgaatgtaggtaaattgtttgcaaaatgttctgtgtttcaggaatactgcaatcatttgattcaaatgtcaccatatgtgtgcgtgtatacagtcatgggtcacttaatgatggggacatgttttaagaaatgtgtcgttaggcaatttcattcttgtgtgaacatcatagggtgtatttcaacaaaccgagatgggatatatattttcatttatatattttattatggaaaatcaaatgtcccagcactgttactaaatatcagtcatttcccctacttgatctgccatgccaacattaagtgccatatattagatctctatatatrctccattataatcttacaggatcactgttgcacatgtgtttcctcattgactgaaatgttattcagtgcatgactgtacatatagtaaaaacgttatgcaccatattttaacatactgatattactaatgagttgtcctcatggtgactttaaatatca

SEQ ID NO: 619995 - DNA, 496 bp, Homo sapiens
ctaatgctatgaatgtaggtaaattgtttgcaaaatgttctgtgtttcaggaatactgcaatcatttgattcaaatgtcaccatatgtgtgcgtgtatacagtcatgggtcacttaatgatggggacatgttttaagaaatgtgtcgttaggcaatttcattcttgtgtgaacatcatagggtgtatttcaacaaaccgagatgggatatatattttcatttatatattttattatggaaaatcaaatgtcccagcactgttactaaatatcagtcatttcccctacttgatctgccatgccaacattaagtgccatatattagatctctatatatactccattataatcttacaggatcactgttgcacatgtgtttcctcattgactgaaatgttattcagtgcatgactgtacatatagtaaaaaygttatgcaccatattttaacatactgatattactaatgagttgtcctcatggtgactttaaatatca

SEQ ID NO: 619996 - DNA, 548 bp, Homo sapiens
aatatatcaaataaattcagataccacttgttctgtttatttccttcccctgccaattttttatttttcctgrttctgctgaagccaagatggggttctgtgtaagattttgtttgtgaggaaaggttctgcatgaattaaagttttgcaagccatgggcatttcattgtatgggccgttttgaggtctgtcatcttgcagattagattagcttacactgaggcacagtcacctgctgggctgggcagagagctgcactccactagtatttgagctgtcccggctgttcaccagctggatccacttcagataggcatagccagggcagccgccattcccatttgtgggggaaaagggaagctatcacaagaatgggctgcagctgtgggatgaggcgggcagcccagtgatggtgtcattgtcaaggggccattgaaatgtccttaagcagtcattggccaaatcctgtcctctatggatccagagccacagaatgttccagcagaaatatgtcttagccagcagctctttattgaggactgattgtg

SEQ ID NO: 619997 - DNA, 548 bp, Homo sapiens
aatatatcaaataaattcagataccacttgttctgtttatttccttcccctgccaattttttatttttcctgattctgctgaagccaagatggggtkctgtgtaagattttgtttgtgaggaaaggttctgcatgaattaaagttttgcaagccatgggcatttcattgtatgggccgttttgaggtctgtcatcttgcagattagattagcttacactgaggcacagtcacctgctgggctgggcagagagctgcactccactagtatttgagctgtcccggctgttcaccagctggatccacttcagataggcatagccagggcagccgccattcccatttgtgggggaaaagggaagctatcacaagaatgggctgcagctgtgggatgaggcgggcagcccagtgatggtgtcattgtcaaggggccattgaaatgtccttaagcagtcattggccaaatcctgtcctctatggatccagagccacagaatgttccagcagaaatatgtcttagccagcagctctttattgaggactgattgtg

SEQ ID NO: 619998 - DNA, 548 bp, Homo sapiens
aatatatcaaataaattcagataccacttgttctgtttatttccttcccctgccaattttttatttttcctgattctgctgaagccaagatggggttctgtgtaagattttgtttgtgaggaaaggttctgcatgaattaaagttttgcaagccatgggcatttcattgtatgggccgttttgaggtctgtcatcttgcagattagattagcttacactgaggcacagtcacctgctgggctgggcagagagctgcactccactagtatttgagctgtcccggctgttcaccagctggatccacttcagataggcatagccagggcagccgccattcccatttgtgggggaaaagggaagctatcacaagaatgggctgcagctgtgggatgaggygggcagcccagtgatggtgtcattgtcaaggggccattgaaatgtccttaagcagtcattggccaaatcctgtcctctatggatccagagccacagaatgttccagcagaaatatgtcttagccagcagctctttattgaggactgattgtg

SEQ ID NO: 619999 - DNA, 548 bp, Homo sapiens
aatatatcaaataaattcagataccacttgttctgtttatttccttcccctgccaattttttatttttcctgattctgctgaagccaagatggggttctgtgtaagattttgtttgtgaggaaaggttctgcatgaattaaagttttgcaagccatgggcatttcattgtatgggccgttttgaggtctgtcatcttgcagattagattagcttacactgaggcacagtcacctgctgggctgggcagagagctgcactccactagtatttgagctgtcccggctgttcaccagctggatccacttcagataggcatagccagggcagccgccattcccatttgtgggggaaaagggaagctatcacaagaatgggctgcagctgtgggatgaggcgggcagcccagtgatggtgtcattgtcaaggggccrttgaaatgtccttaagcagtcattggccaaatcctgtcctctatggatccagagccacagaatgttccagcagaaatatgtcttagccagcagctctttattgaggactgattgtg

SEQ ID NO: 620000 - DNA, 571 bp, Homo sapiens
tgccactttaagaagaacatggagaaggcaggcagaagtgaccktggagaacagtatctgagccagaaggcaggaggtcagcgggggagtcttgagtgggaaactcaagggtagcctgactgtccttgtcacaggtttagctgggcactgttagttcccccctttgtcagtttgtgggaatctgggcatcagggatctctttcagcccttcacatttgtatttgggtgtgctcagcttaaaacgatagcagcctgcaggagctcagctctgcctccatttatagagggaagagaaactaaggaatgctccttggggtggtgttggggagcagctacatgggaaaatgaagggtgcagcaccagtaaaaaggtgctcccaggactccctcccaccagcactcggaccaaggaagaagcatttaatttcagccagatttctagatggttgcttttatttgttttcatctgaatttgtgccaaggattcaacttttcctgcttattttattaaaaactttatacacagcattaataaatagatataaactgccatatacatgacaaacagaggg

SEQ ID NO: 620001 - DNA, 571 bp, Homo sapiens
tgccactttaagaagaacatggagaaggcaggcagaagtgaccttggagaacagtatctgagccagaaggcaggaggtcagcgggggagtcttgagtgggaaactcaagggtagcctgactgtccttgtcacaggtttagctgggcactgttagttcccccctttgtcagtttgtgggaatctgggcatcagggatctstttcagcccttcacatttgtatttgggtgtgctcagcttaaaacgatagcagcctgcaggagctcagctctgcctccatttatagagggaagagaaactaaggaatgctccttggggtggtgttggggagcagctacatgggaaaatgaagggtgcagcaccagtaaaaaggtgctcccaggactccctcccaccagcactcggaccaaggaagaagcatttaatttcagccagatttctagatggttgcttttatttgttttcatctgaatttgtgccaaggattcaacttttcctgcttattttattaaaaactttatacacagcattaataaatagatataaactgccatatacatgacaaacagaggg

SEQ ID NO: 620002 - DNA, 571 bp, Homo sapiens
tgccactttaagaagaacatggagaaggcaggcagaagtgaccttggagaacagtatctgagccagaaggcaggaggtcagcgggggagtcttgagtgggaaactcaagggtagcctgactgtccttgtcacaggtttagctgggcactgttagttcccccctttgtcagtttgtgggaatctgggcatcagggatctctttcagcccttcacatttgtatttgggtgtgctcagcttaaaacgatagcagcctgcaggagctcagctctgcctccatttatrgagggaagagaaactaaggaatgctccttggggtggtgttggggagcagctacatgggaaaatgaagggtgcagcaccagtaaaaaggtgctcccaggactccctcccaccagcactcggaccaaggaagaagcatttaatttcagccagatttctagatggttgcttttatttgttttcatctgaatttgtgccaaggattcaacttttcctgcttattttattaaaaactttatacacagcattaataaatagatataaactgccatatacatgacaaacagaggg

SEQ ID NO: 620003 - DNA, 571 bp, Homo sapiens
tgccactttaagaagaacatggagaaggcaggcagaagtgaccttggagaacagtatctgagccagaaggcaggaggtcagcgggggagtcttgagtgggaaactcaagggtagcctgactgtccttgtcacaggtttagctgggcactgttagttcccccctttgtcagtttgtgggaatctgggcatcagggatctctttcagcccttcacatttgtatttgggtgtgctcagcttaaaacgatagcagcctgcaggagctcagctctgcctccatttatagagggaagagaaactaaggaatgctccttggggtggtgttggggagcagctacatgggaaaatgaagggtgcagcaccagtaaaaaggtgctcccaggactccctcccaccagcactcggaccaaggaagaagcatttaatttcagccagattyctagatggttgcttttatttgttttcatctgaatttgtgccaaggattcaacttttcctgcttattttattaaaaactttatacacagcattaataaatagatataaactgccatatacatgacaaacagaggg

SEQ ID NO: 620004 - DNA, 521 bp, Homo sapiens
tatttgccaacttaacctcaccatagaaagccaaaagattcatcctgtggccagtctttcacattacagartttaaagtacttttttaaaatttctatttcattttttaacaaaatatttaacaaaatatagtatatctcatgtgccaggtactatttgtaatatttataaacactgatttatttaatcttcacagagactcattttacagattggaaaacagaggcagagagaagttaagtaactttaatgtcactcagctgggacgtatcaaaggcttggctgctggctccagagtctagacctttaaccattgtgttatgctttccatgggtaaagcaacctaaaaaggcccctggaatcagttacatgtggttggagactaactctgtcattgacttaccaaatgcttgatattgggcaatttatctaacctctctctgcatcagtttctacgtctgcaggaagagatgacaagcctgcctgttctacaaggttgttttggggattcagtggagcat

SEQ ID NO: 620005 - DNA, 521 bp, Homo sapiens
tatttgccaacttaacctcaccatagaaagccaaaagattcatcctgtggccagtctttcacattacagaatttaaagtacttttttaaaatttctatttcattttttaacaaaatatttaacaaaatatagtatatctcatgtgccaggtactatttgtaatatttataaacactgatttatttaatcttcacagagactcattttacagattggaaaacagaggcagagagaagttaagtaactttaatgtcactcagctgggamgtatcaaaggcttggctgctggctccagagtctagacctttaaccattgtgttatgctttccatgggtaaagcaacctaaaaaggcccctggaatcagttacatgtggttggagactaactctgtcattgacttaccaaatgcttgatattgggcaatttatctaacctctctctgcatcagtttctacgtctgcaggaagagatgacaagcctgcctgttctacaaggttgttttggggattcagtggagcat

SEQ ID NO: 620006 - DNA, 538 bp, Homo sapiens
accacgtgactgaatagaattttagtcayaggattccagtttaacatatgcagttactatagcaattgaggtttccttagtaacagttgcaaaaataatccagccccaattaataatacattttaaagctctttctactccatgctgaacaacccagtttttttggccaagaaccagataattcaggtggtgtcatttgcactgatatagatatcatttgcatgcggtgaattgggttggaaaggaatgaaaagggagccggttgtttcaagtattataggaatccaatctgaaaagtcgactggcaagcgaatgcaaatctagcttccagagcttgggagcttaatggtaaaccctgtcctggattcctagtgtgccctagaggactttctgcatttgaagaagggagaaggcagaagattggacttgctaacaaaaaagatgaacccgggagggtggggccgtggcacacaggatttctctctaagtggtgcctggtgtgttcttgatggcgtgagaaggtctgtgggtttgtgaa

SEQ ID NO: 620007 - DNA, 538 bp, Homo sapiens
accacgtgactgaatagaattttagtcacaggattccagtttaacatatgcagttactatagcaattgaggtttccttagtaacagttgcaaaaataatccrgccccaattaataatacattttaaagctctttctactccatgctgaacaacccagtttttttggccaagaaccagataattcaggtggtgtcatttgcactgatatagatatcatttgcatgcggtgaattgggttggaaaggaatgaaaagggagccggttgtttcaagtattataggaatccaatctgaaaagtcgactggcaagcgaatgcaaatctagcttccagagcttgggagcttaatggtaaaccctgtcctggattcctagtgtgccctagaggactttctgcatttgaagaagggagaaggcagaagattggacttgctaacaaaaaagatgaacccgggagggtggggccgtggcacacaggatttctctctaagtggtgcctggtgtgttcttgatggcgtgagaaggtctgtgggtttgtgaa

SEQ ID NO: 620008 - DNA, 544 bp, Homo sapiens
ggccttgtgtttctgaggcccgactttagactgtgccctgttggggaggggccagggaatgtctgaggctgggcctgaccctgctccttaccccgtgggagcagcagagccatgaagaagaagttagtggtgctgggcctgctggccgtggtcctggtgctggtcattgtcaatctctgtctctggctgccctcagcctccaaggaacctgacaaccatgtgtacaccagggctgccgtggctgcagatgccaagcagtgctcggagattgggaggtgagcggggcagggcatgggacatgggccctgaaaactgggcaagtggacctgagcaatacsttcacccctctgagactcagtttccccacatgtaagcttcgcttggactccctcagtagcctttgggaaggggacggtgactccgagagcagggtgtgggtctctagagccaaacaggccccttttctcagttctaagagtctctgtctctttggataaactccactgttttgttgtttggttgctatttttacttatttcttcct

SEQ ID NO: 620009 - DNA, 349 bp, Homo sapiens
gagggagaggggcaggggttgtgggttgggccgaggcacagctgggtggcccccaggctcacgtggcataaagggtttkggtgggtgggcctgcctacctgcttctccttctaggaaaagctgaggtcatcaatgcccgcgaggtggcccccaggctggcctttgccagcatgttcaacagcttggagcagtcccagaagggtaagccatgctgcagacttggggcatgggtgcagagctggctgagccaccgggaaggggccttgcccacaggagcctgctcccgtcagggttcaggggcagttctagcaccccccatcccttcctggccccatagcaccctcccaca

SEQ ID NO: 620010 - DNA, 349 bp, Homo sapiens
gagggagaggggcaggggttgtgggttgggccgaggcacagctgggtggcccccaggctcacgtggcataaagggtttgggtgggtgggcctgcctacctgcttctccttctaggaaaagctgaggtcatcaatgcccgcgaggtggcccccaggctggcctttgccagcatgttcaacagctyggagcagtcccagaagggtaagccatgctgcagacttggggcatgggtgcagagctggctgagccaccgggaaggggccttgcccacaggagcctgctcccgtcagggttcaggggcagttctagcaccccccatcccttcctggccccatagcaccctcccaca

SEQ ID NO: 620011 - DNA, 615 bp, Homo sapiens
agttctagaaaacaattatgtatctatgaaatgcatgaataattaacttcatgatacccaataaaaactaggaacaataggtcaaacttccttggattatrggcagaaatgttacatgtttttaaaaaatggtcttcctgagctgggtgcgggggctcatgcctgtaatcccagcactctgggaggccgaggtggcaggcagatcacgaggtcaggagatcgagaccatcctggctaacacagtgaaactctgtctcttctaaaaatacaaaaaattagccgggcgtggtggcgggcacctgtaatcccagctatgcgggaggctgaggcaggagaattgcttgaacccgggaggcggaggttgcagtgagccaagatcgtgccactgcactccagcctgggcgacagggcgagactccgtctcaaaaaagtcttcctggcatttcttttttcatgtcccaataaaaagagttagaagcactgcaaataaatgcaatgctcagctaatccactatgagctttttcctggaaaagatcaaaaggcagggatctatttacacaagaggagagagaatactccagaagctcatctggaaaaatcagagtatcaacata

SEQ ID NO: 620012 - DNA, 615 bp, Homo sapiens
agttctagaaaacaattatgtatctatgaaatgcatgaataattaacttcatgatacccaataaaaactaggaacaataggtcaaacttccttggattatgggcagaaatgttacatgtttttaaaaaatggtcttcctgrgctgggtgcgggggctcatgcctgtaatcccagcactctgggaggccgaggtggcaggcagatcacgaggtcaggagatcgagaccatcctggctaacacagtgaaactctgtctcttctaaaaatacaaaaaattagccgggcgtggtggcgggcacctgtaatcccagctatgcgggaggctgaggcaggagaattgcttgaacccgggaggcggaggttgcagtgagccaagatcgtgccactgcactccagcctgggcgacagggcgagactccgtctcaaaaaagtcttcctggcatttcttttttcatgtcccaataaaaagagttagaagcactgcaaataaatgcaatgctcagctaatccactatgagctttttcctggaaaagatcaaaaggcagggatctatttacacaagaggagagagaatactccagaagctcatctggaaaaatcagagtatcaacata

SEQ ID NO: 620013 - DNA, 497 bp, Homo sapiens
agcaaaggtctggtagcccatatcaagcaaaagaaaagtctaccctgtaaaggaaatatacattcacacacatataccttggctcactcttttatattgttttaggcaagtgcaggagatgaggacccactcaawtctttgaggatctgttctgtcactggcttgctgcacaatggttacattcttattcctattatgtcaagttgatttgagtaagcaggtttgcctgcctgcagccagtgacactaaaaaggatagaatcatttgacattaaggtggatcatacaagcaaaggtgccccaggaggagatccctcagcttgtaatttaactcagtctatgacctcagtggaataattttccccaggagacgtgacagcacagagtttatgtcagaggatcatggtggtctttcctttcataactggcctgtggtcatggcaggagatattgggctgatagatgtgctgggctgcgggaagagggctggccaggctg

SEQ ID NO: 620014 - DNA, 579 bp, Homo sapiens
ctagctgcgtgatcttgagcagtttacttaaaatttgtatgctttagtttcgtcatttctaaaataaagataagactggatcatagggttattgtgaagagtaaatgagttaatacctataaaataattagaatagtgcctggctcctaagaaggattctggctgacccctgagatgtagtccatcagggtagtgacaggccacctactcaactaaggtgagttagcataaactaagagggtctagagatagatttatccattaaaggaatccaaaggtaggagcatttatttctgaatattagatcagataataaattagctcagtagtttatttatgcgccacttctgttcgacwtagtagtagaagtgcttcccagagcaattgggtaagaagaaacaataaaaatcatacaaataggctgggcatggtggctcacatctgtaatcccagcacactgggaggccaagacaggcagatcacctgaggtgaggagcttgagaccagcctggttaacatggtgaaaccacatctctaccaaaaatacaaaaattagccgggtgtggtggcgcatgcctg

SEQ ID NO: 620015 - DNA, 579 bp, Homo sapiens
ctagctgcgtgatcttgagcagtttacttaaaatttgtatgctttagtttcgtcatttctaaaataaagataagactggatcatagggttattgtgaagagtaaatgagttaatacctataaaataattagaatagtgcctggctcctaagaaggattctggctgacccctgagatgtagtccatcagggtagtgacaggccacctactcaactaaggtgagttagcataaactaagagggtctagagatagatttatccattaaaggaatccaaaggtaggagcatttatttctgaatattagatcagataataaattagctcagtagtttatttatgcgccacttctgttcgacatagtagtagaagtgcttcccagagcaatygggtaagaagaaacaataaaaatcatacaaataggctgggcatggtggctcacatctgtaatcccagcacactgggaggccaagacaggcagatcacctgaggtgaggagcttgagaccagcctggttaacatggtgaaaccacatctctaccaaaaatacaaaaattagccgggtgtggtggcgcatgcctg

SEQ ID NO: 620016 - DNA, 599 bp, Homo sapiens
tctgggcacactcttggtggcagaaggtaaactttgttgtttgttaatgagcatgtgtgattgataycaatctgcataataatgaatattgaactctgttttctttgaagctggtgctctctgcagatgataatgcatttggggaaagtttgcttccttcatatagacctagactgtattattactgaaaattaacaaatttgtgtttggcaggtgtgtgtgtgtgtgtgtgtgtgtgtgtgtgtgtgtgtgtgtgtgcatgttcattcaagagttatgtccaaataaccaacttccttctgcacttcactggcaagaagatatcaaaagatgtggtggtgaagtaacaaaaaatacgataaaaggaagggcagggataaaaagaagtgtgacctgccaccattcatcccttggtcaatggcacagaaggggcctttctccactgttaaagaggacagtggtgcaggactttaaggcagaggtctgcaaaagtgggcagatgtcactggtggagggaagaggcaaccaagatggagaaataaagtggttgttatggggacaactcaagaacataagtgtgacaagtctctttgttccca

SEQ ID NO: 620017 - DNA, 625 bp, Homo sapiens
gcaaaccttatgttttagtggttctgtagggtaggtctacttttgcaaaaggtaaataagctgtgggctttcagcagaaatatcttctatatacctgtttttgcctgatttcagtttgttagaacatgaggttgatataatttttacttattttttaaagtattgccatgatacacaaaatcatggcccctgcatacctttcctgttttgtcactgtataacatttttcacatagcaccctgtacttcaactattttattttattttattttattttattttattttatttttttgagactgagtctcgctgtgtcgcccaggctggagtgcagtggcacaacctcagctcagtacaacttctgcctcctgggttcaagcaattctcctggcacagcctcccaagtagctgggattgcaggtgtgcaccaccacacccaggtaatttttgtatttttagtagatacagcattttgccatgttgtccaggctggtctcgatctcctaacctcaagtgatcmgtccaccttggcctcccaaagtgctggaataacaggcaagagccaccgcacccaaccacaactattcttaatcacttgcattttccatcaagttctgttgcctca

SEQ ID NO: 620018 - DNA, 483 bp, Homo sapiens
tatctgcctcaccctcaattcctccttccatctctcccttccttcctttgtttttttttttttyccccataaactaagaacacactggtcatttaatatataatctgaagtcacaaagggtaatatgctattaccattctcatggaatacctaggttaaaactatggaagaagaatgcaatagaaactttaggttttactattcttaaattagtctttctatagcaaacactaatattttcatttaccatttttattagggaacaactaataatcataattctcaggggagaacatgtttagcaagttttgaattcaggaaacttcactggactaatctaagcccttttgttatagttttcaacaccttttgttcctttgtgtataattagcaactcctttgaaagcttgcaaatattagcgttcagccttgtcataaggactattaatggttgatagtcttttcccagaagtgcataagtga

SEQ ID NO: 620019 - DNA, 486 bp, Homo sapiens
tatctgcctcaccctcaattcctccttccatctctcccttccttcctttgttttttttttttttccccataaactaaaaacacactggtcatttaatatataatctgaagtcacaaagggtaatatgctattacyattctcatggaatacctaggttaaaactatggaagaagaatgcaatagaaactttaggttttactattcttaaattagtctttctatagcaaacactaatattttcatttaccatttttattagggaacaactaataatcataattctcaggggagaacatgtttagcaagttttgaattcaggaaacttcactggactaatctaagcccttttgttatagttttcaacaccttttgttcctttgtgtataattagcaactcctttgaaagcttgcaaatattagcgttcagccttgtcataaggactattaatggttgatagtcttttcccagaagtgcataagtgaaaa

SEQ ID NO: 620020 - DNA, 500 bp, Homo sapiens
attgtaagagtaattagaaagcatttcatattgtttctgtgcaataaagcactgaaatatggctaaaaagacttacaacttaaaatgcaaacttcaaacatttatggacagagaaattaaacattttatgtaatagataaaagagaagtcaatcaaataaagaacaataaaaaataacaataaaacaccctgtgaaaagactgatcaaaagtgtatacagatagaagttgcaatggccaaaaacagaaatagtagacagtgatactacattccaaatctaatgatttaatgaattcctcttgaagaggaattgaggttaatggaaattgttcatgcttaatttagctgcatacaatgctctgattttttattttatttggatttagcctcactttatgctttttctgcatttacaaagtctaaggtaacaaaccatttcaaattttttaaaaatcaacatttcaaccyaaaatttggaggggacaaatccagtaagcagt

SEQ ID NO: 620021 - DNA, 483 bp, Homo sapiens
agtacttcccatcatctctaagggagaaaatataatttactgccacctaaacaaattttctagtcacagagatgtgacatagtatatgaattctgatgtgtgactttgggcaatttgcttactttggtgagtttcagtttttttaaatctataaagcatgaaaaaataccaacttaaaatgttgtggaaagattcaataagataacatgtataaactaattaacacytagtgaatgttaagaaatgatattttaatattctattaataagggacagtcctcttgttcattatgtataatcaacacgttgggtggttgccagaccactcaaaattatattccctaaggcgctcaggaacactagtactgtctattcccaaatgaggaggagccatctgcttttgaaacttaataactgtgtgtaggaactgtaatcgaaacaaagagaagtaagtccagtattaatgcttctaattacttgtgt

SEQ ID NO: 620022 - DNA, 585 bp, Homo sapiens
agattaaagagtttgtttttaatgataggaagatctccctataataagcattcagaaagatgattrctattcacattggaagaaaagaaaaacaatatggattacatataatttaggaaaaatacacagaaaatgtaaacaaattctctaacacattaagaaatattgtgtcttctgtcacacataatgaaatcatttcttcagattttcactcctgtgtgtgcaaaaagtatataatgtccttgaagagatggtgtgattttttttaaatgtctcctggcagggggccacctcatctaaatacatggtttttcttttcttacagtgaaatctgtttcattctgttctactgtgttgagtaagacctcttaaatggttaaaaagaaaaatggaaacagtgataattactcactaacttgaattaatgtgactgcattatgctcctaataactgtagtttactcatgtctcccctgtaataatccaaaattaatttcattttatgcttgcgaataatcagtttatttataaaggttagccatctttcttagcacaagttattcctttctcattacttactgaattg

SEQ ID NO: 620023 - DNA, 657 bp, Homo sapiens
cagtccaccattgatgggcacctaggttgatttcatgtcttttctatgatgagtagtgctgcaatgaacgtacaacttcatgcatatttttggtacaacaatttattttctttgagatataaactcggtaataggattgctgggtggaatgtagttgtgttttttgagaaatttccaaagtgctttccacagttgctgaactaatttacattttcaccaacaatatattagtgtttcctttcctccacagcctcaccagcctctgttgttttttcactttttrgtaatagccatccagattggtgtgagacagtatttcgttgtggttttgatttgcatttcccagggactattccatatagacttaacttttgtctttttcaaattatgtctctgataatcttatgtctgttccaaataagttatttgatgtttccaacaatagttatattcagtgtttttggcaattatattacctcattaagttggcatcaatcagtgccatgtagtttctagacaaccactatggaaatacagtaatagaaacagaggctagacctagaaattactttcatgtctttaaacgagttatctcttggaagcatgagtttaacccatgctaaatttgaaatgatattttctcttgtaaacattgat

SEQ ID NO: 620024 - DNA, 580 bp, Homo sapiens
acaggtatgaaaaaacagcatgatatcttcaaggtttttttctttatcccaattgacccagataaaaaatacaaatcctatgtcaatgataaagatgtaaaaaagagaaggaaaaaaagaaaatggaaccaaatgaaacgtcaggtgaacagttaagtaaatacrtatttcatttcttatagattctgaaagaattcaataatttctttaaaacacatctaaaatctcagaatcaactgaagagcagcatttgcttttaaagccagagggatatttaaattacagaattatcccatataatactgtgaaataactgctatagtagagataggaactgaatattttggggtaatgggaattgaataaataattagttgctcttgctctgtattgtaattctttacctctcttattctgcaatgaagctgtggatttcagagaaggaatgtttttctttatgtccaaagtgtttagttcagttctctgctcaatgttagtattcaataaatgtttgaaaattgtttttatccctgaattagttctactcttcatcctttcatatggaaagcaggggtaggaa

SEQ ID NO: 620025 - DNA, 599 bp, Homo sapiens
tttgagtggataaaagctaccctagtttggggtcattcatgttactcattatattcctcatctttacatacacaatgtattgttaaacttctattctggtttagagttaagcattttaaaaagggaaaaatttatacctgacatgttttcatggagaacctactgtgagtcaaatacttctgggcacatggggttataagatcgggcatgaaaaattgttttctgtcatcagagggctcattattgtgtgtgagacacaatcctgtaagcagacaattacarcacaatgcaatagttgctgtgacatactattagtggatgctacaaaaacacaaaggatgtgaatattggctagaggacagtgggaggatcgaactcatgttggtccctggggatgtaggaggatttctatagagaggaaagaccaaggatattttgggctgagacaaaaagaaaaaaaaaaaacgcaatgaggcaagaatgagcatactgcttttaagtgtggtgtctatggagcactgtgggctgagtgggagccctggtttgaaggaagtagggagtactgactagaatgcatttttttaatatggtaagaggaa

SEQ ID NO: 620026 - DNA, 544 bp, Homo sapiens
cagtaaacattgtacatcaaaaacatctgtaggattatgaacagtgagcaaaatatagttcaacagctgcaaatatgcttagaattgtgctgccataaacactctaaagtgttcagaattaccacatcattagagatatgttaaaagtaagtatttgtatgtgttccaaagttatcttttatttcatctctagaattgaaaaaaaaagatatatctaataagtagatacacccagttattgtggttccttcaagggtctgtgtcctttgcctacatcattaataagtttctgtggtatatcagatgtggaaacaaaagctttattctctttctccattgttatactactrataaatggttttatattcttagcttaatttttattttaaaaatgtagacttcactctactatataaaagttatgatactcagagtaatcaaaacctaaaaagttccagtggataaatgaacatctgggaaacttggaatgctataaatagttttgtgccacaacaaaacctgtgtcatgattaattttatgagt

SEQ ID NO: 620027 - DNA, 456 bp, Homo sapiens
ttcattgtggggaaaatttgtagggactaatacagtcttattgttatcggtaattgaacttacttggtctttcaccctgtgatcagtagtcaggtattgattagtctgcctgagctcagtataatttgtcttccattggacctgcactataatgtaaatggggtaagtaaataatgatttatggtagaacaggtcgraatcccctgcaaagggaataagaatgagtatgtatacccctatccatgtaacatttatcttaaatatttgagatcacttttagccaaattatagagagcaaataataagcattttcttacaagcagataacaggtatttatcatatatgttcttagaaatgtagctttgttatctagttattgatataaagaagctatagatcatgtacaaaaaaacatggacaattttgggacacctactcctagtttttactggtag

SEQ ID NO: 620028 - DNA, 456 bp, Homo sapiens
ttcattgtggggaaaatttgtagggactaatacagtcttattgttatcggtaattgaacttacttggtctttcaccctgtgatcagtagtcaggtattgattagtctgcctgagctcagtataatttgtcttccattggacctgcactataatgtaaatggggtaagtaaataatgatttatggtagaacaggtcgaaatcccctgcaaagggaataagaatgagtatgtatacccctatccatgtaacatttatcttaaatatttgagatcacttttagccaaattatagagagcaaataataagcattttcttacaagcagataacaggtatttatcatatatgttcttagwaatgtagctttgttatctagttattgatataaagaagctatagatcatgtacaaaaaaacatggacaattttgggacacctactcctagtttttactggtag

SEQ ID NO: 620029 - DNA, 484 bp, Homo sapiens
aattgaactggagagggaggtaaagagaggatgtcagaccaatcccaatgataagtgtcacatccaattgccacccttaccagagggaataaaattaggttaaggggacaggttctgtatttttaaaaattacctgccatgtatttttccccaaatgtcaggtagcagcctctattagaggtataccattaatcaaactaatgagaactatggatgtaaccatcccttaacaaagacataatgcctcaatggggaaaagagcagaatgcaagaattttatgaagtgggccttcctttgtaaacayttgtgtttgaatcacaccatagtgtccaaatcagggcctcctgatcctgacaacagtgtttaatgttccctaacagagagggtcataatactgaatcaaaatcagttttacttatggttttaatggaaaaaataacatttgatttgccacagtaaggcatttcaaagccattcttaatg

SEQ ID NO: 620030 - DNA, 606 bp, Homo sapiens
ctgaggcaggagaatcacttgaacccaggaggcagagattgcagtgagccaagatcgcaccactgcactgcagcctgggcaacagagggagactctgtcaaaaaacaaacaaacaaamaaaaaaaaaccttcaaattttcagtctgtttataattctctttggtggaaaataacaactactacacataattaccctgtttgcaaggatcttatgtatctatcagtatcagcattttatttaaggaatcatcaacttacaggaaatgaaattaagccttcatctacattagagactagaagaaaatactgcattcacaggcacacatgtgtgtgcatgcacgtgtgtgtgtggtttatctcagagagtttaaatgttcttaaacaaaattgcagcagagtaggatatctgttttgcttcctcacacttctatgacctaattacatcttctgtttaaagtacttcacagataaagctcatattatagccaataccacagagagctttatttgaatgccagttatgtcttaggaactattctaaacgctggaaatatagtggttaagaagataggaaaatcccctgccctcatctgtgaaaactgagta

SEQ ID NO: 620031 - DNA, 606 bp, Homo sapiens
tgaggcaggagaatcacttgaacccaggaggcagagattgcagtgagccaagatcgcaccactgcactgcagcctgggcaacagagggagactctgtcaaaaaacaaacaaacaaacaaaaaaaaaccttcaaattttcagtctgtttataattctctttggtggaaaataacaactactacacataattaccctgtttgcaaggatcttatgtatctatcagtatcagcattttatttaaggaatcatcaacttacaggaaatgaaattaagccttcatctacattagagactagaagaaaatactgcattcacaggcacacatgtgtgtgcatgcacgtgtgtgtgtggtttatctcagagagtttaaatgttcttaaacaaaattgcagcagagtaggatatctgttttgcttcctcacacttctatgacctaattrcatcttctgtttaaagtacttcacagataaagctcatattatagccaataccacagagagctttatttgaatgccagttatgtcttaggaactattctaaacgctggaaatatagtggttaagaagataggaaaatcccctgccctcatctgtgaaaactgagtaa

SEQ ID NO: 620032 - DNA, 496 bp, Homo sapiens
atgaaattagtcattgaaaattgtacacatatctctattaaaataatttgtgcttcaatcattttataatttttagttaaataattccatattcttataaaatcaatttttaacttatactgatatttcaaaagtatatttaaattggagaaccaccaaattacattcctgataaaagatttatcactaaaaaattgctaaagaactactcagtattactggaacattgctttattctcactgaaagtcacatttttttttctggaaaaggcaacttgtttttcattttttgaacaagttaacctcttgtgacccagcttytaaacagacactggaaaataaaaatggccaattcccatcttccaaaataaaccaaacagcttagaacagatattgaaaaaaaaaaaaaaaaaaggtggaggactccaacaccttcctgacagcactagatagattattgagacagaaatcaacaaaaaacactgtacataaattg

SEQ ID NO: 620033 - DNA, 617 bp, Homo sapiens
tattttgagtacattttcccttcctcagacatctccagttagggaggtatagaataccaaataaaaggtgatattaaaattattagccaagttttcagcagtcagctagaattatgaatatgttgcaagaagtttccaaaagtattgactgctgcccttaaaaatatttcaataaaagttacttctatggacagtattgtttatagtttcacacctattgacccttcatagcttgatatattgggggaacctgcccccaatattttaacataggttctttctattttccataagtgttggccagctgaaaaataaagagaaagagtacaaagagaggaattttacagctgggccactggggctgacatcacatatgggtaggaccgtgatgtccacctgagtctcagaccagcaagtttttattaagggtttcaaaaggggagggggtgtaagaacagggagtaggtacaaagatcacatgcttcaaatggcaaaatgcagaactaccaatamgggtctaacaaagatcacatgcttctgagggaataggacaaaaggaaaaagcagaaccactgataagggtctatgttcagcagtgcacgtattgtcttgataaa

SEQ ID NO: 620034 - DNA, 591 bp, Homo sapiens
agatctaaacatgtaaatcctcttttacagttgttttaaaaacaccaatacatggcaaaagcctgagaaagggttttaatgaagaacatgaagaaaacgttggtgtggagacaactgtattaatgaattccactttacattcagtgatactgagaaaggaagaagtttcaagggttaggaaaaggttgatagcctttagacattcacaatgattcactttcccagcactttctgaaagagaatcatgaaytgagtaacaatcaataaatacatgcaaaactatcttcactttattctctttctggtaagaagactgacatctatataaccatggattttgagaaaaccataatttatcactttagaaggaaacataagaataagagtagaattgaggctggtcacagtggctcacacctgtaatctaacactttgggaggctaagacagatggatgacttgagcctaggagttcgagactagcctggccaacatggtgaaaccccatctctactaaaaatacaaaaatagccaggcatggtggcccatgcctgtaatctcagctactcaggaggctgaggcaagagaatcc

SEQ ID NO: 620035 - DNA, 492 bp, Homo sapiens
gaggagtgtcagggctcagaaacctgggtccgagtcaccagttgtcaacactttggagagaacacagacatctgagggagacctcaggatgctgcgcaccagacctggcacctgcaccttccagaccgcctcccacacattatttccactgggggttggccccaagctaagtaattgcagtcaagaggaaattataaaccactgcctctttgaagacacaactgagacacgcagatgcaaagataaaaaacaaggctttytaaaacaaaacacaagacagtgcaggctggcagacgactggtaaaaggtttaaatcacagcaagcagcggtgcagggagctaagtggggcacaagaccagggttttttttttttaatgtattaacaaaaatatttgtgctgttccttgtggagcagggctaacccataggcagtgagcccagcgtggcgagaggcctgggtttgaatctcagctctgcgatttaggagctag

SEQ ID NO: 620036 - DNA, 617 bp, Homo sapiens
tcttgctctgtcgcccaggctggagtgcagtggcttgatctcggctcactgcaacctctggcacccgggttcaagcaattctcctgcctcagccttccaagtagctgggattacaggtgccaccactccaggctaatttttgtatttttagtagagacagggtttcagcatcttggccaggctggtcttgaactcctgaccttgtgatttacccgtctcagcctcccaaagtgctgggattacaggcgtgagcyaccgcgcctggccaatttcatttcattttaattaaatttaaagagctatgcattgctgctggctgctgttttggacagtgcagaattagaactcagaaagcaactaccctgttggtgctgcaaagacctccatcacctgcaccactacataaatcatgttagcagaaaatacattgtttagggactcaaggattcccttgaacatacctggttatttttatactcatcccagcctgttttctgcacaagcctctgagtttggttttgttttgttttgtgttttcttactcactgtctgcagcagggcatgcagtgggtaggctgaaggcaagagaggcagaggggtgcgacaggagaggacaa

SEQ ID NO: 620037 - DNA, 537 bp, Homo sapiens
tgttatttatctcttgattttataattcttttttggcttgaaattttattatgtaaaattttattaaattttaaaatctttctacttctggcttttgttttgagttatttttcctactccaagtttataatggaattcattcatatttttaaatacttaacaaggttttgttttaaacctagatacttgttgcacacaaactttatcttactatacagcatgaagtacagacccaattttatatttttctaaatagctatccagttaaatctatgttttcctcacacatcagagatgctatttatatcctatattaactttccatatgcacttggaacaatttctggattttctatttcattgatccattatgccatactgttttaacaatagaggatttgtagtatgttttaatatcaaacaaagctaaactcaccaccctacttttttttttgagacggagtctcactctgtcacccaggctggagtgcagtggcacrgtctcagctcactgcaagctccgcctcccaggttcat

SEQ ID NO: 620038 - DNA, 443 bp, Homo sapiens
tgagagccctgggcaggaggctgtgtggaagggcatttagagcagagcggatgccggcaacaaaggccccgaggcaggagcgcgctcggcgtggtctacgtgaggaacagcaaagtcaacgggcctctgcggctgccaagtcaggggagagcagcacgaggtgatggcagagggatactgacagccagcctggacatcccatgggggccgtggtaagccctttggcttttactccaagaaagataagaggccaaatggaggcttcagagcagaacagcgacacgtctgttttatgttttattcagatcactgtgactacacgttgggaacatagttacagaggcaaagaccagraaggatgtcattgcaatcatctagatgacaaataaaggcagcttggaccaggccagtagccatgggaggaggagcactggagatagatg

SEQ ID NO: 620039 - DNA, 619 bp, Homo sapiens
aatatttatattcattcattcagcagatatttactgaacactttgtaatgacagataccacttactaagccctgtgtgcagacagcccatcatgctcagagtaagcctacaaggtagctatgatttctgtcacttacagatgggcaacagaggacagacacatcacgtgactttccccaggtcacatatcctatacctgrcacagctggaattcagcactcttttccctaagccatgctattaaaaagctacttcagcattagcctcaagccatctcattctagaacattctcaccccccagtattggcagcagaattgccaatgtgaacacataaaacatttgcagttcatcctgccacttcctctatgaagtcctctgtgagtcccacaggcagagccagctgctgtcattgaccccaatgcactttgctaacattgctgaacaactcttgctcagtgtcattattggtcttcctgtctctcccatgaggctgaaatctctcaaggacaagggctatgtttcatactcattttggcatctctggtacccagcacagtgtctggcacatggtgagaatccaatgaatgctgactgaatgagcaaatgaattgcattag

SEQ ID NO: 620040 - DNA, 509 bp, Homo sapiens
ccttggggcactcactgatttattttccctatattttcctcagttttgatgaaaagtattctcaaagagaaatcattattcattacaaaatatggctgttcctcttaaagttggtatgatcatttgcataggcacagaaaatgtgtgaatttaccaaaaaaataggaagggagataagggtacaagttggctttgctggaagttttrtaagaaatcagattgaacttttaaaagcctccaaaatccaagccacactttaccagattttgcaaaaatctaagttgcttcctctcttctgaagggataactgaaatatcctaaagttctgaaactctgaaacttccagaaagtgatctttcttactaacagataaagctaggaaatggtaaaacaggtgacagggtcagtttcactggaacagctgtgaagtcattgacttcgtaagtcagcctgaattccttaaaacaagctgtctgtacctgaatctgcatgtctatagtaagaattat

SEQ ID NO: 620041 - DNA, 484 bp, Homo sapiens
gaaaataaaattaagaaaaagaaaaaaggcagagcaaatttgaatcaracttgtaactcagataactctgtggctcactaggaataaagatggagtcagcaggtttgactcctgtaactacacagcatgactcactctgaaaactataacaatattatcacctaaggttattacctgctcaggttccaaggtggccaacatccttcctccagatcgcgccatttctccctgctgctcaacagtagggcctgcaagaatatgtgcaaatatcaggtcatggtcaccttagttctctctctagttctactactagagagagaactaccagcacatgcacaagctcatcacgcccacagaaggaacacatgatgtcttggtatgcttgtttcacacaggggatcaccatgaccaataaaatagcaaaagaatgtgccagattcactcaggtataaacataagaacttgcctgtatttctggggcaga

SEQ ID NO: 620042 - DNA, 634 bp, Homo sapiens
ataaatagagatttatactgtatttatactaacagaaaaaaagctaagactacagaaagtggggtccccagccataggcaatgggacaagtccgtgcctttctgttttacctcactgacttgaggacactctggtgtaataccagaacatcactgtgggtacaaacaggcaaatgatggagaaacaaaaaaaagtaacaggaaatgaagaagcaaaacctgaaacaatatatgtatatataacaatatcacctgtgtaaaataacatctgtgcatgtagtgtacatgtaaaataatatccataatataaaataacagctattttacatctttacaggtaaaggaatttcaaaataaaataatttgggagttagatttttttttcagttgtttcctgaagtgactgttattgagatgtctctagtgtgtagttgtacagttgattaagaatataattcaaaaaaattcaggagatttaggtaaaaatgaaacaatgtagaaagaaggttctagaacatttaggrgtagccaccaaaaattcgtaagtcccatgaggactggaatcatgtctgatttgttcaccacagtatccccaatgcccaagactgctaggtacaccataggtgctcaataaa

SEQ ID NO: 620043 - DNA, 570 bp, Homo sapiens
tcagtctggttcccaaactcttatcactgagcacctattttatttttcttttccctcatgagtcctgtgtttgggagattctcatcacctaataaatgtatttatttatttataaggcagagtctcactcagttgcccaggctgcagtgcagtggtgtgatctcgactcactgcaacctccacctcccaggttcaagtgattytcgtgcctcagcctcccaagtagcttggattacaggcacatgctgccacacccagctaatttttgtatttttagtagagatagggtttctccatgctggccgggctggtttcaaactcctggcctcaagtgatatgtcctcctcggcctcccaaagtgctgagattacaggaatgaaccgctacgcccagccaatgcatttattatgtaataatttaaaagtactctttgtggtgtgtccaaacatttcttcttttgtgaagtctcaagcaaagactgggaaccccaaagtggcccaaccttttaattttacagagacagaaattgaggcctagacagggagactgcccaggccacacgcattggca

SEQ ID NO: 620044 - DNA, 550 bp, Homo sapiens
gtttttcaattaggaagacatttacataaatatttaccaccacatatcttttttaaaataagaatggctataaataaataacacatatttacttacaattatwttcttaccactaatctctcaccaaaaatctgcattctaattatatatcagtttctaataaagtcatagtttttttccccattatttccttttatttttcactgtactttactttttcagccacttcctcttttgtccttatatgctttaacatttctgatgacccagtaattatgcccaagattatgattgattctttgtcctttctcttttcacttcccttttaatgtagaaatataagccaaatggtggtggcaccacttgattatagtgggaaatactggcacagtggctcacacctgtaatcccagcatttcagggggctgagacaggaagctcacttgagctcaggagtttgagaacagcctgggcaacatggcgggaccttgtctgtaacaaaaaaaaaaaaacaaaagaacacagaaattaatgaggtgtggtggcatgc

SEQ ID NO: 620045 - DNA, 501 bp, Homo sapiens
tggcatcagactgctaggagtaaccatttaggtagatgatattattgcagcattatttttaacatgctgctaagagaacttctattaaacaacctctatcacttgcctgctgacatcttaaatttttttaaacatggctaaattcatttactccacaattagttgtaaataaccatgagaaaagtaatgcaagcatatatcatttctaggttaaaataataagaaaatacatgtgcttaaaggagtyaaaacattgatctcacaagcaaatggtgggattggaggtagagagattgcattcttcccacggcacatcttgagtccttataactgattgacacgtgagggaattctttccacaaagaaatgggtaataaatgaaacaaatctttatgatcgaaaaatatgaatcacatataagttatcaaagggatttcctagacaacttccaaacaggaggtagagaccttgaggtcatctgtagactgaattttgaccacc

SEQ ID NO: 620046 - DNA, 578 bp, Homo sapiens
ctcccaatcaatactccatctccagaaataacaattctgatttccatcacttcttattcacaatctattaactgaattattgttttaatatgcagatctgagataagaatatggtcatgaatgccagtcagtttcaagtcattgatggtcaagaatgtgtatgatcagcaatttgtaatgaaaataggaagctcagccaggcatggtggctcaggcctataatcccagcactttgggaggycgaggcaggtggatcacctgaggtcaggagttcgagaccagcctggccaacatactgaaaccccatctctactaaaaatacaaaaaattagccggacatggtggcaggcgcctgtaatcccagctactcaggaggctaaggcagaagaattgcttgaacctgggaggcagaggttgcagtgagccgaggtcgcaccactgcactccagcctgggcaacaagagcgaaactctgtcaaaaaaaagaaaaaaaaaaaaaaaaaaaaagaaaaaaaaagaaaataggaagctcgataatgctcatgtctgccccataccagatgagtctctaacagaatc

SEQ ID NO: 620047 - DNA, 605 bp, Homo sapiens
ctccaaatgttagagctccatgttttgtccaaacaaatctcataacctgactaaactgcttggactacacgggacaaattggcatttyatcaacttctgaacctgagctggggcataatttactgtggaaacactgacgaaggagcttcatgttcttgggagttctctggattttaaattctaaactgaagatggcagtgagccagtgaccctaacctgagtttgaaggtggtgccacttctctgggagcacaaagttcaaaaggatgaatttgggaaaaagcatcacttctggtgggcacttctgtcactcaggacccagtgtgcagagatgatactgggaactcaaacacctaaaaattcaagaaactgagtgaaccctctcagagataaaccccccaaaatgcaccaaaacacatcaatcatcaaacttttgaaaattaaagacaaataaaatatcttgaaagtaaagagagagaaacaacactttacttttagaaggaaactaatttgacttacagtagctttctcatcagaaaccacagaggccagagaaaatggcacagtatttttcaactactaaaataaaagaattgtcaacacaga

SEQ ID NO: 620048 - DNA, 605 bp, Homo sapiens
ctccaaatgttagagctccatgttttgtccaaacaaatctcataacctgactaaactgcttggactacacgggacaaattggcatttcatcaacttctgaacctgagctggggcataatttactgtggaaacactgacgaaggagcttcatgttcttgggagttctctggattttaaattctaaactgaagatggcagtgagccagtgaccctaacctgagtttgaaggtggtgccacttctctgggagcacaaagttcaaaaggatgaatttgggaaaaagcatcacttctggtgggcacttctgtcactcaggacccagtgtgcagagatgatactgggaactcaaacacctaaaaattcaagaaactgagtgaaccctctcagagataaaccccccaaaatgcaccaaaacacatcaatcatcaaacttttgaaaattaaagacaaataaaatatcttgaaagtaaagagagagaaacaacactttacttttagaaggaaamtaatttgacttacagtagctttctcatcagaaaccacagaggccagagaaaatggcacagtatttttcaactactaaaataaaagaattgtcaacacaga

SEQ ID NO: 620049 - DNA, 541 bp, Homo sapiens
gttcagcccaaccccacttggagagatccgagcaggcrccgggagagaagagaggtcaggcagtgggagcagacgctcctaagcctgcagggactgaggggggtgccttcctgggcacccgagggtgcaggctgcagagatggccgggtcctgtgcctgggagggtggccacagctatacctgggagctcccgccctgccaactcagggatcccgcttgttcccaactcctgcctgctccatgcagcggggacctggtctgcagctgttggtcgtgggggctgcagctgcacccgggagggcagatcctgcctgctcctggcctcctccaagagcacagggaggctcagatgcacagccatggtttgggcagctgcagccctgcccaggagggtggagcttctacctgctccatagagcatgaggcctgggtctgcagccacagtttgggggggctgcagtggtacctgggtagctcccaccccaattcagaaagggcaggcctcccactggctccatggagtgcccaggcccagcggggc

SEQ ID NO: 620050 - DNA, 541 bp, Homo sapiens
gttcagcccaaccccacttggagagatccgagcaggcgcygggagagaagagaggtcaggcagtgggagcagacgctcctaagcctgcagggactgaggggggtgccttcctgggcacccgagggtgcaggctgcagagatggccgggtcctgtgcctgggagggtggccacagctatacctgggagctcccgccctgccaactcagggatcccgcttgttcccaactcctgcctgctccatgcagcggggacctggtctgcagctgttggtcgtgggggctgcagctgcacccgggagggcagatcctgcctgctcctggcctcctccaagagcacagggaggctcagatgcacagccatggtttgggcagctgcagccctgcccaggagggtggagcttctacctgctccatagagcatgaggcctgggtctgcagccacagtttgggggggctgcagtggtacctgggtagctcccaccccaattcagaaagggcaggcctcccactggctccatggagtgcccaggcccagcggggc

SEQ ID NO: 620051 - DNA, 535 bp, Homo sapiens
agctctggcagaattcatctccttgctttttaagagattaataaacaatgaatacattgtagaggaaagaagtatgttttcactttgaaacctttttaaaaatttttctttagccatttagtattaataacaagggaagtagtattaataacaagggaagaggggtttctactccttttctttttttctttgctcttcttcctcatttcatcccttggagactgtctatagtcccacattttgtccagttttgaatctgtgtaattttgactctatggcagaaactgtttattgctgactatayatttgttctctcttctctcaaataaacagagccccaactttttactgagcacaatatagccaaaagatgacattgcccagcctctttcgcagatagctgtggctattccaggatcccagaaaatggtagccacaaatgaaggcctctgaagcagaactgccctggatctttactgtgctggtgccctctcggactttctcttgcccttctgtctctggcctctcattctcc

SEQ ID NO: 620052 - DNA, 639 bp, Homo sapiens
ctggggaagccgagggccaactagaggcagaaagctgttgtcccgaactcccagcattagctggttcagatcatggcacagccagaagtctctactcaacagttgcccatgtgtgtgcccctacctttccttctgacccatacctcctgggtcccaaccacgactttcttgaaagtgtagccccaaaattctccttacctctgaatctacttcctcccatccctgcctcctaggtactaatggttcagagtttcatttcctctagcaagttgtatctccaaagggatctaagggagctctacactgcatccttaggcccctaggctatgaacccagagagtcttgtccctggtatccctcccaatttaggtatacagctctmgacatgggcagttatgtgagacccattccccaccacccttgccagggccccaagtttgtaaagggctaggagaaaagagagagaaagagagagacagaggggagagaaagaaagagagacaaagagggagtcaaagagagaaagaaagagaaagatagaagtagtaaagaaaaaacaatgtgccctattcctttaaaagccagggtaaatttaaaacctataattgatcatggaaggtcttctccatgaccctataa

SEQ ID NO: 620053 - DNA, 609 bp, Homo sapiens
taaaaactttcagccaggcatagtgactggctgggtgcattggcttacacctgtaatcccagcactttgggaggccgaggcaggcagatcacttgaggtcaggagtttgataccagcctggccaacatggtgataccccatctctactaaatatacaaaaattagccaggtgtagtggcgcacacctgtagttccagctacttgggaggctgaggcaggataatcttttaaactttggagatggagctcacagtgagctgtgatcatgccactgcactccaacctgggcaacaaagaaagactctggcaaaacaaaacaaaacaaaacaaaaaacctctcaatgaactaggtattgaaggaacatagctcaaaataataagaccaatccataaccaatatcacactgaatgggcaaaagctggaagcagtcctcttgaaaactggcacagaacaaggatgccctctctcaccattcctattcaacatagtattgaaarttctggccagggcaatcaggcaagagaaagaaataaagtgtattcatacaggaagggaggaagtcgaactatctttgtttgcagatgacatgatcccatatctagaaaacc

SEQ ID NO: 620054 - DNA, 616 bp, Homo sapiens
tttgggttgcttccaagtctttgttattgtgaacagtgctgcaataaacataagtgtgcatttgtcttgcatgggacagtttcttaccacttcccagatactgatgaaatatgaggctttctgcaaggtatggcatcaggctacaaaaccacttagctccagtctagaattgcatcttagtaatggagtatcctgcaactcctatgggcagccattcagccccttttgttttrctagcataattttgggtgcataggacagggatgcatctacctggcatctttggctactctttatttcactctccatggaaataacaaactgcctgaatctaaaaataactcattgtgtcttaactggctgaatcagaccttagctttgtccttatcttgtgtgcttgaaaatatctgctactactcttccccataaatatggatgaatctcataaacacaatgttgtgtgaaaagcaaattgcaaaaatatatttactttatatttctaggcatataaacttcaaacacacactaaactaagcagtatgattttaggggaagagtaaatacaatgatcagtacagggatcaatcctgagagataaggagaggatacatctgga

SEQ ID NO: 620055 - DNA, 587 bp, Homo sapiens
gtctgctaaactagcgttgcccagtgacatctcacagccaacccaagaacatcttcagggccctggcaaggagggtaggacagagccttggggagtcgtcaccttttgaggtatctggcgtcctccccttgcatggcggcagcggcagcggcgtggagaggatggggtatcttgagaggcaggcgcggttatttccggggacggtggccaaagtaccctcacacccagaggcgatgacagtcctgaggcctgcaaggcggggcagcagcggcgctgtggttaccacggtgaagcctccagctcctcccacagcttctgtgccccaaaacactggaacggcccagacccgcccagagtcgcctaagccgggccgtcacgacgcatgcgcttgctctgcacctcttgtatgcgcaggctcagtctgaggcgstggcctcagagtttgacgcaccggggagccgagcagggaagttttggtgcagttttgagcgtccgtgtataaggagtggctccgtagtcaccgcccccttgaggatgggaatagaaagggctgtcaggtcagcttgaaaggagagaggggaatccga

SEQ ID NO: 620056 - DNA, 564 bp, Homo sapiens
aataacctcattaaaaagtgggcaaaagacatgaacagacacttctcaaaagaaaacaaaccaacaaacatgaaaaaaatgctcaacatcactaatcatcagagaaacgcaagtcaatgccacaatgagataccatctgacaccagatagaatggctgttattaaaaagtcaaaaaaygacagacactaatgaggctgcagagaaaaaggaatgcttatacactgctggaaataatgtaaattagttcagccactgtggaaagaagtttggaaatttctcaaagaacttaaaatgaaacaaccgttccacccaataatcccattactggctatatacccaaggaaaataaatcattctaccaaaaacacacatgcatgtgtatgttcattgcagcaatattcacaatagcaaagacatggaatcaacctaggtgtccatcaatagtggattggataaataaaatgtggtacatatacaccatcaaataatacatggtcataaaaaagaatgaacttatgtcctttgctgcaacatggatgcagctggaggccatcatcctaagt

SEQ ID NO: 620057 - DNA, 374 bp, Homo sapiens
agatatgaaaggaccaacatagtgaattgccttggatccatattgcayaattttgctgttggcagactgaagttgtccaagggctgagtaaaaatgatgaggaatactttacaaaggccttacttggtttggttcctgtggtagagatgatttgtttgcagtgactgttccttaagttcccctgcttcatttttcttcctttactgcagttagttttcatcaatggactgcagattgcagtgacatgtttcacttctgggaggggaaatttaacagccagcatgctccctccacctctttttcccccactgttatgatcatgagaccaattgttccaaatggcagagctaaagagggaagagggctacctaaac

SEQ ID NO: 620058 - DNA, 374 bp, Homo sapiens
agatatgaaaggaccaacatagtgaattgccttggatccatattgcacaattttgctgttggcagactgaagttgtccaagggctgagtaaaaatgatgargaatactttacaaaggccttacttggtttggttcctgtggtagagatgatttgtttgcagtgactgttccttaagttcccctgcttcatttttcttcctttactgcagttagttttcatcaatggactgcagattgcagtgacatgtttcacttctgggaggggaaatttaacagccagcatgctccctccacctctttttcccccactgttatgatcatgagaccaattgttccaaatggcagagctaaagagggaagagggctacctaaac

SEQ ID NO: 620059 - DNA, 374 bp, Homo sapiens
agatatgaaaggaccaacatagtgaattgccttggatccatattgcacaattttgctgttggcagactgaagttgtccaagggctgagtaaaaatgatgaggaatactttacaaaggccttacttggtttggttcctgtggtagagatgatttgtttgcagtgactgttccttaagttcccctgcttcatttttcttcctytactgcagttagttttcatcaatggactgcagattgcagtgacatgtttcacttctgggaggggaaatttaacagccagcatgctccctccacctctttttcccccactgttatgatcatgagaccaattgttccaaatggcagagctaaagagggaagagggctacctaaac

SEQ ID NO: 620060 - DNA, 374 bp, Homo sapiens
agatatgaaaggaccaacatagtgaattgccttggatccatattgcacaattttgctgttggcagactgaagttgtccaagggctgagtaaaaatgatgaggaatactttacaaaggccttacttggtttggttcctgtggtagagatgatttgtttgcagtgactgttccttaagttcccctgcttcatttttcttcctttactgcagttagttttcatcaatggactgcagattgcagtgacatgtktcacttctgggaggggaaatttaacagccagcatgctccctccacctctttttcccccactgttatgatcatgagaccaattgttccaaatggcagagctaaagagggaagagggctacctaaac

SEQ ID NO: 620061 - DNA, 608 bp, Homo sapiens
tacaaggtttttggtgtctgcaagttggaagttgaaactatcttttgtatacttcttttagctattatatacttgtgyctatttatttctcagtaccagaaaatgtgttcctgaagacatattcttcattgcacagttcagagaaaatcttgtatcctcattgttgaacattcaaaataatagtgtgattattctattactgtacttgatagctatggctaaacaactaatcccagtgggaaatttctagaagtattagaaaatttgaactacatagtgcaactccgtgaccacttccactgccatagaattttagtaagatttttatatagcttcaaaaattaaaaaaaaaaaccattgaattaacttttttaattgaaagattgataaaacatctcatggcagatatttttgttatcaacttcagtatatacatttatcatctttttgtatgatttaatattctaatgcagtaattggcaaactttctctataaagggccaaatagtaaatatttcacttttagaagccatgtagctactcttacaactactcagctctgccattatgacatgcaagcagccatagacaatatataaatgaatgtg

SEQ ID NO: 620062 - DNA, 608 bp, Homo sapiens
tacaaggtttttggtgtctgcaagttggaagttgaaactatcttttgtatacttcttttagctattatatacttgtgcctatttatttctcagtaccagaaaatgtgttccygaagacatattcttcattgcacagttcagagaaaatcttgtatcctcattgttgaacattcaaaataatagtgtgattattctattactgtacttgatagctatggctaaacaactaatcccagtgggaaatttctagaagtattagaaaatttgaactacatagtgcaactccgtgaccacttccactgccatagaattttagtaagatttttatatagcttcaaaaattaaaaaaaaaaaccattgaattaacttttttaattgaaagattgataaaacatctcatggcagatatttttgttatcaacttcagtatatacatttatcatctttttgtatgatttaatattctaatgcagtaattggcaaactttctctataaagggccaaatagtaaatatttcacttttagaagccatgtagctactcttacaactactcagctctgccattatgacatgcaagcagccatagacaatatataaatgaatgtg

SEQ ID NO: 620063 - DNA, 547 bp, Homo sapiens
tgcagtaattggcaaactttctctataaagggccaaatagtaaatatttcacttttagaagccatgtagctactcttacaactactcagctctgccattatgacatgcaagcagccatagacaatatataaatgaatgtgcgtgtctgtgttccactaaaactttatttacaaaaacaaatgctggctgtagtttgttaactctcactcaatgggagtacagaatattctttgtttcagtgttttagtcttggtagtaattttcaatcaagaatcttccaggaggtggatgatgagtgcgttggggttccttagaggaacagaatgagtaagattatacacacacacacacacacacacacacactcagttgattcttgttattcactgtagttatgttctataaagtttctatgaacattgaatcagtgaataatgaacaattgctcctagggaaaatacagtgtagtttcctgaaagcctctggtcacaacatttttgtcaaccagtcaatatacattcttgktttatgtgtgtttctcttcaaa

SEQ ID NO: 620064 - DNA, 189 bp, Homo sapiens
tttgtggtgatatgttaaacacatatttggttraatttatgtggcataatttggaaataatgctttcaattcccttctacttcataaatcagaacaatttcttgttaactaatatgatgtttccttttattatatatatcagaaaaatttcttattaactaacatattttcacttttgtttttgtatgt

SEQ ID NO: 620065 - DNA, 189 bp, Homo sapiens
tttgtggtgatatgttaaacacatatttggttgaatttatrtggcataatttggaaataatgctttcaattcccttctacttcataaatcagaacaatttcttgttaactaatatgatgtttccttttattatatatatcagaaaaatttcttattaactaacatattttcacttttgtttttgtatgt

SEQ ID NO: 620066 - DNA, 189 bp, Homo sapiens
tttgtggtgatatgttaaacacatatttggttgaatttatgtggcataatttggaaataatgctttcaattcccttctacttcataaatcagaacaatttcttgttaactaatatgatgtttccttttattayatatatcagaaaaatttcttattaactaacatattttcacttttgtttttgtatgt

SEQ ID NO: 620067 - DNA, 576 bp, Homo sapiens
gaggtgttaacatttactctacatttcactttcaatttgtatgtttaaaggttctttttttttatattaagttgtttaaatctcccgattatttttattcatcacttgaaaataaaaaaagatattccttaaagttccattttattatgtttcaaatacctattacagaatttttctttaaaggcagagaaggtaaacttctagaaatacttccattgggtaataatagcatctataaaatagggatccaaatttcagaaatgcacagtttgtgttcttactctcagagtggtaataatacattggytcattggtgttgatttaaagtgtatatgagagctagggttttcaattaggaggtgatatattatagaacgagagtaactgaagatttttagcccaaaggaaaatgagaaataatcgcatgtagagcctcaaacactgaacattcattttattttataaaagaaagaaaacactatcctgctttaaatatctatcaatagcaacatgaaatagactaagaaaagaaataaatctctgttgaaagggttaagatacttctccaagacacat

SEQ ID NO: 620068 - DNA, 563 bp, Homo sapiens
aactacaggggctttgagcttgatgtttgggtactttaattgtcactgtaattgattttacctttgacttgctgtagtgattgccttgtaatttgttgatgattaatgaccatcctctgggtattgctgctcagctggccagaaatagagcaattggtttttcttggctcttacttctcaaaaaagattttaaaaatcactgagggggcctatgtaaaaaggttttataccctctgtggtttaactgtattgtgggaaaaatcagggcacaaaattaagtgtatgtttggttaattttatctttatgtccttaagatacattcaaaactttctgcttttagcattttgatgaatgaataaattttagaaaatagagggttttgaagattaggagaagttagggtatttgaattactatgaaaattttctaagtaaaattccccaaaaagagttatcattgctmctaatggaattgttaggatctaataatataaattgttgatcaaaacaccaggataaaagggaaaatggcaataggttatagggatctgacagtaagaatt

SEQ ID NO: 620069 - DNA, 617 bp, Homo sapiens
tacaattaaataactttatgaaattgagatgcaaaatttatacaaaagattaattaaaccagaataaaaacaaataaaattgatggactgctagctaaattaataaagaagaagaaagagaagactccaagaagcaaaatcagaaacaacaaaggcaatgttaccactgatmccacagaaatacaaaagaccctcagaggatactatgtacaactctatgcacagaaattagaaaatctagaggaaatggataaattcctggaagcatacaatcttccaagattgaatcaagaagagattgaaaccctgaatagacaaatatcaacttctgaaatagaattagtaataaccaaccaactaaaaaatgtcctggaccagaaacattcacagtggaattctatctgacatacaaagaagaactgatgccaatcctattgaaattattccaaaaaagttgaggagcacgggctcctccctaactcattctatgaagccagcatcaccttgataccaaaatttgacatagacacaacaaaaaaacaaaacttcaggccaatatccctgataaacatagatgcaaaaatcctcaacagtatattaggaaactgaacccagca

SEQ ID NO: 620070 - DNA, 617 bp, Homo sapiens
tacaattaaataactttatgaaattgagatgcaaaatttatacaaaagattaattaaaccagaataaaaacaaataaaattgatggactgctagctaaattaataaagaagaagaaagagaagactccaagaagcaaaatcagaaacaacaaaggcaatgttaccactgataccacagaaatacaaaagaccctcagaggatactatgtacaactctatgcacagaaattagaaaatctagaggaaatggataaattcctggaagcatacaatcttccaagattgaatcaagaagagattgaaaccctgaatagacaaatatcaacttctgaaatagaattagtaataaccaaccaactaaaaaatgtcctggaccagaaacattcacagtggaattctayctgacatacaaagaagaactgatgccaatcctattgaaattattccaaaaaagttgaggagcacgggctcctccctaactcattctatgaagccagcatcaccttgataccaaaatttgacatagacacaacaaaaaaacaaaacttcaggccaatatccctgataaacatagatgcaaaaatcctcaacagtatattaggaaactgaacccagca

SEQ ID NO: 620071 - DNA, 623 bp, Homo sapiens
gctttaacattgaatgtctgccctgctggctttcagacttgcatgaggtctgttacccctatcttttagcccatttctcccttttgaaattggagtgtttacctaatgtctgttccatcaytgtattttggaagtaaataacttgactttgactttacaggcttgtaactgtaaagaacttgccttgagtctcaaatgagacttttatgttagacttttgagttgatgctggaacacgttaaaactttgggggactattgggatggaatgaatggaatgatagtattttgtatgtgaggacatgagatttcaggggccaggtatagaatgaaatggtttagatatttgtcctctctaaatctcatgttaaaatttgatccccaatattggaggtgaggccaatgggaagtgttttgttcatgggagtggatatctcatgaatgtcttggtgttatcttcatggcaatgagtgaattctcacttgattagttcctgtgagagctggttgtttaaaagagtctgacacttccctcctctctctcttgcttgttttctctcacatgggatgtcagcacacactggtaccccctttaccttccaccatgagtggaagtagcctgagt

SEQ ID NO: 620072 - DNA, 270 bp, Homo sapiens
atgaactataatgttctacccatattagatacctgatatatatttattattacatrtttattaattatattaaaataatataatattttcaccaatatctacattttgaagagacctaggaagtcatctccaaatctcaaataatcctaaatcatcatcatgcaacaatgtatctaactatattctaattatactataatctccctgagaagtagagatttatgtgaatgtgattgagaagtttgcttttctttctcttttccattttga

SEQ ID NO: 620073 - DNA, 566 bp, Homo sapiens
ttctttttttattttattttttcccccaagatggaatcttcctgttgcccagactggggtgtagtggtgtgatctcagctcaccgcaacctccacctcctgggttcaagcaattctcctgcctcagcctcccgagtagctgggactacaggtgtgcgccattatgccgggctaatttttgtacttttagtagagacagagtttcatcatgttggccaggctggtctcaaactcctgacctcgtgatttgtgtgcctcagcctcccaaagtgctgggattacaggygtgagccaccgcacccagctgacatacctttcctcaagggtttccagaaacaaatttagttactaatataagaatagcatatgaaccagcaaggcagagtgaatgagcatggaatttcaaaccagatatatccaggtttgtaaacatcacccaacagtacctgagaaaagtttggcacattacgttatctatccattctcaagttttcacatctagacatatgaagaacatacctcaggaagctgttgtaagggttaaaggcaaaaatataaaccaatata

SEQ ID NO: 620074 - DNA, 479 bp, Homo sapiens
tttcctcaagggtttccagaaacaaatttagttactaatataagaatagcatatgaaccagcaaggcagagtgaatgagcatggaatttcaaaccagatatatccaggtttgtaaacatcacccaacagtacctgagaaaagtttggcacattaygttatctatccattctcaagttttcacatctagacatatgaagaacatacctcaggaagctgttgtaagggttaaaggcaaaaatataaaccaatatatttgtcattagatattaaattttttaaattaaaatattttaaaatattgaaatattgaggcctgccattatatttatttcctctcttcttcctaaaaatgatagtaaattatttttttagttggaaacccccaagagcaaatagaatgggagtagagtcatcagcagatttgaaatttcaagacagaaagtaagtagaaaagaagtgacagaagctgaggagagga

SEQ ID NO: 620075 - DNA, 617 bp, Homo sapiens
tatgaagaacatacctcaggaagctgttgtaagggttaaaggcaaaaatataaaccaatatatttgtcattagatattaaattttttaaattaaaatattttaaaatattgaaatattgaggcctgccattatatttatttcctctcttcttcctaaaaatgatagtaaattatttttttagttggaaacccccaagagcaaatagaatgggagtagartcatcagcagatttgaaatttcaagacagaaagtaagtagaaaagaagtgacagaagctgaggagaggaaaccatgggataaaatcttcaaaatatgcatagaagaggataaggtcaagggaagaatgagcttaccctatggatccttgaagaagctctagattcagaatggaaagggatgctagactgaaatggggggaatgagcaacgggccaatcccctgcaagttgtgaagaaagattttgctgacctttaaatctctttagctgccaaatcatcgattcatttctctctttgactaaagatattttgggacacacaagactctaacacttcttctttggaagttacttgagaaagcacccaacaaaactagtaagtgaaatacgagaagccaa

SEQ ID NO: 620076 - DNA, 552 bp, Homo sapiens
agagaccgggtttcaccatgttagccaggatgatctcgatctcctgaccttgtaatccacccgcctcagtctcccaaagtgctgggattacaggcatgagccaccrcgtccggctgttgcagtctatctttcttttcaaatctattaatatttgctctatataattaactgctttgattctgggtgcatatatatttacacttgttatatcctcttgctgatttgatccctttatcattttataaagactttcttgtgtcttcttacagtttttaacttaaagtctattttgtctgatataagtatagctactactgttaaattttgatttctgtttgcatggtatatctttttatatcactttactgtcagtttacatgtatttttaaaggtgaagtgagtccctcctaggcagcatattattggtcttgctttttttttttttaatccatatagtcattttgttttttgtttgaagattttgatctatttaagttcgagttaatgattgatatataaggacttattactgctattttgtgaattgctttc

SEQ ID NO: 620077 - DNA, 596 bp, Homo sapiens
atatatgcagaagtgggattgctggatcaaataataattctgtttttaattttttgaggaacctccatattgttttccatagctgatagctgtgcaccaatttacatttccacgaacattgtacacattttcttttctacatccttgccaacacttgttgtccttttttttaatttttgataatagccatcctaacaggtgtgagatgatatctcattgtggttttmatttgcatttctctaacgattagtaacactgagcactttttcatatactgttggctattgtatgtcttagaaattacaccaaaagcacagggaaagaaagcaataataggcaagcaagagtaggtcaaactaaaaagcctttgctcaggaaaagaaaaaaaataataaaataaaaaaacaagttatgaaagggagaaaacacttacagactatatatttgattaaaggttaatatccaaaatatataaagaactcctgcagcttagtagcaaaacaaacaaacaaacaaacaaaaaacccaaataacttaattgaaaaactggcaaaggacttgagaaaacatttctccaaagaagctctacttcagta

SEQ ID NO: 620078 - DNA, 493 bp, Homo sapiens
tcattgttttcttttttggcaggatgactttatcaagtggtacatgatgtcttatggtctctctccctgtgatattctcagtcactgagggtcattgcttaatgatatcccaagtttgctattttgccttcatttatcagttaaatttatttaaagagaaatgttctttttttctacgatttggttactctgaagtacagatcatatggaaaaaccagaatagatttctgactttttcctttacttgttttcaaaataatgagatggttcgctgaaaccctccaagatgactaaacaaggtgggtggggtttttttgtgtaattatgaacctacagatttaaacgttattatctttattgatgctgaagttgtctcatctttggtcaatgagaatttattcagattagctcttcagttcttttgacataattctagtaatatttaatagcttctttcctttttggtttgacmaaagttccatgctcatttgtg

SEQ ID NO: 620079 - DNA, 642 bp, Homo sapiens
gcaggctcagcttgctattaaacaaaccaataacaaaaggctttgtggcactgcttttcttgagtgrctttctccctagatcaagttctgttttatattccaaagcatttcttaaacagtaggcttttcacaaatcccccgttttctcaccacgtccctttgtattaattctattcaatcagctttttgcccaggactcaactgagtctgctcctatgaaactcactgtgacctgtactcaccacgtccagtggggtgtgccacagcctcctccctgacctccatcagcattgactactgctcacggccttctccttcctgaagctctctcctctcttagctccctgcagctcctgtccccaagggctctccttgatcttctagagcccaccatctatgatacttcactgacctcctttcttctcctgtccccataataaagttgttgtcccaaggttatctccttgtcctcctttccttagtgtcccaatataagtctttgagtgatttaatgtgggcccctgcctacagttacttccttccatgaggatatctcccaaatcaatataattcagtgtcctcattctctgtagcttcctatttcctaactgcctggcacatgtctcaacctagattgtcttt

SEQ ID NO: 620080 - DNA, 628 bp, Homo sapiens
acctgcccacgctggcccagtcagttttcccagccttcattccatggttggtgtagaagggtccttgctgccttcttccaaaggcaagctcccagctcatctttcagccagggaccaagttgaatgtcatagggtctccctatgctgcccagattgctcttgaactcctggcctcaagcaatcctcctgccttagcctcttgagtctctgggattacaggcatgagccactgcacctagctgtgatggctaatttcatatgccgacttggctaggctgtggtgcccagttgtttggacaaacattattctagatcttgctgtgaaggtatcttttagatgagataacatttaaatcagtggattttgagtaaagcagattatcctccataatgtgggtgggcctcacccastcagttgaaggccttaagaaaaccacagacctctcccaaggggagggaattctgccagctgatgaccttcagactcaagcaaaaactcttcttttggtctctagcctctggcttgctctggaaatttggaacttgccagcccccattatctcatgatccaattccttaaaaccaatctcactcacccaccctggcatgcacactacctattgttgtt

SEQ ID NO: 620081 - DNA, 628 bp, Homo sapiens
acctgcccacgctggcccagtcagttttcccagccttcattccatggttggtgtagaagggtccttgctgccttcttccaaaggcaagctcccagctcatctttcagccagggaccaagttgaatgtcatagggtctccctatgctgcccagattgctcttgaactcctggcctcaagcaatcctcctgccttagcctcttgagtctctgggattacaggcatgagccactgcacctagctgtgatggctaatttcatatgccgacttggctaggctgtggtgcccagttgtttggacaaacattattctagatcttgctgtgaaggtatcttttagatgagataacatttaaatcagtggattttgagtaaagcagattatcctccataatgtgggtgggcctcacccactcagttgaaggccttaagaaaaccacagacctctcccaaggggagggaattctgccagctgatgaccttcagactcaagcaaaaactcttcttttggtctctagcctctggcttgctctggaaatttggaacttgccagcccccattatctcatgatccaattccttaaaaccaatctcacycacccaccctggcatgcacactacctattgttgtt

SEQ ID NO: 620082 - DNA, 569 bp, Homo sapiens
ccaaggtcatagtcaggagcagtggagggaatgacaatcataataatttgcatttgtaaagtgattttgaagaatccaaagctcttagcaagcataatttaattcgtcattgcaacaatgctgtgaagtaagacataaaatatttatttcaataaggaggaaaagttttaaaatatatttgggtaacttatatcataatcagccagccagactggatgaaaaaggcatgttttgcatcacactccaaaatggaatattgggaacttcgttagagttctgaggaagagtgacttactcaagtcaggattctcttggttgtatctcttgcttcctgctccccaagttaaaccagagcaatagatagaggagaggcattgaagggaatccatgtgaatttggagtcagccaaacgagattcttatctacactcagcactgtcacctttggtaagaaacttaactttgaataagcctgttttctcattagtatagtagaaataataactgaaytacacacgtgaatatgaaaaagaaatcaggtgtttagcatggggtctggtccaaatagct

SEQ ID NO: 620083 - DNA, 527 bp, Homo sapiens
aattggacatgacacagtggctcttttagcttcctgtagctggaggttgtcatagattgtttgagaaaagattaagctgtggttaggaaagatttctgagcccaaataaaagtaatgataattgacccttttgcaaacttggagagtttattttttaaccaaaagtgctttcactatatttcaagcctgttggcttcaattgtaaaattgcacctwcctctgacaatgacccctatttcacccccatattcctgtttggcaaagcaatatggtttagtgttcaagagcactctccaagcaaagtttttccccttacagtttttgcagcttgcaggcaggtctcagttgtaagcacttcttgaatgtcacagaggcaaagtggccctgccagaaaaaaaaaaaaaagtgtttgtgaaaggaggaagtctgagtcatcagctgcaggtagctattacctattgcagcacaaggataatatcttggagtccaggcagacaaaacgaaggcctcatccatccttgtcctct

SEQ ID NO: 620084 - DNA, 453 bp, Homo sapiens
gatctctgtccagcactgcctgagatccatgcctgggcggggccggccagttccacccagaccacatggtcaaggaagggggtggtggtggcgatgcttgtggagaaatgtcctcttctgagatcgcgggtggtgggcagccagcaatagccccttgtggaggagagtgtgcctgggaccctgtccacccatgtcctcttgtctgcwggcgcagcagagcgtccgcacacagcacttgcgggacctacaggtcatcgccgcctaccgggaacgcacgaaggccgagagcatcgccagcctgctgagcctggccatcaccacggagcacacgctccacgccacgctgggggtcgccgagttctttgagtttgtgcttaagaacccccacaacacacagcacacggtgactgtggagatcgacaaccccgagctcaggtgaggtctcagtggtgc

SEQ ID NO: 620085 - DNA, 453 bp, Homo sapiens
ttggcatttcgttagcatcacactggggccgttgggatgggctgaggcaccctggcaggtgctggtgtggggctcaggccagcagatggcaggtgcttgggctgccaggcaggaggtgaggggcgcatgtccctgctacaggttgctgggggaacgggggcaggagagaggggtctgccagtcactagtcacccagaatataagctccgtttcccagatgctccatttcctcctctggaagcctggaatgaatgcagaggatatctgggagcccgaggttgagggccaccctggggagggtggcgcagggaagctgtcctgacaccaggggctgcccggccaccctagactacacytcgagcctgattagtcctccagtgccctggagctgggcaggggaggtgactgaggccagaggtttgggtgacttactcatagtcacagagcaagtgg

SEQ ID NO: 620086 - DNA, 560 bp, Homo sapiens
taggtaaaccactgaggattcataggctttcgaatggttaaaatggctctgagtagagagttctttgtgtggcttaaaatcttaaaattgttgaatggttctcctctataaaataccaataggcatttcaggatttcttgcttcctagatttatatagaatatgccagggaaggtgtattttttatggtgaaaaaatttttgttggaaaaaataatttttgtctaattcagaagttactaaaaggaaggatcaaaataggagaaaaccagtcagtagaaaagagagatgtgaggaaagttataggtggaagatatattttttgcagggagagatgaggaaaaacatgatttaatatgaagacagatcttgtgtggtagattcttgttttaaaataaagtgactggttgtttgggaggtaggtggtacgggacaggttggagggtccagccatktcatcgaatcgtctttgtgggcgataatagggataattgtgaaagggaatttgcaacaggaattttgtgtgtgattaagctggctgtgattaaagggagattgtttg

SEQ ID NO: 620087 - DNA, 613 bp, Homo sapiens
tactgttctcatggtagtgaataagtctcacgagatctcatggttttataaggggaaacccccttttgctgggctgtcattctcttctcttgtctgctgccatgtgagatgtgccttttgccttcagccatgattgtgaggcctccccagccacgtggaactccattaaaccgctttttccttataaattacccagtctcgggtatgtctttrtcatcagcatgaaaatggactaataccctgcctttcagcaattctgtactattttataccctgaccaaaatcatatgcatgcctctttccctattctcattgtcaacagtgtatgttataaacctttagaaagttttccaatttgagtgaaagagttatatgttgtattcatttgcatttccctggttagcagtgaaactgcatgtcgtttcatgtttgtttggctatttaatgtatggcaccctctttgaattgccttcttgtcaattttgtccagttttctataaagcagttaaagtacaactgtcagagcgagaaaaatatctgaaagataaataacactgtacaaatatccataatgcataaaggctatattgacatcttaaataatgatgttatt

SEQ ID NO: 620088 - DNA, 585 bp, Homo sapiens
tgaaagttttttctttctggctgttaaaatatcgtaggcatgagtattgagagcagctgaaaataattgtttatgtttaaaaatattataatgaaaaaaggtacttcttgcattcaatgtttcttgtaaatgctctcttcactttgctcttttgaggactcttcgagattggaatatcctttcacaatggttcagaatgatgtggyaatggagataaaagtttttactccaccatttcactccactctaaactgaaatcaggacatcccaacagggctcaacatttctactttcttacaagataatagttgacagaaatgtgtgtaatgcaggaaagaaattggatcctatcagggtgtcctatgacatgattaaccattaaagacagctcctcttttgccacctggagggcttttggttgggtaaccaccctggtgggacagctgcagtcagcagttctctagagaaggcaggcagcccatgagactttaagaacaaatacccacagcagctgggggtggcttcaccaggctgaaaaagggtctgggtggagtcccaagtgtctactatagtctgtgtcttata

SEQ ID NO: 620089 - DNA, 530 bp, Homo sapiens
gatttcattatttttatggctgcacggtattccatggtgtatatgtaccacatttyctttatccagtccaccgttgatgagcatccaggttaattccatgtttttgctattgtgaatagtgccgcagtgaacatacgtgcgcatgtgtctttttggtaaaaagacttatttttcctttgggcatatacccaatagtgggattgctgagtctaatggtagctctgttttaagttatttgagaaatctccaaactgctttctacagtggctgaactaatttacattcccaccattggtgtataagcattcccttttctccgcaacctcgccagcatctgttagtttttgaatgtctttattttaaagcaggtgtcagcaagcccttttaaatggtccaaatagtaagtattttagacttgtggccatatggtctcagttgtaattattcagctctgccaaggtagtgcaaaagcagccacaaatgatacctacataaataatgggtgtgactgtattccaaaacaatttgta

SEQ ID NO: 620090 - DNA, 550 bp, Homo sapiens
acctaacattataacaaaagactgttaacaagggctatatgagttatgagccaggaactgtggatgaaaaccaatatatttatgtgtgtaaatcacaacaccaccttacccaaatcaagaaacagaaccttcctagtaccctagaagccctctcctagtctaccttcatcttcttctctaaaagtaaccaaaatcctggtttcaatgccacaaatttttttttctgccttgtttgcataaataaaatgatataactattaaattatattattgttttttgtttaagattgtttatgagcttgttatgttgtatgtagttcattcattttcatagctgtataatagtccattgaackaatataccaaaatttacttccaaattctactattggcagacacttgggtggtttccagttttggctctgagtattcaaatctgagtgttttcagtatatgtacctaacattcttgtatatgtcttttgtagttcttatgtatttctatgggacatatcttagaagtggaattgttgtgtcatatgcaaaggttc

SEQ ID NO: 620091 - DNA, 445 bp, Homo sapiens
tcccctttctctctctctctctctctctctctctctctctctctctctctcyctctctctctccctctccctcctgctgccatgtaaaacgtgccttgcttccccttcgccttctgtcacgatcgtaagcttcctgaggcctccccagccatgtggaactgtgagtcaatgaaatctctttctttctaaattacccagtctcaggtatatctttatagtaatgtgagagtggactaatacagtggagttagcagtattgttagcagtggcggcaagctttgcttaaaatggaagaccgtacagtgctatctgttagtattttgtgctaaagggaaaaacaagcctagtgactgtactagggaaaatgaaacgtattcagtttacctccacaaacgtgtatgtgaaattgattcagctcaattttcaaaatatgtttgtcttagac

SEQ ID NO: 620092 - DNA, 563 bp, Homo sapiens
catggcaaaagggattttacagatgcgattgacattactattaatagtcggttggcatgaagatagcgagattgtcctgggtcatggggggttggaggataccaatgtggtcacatgagcccttcaagcagagaatcctaggagagggcaataggatactcaagtatgaggctgataccacgtgccagtgctggtttaaagagagagggggtaatgtgcccaggaatgcaggtgaccttaggcagctgacagaggctcctgaaaatgggcacctcagtcctacagctgggagacactgaattctgccaataacctcrataagcttagaagcaggttctcccagagtctccagagaagagcccacgcaggccaacaccttaattttggccttgcaagacccagagcagagaaatagctgagcccactcagaattctgacctacagagctgagaactaatatctttctgttattttaagccactgagattgttgttgtttgttctagcagcaagaggagaggaatataggactggaggctgggggtggggagactggggccaggg

SEQ ID NO: 620093 - DNA, 522 bp, Homo sapiens
tgaattcctgaaaacctttcctttgtctgcagctaccaacaaagttacgaaagccagatttttttttttttttttaccaataatttcagtcattcctgacaactggttaaaaacccaggaccctttttaaaagatcaaaagatgtggcaacttaagaattgccatgctaatggaagctcagtcggggtcaacagtgatagactccacttagccttcttggactggatgaaacaagattttacagcattttactaatgccctgcttttttagccttgtctgtgtctatcaacatctaattgtacttccaamgattggagacaaactatcttttcttctttccaaatgagaatttgtaggggttttctggtcccatttgccaccaagtgcacatcagaagatgagtctcctagcaggaggtcaatgatagctgaggaagaaagaggcccgctccaggcccagtggcggcgccggcagaagggccttccccaactcgagttgccatggcaaactgactgatgaaa

SEQ ID NO: 620094 - DNA, 516 bp, Homo sapiens
ctgtgtcacccaggctggagtgcagtagtgcgatctcggctcactgcaacctccacctcctggattcaagcgattcttgtgcctcagcctcctgagtagctgggactacaggcgtgtgccaccatcatgcctggctacttttttgtattagatatatmttttctctcttagcacagtacctaccaagagtgagtgagtagatgtcctgacccctgcaggcatccaaggccctccttccctggacctgtttccacatgtgtgaaggggtgcacaggcagcagcccacctctcagcttccttccagttcttgtgttctgtgaccccttttcctcatctctgcctgcttcctcacagcttgaggcagccctaggtgaggccaagaagcaacttcaggatgagatgctgcggcgggtggatgctgagaacaggctgcagaccatgaaggaggaactggacttccagaagaacatctacagtgaggtggggactgtgctttgcaagccagagggctggggc

SEQ ID NO: 620095 - DNA, 550 bp, Homo sapiens
atgttgcccaggctggtcttgaactcctgggctcaagcgatcctcctgccttgataacatctgcttcttatgagagtgctttgagaaagtcaaagctttagcggaaaaacgcccaggagaacttcaacggagttgttctctaccacaacaatgctcctgctcattcctctgatcaaacaaaggcaattttgcaagagtttccatgggaaatcagtacgcatctaccttccagtcctggtttggctccttctgacttcttttttgtttctcagtcttaaaaaatctttaaagggcatctatttttcttcagttaatgctgtaaaaaaatattgcattgacatggttaaattcccaggaccctcagttctttaggaatggactcaatggctgatattaatattatcatttacaaaagtatcttgaacttgatggagcttgtgttgataaataaagtttatatttttaatttttatattttgatttcactttttcgagtcccctcacatttaatttkgggggagccattataaatgattttttgttcatttgt

SEQ ID NO: 620096 - DNA, 590 bp, Homo sapiens
cacgtgctaagtaaactttaaaattcatataagaaactttagtcctatagctgtttctatttatttggagttgaaaaaatggcattgttgtacacgtacttgcttyatagttaaaaaaaaaggagggggacaaaatacattaatcacactttccaagcatcaaggaaatttgtggtggaattatgaatcatatcattgtagggtcattttcctttgtatcatgatatcatacaagaccaatgtcaaacggaataggtgaaaaatggacaaaaagttttaaaaatcatttcagttaacagatttaaacagagtttagctatgaagcaatgagcaatggtatactagctagtgaaagaaatgaacaactagggattaagtgttgaggaaaattgctttctaatgaattaattttgaattggtaagagacaaattaaagaataggatttaacttttaaatatacaactttggtgacaaagtatttgcctatacaggtttcttatgtctagtgtgttccttacctcccaaatattattttataactctctgataatttctgaaagatatatatcagatattcctatctaaaaaa

SEQ ID NO: 620097 - DNA, 590 bp, Homo sapiens
cacgtgctaagtaaactttaaaattcatataagaaactttagtcctatagctgtttctatttatttggagttgaaaaaatggcattgttgtacacgtacttgctttatagttaaaaaaaaaggagggggacaaaatacattaatcacactttccaagcatcaaggaaatttgtggtggaattatgaatcatatcattgtagggtcattttcctttgtatcrtgatatcatacaagaccaatgtcaaacggaataggtgaaaaatggacaaaaagttttaaaaatcatttcagttaacagatttaaacagagtttagctatgaagcaatgagcaatggtatactagctagtgaaagaaatgaacaactagggattaagtgttgaggaaaattgctttctaatgaattaattttgaattggtaagagacaaattaaagaataggatttaacttttaaatatacaactttggtgacaaagtatttgcctatacaggtttcttatgtctagtgtgttccttacctcccaaatattattttataactctctgataatttctgaaagatatatatcagatattcctatctaaaaaa

SEQ ID NO: 620098 - DNA, 590 bp, Homo sapiens
cacgtgctaagtaaactttaaaattcatataagaaactttagtcctatagctgtttctatttatttggagttgaaaaaatggcattgttgtacacgtacttgctttatagttaaaaaaaaaggagggggacaaaatacattaatcacactttccaagcatcaaggaaatttgtggtggaattatgaatcatatcattgtagggtcattttcctttgtatcatgatatcatacaagaccaatgtcaaacggaataggtgaaaaatggacaaaaagttttaaaaatcatttcagttaacagatttaaacagagtttagctatgaagcaatgagcaatggtatactagctagtgaaagaaatgaacaactagggattaagtgttgaggaaaattgctttctaatgaattaattttgaattggtaagagacaaattaaagaataggatttaacttttaaatatacaactttggtgacaaagtatttgcctatacargtttcttatgtctagtgtgttccttacctcccaaatattattttataactctctgataatttctgaaagatatatatcagatattcctatctaaaaaa

SEQ ID NO: 620099 - DNA, 525 bp, Homo sapiens
ggatgaaaagaactgaacagcactgagagatggctgatatatagttctggaattatacattcaaaacacaagctggtgagacatttagagaaactacttttgcatgcacttgtcttcagccctctgccaagaaagtcctctagcccatgaataaaagcaatgtttcaggacaaccaagggttctttgaatcatctcctgtgtttctgtgggacttccctagcctttggatgcctcacattgatcactgctctgtgtctcaagcctcgtctccttggcatccatatggattagctttctggctcccaatttagctccatttccttgattctgacaactttacacattggtatgctgccatttacattccacatggctcctcacacatgcgtacaacakccattaattcatttctttataaagctgaaattcagtgagttccagccatatgctaaggactgtgctaggcgctggaaatccgtagtgagcaacccattgatttttaggagtttatatgttaagaggag

SEQ ID NO: 620100 - DNA, 612 bp, Homo sapiens
taaatagagatatggaaaagatttagcaggatgaaaagaactgaacagcactgagagatggctgatatatagttctggaattatacattcaaaacacaagctggtgagacatttagagaaactacttttgcatgcacttgtcttcagccctctgccaagaaagtcctctagcccatgaataaaagcaatgtttcaggacaaccaagggttctttgaatcatctcctgtgtttctgtgggacttccctagcctttggatgcctcacattgatcactgctctgtgtctcaagcctcgtctccttggcatccatatggattagctttctggctcccaatttagctccatttccttgattctgacaactttacacattggtatgctgccatttacattccacatggctcctcacacatgcgtacaacagccattaattcatwtctttataaagctgaaattcagtgagttccagccatatgctaaggactgtgctaggcgctggaaatccgtagtgagcaacccattgatttttaggagtttatatgttaagaggagagggactaaaatattaaaaattatttaaacaaaaattattggtataaatgtagaaaaac

SEQ ID NO: 620101 - DNA, 565 bp, Homo sapiens
atctgggcagcatccacctgacattggccaagccgacgatatacagcaaacaggtgctcagtttcatctgtcaagaataatataaatgtagcatcactgttctccttgtcacatatttgtgaaagtaagtgtatgtgtgtgtaaggtgtgtaagtcaagacaaggctgctgtcatgctctctgggtagtttttgagtagagagaggaggaaagaccaggaaataaaatgtaaatgagatgcatagtcatggtgaaataaaaaaatggagtaggaagtaaccataaattagatctttaaggcagaatgttctggaggaacatggagaggataaacagcttagcggagttcttgattacatacagaartgaaacccctgcatatatacaaaattatattaatataagaagtctttggtgtgattaaagttagaacattaaacttactgagcatatatggagtcattatttgaattttttgtatattcaaattatagtagtattatttttctggggacaattttattaaaatgaagacaaacttacatgggaatattgcctggaaagt

SEQ ID NO: 620102 - DNA, 573 bp, Homo sapiens
atcaatttactaaactgaaattagaacatttgtcagaattgatctatgtataaacatattgattatgtataattagcatttttattattgatagcattttttyaattagaacaaaaaacatggtttgttatattatgaaaagccagcagaaacatgcaattgccagattatatccttaaatattcactgatttcctgtttccattttatttactccagtttcttaacttagcaatcttgaattcagcaaatgtttatatacagtggctatgtatcatttacaatacacagtaaaaatcactgacaatttgaatgaggcattgcaggaagtatcctaaacaacactagggaaaaaaatccattgttaatatattcaatatcacaaaagaaaatccatccctgttatgctaaaataatgaaatttgttctttgtaatttcctagaagtagatggataaagtaatttacaagctttgggttggtattttatgtaacttattttttcaatataaagcaattctaacatatagaaaagggaagcacataatattcttttcactcacatgctagtgatg

SEQ ID NO: 620103 - DNA, 205 bp, Homo sapiens
cattgtaatgtctgacattattgaagtaattgcaccaaaaatgaaattggtacaactttcaccattgaccctccaatgtcttatacattgactataatggcttgttaaattaatggatgaatatggttacacaaattgaatttaaagtgtctatataacacacacatmtagtaagcagcaggatatatggaccagttgttcctca

SEQ ID NO: 620104 - DNA, 608 bp, Homo sapiens
ctgcaatcccagtactttgggataaagaggtgggaagatggctttgagactaggagttcaagaaaagcctgggcaacctagaaagaccccatctgtattaaaaattaaataggtagaatagtaaaatgcatagytgttgctactccatgcaacctgggaaaacatgtagagtcacatttttttttcgcaggtagtactgaaatttgaaattgctttattccgaccaaaatatcaggatagtccaaactcacagctttgagactgatacagtttggctgtgcccccactcaaatctcatcttgaattctaactccaacaattcccatgtgttgtgggaggacccagtgggaggtaattgaatcatgggggtgggtctttcctgcactattcctgtgatagtgaataagtctcatgagatctgatggttttaaaaaggggagtttccctgcacaagctctattctcttgtctgccaccatgtgagatatacctttctccttctgctgtgattgtgaggcctccccagccatgtggaactgtaagtccagtaagtctctttgcccagtctcaggtatgtctttatcaacaccatgaaaacagactaataca

SEQ ID NO: 620105 - DNA, 608 bp, Homo sapiens
ctgcaatcccagtactttgggataaagaggtgggaagatggctttgagactaggagttcaagaaaagcctgggcaacctagaaagaccccatctgtattaaaaattaaataggtagaatagtaaaatgcatagctgttgctactccatgcaacctgggaaaacatgtagagtcacatttttttttcgcaggtagtactgaaatttgaaattgctttattccgaccaaaatatcaggatagtccaaactcacagctttgagactgatacrgtttggctgtgcccccactcaaatctcatcttgaattctaactccaacaattcccatgtgttgtgggaggacccagtgggaggtaattgaatcatgggggtgggtctttcctgcactattcctgtgatagtgaataagtctcatgagatctgatggttttaaaaaggggagtttccctgcacaagctctattctcttgtctgccaccatgtgagatatacctttctccttctgctgtgattgtgaggcctccccagccatgtggaactgtaagtccagtaagtctctttgcccagtctcaggtatgtctttatcaacaccatgaaaacagactaataca

SEQ ID NO: 620106 - DNA, 568 bp, Homo sapiens
ctacaagagacctactttagcattaaggacacaaataggctgaaagtgaagagatggaagatactccatgcaaatcctagccaaatgagaacaaggatgactctacttatatcaaataaaatagactttgaattaaagacaccagaaaataggtaatgatttctttgtcttaaagtcacaagaaacgtaacaggtcattatttaatgatagagggctctattcctcaagagggcgtaacaattataaatatatatacatccaacattgatgcacctaaatatacaaagcaaaaattaatggagccaggcacagaggggcatkcctataggcccatctacttgtgaggctaaggcagagaattgcttgagcccagaagtttgatgttacagtgtgctataattatgcctgcaaatagccactgcaccccagcctgagcaacacagtgagaatctgcctctataaaaatgaatatggaaggagaaataggcttaacacatatatatagaactttccagcaagatacacattcttctttagtgcacataaaacaagatagaccacttggta

SEQ ID NO: 620107 - DNA, 559 bp, Homo sapiens
tattttgaagttggttggctttgcagaaagactgaagccagaaatgatttaataattaaaatttttaatgaaaattgaggtatccctttgaagcaccttttataaagctactttactggcttggattcattcttttgctcttaccaagttagatgtacagctgaatactccattttgagggaatgactagacgacaggatggggcccaatctacaggttttgttggactggttaaaatgaatattcaagaatgtgggattcacaaaaacaactgaytagatatagctaattgattaaatgtgttttctgaaggcttgtgttcatgagtaaattttcctttagaaacctttaatgcttgagctcaaatttatcgataatacaattccataaaaaggaaaaagaataaatcatgttatccaataatataagaaatgacttagtgaaagctacatagaaagtgaattttatgtttaacttgacatttacagaatccatgtagagatgaaactaatgtgattttgaaaatttattagtttcgaaattttgaaaaaaatgatta

SEQ ID NO: 620108 - DNA, 493 bp, Homo sapiens
gatggtatcaatgtgttatcttccattgacaagaatccaggcctccagcaagagggaaaaaggagatcctggttatgtgaattgccagctacagcccttgcctcagagttaggttctagcaagtctacacctctgccgccagacatataccatgaatataatatttactttaactttttggggtgttatattttctaaactcaatttgacatttaattatattcagatatttaaagaaacaattttattctgagtttatcaaaaacaaactctcagatccagaattaatttggggagttttcactctggagagaagctgttgttacatttgaatcctctacactttctccttcttctcctaccacacatcaaatgtgtattttcttcagaagtcatcarcttcattaaacataatgtaatttggctgtttgaaattcacaatgtattaaaaagtcaagagcaaaacctttgagaaataatttaatgctgaaaa

SEQ ID NO: 620109 - DNA, 653 bp, Homo sapiens
ttgttacatttgaatcctctacactttctccttcttctcctaccacacatcaaatgtgtattttcttcagaagtcatcagcttcattaaacataatgtaatttggctgtttgaaattcacaatgtattaaaaagtcaagagcaaaacctttgagaaataatttaatgctgaaaattatctttttctctttttccttcaattcatacaaacattaaaggtttgttacaggtaatttggagacatcatagtgaatgtgatttcatttattgaaataatgttgtcttccaacacacagaatgggaaaaaatatttgccaactatccatctgacaaacgcttaataagcagaaaatataaggaactcaactcaataggaaaaaatctaataatctgattaaaaatgggcaaaaggtctargaaagacataccaatggcagagaaatgcaaattaaaactacaatgagatatcatctcaccccagttaaaatggcttttattgaaagggcaaacaataaaaaatgctgataaggatgtggagaaaagggaacgcttgtacattgctagtgggaatgtaaattagcacagctactatggaaaacagtatggaagtttctcataaaactaaaaatagaactatcatatgatccagcaatc

SEQ ID NO: 620110 - DNA, 435 bp, Homo sapiens
gactatcaaaatatcacatgtaccccataaatatatgtacctactaggtactcataaaaattaaatattaaaaaagataataaaagactaataaaaaatgttgtctctaatgactataaaatgtatttgaaatacatagatgattcctatagcccccccccacataatgattttgtaccaagagggtaaagtataagcttatctgattcccaggttatttctcaatatcttacatctagcttttacaaatgacacataagaaaatgaggagttttgttctaataggaaaaaaaatactatttaaccatgtaataagacccctgacttttaagctaaaagaaatcaaaaattttttaaagtaatatttcccattatgggcgttttatatttttctcaytgtgatttcatcactaggcattgaataattgcttgtaa

SEQ ID NO: 620111 - DNA, 547 bp, Homo sapiens
agacttaaataactgggtaacataattgtactgttctatttttgaatgccaactttgacatttctgtatgaatctaaatttcgaaccattttaattcatacattgtaatttttgcatgttgcattaataattgggaagaaaattagagattatctagtttaattactcaatttwaaagttgcagaaactaggaactggaaatagtacatttaaatgactttaatcaagctgcatatttagttaacagcagtactagggcaaagagtcgatttacttatcctctcagaaaaaaactatttctgtaatattagcccaggattcaatattcatactggtttggtgctttgcttgcttcatctccctctgcccattctgcacaatttatctgtacaagaacaatattccttgcacacattttttcccctattctcttcacttggactgcccttctccccaaagcatccttacaggctactcatcctttgttatctaccatgtctctaatcaaatgtgatctagataaactttctctgaattccctaagatg

SEQ ID NO: 620112 - DNA, 551 bp, Homo sapiens
attgtgccttaaatagaatatcagattcactatgaaatcaagaaaactggaaatttagcaaagttgaatgaaagttttaggttttattcagaagtgtgatgtcaaatggatataacttayaaagtgtttttcttcatttttttccctttataagtggcacagaaaatttgtttttacttatgtttttgcatccagagtatcagtaatactcaagaataaatacagtcttttgaagtgtgtggcaaatctgagtctagaattagatttgaaatggaaaatgacatattttctttctttttttttttctttttctttttttttttttttttgagagggagtttcactcttgttgcccaggctggagtacaatggcgtgatcttggctcaccacaacctctacctcctgggttcaagcaattctcctgcctcagcctgctgtgtagctggcattacaggcatgtgtcaccatgcctgcctaattttgtatttttaatagagacagggtctccattttggtcaggctggtctcaaactcctgacctcaggtgatc

SEQ ID NO: 620113 - DNA, 438 bp, Homo sapiens
caaaattatgtgggagctttttagccaaagatccatggttatctgggaagaattctttgttcatagtcacatgaaaaatagcttctgatgatctatcaacagttcccactgctctgatttatgccataaaatctgtattcttatctaatgcaggaatatacattaagtgattgaatagcaaattttgagcagcagatgggagggaaagatcatatgtaacataataacacaggaagttcctatattygttgacttccatgacatcctatcaaatgtagctggtaagctattttcttcccctctagagccagagtagtatttaaatcacctttctaggtattacgtgacaaacaacaggaataaattcagttcaccaacaagaaatgtgcagatgaaaaatacaactgggaagacagaagtcatttgttaaagaggatc

SEQ ID NO: 620114 - DNA, 296 bp, Homo sapiens
tgcttggtgaactatgggaacaaagtctgttacagctatttctgtaggaaactgctacactccttaccagaacgggtgtaacattttgtaagtcccaacagcaacatatgagtgatccattttctctgtcaatattttgtgttgtcactttttcttrttttagacattcttataggtctaaataagaaataatacatttcttataggtctcaataagaaataagacatttcttattttcttattttaggcattctgataggtatgtagtgtcatctcatctcattgttttaacttg

SEQ ID NO: 620115 - DNA, 540 bp, Homo sapiens
gttgtggtctcctcatgtcattcccactgagaagatctggaggtctttggataaatgaccgggtctggggaaaaatgtttccaacgagcctacaacatcttgttctaccagcaagtgcaagactaaaaggtaatgaatgactctttataaaacatcaacacaatacagtcaattccacagcctctgatcaggaagctgctggcatcacagaaggcgagttggacattagcacctcccttggtgaactgctcttgccaaaaaagtaaaagtaaaagctgaaccagaatctgaccaggcacctagatgtaactgtcaatttataggaaataccggggacagaggcacatgataaacacctccaagggggcgtaatcgacaaaacccacctcatgtgaagctcyacatgacaaatgacctggtttctccaacaacaacaacaaaaatacaaagaaaagagaatcagcaagaaaacctgtctatcaaaagagactcaggaaatagcagccaattgcaggctatggactggataagattttgatc

SEQ ID NO: 620116 - DNA, 540 bp, Homo sapiens
gttgtggtctcctcatgtcattcccactgagaagatctggaggtctttggataaatgaccgggtctggggaaaaatgtttccaacgagcctacaacatcttgttctaccagcaagtgcaagactaaaaggtaatgaatgactctttataaaacatcaacacaatacagtcaattccacagcctctgatcaggaagctgctggcatcacagaaggcgagttggacattagcacctcccttggtgaactgctcttgccaaaaaagtaaaagtaaaagctgaaccagaatctgaccaggcacctagatgtaactgtcaatttataggaaataccggggacagaggcacatgataaacacctccaagggggcgtaatcgacaaaacccacctcatgtgaagctctacatgacaaatgacctggtttctccaacaacaacaacaaaaatrcaaagaaaagagaatcagcaagaaaacctgtctatcaaaagagactcaggaaatagcagccaattgcaggctatggactggataagattttgatc

SEQ ID NO: 620117 - DNA, 592 bp, Homo sapiens
aaattatttcatgtaaatggaaaccttttttaaaattaatcattactttaaaaggttgaattacataatttttaaggatggtaaatctggctggaaacggtagcatctgtatcaggaaatgctggtattggtggagctgcttattttacacactcccaagttttaggcacaagcagaattctgggtccagggaagacgtgacgatgccgagtgtccccccaggtgcagggtttggcaggtgtgaggacttagctcycggtcccccatccttttcagcagctggcctctgccttcaagctcaaccctaaatcagaggcagtgaccacgacccacctctgctgctttactgggaagcctgcctgtcctcagagggccgctgcacctgtcacggtccctcaggactctattaacaatgcaagttttcaagtttcatccccgaaatttccaatcactccttgaggtggagccctggactgggcagtgctgaagcccaatggggaaatgaggggtgggggcccctggcagtggctgctcctgcagggtgtgaggctccccaggtgggaggaagacggggagtgagtgggggccgggg

SEQ ID NO: 620118 - DNA, 592 bp, Homo sapiens
aaattatttcatgtaaatggaaaccttttttaaaattaatcattactttaaaaggttgaattacataatttttaaggatggtaaatctggctggaaacggtagcatctgtatcaggaaatgctggtattggtggagctgcttattttacacactcccaagttttaggcacaagcagaattctgggtccagggaagacgtgacgatgccgagtgtccccccaggtgcagggtttggcaggtgtgaggacttagctcccggtcccccatccttttcagcagctggcctctgccttcaagctcaaccctaaatcagaggcagtgaccacgacccacctctgctgctttactgggaagcctgcctgtcctcagagggccgctgcacctgtcacggtccctcaggactctattaacaatgcaagttttcaagtttcatccccgaaatttcyaatcactccttgaggtggagccctggactgggcagtgctgaagcccaatggggaaatgaggggtgggggcccctggcagtggctgctcctgcagggtgtgaggctccccaggtgggaggaagacggggagtgagtgggggccgggg

SEQ ID NO: 620119 - DNA, 592 bp, Homo sapiens
aaattatttcatgtaaatggaaaccttttttaaaattaatcattactttaaaaggttgaattacataatttttaaggatggtaaatctggctggaaacggtagcatctgtatcaggaaatgctggtattggtggagctgcttattttacacactcccaagttttaggcacaagcagaattctgggtccagggaagacgtgacgatgccgagtgtccccccaggtgcagggtttggcaggtgtgaggacttagctcccggtcccccatccttttcagcagctggcctctgccttcaagctcaaccctaaatcagaggcagtgaccacgacccacctctgctgctttactgggaagcctgcctgtcctcagagggccgctgcacctgtcacggtccctcaggactctattaacaatgcaagttttcaagtttcatccccgaaatttccaatcactccttgaggtggagccctggactgggcagtgctgaagcccaatggggaaaygaggggtgggggcccctggcagtggctgctcctgcagggtgtgaggctccccaggtgggaggaagacggggagtgagtgggggccgggg

SEQ ID NO: 620120 - DNA, 443 bp, Homo sapiens
gaggctttcgcactggtcaggttcttggctgagatgtgcctgtcacatgaggacagggttccacagaaatcagaaacaggagcttcactggggatggcgttgatgtcacttggaagaaaagggtccctgtgaaaagccctttgaaaaaggagattggtatcccagggatgcctgccacccccagaatctgatggaaataacgaccagcaattgtagtaataaactatccgcacatgttagtccattttcacatggctytgaagagctacctgagacagggtgatttaggaagaaaagaggtttaatcgagccacagttctgcaggctgcataggaagcatcgctggggaggcctcaggaaacttacaatcatggcggaaggcaaaggggaagcaaggcccttctttacaaggctgcaggagagagagagcaaaggggaaaatg

SEQ ID NO: 620121 - DNA, 461 bp, Homo sapiens
gctttcgcactggtcaggttcttggctgagatgtgcctgtcacatgaggacagggttccacagaaatcagaaacaggagcttcactggggatggcgttgatgtcacttggaagaaaagggtccctgtgaaaagccctttgaaaaaggagattggtatcccagggatgcctgccacccccagaatctgatggaaataacgaccagcaattgtagtaataaactatccgcacatgttagtccattttcacatggctctgaagagctacctgagacagggtgatttaggaagaaaagaggtttaatcgasccacagttctgcaggctgcataggaagcatcgctggggaggcctcaggaaacttacaatcatggcggaaggcaaaggggaagcaaggcccttctttacaaggctgcaggagagagagagcaaaggggaaaatgctacacactttgaaacaacca

SEQ ID NO: 620122 - DNA, 461 bp, Homo sapiens
gctttcgcactggtcaggttcttggctgagatgtgcctgtcacatgaggacagggttccacagaaatcagaaacaggagcttcactggggatggcgttgatgtcacttggaagaaaagggtccctgtgaaaagccctttgaaaaaggagattggtatcccagggatgcctgccacccccagaatctgatggaaataacgaccagcaattgtagtaataaactatccgcacatgttagtccattttcacatggctctgaagagctacctgagacagggtgatttaggaagaaaagaggtttaatcgagccacrgttctgcaggctgcataggaagcatcgctggggaggcctcaggaaacttacaatcatggcggaaggcaaaggggaagcaaggcccttctttacaaggctgcaggagagagagagcaaaggggaaaatgctacacactttgaaacaacca

SEQ ID NO: 620123 - DNA, 563 bp, Homo sapiens
ggagggtgtcaggcaccctgtcagccccagagaaacctgcttagctctagagagcccagcccggctctggagagcccggccattctaacagccctgaaggcgatggctctgtaagaggaagattccatcccaaacctctctgaccagctcctgggctttgtagccaaggagccacagcccgtcagccttggtagaaccacrgcctctcacattgtttcctaaaacattgaccccacgtctttgatgtgctgggagctcaccatgtcaccaccgcttggtgatgagaccccatcctcctgcccgccaccagcaccacgtgggtgcccccagccccatcccaggtctgccagcagctgcgtgtccctcccgttacccaccatgccctgcttccgtttccctcctgttgtccacacaccagtttcactgtgcttcctggagctggggccctatctctgtgtctctgccaccatccgtagtgcctgggatgtgaaaggcgatcaggaaacgttaccggaaggcacgtatagacgtggacctgtgggctcgggctggctgcgggtcac

SEQ ID NO: 620124 - DNA, 563 bp, Homo sapiens
ggagggtgtcaggcaccctgtcagccccagagaaacctgcttagctctagagagcccagcccggctctggagagcccggccattctaacagccctgaaggcgatggctctgtaagaggaagattccatcccaaacctctctgaccagctcctgggctttgtagccaaggagccacagcccgtcagccttggtagaaccacagcctctcacattgtttcctaaaacattgaccccacgtctytgatgtgctgggagctcaccatgtcaccaccgcttggtgatgagaccccatcctcctgcccgccaccagcaccacgtgggtgcccccagccccatcccaggtctgccagcagctgcgtgtccctcccgttacccaccatgccctgcttccgtttccctcctgttgtccacacaccagtttcactgtgcttcctggagctggggccctatctctgtgtctctgccaccatccgtagtgcctgggatgtgaaaggcgatcaggaaacgttaccggaaggcacgtatagacgtggacctgtgggctcgggctggctgcgggtcac

SEQ ID NO: 620125 - DNA, 563 bp, Homo sapiens
ggagggtgtcaggcaccctgtcagccccagagaaacctgcttagctctagagagcccagcccggctctggagagcccggccattctaacagccctgaaggcgatggctctgtaagaggaagattccatcccaaacctctctgaccagctcctgggctttgtagccaaggagccacagcccgtcagccttggtagaaccacagcctctcacattgtttcctaaaacattgaccccacgtctttgatgtgctgggagctcaccatgtcaccaccgcttggtgatgagaccccatcctcctgcccgccaccagcaccacgtgggtgcccccagccccatcccaggtctgccagcagctscgtgtccctcccgttacccaccatgccctgcttccgtttccctcctgttgtccacacaccagtttcactgtgcttcctggagctggggccctatctctgtgtctctgccaccatccgtagtgcctgggatgtgaaaggcgatcaggaaacgttaccggaaggcacgtatagacgtggacctgtgggctcgggctggctgcgggtcac

SEQ ID NO: 620126 - DNA, 543 bp, Homo sapiens
agttgtggtctcctcatgtcattcccactgagaagatctggaggtctttggataaatgaccrggtctggggaaaaatgtttccaacgagcctacaacatcttgttctaccagcaagtgcaagactaaaaggtaatgaatgactctttataaaacatcaacacaatacagtcaattccacagcctctgatcaggaagctgctggcatcacagaaggcgagttggacattagcacctcccttggtgaactgctcttgccaaaaaagtaaaagtaaaagctgaaccagaatctgaccaggcacctagatgtaactgtcaatttataggaaataccggggacagaggcacatgataaacacctccaagggggcgtaatcgacaaaacccacctcatgtgaagctctacatgacaaatgacctggtttctccaacaacaacaacaaaaatacaaagaaaagagaatcagcaagaaaacctgtctatcaaaagagactcaggaaatagcagccaattgcaggctatggactggataagattttgatcct

SEQ ID NO: 620127 - DNA, 543 bp, Homo sapiens
agttgtggtctcctcatgtcattcccactgagaagatctggaggtctttggataaatgaccgggtctggggaaaaatgtttccaacgagcctacaayatcttgttctaccagcaagtgcaagactaaaaggtaatgaatgactctttataaaacatcaacacaatacagtcaattccacagcctctgatcaggaagctgctggcatcacagaaggcgagttggacattagcacctcccttggtgaactgctcttgccaaaaaagtaaaagtaaaagctgaaccagaatctgaccaggcacctagatgtaactgtcaatttataggaaataccggggacagaggcacatgataaacacctccaagggggcgtaatcgacaaaacccacctcatgtgaagctctacatgacaaatgacctggtttctccaacaacaacaacaaaaatacaaagaaaagagaatcagcaagaaaacctgtctatcaaaagagactcaggaaatagcagccaattgcaggctatggactggataagattttgatcct

SEQ ID NO: 620128 - DNA, 481 bp, Homo sapiens
taagaactgtagaggtttaatcatgcccttgtctggtcccgccctcagagcttctgatatcattggtctgggttatagcctaggtaattgggtttttaaagtcttcccaagtgattcttttatgccaccaaagttattaatggctggttaagaggaaaaatgggccaggtgcagtggctcacacctgtaatcccagcaactttrgaggtggaggcaggaggatcatttgagaccaggaggtcaagaccagcccagtcaacataatgaaacccccatctctacaaataatttttaaattagctgggcatggtgtcgcagacctgtagtcttagctactctggaggctgaggcaggaagattgcttgagcccagatgttcagggctacagtgagctatgatggggccactgcactccagcctgggtaacagagagagacccaatccctaaaaaaaaaaaaaaaagaaaaagaaaaaaagagaa

SEQ ID NO: 620129 - DNA, 596 bp, Homo sapiens
tttttcttttgtttgcttattttttttctatttattttgagaaaagtctgttcatgtctttggcctccttttttattgagttgtgctttatcttattaatttatatattcagagtgctctccttttgtctgttaaatatgctgcaagtatcttctctcagttggaaggtttacttttgttgtcttttgaaacacagagatgtactgaactttaatgtactcgaattcatcaaactttaataatttatacttttttatcagtttcagtaatcccatagtctgtgcttatatctctttctatagcttcttaccaataattttaaagttktattattttcatttaggtatttaattcgactgtaatttacaagtggtatgtaatagggaacaatttatttggcctaaatgcatacacaattttcccaacacatttattgagtggtcctgtggtgagtgaccttaaccttcattgtctgtaaaatgggggtgataacaggaattatctgtgcttgttttccagtgccatgtaacaaatacctccatatcttgcagcttaaaacaatacgtattatctcacagattttgtgggtcagggat

SEQ ID NO: 620130 - DNA, 575 bp, Homo sapiens
tcaagcatagcttgactagtatgaaaaattgtaggattagtatctcctttgacccatatgccacaatctcaatctattctaacatcttagatatgctgatggtgtttagtgaatgtgggggccaccttatcctctaggtctttctgattaaaactcagccagggttcattagtcttctatttttgtactcctttcatttgaagtctctcggaaaaaaataacagcaaagaaattgccatatataaacatatgcaacttcaatctatacttcaaaccatacacaaaaagtaaactcaaaagagataacaaactgaaatgtaaaattataaaacttccagaagaaaacataagagaaaatccttgtgacttagacaratatttattaaatacggcatcaaaaacacatgtaaaaaaattgataaattgaacttcaccaaaagtaaacacttctgctcttaaaaaaacactgccaagaaaatttaaaaaaagaaaaaaaaaatgccatagactggggataagggcaatatttgccaaacacagataatgagcttacctagaatatgtgtttaaaaaca

SEQ ID NO: 620131 - DNA, 408 bp, Homo sapiens
gagaaacagttaataattttttagttgcttgttatacttgcttagaaaaacctgatttacartgcttttgtttgcatacataaaagttgttagcagcccaattccaagagaaattcctgttagaaaataagttccagttaattgaaagaaaaaaaaatcaaagaggattatataagctaacaatgacacaaattaaaagtaaacatatacaataataaaagctaacaaaaaataagtaactgaatgcattaagtagactaccaataaagaaaattaactgattttcagaatgaaaacaagtcaatgttttattatgccctacctgttatatgctgcataacaagtttgacactcagaatcaaaatatgtggaagacttttttgcaaccacttgaagagctactaccgt

SEQ ID NO: 620132 - DNA, 408 bp, Homo sapiens
gagaaacagttaataattttttagttgcttgttatacttgcttagaaaaacctgatttacagtgcttttgtttgcatacataaaagttgttagcagcccaattccaagagaaattcctgttagaaaataagttccagttaattgaaagaaaaaaaaatcaaagaggattatataagctaacaatgacacaaattaaaagtaaacatatacaataataaaagctaacaaaaaataagtaactgratgcattaagtagactaccaataaagaaaattaactgattttcagaatgaaaacaagtcaatgttttattatgccctacctgttatatgctgcataacaagtttgacactcagaatcaaaatatgtggaagacttttttgcaaccacttgaagagctactaccgt

SEQ ID NO: 620133 - DNA, 408 bp, Homo sapiens
gagaaacagttaataattttttagttgcttgttatacttgcttagaaaaacctgatttacagtgcttttgtttgcatacataaaagttgttagcagcccaattccaagagaaattcctgttagaaaataagttccagttaattgaaagaaaaaaaaatcaaagaggattatataagctaacaatgacacaaattaaaagtaaacatatacaataataaaagctaacaaaaaataagtaactgaatgcattaagtagactaccaataaagaaaattaactgattttcagaatgaaaacaagtcaatgttttattatgycctacctgttatatgctgcataacaagtttgacactcagaatcaaaatatgtggaagacttttttgcaaccacttgaagagctactaccgt

SEQ ID NO: 620134 - DNA, 408 bp, Homo sapiens
gagaaacagttaataattttttagttgcttgttatacttgcttagaaaaacctgatttacagtgcttttgtttgcatacataaaagttgttagcagcccaattccaagagaaattcctgttagaaaataagttccagttaattgaaagaaaaaaaaatcaaagaggattatataagctaacaatgacacaaattaaaagtaaacatatacaataataaaagctaacaaaaaataagtaactgaatgcattaagtagactaccaataaagaaaattaactgattttcagaatgaaaacaagtcaatgttttattatgccctacctgttatatgctgcataacaagtttgacrctcagaatcaaaatatgtggaagacttttttgcaaccacttgaagagctactaccgt

SEQ ID NO: 620135 - DNA, 573 bp, Homo sapiens
tcactagggaaatgcaaacccaaaccacactgagataccayctcataccccctgggaaggctagagtgagaaagatggtcaataacaagtgtcggtgaagatgtggagaaatcggaaccctcgtgcacgaagtaaattataaaatagtgcagctgctctggaaagcagtttggcaggtccttaaaatgctaaatgtagaattatcatatgacccagtaattccacttctaggtatccatctactcaagagaaatgaaacatgttcacccaaaacttgaacccaaaagttcatggaggcattattattcatggaggcattgttaacaatcacagtgaccaaaaaagtagaaacaacccaaatgtccatccaccgatgactggaaaagccatatgacatatccataaagtggaatgttacttagccacaaaactgaagcaagtactgatacctgctacaacatggacggcccttgaaaacattatgccaaatggaagaagctagtcacaatacatcacatattgtatgattccatttatggaaaatgtccaaaacaggcaaatctatagagacag

SEQ ID NO: 620136 - DNA, 573 bp, Homo sapiens
tcactagggaaatgcaaacccaaaccacactgagataccatctcataccccctgggaaggctagagtgagaaagatggtcaataacaagtgtcggtgaagatgtggagaaatcggaaccctcgtgcacgaagtaaattataaaatagtgcagctgctctggaaagcagtttggcaggtccttaaaatgctaaatgtagaattatcatatgacccagtaattccacttctaggtatccatctactcaagagaaatgaaacatgttcacccaaaacttgaacccaaaagttcatggaggcattattattcatggaggcattgttaacaatcacagtgaccaaaaaagtagaaacaacccaaatgtccatccaccgatgactggaaaagccatatgacatatccataaagtggaatgttacttagccacaaaactgaagcaagtactgatacctgctacaacatggacrgcccttgaaaacattatgccaaatggaagaagctagtcacaatacatcacatattgtatgattccatttatggaaaatgtccaaaacaggcaaatctatagagacag

SEQ ID NO: 620137 - DNA, 537 bp, Homo sapiens
gactccgtcacacagacaaaacaaaacaaaacaaaaaaaagaatcagactctttggagaaatggctgattccagaactggagcaggaaatatgcamaattagcctaaagtgccttgtagtgccagaaagtaagaatataataattttttaaaacctcacaagacacacaattatgggattatgtcaaagggtcataggagccaactgaggagttgccaatggctacaactggaacaactgagtaacaaaacaaagtagtactggattataaccaaaaatataaatatgtatgagttatcagatgaatgagtgaataaataaatgagaagagacaaatctcccaaacagcataattccaaatttatgtagatattcctcccacgaggaggtagatcgtaacttacttctcactcactccttaagtttgagatgtgtttagtgacttctttccaaagagtacagtgtaaaaaggaaggagaaagagtaattttatagtggagaagcctgacaaacactaccttaggtgaccaaggccaa

SEQ ID NO: 620138 - DNA, 537 bp, Homo sapiens
gactccgtcacacagacaaaacaaaacaaaacaaaaaaaagaatcagactctttggagaaatggctgattccagaactggagcaggaaatatgcaaaattagcctaaagtgccttgtagtgccagaaagtaagaatataataattttttaaaacctcacaagacacacaattaygggattatgtcaaagggtcataggagccaactgaggagttgccaatggctacaactggaacaactgagtaacaaaacaaagtagtactggattataaccaaaaatataaatatgtatgagttatcagatgaatgagtgaataaataaatgagaagagacaaatctcccaaacagcataattccaaatttatgtagatattcctcccacgaggaggtagatcgtaacttacttctcactcactccttaagtttgagatgtgtttagtgacttctttccaaagagtacagtgtaaaaaggaaggagaaagagtaattttatagtggagaagcctgacaaacactaccttaggtgaccaaggccaa

SEQ ID NO: 620139 - DNA, 607 bp, Homo sapiens
gatcagaattaggaagacctagttcaaatgccagcrtaacagtttgtttagttgtttgatctttagtcaaatcccttatggtcttggacccacagtctcatcatctgtaaaactgggctcgtaacacctatcctgttttctcctgagaggtaatgtgacagtaagtaagagcatggactcaggggccaaactgcatgggttcaaagtgtagtttctctacataacagctgtgtgaccataggtgtgttacttaaccttttctgtgcctcagtctccccagctatacaaagaagatgataatacccccaatctaatagggtttctctgaagactaaataagttaatatatgttaagcgattagaagagaaattagaaagtgctggcacacagaaatacttaagtgctattgatgggaagacacaatatattgcataactcaatcagcatataattcttgccttttccgtccttcttcacatagtgccagtagccgtgagactaggacttgagcctaaatctccatacttcaagtcttatgtccctcaactatgactaagtggtaagacttaagcagtgctggtcatggccttctcaatctacatgtgt

SEQ ID NO: 620140 - DNA, 607 bp, Homo sapiens
gatcagaattaggaagacctagttcaaatgccagcataacagtttgtttagttgtttgatctttagtcaaatcccttatggtcttggacccacagtctcatcatctgtaaaactgggctcgtaacacctatcctgttttctcctgagaggtaatgtgacagtaagtaagagcatggactcaggggccaaactgcatgggttcaaagtgtagtttctctacatamcagctgtgtgaccataggtgtgttacttaaccttttctgtgcctcagtctccccagctatacaaagaagatgataatacccccaatctaatagggtttctctgaagactaaataagttaatatatgttaagcgattagaagagaaattagaaagtgctggcacacagaaatacttaagtgctattgatgggaagacacaatatattgcataactcaatcagcatataattcttgccttttccgtccttcttcacatagtgccagtagccgtgagactaggacttgagcctaaatctccatacttcaagtcttatgtccctcaactatgactaagtggtaagacttaagcagtgctggtcatggccttctcaatctacatgtgt

SEQ ID NO: 620141 - DNA, 489 bp, Homo sapiens
ctagttgctcaatgtcacacaagagagtagtacagcaaagactagaatctagtccctactttccaagccagctctccacctctggcatctagaccacattaacagcctctctctcttctatgaacacccttgacattttaacttatttttttcactcatttgtttaccccatagttctcatctaagcaatgttcaggataaagatgaatattggccatcagctatatgcagttccattgataaagccatccctacaataagatgaatgcctarccttttctcccaataagtcactgaataatctacttgacaagcacatttttgataaagatataggtctccatatgagtctgcctacatggaaataatgggcagaatttggaatagtgatttctcagggtaaattaataaaaatgccttttggctttatacctctgatatagtttgtctccccatccaaatctcacctcgaattgtaatccccgtatg

SEQ ID NO: 620142 - DNA, 552 bp, Homo sapiens
tatagcctgcagaaccatgggccaattaaacctcttttcttcataaattacccagtctcaggtatttctttatagcagtgcgagaacaagctaaagcaggaagattgcttgaggccagaaattcaagaccaacctgggtaacatagtgagacactttctctaataataattttttaaaaattgccaggygggcgaggcgcggtggctgacacactttgggaggccgaggcaggtggatcacaaggtcaggagatcaagaccgtcctggctaacatggtgaaaccccatctctactaaaaaaatacaaaaaaattagccaggcatcatggcaggcacctgtagtcccagctacttgggaggctgaggcaggagaatggcttgaacccggaaggcagagcttgcagtgagccaagatcgtagcactgcactccagcctgggtgacagagtgagactccatctcaaaaaaaaaaaaaaaaaaagccagtcaccgtggtgcatacatgtagtcccagctgctcaggaggctgaggccagagaatcagtttaaccca

SEQ ID NO: 620143 - DNA, 468 bp, Homo sapiens
gaattcagcatctctgttctgcctataggatgaggttggaggtcttcagcatggcctccaaggtatttatgagctgacctccccctacccaattctatccttccctagtcccacttcctgccattccccatctcatactttgtgtttctggattatgagttgtttatagtaacctgaatgtactatgctgctcccacttttataactgtacatgttattccttctactatgaatgttctttcttgccttggcctgtctaccaatttcttacaagagcttaaagttagcttggacataacctcctcccaaaagcattctctcatctctacaggctcccatctctttcttccttgggcaactttgtcacctggcaatacytcaattgtggaacttatcccgttgttctaaaataatcttatgtgcctaaattaaattgtgttttattcccctgtaacacctgcctggagc

SEQ ID NO: 620144 - DNA, 513 bp, Homo sapiens
ttgaaagctaagaaatggaagaagctccttcatgcaaacactaactaaaagacagctggagtaaatatatgactatcagacaaaatagagtttaagaaagaaattatgcctggtgcagtagctcatgcctgtaatcccaacactttggtaagccaaggagggaaaatcacttgagcctaggagttcaagaccagcctgggcaacatagggaacccccatctcaaaagagagagagagagagagagagagacagagagagagggagagagagagagagacagagagagagggagagagagagagggagagagagagagagaaagaaagaaggaaagasagagaaagaaagaaagaaagaaagaaagaaagaaagaaagaaagaaagaaagaaagaaagaaagaaaataaagacattagctgggcttagttgtatttacctgtggtcccagctatttgagagactgaggtggcaggcgggcttgggcccaggaggttgagactatagtaagatgt

SEQ ID NO: 620145 - DNA, 480 bp, Homo sapiens
ccatgtttttcaaaacatttcgtttattttgctacttgaaaacggtcttcccttttgccccatgtaaaataaaattgctcatkatctatggtcccgtgagagcttatttaaggagcactgacggattctattttccttattaatgtggcatatttgccacgtgtgcaaatgaaaacatccctttccaatgagtgcctaggaggaaatcagctcttccttcctcgaagagttttaattcatgggtatgatctatttctttctttctttattttgttttatatattttttagagacagagtctcggttttttgtccaggctggggtgcagtggcatgatctcggctcactgcaacctgtgcctcccgggttcaagcgattcttctgcctcagcctcctgagtagctgggattacagtcatgtgccaccacccccggctaatctttgtatttttagtagagaatgggtttcgccatcttggcc

SEQ ID NO: 620146 - DNA, 586 bp, Homo sapiens
tcttttaaaacgttattgtatcatttgttccctttctgtatttacaactactttctctccattggctcctttctctgtatgtataaacttgctgaagtattccccttttttaacagagaacaaagagccactattccgtgttaaagtcatactgtatttcccctttccttcacagtaaaatttgagttgttttattctcaccctttatgcttcactctcattcagtcttcaacccactacccttgagtttctttcctctaagactttcacttcattaccagtttgctaaatccactaagtgttatattaccattttcttacttgatggttcctttgtgaaattatcttgtcttggtttctggttatcttgtctgttgccttttctttacctctttagatgatttccrgtgaagtttactgtcttttttttttaattaactaattatttttgcctttgccagcaaccgcactgttgatcttacctcacctacccaactttctccaaactcacctcaagcaacagttcttcaagcctatcatgctgcattgactttctatttgttgaagaagctaagctgttttaatg

SEQ ID NO: 620147 - DNA, 491 bp, Homo sapiens
gtgatgttcctggtgataatgggaaaatatgaaatacacacagtgaaaggacaataacacattccacagagacatgttgtttcaaactatctgacactcaagtcgagatacttaataaaactgcgtatrcaggagtgaaggtctggaaagataattaagctacaaggatattcttgagaaccagcaagtggtaacaacacaagcaaaagggtgagacaacccagcaacagcatggagggacatggaagattctcaaagacaaagccccaggagggaccaacatttagcaatttggacagacacgggaagcattcgaaggaaacctaagtagaagctcaaagagaggaaggaaaactgtgggaagatggcaggagagagactgttcctaagagagtgtcacaaaggtcatcgaatgtcaaagagagataaggtaataaaaaaggaaagaaagctatcactggatagaaaactaaggaaggtaatagcaattg

SEQ ID NO: 620148 - DNA, 491 bp, Homo sapiens
gtgatgttcctggtgataatgggaaaatatgaaatacacacagtgaaaggacaataacacattccacagagacatgttgtttcaaactatctgacactcaagtcgagatacttaataaaactgcgtatgcaggagtgaaggtctggaaagataattaagctacaaggatattcttgagaaccagcaagtggtaacaacacaagcaaaagggtgagacaacccagcaacagcatggagggacatggaagattctcaaagacaaagccccaggagggaccaacatttagcaatytggacagacacgggaagcattcgaaggaaacctaagtagaagctcaaagagaggaaggaaaactgtgggaagatggcaggagagagactgttcctaagagagtgtcacaaaggtcatcgaatgtcaaagagagataaggtaataaaaaaggaaagaaagctatcactggatagaaaactaaggaaggtaatagcaattg

SEQ ID NO: 620149 - DNA, 477 bp, Homo sapiens
aacacccaaagacatcccaagatttctggattgattttcaaataaggctttctgacatggaagtatatttatattttacatgatttttgaaatttcatgaaattttctctgagatgagggaggagacatgccacatgctctgcagcgtgtgaaaatgccaagcggacggacagacatggctctgtccttgcgcatgccctggaggtgtggagccctgcacaggaattcaactaacccgagccatcatgacagttccacgaggcaggcgtttcctgccctctccacggataaggaaataaatgcaaggcagagagatctgcactccggagtgcccgaggtcaccgggccaacgcgtgcacctggcctggagcctgagcatgcgctctaggctgcaccatctcgcgccaccacactgatttccaccagttcagtaaaggggccaggaattgccyagcaatggctctgcctgaagcacta

SEQ ID NO: 620150 - DNA, 572 bp, Homo sapiens
ctaaggtgggaggatcacctgagcccaggaactcaagatcaacctgggcaacatagtgagaccctatctcttaaaaaaaaaaatggcagagaatggtggcacacaccctagtcctagctctctgaagctgaggcagaagcatcactagagcctgtgaggttgaggctgcaatgagccatgattgtgacactgcactacagcctgagtgacacagcaatcttctgtctcaaaaaatatatacatattttctcttaaattttacctaacctttgatttgtctagwactgtggactaattgtatttctccaaactcatatgtggaagcccccatccctaatgcaactgtatttggagatagagcctataaggaagtgatttaggttaaatgaaatcataagggtgggatcctaagcctacaagattgctccagagagtgccctctccctgctcctccctgcctcttcctccttcccattttccctgcctcctgctgtccgccctgcaaggacacagcagtgggaaggcaccctgcaccttcagtcaacctgcaccttgaccttggaccctcagaa

SEQ ID NO: 620151 - DNA, 562 bp, Homo sapiens
gtccaaggtcaaggtgcaggttgactgaaggtgcagggtgccttcccactgctgtgtccttgcagggcggacagcaggaggcagggaraatgggaaggaggaagaggcagggaggagcagggagagggcactctctggagcaatcttgtaggcttaggatcccacccttatgatttcatttaacctaaatcacttccttataggctctatctccaaatacagttgcattagggatgggggcttccacatatgagtttggagaaatacaattagtccacagtactagacaaatcaaaggttaggtaaaatttaagagaaaatatgtatatattttttgagacagaagattgctgtgtcactcaggctgtagtgcagtgtcacaatcatggctcattgcagcctcaacctcacaggctctagtgatgcttctgcctcagcttcagagagctaggactagggtgtgtgccaccattctctgccatttttttttttaagagatagggtctcactatgttgcccaggttgatcttgagttcctgggctcaggtgatcctcccacctt

SEQ ID NO: 620152 - DNA, 562 bp, Homo sapiens
tatttttaatttttccttttttttctaacctactgggtaagcatgttttcaatctcatttttgaattatgaattgctgtgtatagaaatacagattgtttctgtgccttgatcatgggtattgccatcctcttgaactatattcttagttcaaataagatatttttgtaaattccttagaattttctatacacaagattatgtcatctgaacatagagatagttttacttcttcatttccagtttggatactattyatttatttatttatttatttatttattttcttgctaggttgctcaagctaaaaccgcaatacaatgttgaactgagctggtgacagcagacactcttgcctttgtcctcatcttatggggtaactgatcagtcaccattgagtatgacgttagccctgttttgtttttgttttgtttcttttttttattttttggtacttgccccttatcaggttgagaaaatttcctgccattcttagtttatttacttttttctcataaaagggtgttgggctttgtcaaatgctttttctgcatatattgaga

SEQ ID NO: 620153 - DNA, 598 bp, Homo sapiens
tattttgcattttcctgttttatgcaactaaaccttatcctaatcaatataaaattcaacacccatgagttggatgatatatataataaaatccaattgtgtcattggcttagtggagaagatcagacatggagcagtggtgagcagatatcatcagttggaaaattagtgacccttgttatgctgtagcaaaacatttgmtcaaaattgccatttcctgaataatataaagcaagcaacatgcaaactgaagatgtggctgggggaaggggtaagaagtgtaaaattttggtttgtattgattgcatcttgcagcttttagctaagagctgtgataaagatataaactcatctggagctatcctgcctgccaacagagatggaaggaaacatagctttgtaaagattagactctgcctgtaatctaaactcagctatgagtcctgtaactgggagtcttgtaggatgaaaaatactgcttccagtgagtgcaagcccatccagccttggcaggagataaggctgtggccccaggcactttccgagcatcttcctaggttccttgccagacaatggaaacaagcccagacacaaagat

SEQ ID NO: 620154 - DNA, 598 bp, Homo sapiens
tattttgcattttcctgttttatgcaactaaaccttatcctaatcaatataaaattcaacacccatgagttggatgatatatataataaaatccaattgtgtcattggcttagtggagaagatcagacatggagcagtggtgagcagatatcatcagttggaaaattagtgacccttgttatgctgtagcaaaacatttgctcaaaattgccatttcctgaataatataaagcaagcaacatgcaaactgaagatgtggctgggggaaggggtaagaagtgtaaaattttggtttgtattgattgcatcttgcagcttttagctaagagctgtgataaagatataaactcatctggagctatcctgcctgccaacagagatggaaggaaacatagctttgtaaagattagactctgcctgtaatctaaactcagctatgagtcctgtaactgggagtcttgtaggatgaaaaatacwgcttccagtgagtgcaagcccatccagccttggcaggagataaggctgtggccccaggcactttccgagcatcttcctaggttccttgccagacaatggaaacaagcccagacacaaagat

SEQ ID NO: 620155 - DNA, 443 bp, Homo sapiens
ctgtatgtcttccgcatctataattatagtagcagaagagaatggtgagcctggggcactgcaagatcctaaatcaaagattaaggcatattaactctaccctscctggaaagtggtcagttgtattttaaaaagctttacaataggctttctaataacgagagttgaagcaaagtttccacctaaccctgtaattaaattcaccagaagaccccatttcccattatccagacgaccaaggctttgccgaacaccacccgtccctgccctctaggagaggtcatccaaggccagcaatgaaacagtcaatcaatttgcaaatggacaggaggacactgacaggatgtgttcactgagggtaggtgtctactgggggagagaggccaggcaagtctgtccttgttttcagtttagcaggaggagtgaaggggaggccagagtaa

SEQ ID NO: 620156 - DNA, 443 bp, Homo sapiens
ctgtatgtcttccgcatctataattatagtagcagaagagaatggtgagcctggggcactgcaagatcctaaatcaaagattaaggcatattaactctaccctgsctggaaagtggtcagttgtattttaaaaagctttacaataggctttctaataacgagagttgaagcaaagtttccacctaaccctgtaattaaattcaccagaagaccccatttcccattatccagacgaccaaggctttgccgaacaccacccgtccctgccctctaggagaggtcatccaaggccagcaatgaaacagtcaatcaatttgcaaatggacaggaggacactgacaggatgtgttcactgagggtaggtgtctactgggggagagaggccaggcaagtctgtccttgttttcagtttagcaggaggagtgaaggggaggccagagtaa

SEQ ID NO: 620157 - DNA, 384 bp, Homo sapiens
agcctggggcactgcaagatcctaaatcaaagattaaggcatattaactctaccctgcctggaaagtggtcagttgtattttaaaaagctttacaataggctttctaataacgagagttgaagcaaagtttccacctaaccctgtaattaaattcaccagaagaccccatttcccattatccagacgaccaaggctttgccgaacaccacccgtccctgccctctaggagaggtcatccaaggccagcaatgaaacagtcaatcaatttgcaaatggacrggaggacactgacaggatgtgttcactgagggtaggtgtctactgggggagagaggccaggcaagtctgtccttgttttcagtttagcaggaggagtgaagggg

SEQ ID NO: 620158 - DNA, 443 bp, Homo sapiens
ctgtatgtcttccgcatctataattatagtagcagaagagaatggtgagcctggggcactgcaagatcctaaatcaaagattaaggcatattaactctaccctgcctggaaagtggtcagttgtattttaaaaagctttacaataggctttctaataacgagagttgaagcaaagtttccacctaaccctgtaattaaattcaccagaagaccccatttcccattatccagacgaccaaggctttgccgaacaccacccgtccctgccctctaggagaggtcatccaaggccagcaatgaaacagtcaatcaatttgcaaatggacaggaggacactgacaggatgtgttcactgrgggtaggtgtctactgggggagagaggccaggcaagtctgtccttgttttcagtttagcaggaggagtgaaggggaggccagagtaa

SEQ ID NO: 620159 - DNA, 548 bp, Homo sapiens
caatacatttaacaaatatatgatgtgttctgctatatgcttggccagtgtgtgaaatggaggagacataatcctcatctttgtgtagtttataggctagcaaagaagtcaggcagtaaacaaataaatgcatttataattaattacaatcctgaagttggattgtacttttgtgagtaatggtttaatmaactagattttaagttccattaagataggggttacttctgtgttgtttgtcatggtgtcccaaatccttccttagcctactgcttggaatagagtaaatattaagttgagctttattgccattttgataggtcagaagcagtcgaatgtcaataatgtcacatagttcaacctaatagttgctcagtcaatatgtattgaatgttgaatgcatgttgtaatcaacgatcctatggtaggctgcatttaacacagttttctctagccaaagaaatgctagctatggtatttgaaaaggaattctaaaacttcaaacagctaaaactggtgatctgtgatatagactgtgggactggata

SEQ ID NO: 620160 - DNA, 548 bp, Homo sapiens
caatacatttaacaaatatatgatgtgttctgctatatgcttggccagtgtgtgaaatggaggagacataatcctcatctttgtgtagtttataggctagcaaagaagtcaggcagtaaacaaataaatgcatttataattaattacaatcctgaagttggattgtacttttgtgagtaatggtttaataaactagattttaagttccattaagataggggttacttctgtgttgtttgtcatggtgtcccaaatccttccttagcctactgcytggaatagagtaaatattaagttgagctttattgccattttgataggtcagaagcagtcgaatgtcaataatgtcacatagttcaacctaatagttgctcagtcaatatgtattgaatgttgaatgcatgttgtaatcaacgatcctatggtaggctgcatttaacacagttttctctagccaaagaaatgctagctatggtatttgaaaaggaattctaaaacttcaaacagctaaaactggtgatctgtgatatagactgtgggactggata

SEQ ID NO: 620161 - DNA, 548 bp, Homo sapiens
caatacatttaacaaatatatgatgtgttctgctatatgcttggccagtgtgtgaaatggaggagacataatcctcatctttgtgtagtttataggctagcaaagaagtcaggcagtaaacaaataaatgcatttataattaattacaatcctgaagttggattgtacttttgtgagtaatggtttaataaactagattttaagttccattaagataggggttacttctgtgttgtttgtcatggtgtcccaaatccttccttagcctactgcttggaatagagtaaatattaagttgagctttattgccattttgataggtcagaagcagtcgaatgtcaataatgtcacatagttcaacctaatagttgctcagtcaatatgtattgaatgttgaatgcatgttgtaatcarcgatcctatggtaggctgcatttaacacagttttctctagccaaagaaatgctagctatggtatttgaaaaggaattctaaaacttcaaacagctaaaactggtgatctgtgatatagactgtgggactggata

SEQ ID NO: 620162 - DNA, 548 bp, Homo sapiens
caatacatttaacaaatatatgatgtgttctgctatatgcttggccagtgtgtgaaatggaggagacataatcctcatctttgtgtagtttataggctagcaaagaagtcaggcagtaaacaaataaatgcatttataattaattacaatcctgaagttggattgtacttttgtgagtaatggtttaataaactagattttaagttccattaagataggggttacttctgtgttgtttgtcatggtgtcccaaatccttccttagcctactgcttggaatagagtaaatattaagttgagctttattgccattttgataggtcagaagcagtcgaatgtcaataatgtcacatagttcaacctaatagttgctcagtcaatatgtattgaatgttgaatgcatgttgtaatcaacgatcctatggtaggctgcatttmacacagttttctctagccaaagaaatgctagctatggtatttgaaaaggaattctaaaacttcaaacagctaaaactggtgatctgtgatatagactgtgggactggata

SEQ ID NO: 620163 - DNA, 519 bp, Homo sapiens
gggcctggcctggttttaaatccaaggacaaaaatatcattcattcactctttcattctttctcttatctgaatccccagtggtacctaaaatagagctggtctaaagatgatgattaatgaatgttaaattattgatactacttctaagaagatgtaactgccagctacagaaccatccaaaaggactgcaaacccagtaattcatttcatcccaacctgactgatctctctgatgtctgcactgctgtgtcactagactgccygattgtcctaggttgagacatttagctactgagccccagggatgggtggctgcttctaagctgctgcctaattccctcattactaaatgttgaagctgcttccttagaggactgctaaaccataactcaaaaatattttaaacatgctactatttacttagattagaatatttacttaaatattttaaaaattacagtattttaagtcttttatctcttctgactactaccactaaccctgcttcccctcattt

SEQ ID NO: 620164 - DNA, 519 bp, Homo sapiens
gggcctggcctggttttaaatccaaggacaaaaatatcattcattcactctttcattctttctcttatctgaatccccagtggtacctaaaatagagctggtctaaagatgatgattaatgaatgttaaattattgatactacttctaagaagatgtaactgccagctacagaaccatccaaaaggactgcaaacccagtaattcatttcatcccaacctgactgatctctctgatgtctgcactgctgtgtcactagactgcctgattgtcctaggttgagacatttasctactgagccccagggatgggtggctgcttctaagctgctgcctaattccctcattactaaatgttgaagctgcttccttagaggactgctaaaccataactcaaaaatattttaaacatgctactatttacttagattagaatatttacttaaatattttaaaaattacagtattttaagtcttttatctcttctgactactaccactaaccctgcttcccctcattt

SEQ ID NO: 620165 - DNA, 312 bp, Homo sapiens
tgggggaaaggaagagtaggaaaaaagtgggaaaacgaagtggttgaagcagaaaaaacctggagactctgttttgtctgttttaatcaatttctagcttcctccttttaaattgacagtgtaaataacttgatttccagaacactctaatttcatatctcagtaattctataactttcctttctttttgtctttttctgagctgtaagaacctctttgtaactcaactctctagaytggaaaatgtgaatgtaattcctacctcacaaaattatgaggaggatttacaagatgacatgtgacattatttca

SEQ ID NO: 620166 - DNA, 324 bp, Homo sapiens
ccagtccttttggctttctctgtkgactagctggtgtcgacatccaactcacagttgttctcatggttgtaatgcaagaaaacagccaaaagacaaggcttccaagtttgtagcagggtcatgagattcactggaaaacatatttaatgaacatctacaatgtgccaggcactcttctagatgtggggttgcatcagtaaacatgagaaagatccctacattcataatgcttcaaatccagcagagcaagagacaataaatagaataagtaaattacacagcatctgagaaaatgatgaaaaagctataaaaaaaaaagagaac

SEQ ID NO: 620167 - DNA, 324 bp, Homo sapiens
ccagtccttttggctttctctgttgactagctggtgtcgacatccaactcacagttgttctcatggttgtaakgcaagaaaacagccaaaagacaaggcttccaagtttgtagcagggtcatgagattcactggaaaacatatttaatgaacatctacaatgtgccaggcactcttctagatgtggggttgcatcagtaaacatgagaaagatccctacattcataatgcttcaaatccagcagagcaagagacaataaatagaataagtaaattacacagcatctgagaaaatgatgaaaaagctataaaaaaaaaagagaac

SEQ ID NO: 620168 - DNA, 489 bp, Homo sapiens
gatgaaatgaaggtaatctctttttaattcttagttgtaatgaatatgtaatagttgtacatatttatggagtacaatcaaaattttgatataagcatagyttatgtaatgatcaaatcagagtaaatgggatagctatgacttcaagcatttatcacctctttgtgttaggaacatccaatgccactcctctaattattttgaaatgcacaatagattattgttaactacagatgttcattaattaaaatctacagagacaatgggcagttctcattttatgttacttttgatttagtaactgttcttgtttgacatttcctattgtaagtatggtgggaaaagcatccactgaatagcaacctctctagatgcattacatacagtctacatatcacattctagtaacaatttttcaaggtaggcactgacatgactatttcattgaaaataagtttcactgaggtttagtagttgcctaaacccaca

SEQ ID NO: 620169 - DNA, 603 bp, Homo sapiens
aagactcaaattcacatcattgtaggcctacacaagattgaaatcatccagacatcactaggcaataggaatttttcagctccattatgatcttatgggaccactgtcatatatgtggtatgtggcatacagctgtgtcatatgtatatacgtgatacatatatacacatatacataggatatacatatcatatataatatktacattaaatatgcatttttatatttaaatagaaatatatagttatcatatgtaatacctacatatcatatatatctacattatcatatatctacattaaatatatataatataaaggtatatttataatatattataaatattatatataatataaaatatatatgtatttcttaataaacatgaatgtacattaatttataatataaatatatttaatatatgcgttatataatataaatatataatatatattttataatacttgtatgttttgttatgtttattatatcatttataatatacatatgttcataaaatatacaatatataaatatatttttatatatctcttttgtttaggaagtttgggcttccctaacactcatatttttaaataa

SEQ ID NO: 620170 - DNA, 197 bp, Homo sapiens
agtacttcatgattgtttttattatagccacactgcacatgaatttatattcagatrtacccatcctatgggaataatgctatttttttagcagattattttttaaagcaaacaaatgaatgttcactggaaatcagtgagcacctggagggtcagttaggaggtggttgttaaaaatattgggctttgcctgtggc

SEQ ID NO: 620171 - DNA, 658 bp, Homo sapiens
aacatatcatttaatttttagtagaaaacattaatattcaggcttttccatgcatatgagatgatgttttcagatataaaattagttttcatagatccacagttgaaagaatcctgagaatttatgcaaccatatgctgttttatattgctgatttttcaccaatgaatgtgtgatggttagtattgagtgtcaacttgataggactgaaggatgcaaagtattgttgctcctgggtgtgcctatgagggtgctggcaaagaagattaacactgagtcagtggactgggagaggccgacccatcctcaatccgggtgggcaccagctaataagctgccagcacagccagaataaaagcaggcagaaaaaggctgaaagacaagacttgctgagtctcctggcccccatctttctcccgtgctggatgyttcctgccctcaaacatcagactccaagttcttcagctttgggactcttggatttacaccagtgctttgccaggggctctctgcgtcggccacagactgaaggctgcactgctggcttcactacttttgaggctttgggacttggacgggcttccttgttcctcagcttgcagatggcctattgtgggacctcaccttgtgatcgtatgagtcagcactcgttactaaat

SEQ ID NO: 620172 - DNA, 658 bp, Homo sapiens
aacatatcatttaatttttagtagaaaacattaatattcaggcttttccatgcatatgagatgatgttttcagatataaaattagttttcatagatccacagttgaaagaatcctgagaatttatgcaaccatatgctgttttatattgctgatttttcaccaatgaatgtgtgatggttagtattgagtgtcaacttgataggactgaaggatgcaaagtattgttgctcctgggtgtgcctatgagggtgctggcaaagaagattaacactgagtcagtggactgggagaggccgacccatcctcaatccgggtgggcaccagctaataagctgccagcacagccagaataaaagcaggcagaaaaaggctgaaagacaagacttgctgagtctcctggcccccatctttctcccgtgctggatgcttcctgccctcaaacatcagactccaagttcttcagctttkggactcttggatttacaccagtgctttgccaggggctctctgcgtcggccacagactgaaggctgcactgctggcttcactacttttgaggctttgggacttggacgggcttccttgttcctcagcttgcagatggcctattgtgggacctcaccttgtgatcgtatgagtcagcactcgttactaaat

SEQ ID NO: 620173 - DNA, 484 bp, Homo sapiens
taaggtaaataaatgttgaaatacaaactaatgtggagaaagaaacatccatttttatgctattgcttttgctttttatttgttttaggagctaaattctttctgtatcaaagattatattttagataatagaactgaaggttttcttttgacatagatactaactgatatctagctggaaaacagaataggataaatggcacatttaaggtttggtatcaaacagtgtactggaataaagaatagacatataatattttgaatatctaaagggagaagtgttcaattaagtatttaatctttkaggtgatattaagccactctactttgtaagatgccaagtaaacattcggaagaatgttttaaggtgtgtgcatgaacaactctatgcaggtgaatttcaggacgtaaattgaaaggcagacttagcagaaagtaccacaaacaatactttgggatgatgccttctaaattattggttaca

SEQ ID NO: 620174 - DNA, 605 bp, Homo sapiens
ggggcagcactgacatgccagccccctgtggcctcagccccctctgtgctttgggcactgacaygcacaggagggaagccaaatgggggcacagggtggctcagtgctgacctgcaggcacccctcctccacaccaacagcctgggtaccatggatgttggcaagaggcagacaggctcctgggtggaaagggacgggtcccagtgaagccccaccttcaagttggggaaggcctgaaacctggagtctgggctgccagccccacagactagagtgagaacttatggtgctttttctaggcccacccatggctgcctatggaccaatcagcacatatttccacctgtctgaagcccataaaaaccctagactcagccagacttggagagaggatgggatgatgaccagccatggagagcagttacccactccagagtctcctctctgctgagagctgagcagacatcaggattgccactggcagtgaggagctacctactccagggtctcctctctactgagagctgaacacccaacagaatggcctacctgcagagaactactcactcccaggtctcctctctactgagagctgacactaatag

SEQ ID NO: 620175 - DNA, 605 bp, Homo sapiens
ggggcagcactgacatgccagccccctgtggcctcagccccctctgtgctttgggcactgacatgcacaggagggaagccaaatgggggcacagggtggctcagtgctgacctgcaggcacccctcctccacaccaacagcctgggtaccatggatgttggcaagaggcagacaggctcctgggtggaaagggacgggtcccagtgaagccccaccttcaagttggggaaggcctgaaacctggagtctgggctgccagccccacagactagagtgagaacttatggtgctttttctaggcccacccatggctgcctatggaccaatcagcacwtatttccacctgtctgaagcccataaaaaccctagactcagccagacttggagagaggatgggatgatgaccagccatggagagcagttacccactccagagtctcctctctgctgagagctgagcagacatcaggattgccactggcagtgaggagctacctactccagggtctcctctctactgagagctgaacacccaacagaatggcctacctgcagagaactactcactcccaggtctcctctctactgagagctgacactaatag

SEQ ID NO: 620176 - DNA, 512 bp, Homo sapiens
tttcttccttcttccctgctgcctttccattgccccctttataaggagagaagagaggtcaagatgactgctgtaaaccaatggaagcccaaggtcttcgacttctaacactgcaatcctttttaaagccatataaaggtcctttgtgttgctatcaaaaacacctctgacctcctctttcttgttttcatataaagtgacagctctgtcccatccttcataaaaaggcaaaaaaaaaaaaaaaaaaaaaaaaccctgccaataccatccttcttcaraagccagacactattaatcatcagcaggaggcagtatggcttcaattagctacacagtgttcaataaattctcagttattctgagtgtgtgtgtgtgtgtgtgtgtgtgtgtgtgtgtggtggtggccttagtgctggacaatgttctatctgctttacatggattaattctgtgaagatggtgctattactatgcccatttcagaactgaagagatagaaatacagaaaagct

SEQ ID NO: 620177 - DNA, 600 bp, Homo sapiens
aatttcttaatatctttcagccacactaagtcatctgagtagaagtgtatgaatatattataagctcagaaaatggcatctaaaagcaatagartattacagtgtgaatcaggaaatttttcacgttttgaaggtttcaaatgacttggtttaataaataaataaaacttgtaatacctagaaaattgatgttgaatgggaaaaataaaatattgctattaatgacttggcattcagtacttacattattgatgacttaacatgctggcatgtgattcccagctgttttaaggtgacgctacagatgtgtgattccctagagccatttttctctatctctgttatggcctttattacttgctaccttttacatatttatgtaaaagactttttctccctccaggtcaaaagtttctggaggataagaagtgtatctgatttatctttcgtatctccgtggtgcttagcacatgatttacatatatttggaactcggtaaattctccaatagaacaaacagtaaatctttttaaaaatcatgttttacaacttaaattattatgaatggggaaaacagtagaagaaatgtataccaatatg

SEQ ID NO: 620178 - DNA, 430 bp, Homo sapiens
ctatgtggacagtagcaacccaccctcaggctgagaatacttgctggctstttcttgagaagcaactcctgagtctatagggcaagacaatgcatttgagtaaatgtgagaaaagaattgagaaagtggaatttcattctcccagttttgatgcagaaaagggcaaactgcccatagttatccaccccctccccaattataacaatgagaaatacaagaaaaatttgtaaagtttattcacaatgcagttgttgaaaggaataaaacagttggcaatggcatctcgcttctgaatttgatttataaaaacattagggagctctttttttgtattttgctatttcactggggaatgatgaagagagagtctttttttatacttataaatttcagactttgatgtcatttatcacagtatcgtctggaattc

SEQ ID NO: 620179 - DNA, 548 bp, Homo sapiens
aaggttaaaaagaaaaagattataaaaaacactgtcccaatgtctttggtacattcttggaagatcaggcaatactttaagcaaggccgagaagggcggatcacttgaggtcaggagttcaagaccagcctggccaacatggtaaaaacccatctctactaaaaatacaaaaattagctgggcatggtggcgcatgcctgtagtcccagctactcgagaggctgaggcacaagaattgcttgaacctgggaggctgaagttgcagtgagccgagattgcgccactgcactccagcctgggcgacagagcaagactccatctcgggggggggggraaaaaaaggtaaagtaaaggataataaaacagcgatgatttctctattttatcatcacttgctgggcacagtggcacatgtctacttgaaagaatcatttgaggccaggtgtttgaggctgcactgtgctacagtcatgcctatgaataacccctgcagtccagcctgggcaacatagtgagactcagtcttaaaatttttttttttttcagaa

SEQ ID NO: 620180 - DNA, 605 bp, Homo sapiens
atggagggacattcatcaccttttgtcctgtccccatgccccaggggacttcttgccactttggggtgccccccatgggggaaacacacacccggggtgcaagccagtgagtttccaygtggttacatttttcttgaacctgaacaacttttttttttttttttttagcattgcttcttgctgctggccaaaaattcactcagatatctttattttgacctaatttttaaaaggtatttttaatagatttagaattctcaattgaaagggttttttttaaactacttgtcaactggtcttcattatttctgagaggatgttatatataattcatttatttgttccatagtgtaaaatgtatcttttttcttattcctttatttgggctttaagtagctgaattatgatgcaccaaagtgtgggattttgggggatttatttgtatttattgtgtttcggtttctctgagctttttggatttgttgatccacaatgtttttcataaaactggggaaatttttggccatcatttcttcgtgtgttttttattctgcttcgttctctcttcttcatctgagattctaattacatatatgtatatatca

SEQ ID NO: 620181 - DNA, 418 bp, Homo sapiens
tgatgttccagctttttggctttctacaaagcaaagttttaagctttctgagaattatgggagttgaatcatacattccatttaagcagcatgtacttttcctagaaatacgttagtgcatttaaaaaaaagaatacctgatacatattaggtggccaataaacataagctatgatttttattattagctattactataaatatattatamaaaatcaaatatacttagtagcctatttataataagctaaataattaactgaaataagcaccagcttaatttgataaacagtccagataagatgattttgaaagggcacatatactcaattgtcactgggtaacagtacttatcacagaaacgacgtttttaaaaattctctcttgtaatcattttaatttctttctaaaaagatac

SEQ ID NO: 620182 - DNA, 421 bp, Homo sapiens
ttttgaggcagagtttcactcttgttgcccaagctggagtgcaatggcgcgatctgggcgcactgcaacctscgccccccgggttcaagcgattcttctgcctcagcctccccagtagctgggattacaggtgtgcccacgtccctaccagctgttttgatagctaccactaaatacattttaaggtgtgggtatacatgtgtgcgtaaagacttaactacacagatgttcactggagggtgagttataataatgaatattggaaatagcctaaattctaaccacaggggactaagtaaattatagaacatccagacagtcttgtttatgaaagagcatgggccttgatgtcacacaagctgggtttgaatcccccctctcctaccagtttaaacagccattaaaaataaaaaacatagaa

SEQ ID NO: 620183 - DNA, 564 bp, Homo sapiens
ggtctcctcctgctggccacagaaaggtcagattgaaagcttccgagcgctattttgaaagttaatatgaagcaaggagctaatttgcacatacgtgtagaatgaaaagggtaagaagcatgaataacaaaatacaaggcagtctgtctcctctgtaaaaactctggctagtgttagattgacataattatttttacctttatttctctataggcatcctagtctacttttaccagttggataaaaccttaatgagacttcaaagttcagatagaataagttttgtgaaaataaaacaagatctgagggagtcacttgttttaaaagtacacatatattgggaggctgaagtgggcggatcacctaaggtcaggagttctagccaacatggtgaaaccccatttctactaaaaatacaaaaattagcccggtgtggtggtacatgcctgtaatmcagctactctggaggctaagggacaggaattgcttgaacccgggaggcagaggttgcgatcagccgagatcacaccactgcactccagcctgggcaatagagtgagactc

SEQ ID NO: 620184 - DNA, 522 bp, Homo sapiens
aagtttttagttaaagatgagacaacagaaagggtagggggagtacaagctacatatactgtctattccatttcatgccctatgttagcctcttttaaaacatcatctcacgtgtcatatacttcttataagtaacaaaaacaaacccagcacccactccccaactgcttttatcattgagatcctctattaggaggaaagttagcagtaaaaacaagaaaaataaaccmctcagtttctctggagaatactacttgaaagttgagaatccatttataagatttcagaatgaagtaaattatttaaacataaaagaactaaatagctttatctcaattcccaatctcaaactctttaatttgctgacaaatttagatggtcccaaaataaagcacaagaaatttttaaaagtataagtcatggcttgatacagaaaaaaattagaatacttattacaatgatgactatcagtgcaatattaaaatattaatgttttataatcttatatttaaaaattattaa

SEQ ID NO: 620185 - DNA, 594 bp, Homo sapiens
gaatcatgataagtttatagaatgatttttgaaaaactgacagaaatatttagtcacctaatctatacctccctatttatttaggtactttcaaacttgtatcagccatgttttacagtttatgcaaatcttgtacatcttttttcatatttttccctaagtatttcatactttcagtatagtgaaaaacagtattttaaaactagccacaaattcttttcataagaatgtaactaatgccagaaaatctgaggtggaacagtttcatccwaaaagcatgcccccactccctctgaaaaaagtcccttgtgccagaaaggttggggaccactgctatagttgattcctcaatgacagctgatgaattacgtctatatattactggattgtatcacggaaagaatgcaactgttcagttgtcactgcatttaaagagtgtaaaatatcaaagctaatttaagattacgtatgtctggatgttgaatcataatatgttaggtgaaagctacttcaatatttcatatctcatatctggattacttctcgtgaagtgttattagctatcaacaacaggcagaggagaatgcattaact

SEQ ID NO: 620186 - DNA, 540 bp, Homo sapiens
attaaaagaagaagaaattaactttatgacatgggtttttagcagtaaaatagcttccagcagaaataatagtaataataataataataataagactacaaaagttctaattggggaatacaactgatgtttcgaaagaagagcaaagagttctgtgtgtgtgggccagggttaccaatagtacaatagtaaacagcgaggtcagagtgatgatgggttcctacttgctgcattttttttttttttttttgagacggagtctctctctgtcggccaggctggagtgcagtggcgcaatctcggctcactgcaagctccgcctcccgggttcacgctattctcctgcctcagcctcctcagtagctgggattacaggygcctgccaccactcctggctaattttttttttgtatttttattagagacggggtttcacagtattagccaggatggtctcgatctcctgactttgtgatcccccccccgcctcagcctcccaaagtgctgggattacaagcgtgagccaccgcgcccggcctg

SEQ ID NO: 620187 - DNA, 632 bp, Homo sapiens
gaatatttttatttatttacttattttttgggacaggttcttgctctgttgcccaggctggagtgtaatggtgtgaacacagctcactgcaacctctacctgctgtgctcaagttgttctcccacctcaacctcttgagyagctgggactacaagcatgtgccacaatgcccaactaattgtgttgatttttaatagagacaaagtcttgctatgtttcccaggctgaactagaactcctgagctcaagggattctccctgctcagcctcccaaattgctgagattataggcgtgagccactgggcctggcccacagtaaacattttaatccaaaatgttattgcatgtggttctcctcgattttttgtgttttttatgaaattcaaatatattttataaggtggcctctagtgtgcacaattctagtgataaatttagaactaaaactgtaatcttctcatgtatcaagacattagcattatggccagaaatactggaaaaattttactgagcatttcaggcttttatttgacaactagctgtatgaaatacaaaatataaatgttttgatatagggattatatgcatctagattttgaaatatgacaacacaaactcaaaaaatgagacc

SEQ ID NO: 620188 - DNA, 562 bp, Homo sapiens
tgaattttcttcttaaacactattttgagttgtaagacrgtttggtggaaacagcaagtatggtggacatctgcaaatctggagaagtgagttcagcctgcctctgcccggagttctctgtaattctaatcccactcactctgactctcagatccccacctgtgtgggtaaaatgtatgactgcattatctgttccagctctaaacttctgtaatttcatttccagtgttattacagaaaatcacagtgtcgcctcttttatgtctcagcttttatgtctcatatgtttatgagcaagtgggaacagcggaagtaggaactgaaagtggggtaagtattcagaaaagggaagacacattttctaaatagggtaagttgctgtgattttgtgtcacttcgacagtgtggcttttaggatgttgtcaatccccaaaccttaccactgtatgattcctacccaccttgccacccatactgcaatcacggaatctcaatgtctgctaaataaattttgcgattttgcaagatgtcctttagattatgtctactactcaggaagctt

SEQ ID NO: 620189 - DNA, 619 bp, Homo sapiens
tctgcagttgtagaaagaaactcacaacttaaatctaccatcccagtttggggccagcattctattatacatcctagtactctattacattgtttcatctgaaaggtattatcctgccttaatttccaattcaaacactccattcctaattctagagtttgctcaaaggtcatattctttacaaagactataaaactcacattttctctcttttttgacatctgataacactttctaactaattattattattattactaatcaatgcctaaggtaattaatctttggctgcctcaagtgtgagctcctccaggacatgacctatttttttcttcctcttttatccctagtgcttaattccacgtcccatgcattctaggtcttaaagcttttatgcttaataaatattaaattaatgagctgggattctggaaatctaaatatggagtaaaaatcaactctaattgtgtaggattgaaacaaaactatataaattartttatcttattttctgtgtatatgttgaaggttacatgtacattttcaaaagtagatactgatttaaaaggtgagatcataaatatagatgtgaaaaatcatctttatatgtaaaaacaat

SEQ ID NO: 620190 - DNA, 566 bp, Homo sapiens
tccccctgtctacacttaccaacatcccaccatctgcatcatcatccctttattaggataaaaatgcttccagttgtttagggtagtgatatggtttggctgtgtcctcacccaaatcccatcttgaattcccacatgttgtgggagggactgggtgggcaataattgaattatgggggcagtttctcccatactgttctcttgggagtgaawaagtcgcacaagatctgatggtttgaataaggggaaacccgtttcacttgactctcattctctctcttgacacgaccatggaagaagtgcctttgggtttctaccatgatggtgaggcctccctagccacatggaactgtaagtgcattaaacttcttccttttgtaaattgcttagtcttgggtatgtctttatcagcagtgtgaaaatggactaatacaggcagacagcaaaacatggaattaaactctactgcagatctgtaactaactggtgatagttaatcaaacatatatctattgagcattttctgtaggcgaggactctctgggagccaaagctgtacagtcagc

SEQ ID NO: 620191 - DNA, 566 bp, Homo sapiens
tccccctgtctacacttaccaacatcccaccatctgcatcatcatccctttattaggataaaaatgcttccagttgtttagggtagtgatatggtttggctgtgtcctcacccaaatcccatcttgaattcccacatgttgtgggagggactgggtgggcaataattgaattatgggggcagtttctcccatactgttctcttgggagtgaaaaagtcgcacaagatctgatggtttgaataaggggaaacccgtttcacttgrctctcattctctctcttgacacgaccatggaagaagtgcctttgggtttctaccatgatggtgaggcctccctagccacatggaactgtaagtgcattaaacttcttccttttgtaaattgcttagtcttgggtatgtctttatcagcagtgtgaaaatggactaatacaggcagacagcaaaacatggaattaaactctactgcagatctgtaactaactggtgatagttaatcaaacatatatctattgagcattttctgtaggcgaggactctctgggagccaaagctgtacagtcagc

SEQ ID NO: 620192 - DNA, 584 bp, Homo sapiens
agtaaggcagtagccttatctgtggatccgtcttcacagacagctcagattaacagattaatctcaggatttagagaatgaagaagaatgagggagatgcccattccttctattggagaaaaggacaagctaaaccatgtatgagatttaagaacagggcctacttactctcttctgagttatgcctatgagtgggtcaatttgcccaggtgtcagatgaggtagagttaaaacacctctgcaatttctagactaaaatttcattttgaaaatttcaaaagtcagttgatatcagtttataagagaagtttcccccaaaaggacattgctctgtcattttaatatagatatatttgctaaacaagaaaaactctgctcccatgagaggagtgttattattggtgtgtaaggggtctttgtaggttrcagatatagttaatagttcctatgactaaatgtatagttagtcttttcaaaaaccttacaagtcttttacttaatacattatacggttgatatatttaaatgtgtagtcactctgcacatcatcttatatatatcacccagcttagaggaccagacaa

SEQ ID NO: 620193 - DNA, 615 bp, Homo sapiens
atcaatacaaataaagacaaaaaaagaaagaaaaaatatagtacaaatgggaaaaacagaaagcacaaaataataggatagaaatgaatccaaatagttaatcacagtaactataaaaggactaaaatttccaatgaaagacagaaggttttttacttttaaagactgtttttttttaagtacatccaaaagctctttttaaaaggragacttaaaacataagtacagtgctcacttggacagcacatatacaaaaaccagaattattagcatgattcctgcataaagatgacatgcaaattagtggtgttgtctatgtactgtacaattaaagatgtttaagaggatacatctttaaaaaaaacacacaaggacaggaaagttgaatgtaaaaaagattggcatatgttaatcaagagaaagctgatacagagttaataccaaatataatacactttaaggcagataacattactagaaataagaaattcactccttatttataagaggttgaattcactgggaaggtataataattctaaacttatatgcacctaatagcagtttcaaatacaggcaatcttcgctatttggggtttccatatttgcaaattc

SEQ ID NO: 620194 - DNA, 554 bp, Homo sapiens
atgttgacagctgtcacctcatgaaatgcttacatctccatattttattgattaacccagaaaagtataaaatacatctttcatttaatatttaaaagaaaaatcaggccgggtrctgtggctcatgctgggatgactaatcctagcactctgtgaggccgaggcgggcagatcatgagatcaggagttcgaggccagcttggctaacatggtgaaaccccgtctcttactaaaaatacaaaataattagccaggtgtggtggtggacacctgtaatcccagctactcgggaggctgaggcagtagaattgcttgaacccgggaggcggagcttgcagtgagctgagattgcgccattgttctccagcccgggtgacagtaggagaccccgtctcaaaaaaaaaaaaaaaaaaaatagcagaaaagtaaagatcaatatctctttgattcagagaatcttgaatcattttatctaagacaaatgggtagatagttctgattagatcataaataagccataaaatatggctcaaagagctcaaattttggatttt

SEQ ID NO: 620195 - DNA, 631 bp, Homo sapiens
attcacatcatctttgaatactactgaattatttttagtggtgtaattgtgcaacgttttgcactgtagtatcaaaagagcaactttctgtggtatatctgccaagrgtaactggaaatgagaaaaagtagacagaccgaagttgaagttattctgttctatttatcaggaattacacactggagtacaatgggtgacagaacattgtgttttaagcttgctcttaaaaagtttgaacgtaatgataatgagtacatacatatgtacacatatatgtatacaatatatatgtgtatatatacacacatatatatacacacacatacaaatctgtgtatatatctctctctgtgtatacacacacacagagaaaaagataaattagatatagagcaaatgacatcgaatgttaacaactggccagtctggtgaaggagattacatgaactatttatacagcaaatttggaattatttgaaaataaattattttgtaaagtaatatatatttattgggcatttgcatatttttctattaattatctatttatattatttacccatctttctgaattgctcatttttgtttttgttttttgtttgtctgttttttttgctggattgtaagagtt

SEQ ID NO: 620196 - DNA, 503 bp, Homo sapiens
agattctcttttctgcttttcatcacctgaaatgggttctattacccataaccaaaatagctttaattaaacccatcagatgcctattatcaaaatagaaataatatcaaatacagttacaattccacaaacattaattgagcacccacaatgccctgggatattcagaacttagatcacatctagacaaatattaaaccaattccagtttacatttttaagctaaactgtcaaaatatacaaaaatcctgggctgggcacagtggctcacgcctgtaatcccaacacgctggaaggccaaggtgggaggactgcttgagcccaggagttcaagaccagccgggacaacacggcaaaacctcatctctacaaaatatcaaaaacttagccaggcgtggtagcacrcacctgtggctcctagctagtgagggggctgaggcagaaggatcacttgagcctggggagtagaggctgcagcaagctgtgatcacaccattgcactc

SEQ ID NO: 620197 - DNA, 460 bp, Homo sapiens
gttttttaggtgccacttaggacatttcgtagactggctaggaaaataattatttaagcaatgctggaaaactgtgaggtagctgttgccttgacaaccagaaaactgttctgtttgctcaacaaagggatggtaatttagtagtttaatttcctttttggcatggaggtgctacataaaaacatcttattttagcctctgagatgatccatactaytgatcagaattagagaagcagagcaaaaagaaaaggcaagagtttttttttctggctacgtatagatagacatgcatatttatcagggttggtgttggtcaaaagaatcttagttaacctgctgacataatcttttttatgtctctaaattggaccaaagtaaattaacctcaaaatactggtgcaatcttggtacactaaggggtcgtgatacacttttattatggagcatccccacaaaga

SEQ ID NO: 620198 - DNA, 599 bp, Homo sapiens
ttccatattttctgcagcccattttaggtaacagggccatagacattttccctctaggcctacggagttttctatgtgcctttaatacagctttcaggagcctctggtttttgctctttaggtctaagatgggacaaattctaccctacccccaggtctttttartcccttgaaacaaacatgcccctactttcctggacattgagatagggacagagatattgcttatgtttcttcttgttatgtactagggagagactgtggtctcttatttgaaaattactatgtgtgattcttaaacaactctttagaaattttctttcctgtagcaagtgaaatgactaacagatacttaaaatagaaatcacactgtgtgatataaatctctctctctcttttatttttctgctttaaagagagcaaccttaattttcggtggggagagcatacatttaatccatctgtttgcttgacagaaagtgaatccggattaatttattttccctgtttaccaaataaagtcatttagtaatactctatagtgatacagtattaccaaaataatatttcagattacatagaaattttcaccataggag

SEQ ID NO: 620199 - DNA, 555 bp, Homo sapiens
tgattattaatgggaattgagtgtagtaatttaggacttacttttttttttttgaaatggagtctcactctgtttttcaggctggagtgcagtggtgcaatctcagcttactgcaatctccgtctcctgagttcaagcagttctgcctcagcctcctgagtagctgtgactacaggtgcccaccacmacgcctggctaatttttatatttctttaatagagaaggggtttcgccatgttggccagcctggtcttgagaaattcctgacttcaggtgatccacccgccttggcctcccaaagtgctgggattacaggcatgagccactgcgcccagccacattaatgttttattatttttacaaggataatatgctcatagactgtacaactaaaggccaatttaaaatttatttggaaaaaatacattgttttgtacataggtccctgtaaaggcagagtaagactggaaaaataccctaaataaggagacagtagttatgtccccgagggatgtgggaacagagaagataaaaggagacatttgctttttgtat

SEQ ID NO: 620200 - DNA, 555 bp, Homo sapiens
tgattattaatgggaattgagtgtagtaatttaggacttacttttttttttttgaaatggagtctcactctgtttttcaggctggagtgcagtggtgcaatctcagcttactgcaatctccgtctcctgagttcaagcagttctgcctcagcctcctgagtagctgtgactacaggtgcccaccacaacgcctggctaatttttatatttctttaatagagaaggggtttcgccatgttggccagcctggtcttgagaaattcctgacttcaggtgatccacccgccttggcctcccaaagtgctgggattacaggcatgagccactgcgcccagccacattaatgttttattatttttacaaggataatatgctcatagactgtacaactaaaggccaatttaaaatttatttggaaaaaatacattgttttgtacataggtccctgtaaaggcagagtaagactggaaaaataccctaaataaggagacagtagttatgtccmcgagggatgtgggaacagagaagataaaaggagacatttgctttttgtat

SEQ ID NO: 620201 - DNA, 586 bp, Homo sapiens
taaatgtctttttttttttttttttttttttttttgagacagagtctcgctctgtcgcccaggctggagtgcagtggcgcgatctcggctcactgcaagctccgcctcccgggttcacacctttttcctgcctcagcctcctgagtagctgggactgcaggcgcccaccaccaggcccggctaattttttgtatttttagtagagacgcggtttcaccgtgttagccaggatagtcttgatctcccgacctcgtgatccgcccacctcagcctcccaaagtgctgggattacaggcgtgagccactgcgcccagccttaaatgtcatctttttaataagacctatcctgaccaccaattctgcttaccttgtcctattttttcattttcatggctcttgttccatgaaaatgtttcagttattacttatgcattttatttactgtttattatcactccatgattagaatgtaaactccataaggaatgaccrtttaccctatttggttcactgatttatgtcaacagaccagaccagagcccagcatataaaaatactcattaatatttatgtaatgaatgaatga

SEQ ID NO: 620202 - DNA, 589 bp, Homo sapiens
tagtaaggaagacgagtgatcaccaggacttcaggcaggaaaggacaggctaactccactgttttgtggaaatgtagtcaggttcatgatcaggattgtccttatctacaaagctgctaacccccaagccttgaagggagaaaataaacactaggcaacaggaacacttcttctggatgggatacatcgatgctttgtccctgaagtcaggaagtgccttgccagtaggtgactgccttttaagttcttatttggcaaaaataccaataaattgataatgaacaatgcccccggacacccagagtgtcatgagttcaacagcaaagacgtcaactgtyctgcttgcccccaaacacaacgttatctaattcagcctctagatcaggaggtcataaggacctttaaggctcattacacacagtattttatggaaatgattgtcaatgctatggaacagaatcctgacagaatatcataaaaattgtgaagaattacaccagtcaagatggcatcatctttatggaaaaagctgtaaaagcccgttaagcccaaaacaataaattcctcctggagaaaactgtatccagat

SEQ ID NO: 620203 - DNA, 608 bp, Homo sapiens
gaaaccaataaagagattaggtgagggcagatacggtcaacactgagtaggagtgggattcggggtattattagtgcaatcacaggcatttgcaactggcagtaagatcctagagggaagagattatgtctcattttttcatagactcctcagcacccaagagagtgtcttttttgttaattgctgtatttaagggtaatcatggaattggactggactgcaaacatgcagcaaaggtctactcrtcttaaaatagataagataagaactagaattcctgtgcaggggtggagtgggatgagaacacacggctaagacatttccttccatttttaggctgtcaccctcggaaaacctggcaaggactctgtcacagtgacactcgcagtaacttacataccaactcttggtagccctgatcagacattttaaatcctccccatttcgtcatacctagtttctcaatgaatattgatttttttttttgtttgcttttgtttagttttgcttgttcttgatggacaaatacagtaattagatgtctagaggctctgcaaaggtttgcctgtgcatgcagtagaaagaacaagtggagagcttttttctca

SEQ ID NO: 620204 - DNA, 620 bp, Homo sapiens
caggaatcatggatgtcatctcagattcagctcaccacagcctctttaatttaatgcttgttctaaaaagagcagtatgcattctgctgattgctatccttgaagcacataagttttttttcctagaaatcagggctgctacttcaaagctgaagtaaatgtgtgagataaaggacaaatgagaaatagcactgtggaaacaaattatcattttacttccagttgtatggtgaccctggctaaccctctaactcccccaaaaaataatacctaaaaatgcacagcatttaaaaatacctctaatgcatgaattagctatcaatttaataagaaatacttaaaggcttaaagctaaatgaaaacacactcccatgatggtaagctaggcattgacwttggtgtttatttgcagattgttgaacccagagactgaatgtacttgaaagcaaggagacaatgaatgcccaggagcttcaaaatggaaagtcaaatagaagacccttcacataaagctagaatcccgccatgtaagaagcttttttttttcttttgttggaattcttcagagaaacagaaccaacaggataagagcagaaagagaactagagagggcgagagtt

SEQ ID NO: 620205 - DNA, 534 bp, Homo sapiens
ttgagctctaatgagcaaactcattcaaaatcaatggaatgattcataaataaaatgaataaactggacttcatcacaattaaaaagctctgctctttgaagagttttaagaacttttaaaatacattaatttttaagccacatcggaagaaaatatttctgaattaagtagctagttaaggacatgtgttgagaatatgtaagtgactcccaaaattaataataagaaaacttaaaacccaattgaaaactgggaacagtttgagcagacattttaccaaagaaaattcaagaatggctaataagcacatgaaaaggagtttaacagcatttgtcattaaggaaatgcagctcaaaaacacaatgagatatcactacatacctcttacaatggaaataaaaacatccaacaataccaaattctagtgatratgcacagctactggtgctctcatacattgctggtgggaatgcaagatactacagtcgcttttgaaaacagttttacagtcttataaattaaatacatcctta

SEQ ID NO: 620206 - DNA, 534 bp, Homo sapiens
ttgagctctaatgagcaaactcattcaaaatcaatggaatgattcataaataaaatgaataaactggacttcatcacaattaaaaagctctgctctttgaagagttttaagaacttttaaaatacattaatttttaagccacatcggaagaaaatatttctgaattaagtagctagttaaggacatgtgttgagaatatgtaagtgactcccaaaattaataataagaaaacttaaaacccaattgaaaactgggaacagtttgagcagacattttaccaaagaaaattcaagaatggctaataagcacatgaaaaggagtttaacagcatttgtcattaaggaaatgcagctcaaaaacacaatgagatatcactacatacctcttacaatggaaataaaaacatccaacaataccaaattctagtgataatgcacagctactggtrctctcatacattgctggtgggaatgcaagatactacagtcgcttttgaaaacagttttacagtcttataaattaaatacatcctta

SEQ ID NO: 620207 - DNA, 511 bp, Homo sapiens
tttttcaaatgtgtcattgactgagctaagggatgctcagatagctggtagaacatttctggatttctggggtgtgtctgtgagggtgtttctggaagagcctagcatttgaatcagtagactgtcaaaaagatcactctcactttactggcatcattcaatctcttgaggttccaaatagaacaaaaaggagtaggaagggcaaatttgctctacttttttgagctgggacattcatcttcttctaccctttgacattggagctccttattctcaggccttcggactccagtagtgcatccctcctgctcttgttctcagaccttctcccttggacctagagttacaccaataggatatgaatctatttatataactaacacacacacacacacacacacacacacacataaactgaattatgtgtgtatatatatatattttcyattggttcaatttctctggagaaccctaattaatataaattagtctcagggctcaaagaaaataa

SEQ ID NO: 620208 - DNA, 568 bp, Homo sapiens
ctagctcctgatggttgtgagaattaaataatgtatgataaatgtaacatgcttagtatttgatatgtcacaaatgaggtgctagccatattgtaacatattaagctgtaagaaattcaatgacctacctttctctctttctttctttccctctctctttcttttttctttttctctctttctctctctctctctcttaacagtgtcttgctctgtcacccaggctggattgcaatagtgtaatctcagctcattgcagccttgacctcctaggctcaaacgatccycccatctcagcctcccaagtggctgggactacgagtatggggcaccacgcctagctaatttttttatttttagtagagacagtgccttgccttgttgcccaggctggtcttgaactcctgggctgcagcaatctgcccaccttggcccccaaaagtgctgggattataggtgtgagttactgtggttggccattttttattcaactttgtatatccaatgggctagcttcttgcctagcaggcattacaaaatgtttaatgaatgattgaataaataacac

SEQ ID NO: 620209 - DNA, 621 bp, Homo sapiens
actccccaatgtccccattcctgagaggcagtgggggttgaacaaagaccctgcagacaaagtgactggaggtccaagaggttgtgctgctggtgctacaagagggagagccagctcacacctgttggctgggagatgacctctggctgtcctagaagctcgtctacttcattggttaaggagggattcttccatgcaggtggaaggaaatgagaaaatggacgttttataggcattgtaatctgtaaaaatwggagatatatttcactttcagaacggcatagtttttcatggccaggtgcagtggctcatgcctgtaatcccagtactttgggaggctgaggcaggtggatctcctgagctcaggagttggagaccagcctgggcaacatagtgaaatcccatctctaccaaaaatgcaaaaaaattagccagacatgtgcctgtggtcccagctactggggaggctggggtgggaggatcacttgaacccaggaggcagaggctgcagtgagccaagattgcaccactgcactccagcctgggtgacagagtgagtgagaccccattaaaaaaaaaaaggcatagtttttcatttttgtttttcaagggtataaaaga

SEQ ID NO: 620210 - DNA, 281 bp, Homo sapiens
caagggatttgccttctctgagcttcagtttccttctagagttgagatgtgggaattggtccatctctaatacgatcrtcagcctcacttaataagagtcctagctttgccgaattcttggccacgtgctagcagtgtgatcttaggcaagtcacttcacctccacgagagcactctctgaaagctagagatatggtaagcaaagtgccaccaaagtgcctggcacatagtggggcctcgatacaggcttattctctgataattacacgtgtgccagaggc

SEQ ID NO: 620211 - DNA, 587 bp, Homo sapiens
ccttcactctctctctctctctctcctgccaccaaaagaagacatgccttgtttccccgtcaccttctgccatgattataagttttcctgagacccccaagtcatgcttcctgttaagtctgcagaactgtgagtcaaytaaacatttccttgataaattacctaatctcaggtagttctttatagcagtgtgaaaatggactaatacaggtggttatgaattggtacctaccaacaaggtatcaaatccattgtttggcatttctgccatcaatgcaacgatctgcctttgtacttgaaggcattttgcttctgcacagtcttctattaagggaaatgataagccttatcacttaactcagtgctaacagttggaccccagctgatgctctgagagagtctgatgggacaccagcaaggaggacaggaaatggaacatgacagagacacactttgtctctagtttttctctaggggtaaaacaggcaaaattaacacatcttacctgtcaagtaaaattacaagaataacatgtatgtatgtaagtgaacctgtgtgaaaattcagacagactagttctagagttg

SEQ ID NO: 620212 - DNA, 566 bp, Homo sapiens
aagttcttcccacttgaaggtgtttccattcccattktccttttggaccactcaaaatggtaaaagcagaggcctaacgatccaattttgtgtggtgccaggatgccatgaagaaccatctgtgaaccagacttgagggttttttttttttctgaactagtcagagggaattctgaatgatgcccaggtgtttcctaggggctaactactaacatacagcaggagtaggcattgatatggtttggctgtgtccccacccaaatctcatcttgaattgtagcttccataattcccacatgttgtgggagcgtcccagtgggagacaactgaatcacagggggagggagggcaattaccgccatactgttcttgtcgtagtgaataagtctcatgagatctgatggttttataaggggaaacccctttcgcttggttctctcattctctcgcttgcctgctgccatgtaagacatgcctttcaccttccaccatgattgtgattcctccccagccatttggaactgtgagtctattaaacctctttttctttacaaatcactgagtct

SEQ ID NO: 620213 - DNA, 606 bp, Homo sapiens
atattccttaggatttctcaggtaattagctaacagcagaacccctttgatcacttaaatgacttctttacaattcaggcagagtaaattagtgaaaagctcttgcctgagagtctcctgactttgctccttagggcttgtcctggagtttgcaatcatgtctgaaagaaaaacgaagatggagcttcctcagtggcacatccttttttaagcattagggtgaattgggtgttacagttctctcgggcaagctgaagtgcacctggtcagtacttcgctcactatgaccttacagaaaccttgggatgttgctgcaatatagtattatgtttccttatcccactttgtaagttaagtcccttagaatcagacacgatttagcaatttcctctaggagcaaaggcaaacattctaagtatatacatataattgttgttaagatgacacatcctagccaagtggtcaagatgtattttaccctcattagtagatgtaagactagttcagacmagtgtaaaacacttgccagctttttatttttaggccagatatttctattttctgtcttcttggtgaatattcagtccattagtacacggtattact

SEQ ID NO: 620214 - DNA, 666 bp, Homo sapiens
tatatgttaatatcaggaacaggtaatctgcatgtctctacacagagtacatagcttaatgcatttaaattactggatgtctaaattataggttaattatgaagttatctacatatcatacatacttgtagaatcactttgcttatgtttaaagtatgataattagttctgggttgtcatgtacaaaggtgcctaaaaaataaattccaagttttacactttgagaaaaataaaataagaatatgaacacaggcgtcaattggaaaggggattaagcttaaagacaggcaatttttttgtgtgtgtcttacaamgttttatggactagatgacattcttaaggtattttaaaataaagttacattttttaataatcaggcatgtacttttagtcaaggaaggaacaatagaaggaaaaagtcctttatataacctttgaaagagtctctcataaaactgtaacagtgttatatactatttaaatcaggtggatgagaagttgttattaaagagcgtgacagtatctggatttgaaggtgttctctgctgctgtgagttttgtttgaaatgcttcattcatatttgtactttaaaaaaattacttttgcaccaacctaataaaactatattttcatcatgatattgctgaattttggctctagaata

SEQ ID NO: 620215 - DNA, 363 bp, Homo sapiens
gataatcgttggtttcttttccacattaatctatcatctctcaacttcattgattggaacatactaacttatgaaaaactcctcatgatcatgacttgatcctcaaacaaactgccttgaaaagatgaccatgcagcctaatgtgaatagaatgatttatcagaacagtctataatcttgctaagcaagcagccaagttggaaaatcttttctgcttcctatcttgtgaaacgaagggccgaaaatctgtgtgrccctgaatgatttgggaatcgcagtaaaatgaccccagtggatgaatggggtcattttactgaatgaataaaatgatgagtaatacaaaattgtcctgttaagctgctc

SEQ ID NO: 620216 - DNA, 559 bp, Homo sapiens
tgggaagggtaggagtaagggagggatatggatacattttttaagggatataaaatggcagctagataggaggaataagttatagtgttccacatcgctgtaggatgactaaagttaacaataatatatagttttaaatagctggaaggaggatattgaaaattcccaacacagagtaatgataaatgtttaagacgatgaatatggtaatgatcctttattaccatagagtgataagtgaccttatcactctacattttatgtactggaacaacattatgtaccccatgaatatgtacaattattatttgtcaattaaaaataaataataaaataaaataaattataaaacaaaaattsgcaaatatgaaataagaaaagacataacgggaatgtaaaaacaaacacaaatagctattaaaagatttacacataatcatttctttcccaaacaatcccgaagatggtgccaaggaatatactcagaattcagcaaagagtgaagaaaagctacaacatgaaaagagaattgagataagcagaccagtaacattgaaag

SEQ ID NO: 620217 - DNA, 499 bp, Homo sapiens
ttttctaatcactgagatcagtgacgccatgcacaggataagaggatatgcattcacttgtaagatcccaaaggttagaacatggattaacgaatagaagcaatagaaagactctttattccatatatggaaagtctgactgatactcagataagatcttaattcacctgtaagaagagcctcaagccaagcattcttgagtatttaagttactggtgaacaagtccttgaaagaggttgatttaaaggggcctcaagtttacatagatgattagacagaaaatctctcttggttctgaggttactattcctgaaatgggctgcctaacctaactgctstcttcaaaatacagctgggagtgagatgatgaatccctatttctatcaatttgtacattcctatagattatattgtcaatctttgtgcactgactaatattattcttcatccttttgtttagatattgttttccaataggattgaaaaactcttaagagg

SEQ ID NO: 620218 - DNA, 615 bp, Homo sapiens
cgacaacagatcatcaggcattacattctcataaagagtgtgcaacctagatccctcacatgtgcagttcacaacaggattcatgctcctatgggaatttaaagccactgctgatttgacgggaggcagagctcaggtagtaaagctcgctggcctgctgctcacctcctactatgtatcccagttcctaacaggccacagaccaatacctgtccatggaccaggggttggggacccctgactttaccyattcttatccttgtttcctcattggcagataataattgataataatagaacacataagtacatccattctgctataagggctgaatgaatttgacacataaatacttggaacaaatctttgcaattacagtaagtgcgcagtatgtggtagctctttcaaggtaacactgaggagagttgttcataatgttgccaaaaagttagtgtggttcagtgttttagtgctacagatgttgaaggttttcatcattatcttcctgctgagagatcatttcacttatatggtgggatgtaaagtttttgtatccattggctgggatcttcctatctcagggttctacacaaaggcttagtcagtgaggaaga

SEQ ID NO: 620219 - DNA, 615 bp, Homo sapiens
cgacaacagatcatcaggcattacattctcataaagagtgtgcaacctagatccctcacatgtgcagttcacaacaggattcatgctcctatgggaatttaaagccactgctgatttgacgggaggcagagctcaggtagtaaagctcgctggcctgctgctcacctcctactatgtatcccagttcctaacaggccacagaccaatacctgtccatggaccaggggttggggacccctgactttacctattcttatccttgtttcctcattggcagataataattgataataatagaacacataagtacatccattctgctataagggctgaatgaatttgacacataaatacttggaacaaatctttgcaattacagtaagtgcgcagtatgtggtagctctttcaaggtaacactgaggagagttgttcataatgttgccaaaaagttagtgtggttcartgttttagtgctacagatgttgaaggttttcatcattatcttcctgctgagagatcatttcacttatatggtgggatgtaaagtttttgtatccattggctgggatcttcctatctcagggttctacacaaaggcttagtcagtgaggaaga

SEQ ID NO: 620220 - DNA, 615 bp, Homo sapiens
cgacaacagatcatcaggcattacattctcataaagagtgtgcaacctagatccctcacatgtgcagttcacaacaggattcatgctcctatgggaatttaaagccactgctgatttgacgggaggcagagctcaggtagtaaagctcgctggcctgctgctcacctcctactatgtatcccagttcctaacaggccacagaccaatacctgtccatggaccaggggttggggacccctgactttacctattcttatccttgtttcctcattggcagataataattgataataatagaacacataagtacatccattctgctataagggctgaatgaatttgacacataaatacttggaacaaatctttgcaattacagtaagtgcgcagtatgtggtagctctttcaaggtaacactgaggagagttgttcataatgttgccaaaaagttagtgtggttcagtgttttagtgctacagatgttgaaggttttcatcattatcttcctgctgagagatcatttcacttatatggtgggakgtaaagtttttgtatccattggctgggatcttcctatctcagggttctacacaaaggcttagtcagtgaggaaga

SEQ ID NO: 620221 - DNA, 553 bp, Homo sapiens
attactgggctcggggtgccccctaaagcagacacagctaacatcacaacamccaagtcctatctgcaaagttatcctgagaaggatgggtacaaaggagcccaggcagtgacgactacaataaatacttaactctttaatgcccagacacagacaaacatctacaactatcaagacactgttgatagttgtaggaaaaaaaggacctcaccaaatgaactaaataagccaccaaggattaatcttgaagaaacagagatatatgacctttcggacagagaattcaaaatatcagttttgaggaaacccaaagaaattcaagagaacacagagaaggaattcagaattctatcagataaatttaacaaagataatgaaataattaaaaagaatcaagcagacattctggagctgaaaaatgcaattggcataatgaagaatgcatctgagtctcaaaagcagaattgatcaagctgaagaaagaattaatgaacttgaagacaggctgtttggaaatatgcagtcagaggagaaaaaagaaaaaagaataaaa

SEQ ID NO: 620222 - DNA, 562 bp, Homo sapiens
agctgggactacaggtgcacactaccatgccaagctaayttttttttagggatgggatcttgctatgctgcccaggttggcctgaaacccctgatctcaagtgattcttctaccctggtgtcccaaagcactgggattacaggcatgagccaccatgcccaatctaaatgatatattttatatttaaaaaaactgtttaaagacaaaagctctaggctagagtgtctgctgcagaggagcatcaccttgagtacactgaatggacatctcctagatgggaattttctcaatgccctgtgactagatggataacagggcagagagtggagatggcaggagagcttcctgtgttctctaccctttgggatagcaaggctgtgtgaatttctcatgattgcgtagagatcatgaaacttacctgtgagccaacttactggagtcccagtcacgaaggccatctactcactgagcaggcctcagcaataaaagtctgccgggagaccccctgtggcataaactggtgtgagaggggcttgtagcagtactggagcagcagctgcat

SEQ ID NO: 620223 - DNA, 562 bp, Homo sapiens
agctgggactacaggtgcacactaccatgccaagctaacttttttttagggatgggatcttgctatgctgcccaggttggcctgaaacccctgatckcaagtgattcttctaccctggtgtcccaaagcactgggattacaggcatgagccaccatgcccaatctaaatgatatattttatatttaaaaaaactgtttaaagacaaaagctctaggctagagtgtctgctgcagaggagcatcaccttgagtacactgaatggacatctcctagatgggaattttctcaatgccctgtgactagatggataacagggcagagagtggagatggcaggagagcttcctgtgttctctaccctttgggatagcaaggctgtgtgaatttctcatgattgcgtagagatcatgaaacttacctgtgagccaacttactggagtcccagtcacgaaggccatctactcactgagcaggcctcagcaataaaagtctgccgggagaccccctgtggcataaactggtgtgagaggggcttgtagcagtactggagcagcagctgcat

SEQ ID NO: 620224 - DNA, 471 bp, Homo sapiens
tatgatagatatgataggtttgctgaatgggaatatgcagggtccatctaaagaatacttttatgaagtwtttagggtgaccccaaaccaactctacattgtcaagccattgtgggaatattgtgggaatatatgatatacaaaattgggcataaatgatttttaaaatcccataaagatgtttatatctatttctagggactcactcaattaccttgagatataaatttactagcactattctgaaagagtaatagtgagccttttaacttcaaagttggtaagttaaacaaaggaacattaatagctaatgatttattcaaaattaagtacaggccgggcacagtggctcacatctataatcccagcactttcagaggctgaggtgggcagaacacctgaagtcaggaattcgagacctgcctgaccaacgtggagaaaccgtgtctccacaaaaatacaaaattagcc

SEQ ID NO: 620225 - DNA, 543 bp, Homo sapiens
atggtagggaaatgctcatgatcaaatgctccttttcataattaccacatagctgtttaatgatgactggcccagtgagctctgaaattctgtataaagagaaggcatccccattgccaaaatgaactgaaatccatttctgagtcctgtaggataattttatataacatttacattttttgcaaaaaatttgaagacataatactaggcatatagtagatattaatgaagtttactgaattgaattattgatctggtcatcacttgatgtcagtggggttgcagataactccctagaccaagtgtcctggtctgtttcgtgttgctgcaacagaatacctgagactgaataatcgggtttatttagctcacagttccacaggctgggaaattcaagggcctggccctgccttccactgagggcttctaggctgcatcacaacagggcaaagaaggtcaaaggggaagtggacacatgcaaagagacaaggcctgaggakcatcctggttttgtaagaatctcccctctagggaacttgttta

SEQ ID NO: 620226 - DNA, 552 bp, Homo sapiens
actctctgatatacagaagaaataataagtaaaatgacaagttgttttyttttttggtgggggtgtggggaagtatgatgattctctattctcacatatccatggaagagcactggtaatgaaagcagcccagttggttcagcttttagcaaagaataactcttgggagagaagtggatattggcagcaaaatatagaacataatcagataaaggaggcacaacaaatatctactttataaatttctaggatgttaaatagttatgtctatgtatacaagttggctctccataactttgggttccacatctgtgattaaattaacagtggatttgatctgatccctcaaaacctgagcatacaggacctgtggatatggaggaccaactgtaagggacttgaacatcaagagttttgatattcttgggggttctagaatcaatcttccatggatactggctgtatatatacagccatccctcagtaccacatggaagattgtgtgtgtgtgtgtgtgtgtgtgtgtgtatatacatatatatatacacatat

SEQ ID NO: 620227 - DNA, 552 bp, Homo sapiens
actctctgatatacagaagaaataataagtaaaatgacaagttgttttcttttttggtgggggtgtggggaagtatgatgattctctattctcacatatccatggaagagcactggtaatgaaagcagcccagttggttcagcttttagcaaagaataactcttgggagagaagtggatattggcagcaaaatatagaacataatcagataaaggaggcacaacaaatatctactttataaatttctaggatgttaaatagttatgtctatgtatacaagttggctctccataactttgggttccacayctgtgattaaattaacagtggatttgatctgatccctcaaaacctgagcatacaggacctgtggatatggaggaccaactgtaagggacttgaacatcaagagttttgatattcttgggggttctagaatcaatcttccatggatactggctgtatatatacagccatccctcagtaccacatggaagattgtgtgtgtgtgtgtgtgtgtgtgtgtgtatatacatatatatatacacatat

SEQ ID NO: 620228 - DNA, 554 bp, Homo sapiens
tttatgaaataggaatatttgcagtattgatgcataacattcargtgtgacaggtggcctcaggctgtcagcatgtagtgatgaataactcactgaaattttgatgaatgactatttcctttatttagcagaaggaggagacagccacaatggggagaattggtcttctggcatacaaggtagtagaaggatttggttactcaaggatgagagtagcagagctactaccatccagcctggagctttatcaatgcagaacagaagtagcagtggtgttttctctacagttgctccatttgggtcttactcctagatgatcagttatagagcctgtcttcctggccctcttagagacctgggtgctacataaaatcccttaacaaatttgttttctattttattctagagtggattctaaaaccaactgacatagaaataaagagtcaatggatttaattacatgggggtcactgcaaccagagaaggtctgggctgttaacagagacataggatggtggactgattgaaggcgggtgagggacagagaagtgagc

SEQ ID NO: 620229 - DNA, 591 bp, Homo sapiens
aaaagattactggacttactctttgaatttttgtcttttaaaaatatagacataattcagcttatttaaacccacctacacaagtcctgtgttcaaattttacggggcatagaaccgttcactttgggtacttctttgcctgtataaaatgctgtcatgttgatatatctaaacaccaaggtacaaatttaactatacgattttgaaggaagcasttgaagactcaggtaacactgctttaggacaagtcaaaagagagtttgctgtttggcttttgacactgaagtttcttaccaatatgtttcatgaagctctctctaggaaactacagtattttggtatcagttctctaaagcaactgcctgtgagttaatgtggttgttttgtcacagcgtgccttttgtctccacccgcctccagtcccatctttactcattctgccttttggataaaacatgtacaattatatatggcttggtgcggaatgggcttgggatgccacaaaactaaagtggcacacttaaaaaatacctctcagctacagagtcaaataagacttggaaatgctagaggtcagaacattgctcacaa

SEQ ID NO: 620230 - DNA, 502 bp, Homo sapiens
tatagtagctgctttgtgcatgaggtcctaaatcacactcaagttagtgatgtctttgaacagcatgcagttgagtgatgggttagacatgggttaaatttatgcacacstttagaaaagtgcattccatcagaatgtctgaatttatctaaataaacgatttaatcttggtttatgataaatataatactactctttaattattgtctatttgtggtttacacatatgaatcccagagtatatctttcactcggtctgtgttggttataaatttaagtccagggaccttagattctacatcttacatgtctctcaaagcatagaccacagaacaatttattaatagagacttgttctctgaataaatggctgaatgataaaattaaataaatattctaaaaaatttaacagtgtggcaagcctaaatagtgaggttaggttaggttgatttttttttaatgcaccattaagtaaacaacctgattcttcatacactagaat

SEQ ID NO: 620231 - DNA, 502 bp, Homo sapiens
tatagtagctgctttgtgcatgaggtcctaaatcacactcaagttagtgatgtctttgaacagcatgcagttgagtgatgggttagacatgggttaaatttatgcacacgtttagaaaagtgcattccatcagaatgtctgaatttatctaaataaacgatttaatcttggtttatgataaatataatactactctttaattatygtctatttgtggtttacacatatgaatcccagagtatatctttcactcggtctgtgttggttataaatttaagtccagggaccttagattctacatcttacatgtctctcaaagcatagaccacagaacaatttattaatagagacttgttctctgaataaatggctgaatgataaaattaaataaatattctaaaaaatttaacagtgtggcaagcctaaatagtgaggttaggttaggttgatttttttttaatgcaccattaagtaaacaacctgattcttcatacactagaat

SEQ ID NO: 620232 - DNA, 585 bp, Homo sapiens
aaccagatgaaatagatactattataattatcctcatttgtaaggaaactgagctgcagacagcctgaataaccaagtaactagctcaaggtcatacaactgcaaagtggtagggtgtggatctgaatcttggcaatctttctctagaggctgccatgctatcactttgtgctgcctttcagctgagaatggaaatggtaggcaagggcccaaaccatgcaaaagctagtaaaatggctttcttctacaagcaatatcaaattcgtttctcaaggcatttctctaggccagcagatcttacctaacccatttggttaggagaccataggaaaatctgatgaaagatgtagacagcctcatcataatgaatgtgttcaaacacatacacaaatttacatatgttttttgatggctcacagacaccctagyccatttataatctccttagtagtccaaacattgcagaaaagcaatctgtgggctgcattttcccctcctgctggcctcctgcctcctatctctatcttagatacttttgttgattcagttcttgctctctgccatcttacaagaaatttgcaagct

SEQ ID NO: 620233 - DNA, 544 bp, Homo sapiens
gttttatgtttttttatctgaggttactataagacttgcaaataccatcttgtaacccattattttaaactgatgataacacttacttgataaacaaagaagctaacaagtaacaagaaaactaataaaaactctatactttaactttgttcccctctttttaactttttgttgtttctctttatgtcttattgtactatgtctttaaaagtttttatagtaataattctgattggttcattatttagtctttctacttaagacaaaagtaatttacacaccacagttacagtgctgtaatagtctgtgtttttctgtgtacttatattaccagtgagttttataccttcagatactttcttcttgctcattaacatctttttctttcagattgaaggacttgctttagcatttctcataggacaggtctgtatagatgaaatccctyagctttcatttgtctgggaaggtttttattcttcttcacacctgaaggattttcagtgaatgtactccttcagcattttaaatatggcatgccatt

SEQ ID NO: 620234 - DNA, 348 bp, Homo sapiens
cttgattgtttcttttgctgtgcagaagctttttacattgatgtgatccaatttgtccatttttactttgggttgtctgtgcttgtggggtattactcaagaaatctttgcccagtccaatggcctggagagtttcttcaatgttccttgtagcaattttatagtttgaatcttagctttaaatttttaatccattttgaattgatttttatatggcaagagataaaggtctaattttattcttctacatatggatatacagttttcccagcagcatttattgaagagattgtcctttccccagtgtatgcctttgtyaaaatgtgttcactatagatgtatggattt

SEQ ID NO: 620235 - DNA, 508 bp, Homo sapiens
gaaggatctgcccccatgatccaaatatctcctaccaggccccacctccaacattagggattacagttcaggagtaatgtttaatttaattatctgagccaacctatgaggcaagtattaatatttcaattttgtatttggaaaaagcagatgctcaaatagctggttcaatatttcatmgctaataaatattgcaggtaggatttaatcctagttccactttactttgaatctcaggctctttccactataccaaccctcttcttacacattttaagggacattttcaatatagagctttttatcttctccaaggctgaaatgcagaaatattccaccatctgctttaccttttttcttacgtctaaagacacttctcgaatagaataagaactttattcaacagtgttttgaatacctactatgtacatagcaccctgcaaaccaagatattttacatatcctatatctcatttaattctcatgatgatccatgcagagggcaagc

SEQ ID NO: 620236 - DNA, 466 bp, Homo sapiens
gttcctcaatgtgttttgtagtagttttatagtttaaggtagatttaagtctttaatccactttgatttgatttttgtatgtggtgagagataggggtttaattttcttcttttccatatggatatccatgtttcccagcaccacttattggctattctgggtcttgtatcattctatatgaatttaggaatttttttatgtttctgtgaataatttcattggtattttgagagggattgcattcaatttgtagattgctttgggtagtatggacattttagctatattaattcttccaatccatgaacagggaataattttctattttttrgtgtcttgttcagtgtcttgcataaatgttttatagtttttattgccaagattatttacttctttggttaagatcctcaaagagatttagacccctgcacaataatagtgggagactttaacatctcactgaca

SEQ ID NO: 620237 - DNA, 434 bp, Homo sapiens
taccatgtgcccatcactcagagccatggcctggcagcccagtaggatgccacaaatgctgtgaatagacaccaatcccggctggatctcacagccagaacacacgggtctaggaataaacagtratgtctgaatggctcaagtcccatctccgctgccacaagtcccgtctccactgccaagagtcccgtctccgcctccttggaccctcctgtcaagagagctggtccaaaggccgggtgtggtggctcacatttgtaatcccagcactttgggaagctgaagcgggtggatcatgaggtcaggagttcgagaccagcctggccaacacagtgaaaccaaaccccatctctattaaaaatacaaaaattagtcgggtgtggtggcaggtgcctgtaatcccatctacttgggaggctgaggcaagagaattc

SEQ ID NO: 620238 - DNA, 580 bp, Homo sapiens
aattcccactgtattcatcatttactgaattgctcacacaccagaggtataatccaatgtaaatgatctcatcacccatcagtatgagggctcaaaaattcagcttggcctcaagctaaaacttgacatttcaaggttttcaaatccacagtaagtaagcagtatgttgatgacttccaaacgtctcttctgaaacagcaccagcttttgagaaatgcaggtgtttgggatctagaaatagaagtggccagctgcccttgaggtgcttggggcacagttccatatttcctacccctgatttggccctgagcaaggaacattttgtgcagaaaataatagagttgacaccatttgcattctgctcatacaaatactaaagaattaaatttaaaaggttcattttaaaagtatcccttcttgcatttcactggcattgctctatgtggaagacataaggcattctcatgctgtgaaacagaagacacagagactctccagattggcagagaatttgagagaccactcatgcatgaacacacyccaaataaaggggtattggacctgaggtaagttcactagc

SEQ ID NO: 620239 - DNA, 450 bp, Homo sapiens
ctttgggacagtttaaagaacattctgggtaagttctaagtcaattttcttgaccctttcattttacagacatggaagcccagagagggtatatgtcatgtcatacccaacttaacagtaaattaatgaaaaaaytaaggccaattagatactctatattctaagatcatagtcctatcatgtatagtactatattattaaagatattctttctcaggtatatgaaagtattttagtctatttacattactaaaaaggagtacttgaggctgggtaatttataaagaaaacatgtttttttggctcacaattctatagactgtacaaaaagtgtggcactggcatctgcttttggtgagggtctcaggaagtttacaattatggtgcaaggtaaaggaggagcaggagcatcacatggcaaaagggggagtgagaaagaaagtggggtgc

SEQ ID NO: 620240 - DNA, 522 bp, Homo sapiens
cttattgtcccaattttgtatcagtttaatctcaagtaggtgtgtgtacatagccctagcacacagagcatatttagcattacatttaccttctgaagcatatgtacctttgcaaattatccagttattaataaaatttagtagtgaacactgtggcgcaagtgaatgcagaagattgtctgatagtcgctgactattatgcaaactcctttgattgggcttcttagctttatagacttttctcatgtatcacatacatcagtgcattttaatatcttatttartaaaggctgaaaaagaagactttaatggatgcatggatcagcatcagggacagaactgaaaactttcagggcctgagacttgcatttcactggtctatggtaatgaattcatgagtttggatctaaagtattgattttatgattaaagttttcttcccccaatgctatccaaataataatagaaagcataggaaacggaatttaaaaatgtgcaaaaaaagtgagtgtgtcttacagt

SEQ ID NO: 620241 - DNA, 522 bp, Homo sapiens
cttattgtcccaattttgtatcagtttaatctcaagtaggtgtgtgtacatagccctagcacacagagcatatttagcattacatttaccttctgaagcatatgtacctttgcaaattatccagttattaataaaatttagtagtgaacactgtggcgcaagtgaatgcagaagattgtctgatagtcgctgactattatgcaaactcctttgattgggcttcttagctttatagacttttctcatgtatcacatacatcagtgcattttaatatcttatttaataaaggctgaaaaagaagactttaatggatgcatggatcagyatcagggacagaactgaaaactttcagggcctgagacttgcatttcactggtctatggtaatgaattcatgagtttggatctaaagtattgattttatgattaaagttttcttcccccaatgctatccaaataataatagaaagcataggaaacggaatttaaaaatgtgcaaaaaaagtgagtgtgtcttacagt

SEQ ID NO: 620242 - DNA, 559 bp, Homo sapiens
ataatttaaagcatgtagatcttggtaaaaattttatttcttatattaattaagggctttaaacagagtagtgacattactgaaattgcgtttttaagtgctgactattcttaaagaatgacctggagaaagataaaagttgttactgagagaattatgaagctcctgccattgttcagtaaacagatatgatagcttcatctaagatgacaataaaaacagaaagaagtagatagattcaagttgggaagctggcttatgtgcttaaacttcttggtagactagatgtggaggatatagatatggagggcaggaggaggwgtactgagagctgaaggtttgatttgggttagaagaagggagatagaaaagacagctataagtgtaaaattacccttatcagttgacattatgctctgactgagatgtcctcattgcttcaaggaatccctactgggagaaagtaggaaaccatatatgtaagcaggatgagcttggcccaaatacactgcccttcttgtctttttctgatggatatgaagaatctgatggtctagat

SEQ ID NO: 620243 - DNA, 594 bp, Homo sapiens
attttcctatcacatgggtaaaaggagaacaacaaaaataacctccttattagggtcaccgtatagatctctmaaaccattctctacagtgattttaaaacaaagaaaacttaaatattgtctaagagttaagacatttcaaattcctatgacttggatctgttttacaaagcttgagttaactaatttagggaattttatggaataattgagtgtcataagcctccatttaaattttacagttagatactgtaaaagaattcttactaatcagaagagacttgctgtatttgcactaaaccctaaattaatgtttaaaagtaatgttttgtctaacaaatatattattataaaatgccatttatgatttagcttaacattaaatatcaagttaacaaaaaataatagttaacattattaaagagttactactatgcggcaagcatcatattaaaagctttatatggattatcacatacacagaaaccaccataaaggagatgttacaatttgatcacttcattatcagagatgtacagatggatgaatacagccttgggcttgagtgctcatgattctatgatgaaaccatga

SEQ ID NO: 620244 - DNA, 569 bp, Homo sapiens
ggactaaggctatcggcccactccagtaccagatcagtcccaatagataaagggttcaggccacctttatataccagsctccagggtcaacactggggacccgatcaacaagtccactacagcgtatccaggatttaggctcaattctacagactcaagtactaggcctgcccacctgctgacccaggtaccagatcagctggcctgagaactcgagcagcaaagccactcacagaccacaccagatggcctgcccagaatctctggatgagctgaatgttgaagggctttcttggacaaacccagtttgcaaagactggagtaagtccctagttttccaaatatgcagataccaatgcaaagccacaaggatcatggacaatcaggaaaacatggtaccattaaaggaacaaaatgaagagccagtaaccaactctaaagaaaaagatatctatgagccatttggcaaataattcaaagtaattgttttaaagaagctcagcaaacttccagaaaatgtggagaaacaattcaccaaaagtaggaaaacaatgtatgaccaaaatggg

SEQ ID NO: 620245 - DNA, 569 bp, Homo sapiens
ggactaaggctatcggcccactccagtaccagatcagtcccaatagataaagggttcaggccacctttatataccagcctccagggtcaacactggggacccgatcaacaagtccactacagcgtatccaggatttaggctcaattctacagactcaagtactaggcctgcccacctgctgacccaggtaccagatcagctggcctgagaactcgagcagcaaagccactcacagaccacaccagatggcctgcccagaatctctggatgagctgaatgttgaagggctttcttggacaaacccagtttgcaaagactggagtaagtccctagttttccaaatatgcagataccaatgcaaagccacaaggatcatggacaatcaggaaaacatggtaccaytaaaggaacaaaatgaagagccagtaaccaactctaaagaaaaagatatctatgagccatttggcaaataattcaaagtaattgttttaaagaagctcagcaaacttccagaaaatgtggagaaacaattcaccaaaagtaggaaaacaatgtatgaccaaaatggg

SEQ ID NO: 620246 - DNA, 571 bp, Homo sapiens
acaaatgaatcacttggatcatttttctttgtaattgtaaaaaggtagaattatttttcaaaaatgtttattgtttttmctaccaagatgctctttccctggcccttctctacttcgtttcttcccaaagaagggctatattttctgcccactgatgtcacacttggccacttgacttgcttcaaccatataaactgagtgcaaggggtctgtgtcactcctgagtgcaaactgcaggagccatcatatggttctgttatcactctgccagagactggcatgtcccagcaggaggatctgcatcttgggatgatggagcagagcccatgtcacttcacaatgacaatacaatatgagccagaaaaaaactttgagtgttttaagtccctgaaatattcatattgtctgtggctgtagcataactcaaaatggctgacacattgtctatgaacataaaaacttccctgggaaatggaatatgtgctttctcaaaggggcagagcctgtccatttctgtatggctctgagaagatatctatggatacacagaacttgatattccattcacctg

SEQ ID NO: 620247 - DNA, 571 bp, Homo sapiens
acaaatgaatcacttggatcatttttctttgtaattgtaaaaaggtagaattatttttcaaaaatgtttattgtttttactaccaagatgctctttccctggcccttctctacttcgtttcttcccraagaagggctatattttctgcccactgatgtcacacttggccacttgacttgcttcaaccatataaactgagtgcaaggggtctgtgtcactcctgagtgcaaactgcaggagccatcatatggttctgttatcactctgccagagactggcatgtcccagcaggaggatctgcatcttgggatgatggagcagagcccatgtcacttcacaatgacaatacaatatgagccagaaaaaaactttgagtgttttaagtccctgaaatattcatattgtctgtggctgtagcataactcaaaatggctgacacattgtctatgaacataaaaacttccctgggaaatggaatatgtgctttctcaaaggggcagagcctgtccatttctgtatggctctgagaagatatctatggatacacagaacttgatattccattcacctg

SEQ ID NO: 620248 - DNA, 591 bp, Homo sapiens
tcttcgaacaagattatgacacaaagctggagaattgatataaccctgaggtaggacactaaatgtatattkctagccttgtcaactgaaggctaattgcatctggtgggccctagggacaggaatagagaaaaagacatttgccaagtcaatggctgcataaaggtaccaggaaatgtgttaatttgctcaagcagtgaaaccacatctggtacagcagttgcagttggagtcaccacttggctaagcttatgataatccactgtcattctccaagatgcatctgtcttccgcacaggccaaactggagagttgaatggggatgtgatgggaatcaccagccctgtatctttcaagtccttgatggtggcactaatctccacaatctctccagggatgcgatattgtttttgatttactagtttttctaggtagaggcagctctaatggtttccatttggcctttcccatcataatagtcctcagcctatcagtcagggagccaatgtgggggttctcccagctactaagtatgtctgtgccaattatgcattctggcattggggaaatgaccacaggatgagtccgggg

SEQ ID NO: 620249 - DNA, 469 bp, Homo sapiens
tcaactgacacatattcagttggtttttttaaaaaaagtaggaaaattggagttggatgacatattagtaactcaaataatttcattttgtaaatgacaaaactaaagcctagagaagaatggatgactttgtcatacactttttagtaggcrccattctattctttttaatcagtggaattgttcctctctacatgacaataaataataatattactaataatcagtatgtgcaaactactagaatattttatgtgcattactaataacaattataatagtccatgttttatttttatacatgaagaatctgattctgagaccgactacattcccaagccccaaatagcagtaaatggtaggacaagaccttcaaaggctatactgttttgccgtgccatgctaggtcccacttcagttggccatatcatttgatccagacataattaaaaaggagggaaaatccatc

SEQ ID NO: 620250 - DNA, 600 bp, Homo sapiens
taaaaatgaggaagctgcttcagaggtgacagatgtaaaagctagaggttatatttagttaagacatgtgagtcagcagcaataattgaggcatgaatttttaatatagttgaccatgagatgtctgatttgttttattttttatagttaaataaattatattttgatttcagtggctgagaatcacgctttgggtacgcactgggtcgaaagaccaattctctgcttttcttttacggaaagaaaaaaaaaatctcatctaaaggccattcttcttggccctagtgtttggcttttcattacttctttaataatgactctttttcctgtgttgtcaaatatagttgagcacattcagagtagttcaatacatggccagatttgacatcgacatgaaggaatctttggaggtaaactacactgaagttccccacccactccccaacctaaagtgtcatttttgctcagctaatccctactggagtttttgacagtawacatctgaatgctaatgacaacttctttctttcctgagtagttctactgcgaggtatactgactgacattaatttaatacgagtttaaaagagataatcaaca

SEQ ID NO: 620251 - DNA, 446 bp, Homo sapiens
tacttattgcagactcaaatgtgcttattctaaaacaagtaaatgtttgcctatggtctgagattctaatccacggagttcattctaatccacattcaacactatcatgtaccagtgggcctcatracccacctagccctgtgatttttcaggttcacttttctaaacttgtgaattaaatacttattttcttagttcagaagaggaaaaaaactcttgtaattgttgcccatttcaggagaaatcttgcatatgaaaacaagagataaatatacacaaccgacggctgtggtttaaacaaaatcttgagaatgttttttgaccttatacatttgtgctttagtataacaaaatgatataaacaaaggtaacttttaatagaaccagtcactaaattaaaaaaatgacaaattcttctgcttagctaagcaacagagaaggtaaaa

SEQ ID NO: 620252 - DNA, 446 bp, Homo sapiens
tacttattgcagactcaaatgtgcttattctaaaacaagtaaatgtttgcctatggtctgagattctaatccacggagttcattctaatccacattcaacactatcatgtaccagtgggcctcatgacccacctagccctgtgatttttcaggttcacttttctaaacttgtgaattaaatayttattttcttagttcagaagaggaaaaaaactcttgtaattgttgcccatttcaggagaaatcttgcatatgaaaacaagagataaatatacacaaccgacggctgtggtttaaacaaaatcttgagaatgttttttgaccttatacatttgtgctttagtataacaaaatgatataaacaaaggtaacttttaatagaaccagtcactaaattaaaaaaatgacaaattcttctgcttagctaagcaacagagaaggtaaaa

SEQ ID NO: 620253 - DNA, 446 bp, Homo sapiens
tacttattgcagactcaaatgtgcttattctaaaacaagtaaatgtttgcctatggtctgagattctaatccacggagttcattctaatccacattcaacactatcatgtaccagtgggcctcatgacccacctagccctgtgatttttcaggttcacttttctaaacttgtgaattaaatacttattttcttagttcagaagaggaaaaaaactcttgtaattgttgcccatttcaggagaaatcttgcatatgaaaacaagagataaatatacacaacygacggctgtggtttaaacaaaatcttgagaatgttttttgaccttatacatttgtgctttagtataacaaaatgatataaacaaaggtaacttttaatagaaccagtcactaaattaaaaaaatgacaaattcttctgcttagctaagcaacagagaaggtaaaa

SEQ ID NO: 620254 - DNA, 446 bp, Homo sapiens
tacttattgcagactcaaatgtgcttattctaaaacaagtaaatgtttgcctatggtctgagattctaatccacggagttcattctaatccacattcaacactatcatgtaccagtgggcctcatgacccacctagccctgtgatttttcaggttcacttttctaaacttgtgaattaaatacttattttcttagttcagaagaggaaaaaaactcttgtaattgttgcccatttcaggagaaatcttgcatatgaaaacaagagataaatatacacaaccgasggctgtggtttaaacaaaatcttgagaatgttttttgaccttatacatttgtgctttagtataacaaaatgatataaacaaaggtaacttttaatagaaccagtcactaaattaaaaaaatgacaaattcttctgcttagctaagcaacagagaaggtaaaa

SEQ ID NO: 620255 - DNA, 473 bp, Homo sapiens
gaattctttatgagctcccactgtccatctggataagatttacagacctttcagaaattcctataagcttgggttctgtgcccacactctagactgtcaggctaagatctctgatataaaacagacctcttctgattttgtctagctgcttttctaatatctattcaccaagctcttccaataatagcataaggccctaaytaatattaaacttttatcattataatacataggatgtcttctgttttcctgatcaaattctgactactattaaaatataaagaattgtccagaaatatataaaaaaaagaatcacacattgatcttctttaaatgaaaatataacaattgtatggactaggatgattacagttgttcagttctgactgttatttgaagaaaaaagcaataagaagcctcagcaacttaacagaaggagctgccatttactaggagaaaagattgtggatgag

SEQ ID NO: 620256 - DNA, 535 bp, Homo sapiens
gatactaaagctcagacaggagaagagacgtggccagcctgtgtccccagggcctatggtcttaccactaggttacagtgtttccagatatcacatgttgtgagatttttgctttaaaatgaaccaaaaaaaaccaaaggygaaaaaggcataagctattaaaaagtgggagaaacactaagagaaccttaagcatgtaactaaaaatattatggaaatgttattgaattcattagcaaatttaatgctaggttttcattgaggagtaggttatattactcatgatgaagaaaaatgttcattttaagtatattaacataaataccatcaatattgtttatcatgtttaaatgttcacttaaagcaattcagttaaaattctgcatatcatacaattttatagtttgctagtaggttacaagtaaatagtcacccaaataaaaacatcatgtgttttccactggttgttgctctttttaggtgagcatttgatgtataccaacagagagaggataataacaaatcactaatttct

SEQ ID NO: 620257 - DNA, 535 bp, Homo sapiens
gatactaaagctcagacaggagaagagacgtggccagcctgtgtccccagggcctatggtcttaccactaggttacagtgtttccagatatcacatgttgtgagatttttgctttaaaatgaaccaaaaaaaaccaaaggcgaaaaaggcataagctattaaaaagtgggagaaacactaagagaaccttaagcatgtaactaaaaatattatggaaatgttattgaattcattagcaaatttartgctaggttttcattgaggagtaggttatattactcatgatgaagaaaaatgttcattttaagtatattaacataaataccatcaatattgtttatcatgtttaaatgttcacttaaagcaattcagttaaaattctgcatatcatacaattttatagtttgctagtaggttacaagtaaatagtcacccaaataaaaacatcatgtgttttccactggttgttgctctttttaggtgagcatttgatgtataccaacagagagaggataataacaaatcactaatttct

SEQ ID NO: 620258 - DNA, 529 bp, Homo sapiens
gcttgagcccaggagttcaagaccagactgggtgatataacacaatagtaaacttcaacaggagagagaatctgtaaacttgaatatagatcttctgaaattatccagtcagagracaaagaaaaaaagaataaaaaagagaaaagaaggctgggcgtggtggctcaagcctgtaatcccaacactttgggaggccgaggcaggcagattaagaggtcaggagttcaagaccagtctggccaacgtgacaaaaccccattttctactaaaaatacaaaaattagccgggtgtggtggcacacacctgtagtcccagctacttgggaggctgaggcaggagaatcgcttgaacccaggaggcggaggttggagtgcaatgtgagccgagaccacacattgcactccagcctgggtgacaaagcacgactctgactctgtctcaaaaaaaaaaaaaaaagaaaaaaaaagagacagagaaaagaaagccaacaagacaccattaggcaaaccattgtcaggttatgggagt

SEQ ID NO: 620259 - DNA, 385 bp, Homo sapiens
ggcacaaactggattttaagaaatcctggctgcataaacaattgtcttatagaaaagaatttctgttcctcctttccctccccttgtcaatcctatttstttcagacctgggttcaaacactagctgtagaggctataagctattggaagcacatttgagcctgaaataaactgaacctcttctgccttggttttctcacttgtaaatggggatttttatgcctacctcaaaggtacgttgcaaggatagagggacagaaagttcagcaagtggccaatgaatagaagtctggttttctgagcatccttgcagctgcaggcttcagtctaccagagaatgtgaggtgttattcttctagggcagtggttagaaaagaaaatgaaa

SEQ ID NO: 620260 - DNA, 459 bp, Homo sapiens
tgtctaaacaacggtttaaggtctacacaagattgtgaagtgaacctgcaggattaggagggtaaggattcccacctaggtgggctcacttgctctgccatacctgggtaggatcccagcctgcttctgtgattgtcaggaggcaccaaaaaggctaccctaggttttctgtcattcggcccaaacatttcctctgctgggcaaatgtggaagaggcattaagctggtgctcycacaactgaaaggaaagcaattctctttctgttgtggttccttcctctttggactcttttcttccattccagcctatccccttcttggaaaagctattctaccaatagcagggaagaaacagccctgtgtacctgatatgctaccctgggcacaggcgatcggaccagggatagacacctgaactgatctgggcagatgccctcttctggccattgagaattgaca

SEQ ID NO: 620261 - DNA, 459 bp, Homo sapiens
tgtctaaacaacggtttaaggtctacacaagattgtgaagtgaacctgcaggattaggagggtaaggattcccacctaggtgggctcacttgctctgccatacctgggtaggatcccagcctgcttctgtgattgtcaggaggcaccaaaaaggctaccctaggttttctgtcattcggcccaaacatttcctctgctgggcaaatgtggaagaggcattaagctggtgctctcacaactgaaaggaaagcaattctctttctgttgtggttccttcctctttggactcttttcttccattccagcctatccccttcttggaaaagctrttctaccaatagcagggaagaaacagccctgtgtacctgatatgctaccctgggcacaggcgatcggaccagggatagacacctgaactgatctgggcagatgccctcttctggccattgagaattgaca

SEQ ID NO: 620262 - DNA, 569 bp, Homo sapiens
cctatgactgtataacaaattaccacaaacttggtgatttagagcaatgcccatttattatctcagggtttctataggtcagaagtttgggtgttgcatggctggattgtctgtttaggatctcasagggttgagatcggggtagccagggttgtttctcatctggggctccaagtcctctttgcaagctcactggttgtcagtagaattcagttcctgtggttgtaggactgaggtccccatattcttcttgctgtttgtcagtctggggtgctcccagcaactcaaggccactctcaggttgttgacacagggtgccaacatctatcttcaaaaccagtaggaggatttctcttgcactgaatctcttttgcatctctgacattctcagtctctgacctctagatccagatttaaagggttcacttgattctgtgagacccactcaggacaattattttgttgtgcgtccctttttctgggaagtgggtccaccacttctatcaggttcttaaaaggatctgggaatgttcacccatcacagacatccacaccaggccagttaagtc

SEQ ID NO: 620263 - DNA, 569 bp, Homo sapiens
cctatgactgtataacaaattaccacaaacttggtgatttagagcaatgcccatttattatctcagggtttctataggtcagaagtttgggtgttgcatggctggattgtctgtttaggatctcacagggttgagatcggggtagccagggttgtttctcatctggggctccaagtcctctttgcaagctcactggttgtcagtagaattcagttcctgtggttgtaggactgaggtccccatattcttcttgctgtttgtcagtctggggtgctcccagcaactcaaggccactctcaggttgttgacacagggtgccaacatctatcttcaaaaccagtaggaggatttctcttgcactgaatctcttttgcatctctgacattctcagtctctgacctctagatccagatttaamgggttcacttgattctgtgagacccactcaggacaattattttgttgtgcgtccctttttctgggaagtgggtccaccacttctatcaggttcttaaaaggatctgggaatgttcacccatcacagacatccacaccaggccagttaagtc

SEQ ID NO: 620264 - DNA, 569 bp, Homo sapiens
cctatgactgtataacaaattaccacaaacttggtgatttagagcaatgcccatttattatctcagggtttctataggtcagaagtttgggtgttgcatggctggattgtctgtttaggatctcacagggttgagatcggggtagccagggttgtttctcatctggggctccaagtcctctttgcaagctcactggttgtcagtagaattcagttcctgtggttgtaggactgaggtccccatattcttcttgctgtttgtcagtctggggtgctcccagcaactcaaggccactctcaggttgttgacacagggtgccaacatctatcttcaaaaccagtaggaggatttctcttgcactgaatctcttttgcatctctgacattctcagtctctgacctctagatccagatttaaagggttcacttgattctgtgagacccactcaggacaattattttgttgtgcrtccctttttctgggaagtgggtccaccacttctatcaggttcttaaaaggatctgggaatgttcacccatcacagacatccacaccaggccagttaagtc

SEQ ID NO: 620265 - DNA, 177 bp, Homo sapiens
gagatcacatattaataaaatttgcacaaagtcrgcaaattgttgaaagggaaggctaagatgattaataagatcaagagccagatgatctcaacaacctgaaataactggctgacaaccaatttgaataactccctgcgggtgaagttcaaagtactatttggggttttttttaaa

SEQ ID NO: 620266 - DNA, 459 bp, Homo sapiens
ctctctcgccacatgatctctgcacatgccagcttcccttccccttctgccatgagtggaaacagcctaaagccctcaccagaagcaaatggtggcaccatgcttcttgcacaccttcagaactgtgaaccaaataaacctctcttctttaaaattactcagcctctggtattcctttataacaacacacacacacacacacacacacatgcgcgcgcgcgcaaaagcagastaaaacaggaactaattagaaatggtgacgcaccgagggattggcaccgaggctccccaacaggaactgaggccatggatagaaggacacattcatgttatttttttctaatggttaagtaattatttgctcttactctcaaaatttctgccaaggcctcccatggaccaaactcaactagaatctaggaagcagagaacctgagtgttgcattcagcagaagtcag

SEQ ID NO: 620267 - DNA, 459 bp, Homo sapiens
ctctctcgccacatgatctctgcacatgccagcttcccttccccttctgccatgagtggaaacagcctaaagccctcaccagaagcaaatggtggcaccatgcttcttgcacaccttcagaactgtgaaccaaataaacctctcttctttaaaattactcagcctctggtattcctttataacaacacacacacacacacacacacacatgcgcgcgcgcgcaaaagcagactaaaacaggaactaattagaaatggtgaygcaccgagggattggcaccgaggctccccaacaggaactgaggccatggatagaaggacacattcatgttatttttttctaatggttaagtaattatttgctcttactctcaaaatttctgccaaggcctcccatggaccaaactcaactagaatctaggaagcagagaacctgagtgttgcattcagcagaagtcag

SEQ ID NO: 620268 - DNA, 459 bp, Homo sapiens
ctctctcgccacatgatctctgcacatgccagcttcccttccccttctgccatgagtggaaacagcctaaagccctcaccagaagcaaatggtggcaccatgcttcttgcacaccttcagaactgtgaaccaaataaacctctcttctttaaaattactcagcctctggtattcctttataacaacacacacacacacacacacacacatgcgcgcgcgcgcaaaagcagactaaaacaggaactaattagaaatggtgacgcaccgagggattggcaccgaggctccccaacaggaactgaggccatggayagaaggacacattcatgttatttttttctaatggttaagtaattatttgctcttactctcaaaatttctgccaaggcctcccatggaccaaactcaactagaatctaggaagcagagaacctgagtgttgcattcagcagaagtcag

SEQ ID NO: 620269 - DNA, 459 bp, Homo sapiens
ctctctcgccacatgatctctgcacatgccagcttcccttccccttctgccatgagtggaaacagcctaaagccctcaccagaagcaaatggtggcaccatgcttcttgcacaccttcagaactgtgaaccaaataaacctctcttctttaaaattactcagcctctggtattcctttataacaacacacacacacacacacacacacatgcgcgcgcgcgcaaaagcagactaaaacaggaactaattagaaatggtgacgcaccgagggattggcaccgaggctccccaacaggaactgaggccatggatagaaggacacattcatgttatttttttctaatggttaagtaattatttgctcttactctcaaaatttctgccaaggcctcccatggaccaaactcaactagaatctaggaagcagagaacctgagtgtygcattcagcagaagtcag

SEQ ID NO: 620270 - DNA, 559 bp, Homo sapiens
tgtaatagagtaagttacaaatggcttcaggaaggggagagaggaagaagagtggatgagatacgtaagagtgcctgagggctaattttatgaaagctttgggaagttttaagaaaaagaaaagctatttttcaaggtacatgcgtgtacgcatgcgtgtgtgtgtgtgtgtgtgtgtgtgtgtgtgtgtgttaaaagacagaagaaagagggagacctaggaagactatgagacactaagagaaaaattaaggtaaaaaagacgcacacttagaaaaacacacataggsaggagggaggaggttaagacattttactatgtgctgtgaatggaaactacaaccatttctgatatatgcaatatatatacatatatacacacatatacatatgtatttaaagatttaaattacattttctctttttttagagatgtggtttcactatgtcactctgcccaggctgcagtacagtggttgttcacagtcatgatcatagcacattatagtcttgaactcctgggctcaagcaatcctcctgtattagtctccccagtagt

SEQ ID NO: 620271 - DNA, 422 bp, Homo sapiens
ctgggactggtggctgtggtggctcgttggtctttgtctcttagaaggtggggaataatcatcatcttgaaaaagaaaaaatggtcattactgaaggaaccatcttaggttacagccacctctgggtcaattcccaacattcaaaagctgagcagggctttaaagctatcttattaataattatttctgtattgcgaacttcagcatactttttyctagttacatttgaaatgttattcttttgggatgtgctcaagtgaatactgctttttcctctgccttgcttcattactttttagtttccttcatttgaatcatcattgtaagtctcctcttctcctcaaataactttcaaattgctgccaagaactatgttctatcttaaggcttttgagaaaaaactttcaatgaagatagccgcc

SEQ ID NO: 620272 - DNA, 422 bp, Homo sapiens
ctgggactggtggctgtggtggctcgttggtctttgtctcttagaaggtggggaataatcatcatcttgaaaaagaaaaaatggtcattactgaaggaaccatcttaggttacagccacctctgggtcaattcccaacattcaaaagctgagcagggctttaaagctatcttattaataattatttctgtattgcgaacttcagcatactttttcctagttacatttgaaatgttattcttttgggatgtgctcaagtgaatactgctttttcctctgccttgcttcattactttttagtttccttcatttgaatcatcattgtaagtctccycttctcctcaaataactttcaaattgctgccaagaactatgttctatcttaaggcttttgagaaaaaactttcaatgaagatagccgcc

SEQ ID NO: 620273 - DNA, 631 bp, Homo sapiens
cttgctctgtcgcccaggctggagtgcagcggtgcgatctcagctcaccgcaagctccgtctcccgggttcacgccattctcctgcctgagcctcctgagtagctgggactacaggcgcccgccactatgccctgctaattttttgtatttttagtacagacggggtttcaccrtgttagccaggatggtctcgatctcctgacctcgtgatccacccgcctcggcctcccaaagtgctggaattacaggtgtgagccaccacgcccggccagggtacacttttaagcagagacactactttgaaggtcataaaaaatataataagagataaggctaatttcctttaataataataataaaatcctttaataaaaatataaaggaataatataataattttctttattaaaatataataagagataaggctaatttcctttaataaaatacagtaactacataccaacagaactccaaaaaaagaaatggagaggaagggagcatgggtcattaatcttgtcaaaaatataaaattatatacgaggaattcctagaaactgttttccttgtctgcggccattgtgctgctgctacacaactaccgcaagcagcccttcacgccctcctccc

SEQ ID NO: 620274 - DNA, 495 bp, Homo sapiens
tcacattgacttattaaccaacactcatgatcatgtgaaactctagaactggatctgggtgcctggcaggatgacatggtgtgaggctcaagcagcactgtgggaattcaagcatctgtttatttctgagagaaaaagtgtaaagcaaaataatatcttttaacaaacatttgtatttgactaaaaaggaagcamgcacttagaatttctgaatttgctaattgctcttctgagctgagaatatctgtgttgaatattagtcattatccagatttggcacagaataatcccgagggttaaatgacattgttcctacagtgggcacctgaagactggctataaaagcaatcctggacaggggcggtggctcacgcctgtaatcccagcactttgggaggccaaggtgggtggatcacgaggtcaggagttcgagaccagcctggccaacatagtgaaacctcatctctactaaaaatacaaaaaaattagctaggc

SEQ ID NO: 620275 - DNA, 556 bp, Homo sapiens
atgaatttttaaaagctggaatgaatgagcagcaatagcagraggagaaaagtgagtgagggctctccaagaagccatctggcaggctaagggttctgagggaagctctggtttcagaagcaactcaggaattacttctgtcatattaggatgggatggtaggagattgggaactctagggactagaggtcatttaatttcctgtctacaatccttagaagaggttttgagacttgcaacctaggaccttaactaatcatcttccctcagaattgatagaattctttattatacatgttaatatcagattagtcaggatgggctagattatgctgtgttaacagccattctctaaatctctgtggctcaacagggagctctgcctgtcatggtcacttgggacccaggctttgggtataaggctacagcacatggaaaacgtatgaatgtctctcagattcttaaagcttctgctggaagtgacatgtcattctgctcacagttcattggctaaatgagtcacgtggctctctctaacttcaaggatggtatgaaa

SEQ ID NO: 620276 - DNA, 541 bp, Homo sapiens
aatttttaaaagctggaatgaatgagcagcaatagcaggaggagaaaagtgagtgagggctctccaagaagccatctggcaggctaagggttctgagggaagctctggtttcagaagcaactcaggaattacttctgtcatattaggatgggatggtaggagattgggaactctagggactagargtcatttaatttcctgtctacaatccttagaagaggttttgagacttgcaacctaggaccttaactaatcatcttccctcagaattgatagaattctttattatacatgttaatatcagattagtcaggatgggctagattatgctgtgttaacagccattctctaaatctctgtggctcaacagggagctctgcctgtcatggtcacttgggacccaggctttgggtataaggctacagcacatggaaaacgtatgaatgtctctcagattcttaaagcttctgctggaagtgacatgtcattctgctcacagttcattggctaaatgagtcacgtggctctctctaacttcaag

SEQ ID NO: 620277 - DNA, 582 bp, Homo sapiens
tctagaagcgaggttcctggataaagatgaatttttaaaagctggaatgaatgagcagcaatagcaggaggagaaaagtgagtgagggctctccaagaagccatctggcaggctaagggttctgagggaagctctggtttcagaagcaactcaggaattacttctgtcatattaggatgggatggtaggagattgggaactctagggactagaggtcatttaatttcctgtctacaatccttagaagaggttttgagacttgcaacctaggaccttaactaatcatcttccctcagmattgatagaattctttattatacatgttaatatcagattagtcaggatgggctagattatgctgtgttaacagccattctctaaatctctgtggctcaacagggagctctgcctgtcatggtcacttgggacccaggctttgggtataaggctacagcacatggaaaacgtatgaatgtctctcagattcttaaagcttctgctggaagtgacatgtcattctgctcacagttcattggctaaatgagtcacgtggctctctctaacttcaaggatggtatgaaa

SEQ ID NO: 620278 - DNA, 525 bp, Homo sapiens
gctggtcagactggtctcaaactcctgatctcaggtgatctgtctgccttggcctcccaaagtgctgggattacaggyatgagccattgtgcctggccaaaattaatactttttatattaaatttacatatatatacgttttttctttttgataccgggtctcacactgtcacccaggctggagtacagtggcacaacctctgctcactgcagcctccacctgccaggctcaagcaattctcctgcctcagcctcccgagtagctgggattacaggtaagtgccaccacacccagctgatttttgtgttttttgtagagacgaggtttcgccatatttcccagactgttctcaaactcctgagctcaaagcagtccacccaccttggcctcccaaagtgctgggattacagatgtgagccatcttgctcattctattttaaacttttgagtggtttgtgtctcctgattggactcctacaaatacagaattgatgctaggaagggtaccaggaaatagacgcaca

SEQ ID NO: 620279 - DNA, 525 bp, Homo sapiens
gctggtcagactggtctcaaactcctgatctcaggtgatctgtctgccttggcctcccaaagtgctgggattacaggtatgagccattgtgcctggccaaaattaatactttttatattaaatttacatatatataygttttttctttttgataccgggtctcacactgtcacccaggctggagtacagtggcacaacctctgctcactgcagcctccacctgccaggctcaagcaattctcctgcctcagcctcccgagtagctgggattacaggtaagtgccaccacacccagctgatttttgtgttttttgtagagacgaggtttcgccatatttcccagactgttctcaaactcctgagctcaaagcagtccacccaccttggcctcccaaagtgctgggattacagatgtgagccatcttgctcattctattttaaacttttgagtggtttgtgtctcctgattggactcctacaaatacagaattgatgctaggaagggtaccaggaaatagacgcaca

SEQ ID NO: 620280 - DNA, 525 bp, Homo sapiens
gctggtcagactggtctcaaactcctgatctcaggtgatctgtctgccttggcctcccaaagtgctgggattacaggtatgagccattgtgcctggccaaaattaatactttttatattaaatttacatatatatacgttttttctttttgataccgggtctcacactgtcacccaggctggagtacagtggcacaacctctgctcactgcagcctccacctgccaggctcaagcaattctcctgcctcagcctcccgagtagctgggattacaggtaagtgccaccacacccagctgatttttgtgttttttgtagagacgaggtttcgccatrtttcccagactgttctcaaactcctgagctcaaagcagtccacccaccttggcctcccaaagtgctgggattacagatgtgagccatcttgctcattctattttaaacttttgagtggtttgtgtctcctgattggactcctacaaatacagaattgatgctaggaagggtaccaggaaatagacgcaca

SEQ ID NO: 620281 - DNA, 444 bp, Homo sapiens
cctcctgagtagctaggactgtaggtatacatgacgatacttggctaatttttaaattgttttgtagacacggggtctcactttgttggccaggctggtgtcaaactaatggcctcaagtgacccttccacccctgcctcccatcctcgaggcatgtgccaccacaaggagcacttgttcaattttctaaaaaaaaaatttctaaagtaaggctgtgggatgatggcaggaagatcaaagaaaaacagaagaataagttaaaatgacttatkcacacatattcttttgacagcaagaagaacatttagtatatacattccttacaaacaaacaaaaggcagataaacaatgttgtataggaacttcaacacacactgtacaatattcccactttgctgacataagttatggaaatttcatggtttacttgagtgtcgctaccag

SEQ ID NO: 620282 - DNA, 444 bp, Homo sapiens
cctcctgagtagctaggactgtaggtatacatgacgatacttggctaatttttaaattgttttgtagacacggggtctcactttgttggccaggctggtgtcaaactaatggcctcaagtgacccttccacccctgcctcccatcctcgaggcatgtgccaccacaaggagcacttgttcaattttctaaaaaaaaaatttctaaagtaaggctgtgggatgatggcaggaagatcaaagaaaaacagaagaataagttaaaatgacttatgcacacatattcttttgacagcaagaagaacatttagtatrtacattccttacaaacaaacaaaaggcagataaacaatgttgtataggaacttcaacacacactgtacaatattcccactttgctgacataagttatggaaatttcatggtttacttgagtgtcgctaccag

SEQ ID NO: 620283 - DNA, 636 bp, Homo sapiens
atatgtgaaatcatttaactattctgcactgaaaattatttaactattctgcactgttcagtccctttaaccataaaagggacatgatgatcataatgatttttgccttatgtgaagattctcttgaattcacttttcggtgctcactttctgatgtttgtagagatgagattgtgtccaytaatcctgataaacacttaactatgcttcttaaatctaaacatttctgatttctttttaattataaaaaactttcctcccttatttctgtgaatattacctctttcttatcttttacatacagagataaaatgtgttaattaaatgttctttcatattttccttctctttatctattttacatactttcctcagattcacattaaactttacctttaaactttctctcttcagctatgtgtaatgctgttcaattgcccattcattatttaatatcaataacatatagccacacatatgggtatatggatatagaggcatacaggtataaatagaaatatatagagagatggagatttttctagaagatttgtatagtttttattacatgctttttttctttcggtttctataatttttcttccctttattataattatttttattatacatttt

SEQ ID NO: 620284 - DNA, 588 bp, Homo sapiens
ctttctgtcacctaggctgaagtgtagtaagtacagtggcacaatctcaggtcactgcaatctccacctcctggactcaagcaatcctcagacctcagcctcccaggtagccaggactaccggtgtgcaccaccacgcctgggaaatttttgtttttttaatagagacggggtttcaccatgttgcccaggctggtctggaactcctggactcaagccatctgcctgtcttggtctcccaagtattaggatgccagttaatgggttttaatacttgaatgagcacatatatccaccaygcaaaacattacagagcatattctcatcactcaaaaagtcctcttgtgacaccttccagtaaattactcactccgaaatgacaaatttctgataactatcacaatagattagctttgcctcttgttagaatttgtataaacgaaattacaaggtacatattttctcatgcctttgagttttttcacccaacaaaatgtatttgaggtttatagtctatagtggttgtatcaatagtaagcctagtgcttatagtatccttttattatctcttcaatgtatgtagactatt

SEQ ID NO: 620285 - DNA, 615 bp, Homo sapiens
agtgacaaagacacatataccaagtacaccaggccttcctggagcctgaggctgtggtatctctcctggcacttaggtctggaggcttagtccatggataccagcctaaaatctggggctgtgggcttttcctggggtaggtctagtgttgaggtcctatgcaaatttcagtgcttacttccctgtttctcccccatgcaaaggrtatctctctttactctttgctgccaggggctcagggaggggtgatgtggttaatgtaaaactgtccctcctatccttttcaacatgtcctttcttatttctgtgttatctgtaggtgctataatctctcacctgatttcctttgctcctgtgaaggtaattttgtatatagacacttgttcaaagtgatgtttttgcagatgaatgagctcttggaagtcctattcttttctcttgctgatgtccttccaggtcttaacaaattttctaatgacatttagtgcaaggtgacccttggcccatataggaacaatagccacaggctacgacactgatatttagtgattgaataagtagtgcccacatgaaaacttaatctcaatacagagttctgtttttttttaagtggtt

SEQ ID NO: 620286 - DNA, 495 bp, Homo sapiens
ctcatcagaatatgtccttactttgccttccccttggatgagggctcttccttcgactagcataagaggagctataatggccctacctgatatgagtcacctgacagaagagacatgcctcacccatcaaagagytagattctttacattcattatcactcatgctagcaaaaccattaaaggttagtattatgtcccaatatatcaatgaggggatttgagcatagagttaaaaacttaatttaagtttctgctttgaagctaaagggcccagtaatgggccctaactgttcaggtaaaaagcagtgaaaatggtgactaagtcatcttcccacagccaagggcaactttcaatataactaccagatattttaactgattatggaatttcaaaactatgattaaatatctatgagtacattttatataatattttaatagcatgtgttaaatgtagtcttaactagtaaaaatatgatttaggtaattggactt

SEQ ID NO: 620287 - DNA, 495 bp, Homo sapiens
ctcatcagaatatgtccttactttgccttccccttggatgagggctcttccttcgactagcataagaggagctataatggccctacctgatatgagtcacctgacagaagagacatgcctcacccatcaaagagttagattctttacattcattatcactcatgctagcaaaaccattaaaggttagtattatgtcccaatatatcaatgaggggatttgagcatagagttaaaaacttaatttaagtttctgctttgaagctaaagggcccagtaatgggccctaactgttcaggtaaaaagcagtgaaaatggtgactaagtcatcttcccacagccaagggcaactttcaatataactaccagrtattttaactgattatggaatttcaaaactatgattaaatatctatgagtacattttatataatattttaatagcatgtgttaaatgtagtcttaactagtaaaaatatgatttaggtaattggactt

SEQ ID NO: 620288 - DNA, 633 bp, Homo sapiens
ttctaggagttcaagataattaattttacaaaaaaatgagcaacagaaaagttttgagggcaatttccatactaagttaataaaagaaaaatgagaatgaggagaataatatgattcttatatattatgaaagcacaacagaaagattaccacaggaaagatcaaaatacacaccttaaaggtgagttaaataagaaagcattttaaggcatgatagaaccacattaatcagaattttgaaaactttaaatgagatgagaaaattcaggaaataattagaaataaatgatcacattcaaatggagamtgaattagaaataacacaagcatgaatgaaccactaaataattccttaaaaataaaaaagaaatacagaaacagataaaaattttgagacaacattgcaaataatgaagtaaattcatcctataggtaataagtgtgcctgcagaataaaaccaaaataagagaatgtaacaaatacaaaaactctaattcaaaactttcttaaaattaaatatataatatatatttgaaactatatattaaagagcacaccacttattgacagtaccaacttgaaatttagtaaaattgccaggctttgtagaaaaaagaaaaaatatcatttgc

SEQ ID NO: 620289 - DNA, 633 bp, Homo sapiens
ttctaggagttcaagataattaattttacaaaaaaatgagcaacagaaaagttttgagggcaatttccatactaagttaataaaagaaaaatgagaatgaggagaataatatgattcttatatattatgaaagcacaacagaaagattaccacaggaaagatcaaaatacacaccttaaaggtgagttaaataagaaagcattttaaggcatgatagaaccacattaatcagaattttgaaaactttaaatgagatgagaaaattcaggaaataattagaaataaatgatcacattcaaatggagactgaattagaaataacacaagcatgaatgaaccactaaataattccttaaaaataaaaaagaaatacagaaacagataaaaattttgagacaacattgcaaataatgaagtaaattcatcctataggtaataagtgtgcctgcagaataaaaccaaaataagagaatgtaacaaatacaaaaaytctaattcaaaactttcttaaaattaaatatataatatatatttgaaactatatattaaagagcacaccacttattgacagtaccaacttgaaatttagtaaaattgccaggctttgtagaaaaaagaaaaaatatcatttgc

SEQ ID NO: 620290 - DNA, 488 bp, Homo sapiens
caaaaagacatataatgcatgatctctcttacaggtgggagctaaaagtgtgaacacatggaagtagagaatgatgaaaaaatagataacagagactacaaagggtgattaggtgtaagtggaggcagggtgaagagaagtagattaaagaatacaaatgtatagtaaggtagaagtactaactcaatgtttgatagcaaagtagaatcactatacttaaaaaaaattattgtattcaagtgatggacaccctacatattctgacttgatcactgtgcattttatatatatgtaaaaaatttctcatgtamcccataaatttgcacaaattaaaaaatacacagaataaaaattagaattgcaaggagatgtcaataaactacatgtacaaattcatactttcagcacttcttattaaatgatagacacagcaagtaaaaatactaatacaaatatagaaggtgttaaaaccacaatagttttaatgt

SEQ ID NO: 620291 - DNA, 488 bp, Homo sapiens
caaaaagacatataatgcatgatctctcttacaggtgggagctaaaagtgtgaacacatggaagtagagaatgatgaaaaaatagataacagagactacaaagggtgattaggtgtaagtggaggcagggtgaagagaagtagattaaagaatacaaatgtatagtaaggtagaagtactaactcaatgtttgatagcaaagtagaatcactatacttaaaaaaaattattgtattcaagtgatggacaccctacatattctgacttgatcactgtgcattttatatatatgtaaaaaatttctcatgtaacccataaatttgcacaaattaaaaaatacacagaataaaaattagaattgcaaggagatgtcaataaactayatgtacaaattcatactttcagcacttcttattaaatgatagacacagcaagtaaaaatactaatacaaatatagaaggtgttaaaaccacaatagttttaatgt

SEQ ID NO: 620292 - DNA, 617 bp, Homo sapiens
tttcgttgccttattcttgaagagcatagtgcatatgatgattcgtctatggaatatattttcagactttcttgtggagtagttcagaaatgaatttggatattaaatattccttatcaaaaaataacatgcactccaagatcrtgccactgcactccagcctgggcgacagagcgagactctgtctcaaacaaacaaacaaaaaaatgtgcactgtaggttgagcctaaattactcaattaatgatatttgatctactaatgccccaaaggattgcattaaatttccaaatgaattgtgaatttatgtatttttcctggtttcctgaaactacagacactgtcttgtattttaaggttgtatttttgttatacctaattttgtgattttgttttcttgattttgttttatgaatattaatacaacatttgtccttgttactgattattatatcaaattggtttatatttgtgtagtatatattttcctcacttatgctcaacgctttgtaaactaattctcttgtacaaaaatatcatttcatgttttatgtattttaacattatctatttgtaatttaattactttatataaattactgttttaaaataattttt

SEQ ID NO: 620293 - DNA, 626 bp, Homo sapiens
agaaagtccatttataagataacctccttgtcagaagccttaagtcttttatcttttatcttgtgctcatcaagtattccagagtgtttttctaattttcttggaatatgaagtttctactggcaacattccagaagctgaggggaaacagaaagctgggggtggtagtcttaccttcacagtttagtgactccaggtcacttatcccctgtccccatttttttctaagaaactcatttctatctgcttctcaaacagattttactcagtcatccttattttaatcccacttcccctttgcttcccaatttaaaactacatgaatgttatgaattgtaataattctgtaggggtaaattgagttgtttcttacctttcctcacttcaagtttgggactagattttctcagatcagggtctgtttcgttgtttatgatatttcttcaaatcttagatatctgtttgtagattgtaaaatctagctttaattttcataccactaaaggaagaaaaaactaccatttagcayatgacatactaccaattgtaaaatgcacttccaattttagagatattaaaatgtaaattttttaaaatgtgcaactcaaagccaataaaatatggta

SEQ ID NO: 620294 - DNA, 577 bp, Homo sapiens
gcgtaaatatcacagagcctataaaataataaaacaatgagaaaaaggaggtatttaggcaacaatgagcataataaataaaacagtaccttacatctcaatactaacattgaaggtaaatggtctaaatgctccacttaagagatayggaatggcagaatggataaaaatccacccaccaagtatctgctgccttcaagggactcatccaatgcataaggacacacgtaaacaaggtagagatggaaacagacattccacgcaaatggaaaccaaaaatgagtgggggtaactattcttatattaaacaaaacagactttaaagcactgacagttaaaaaagacaaagagggacattgtataatgataaaagggtcagtccaagaggaaaatatcacaatccttaatatatatgcacttaacatgggagctcccaaatttataaatgattattcctagacataagaaatgagatagcaacacaatagtagtgggagacttcaatactccactagacaggtcatcaagacagaaactcaataatgaaacaatgggtttaaactataccttagaacaa

SEQ ID NO: 620295 - DNA, 415 bp, Homo sapiens
tgcacacaaaataaactatcaacagagyaaacacacaacctacagaatgggagaaaacttttgcaaactatgcatctgagaaaggtctaatatccagcatctataaggaacttaaacaaatttagaagaaaacgcaatgtcattaaaaagtgggcaaaggatatgatagacacttctcaaaagaggacatacatgtggccaacaattatgaaaaaaagcacatcactgataattagagaaatgcaaatcaaaaccacaatgagataccatctcaaaccagttagaatggctagaatttaaaaagtcaaaaattatggatgctgacatggttgtggagaaaaaggaatgctgttacactgttggtgggagtgtaaattagttcaaccattgtggaagacagtgtgtcaattcctca

SEQ ID NO: 620296 - DNA, 665 bp, Homo sapiens
accttttggccctgttgacttttgagagcccctgagtaagagcagaagagcagaaggggaaaataaatgattgctgatctaggagtttctcctctcagcctcatctctcatatcctgtgtgacctaaagcaagtctttccccatccctgggcctcagtttcccaaggacaagaccgagtcccagcagcagccagacacggagaaatggggcatcacatacctcgggtccagggggcccgggaaacccaatggatcctttgtctccgactttgccctgtggaagagaagaggttgcagggaggcaggggtgaggaccccaccttccatgaaccccctgcgttcccccgctggttgtggatggttggaaagttcagaagcatgtgcataaaatctgcctggacaactagaaggagctaccattcaaactctgcctcctgcacttgctaaccatgggaccctgggcaagtcacttcaactttcggaatcttagtttgcccatctgtaaaatgggagcaatattaattccctcactcctggggtagttggcagccttcaaagaaacagttcagaaagggtcggatgcacagygacactcaataaatgacagccactgctgttactgataacatcactattgtttacaaggcatcaggaaccccagatcc

SEQ ID NO: 620297 - DNA, 573 bp, Homo sapiens
cgaagagataacgggtgtaaaagcactctataaactatgaagtgctgtgcatattcgagacgcagttttcaccatgaggggtgattcctggacaaacaccttaagaaaatgggtctctcctgggattcatgtaaagaccagggaagatgctgtgcatttgagcacaaggactcaggtagaattggctttgaagggagggraagagtatgaagtcagggccaaaaagccatgcaaggtggaggcagaagactgcatgaggcacccaggctgaaagaccccctcccgcccacctcagtggactttccaagaagaaaggtggccgcccagagtggagtgagaaggctgctgcttcgtgcctcagtttcctcatccgtctagtgaggatggtaatgtatcaagcttgggagagttgctgggaacattaattattaaatgggttaattcacataaagccctttgggtgggtggcactgggcacatggcaagtgcccaaagcattttagccatgaccttcatcagcatcaccacccagtgtagcaggcactggcaaagggtgtggagcagctgtcaaat

SEQ ID NO: 620298 - DNA, 621 bp, Homo sapiens
tgtgcagccttgcctggcagctytcctgctctgggcctctggggctgcccaagttgggccatggacaaggtgggcactgtccaatcccttgcgtttacctttttccaatcggtgtacacgacatctgacttgggaatgcgcaagcagtcgagagcttcgtagaactctcccagttgctccttggtcgtctctggcttgtcagctgcagggggagcaaggagactgactggggacatggtggggcccggcgggaggccagggagggctggggttctaggggccagcccaggggtgggtgaatggggggtgaggcctcagaggggcatgagtttggggctgctaagcatgcctaccatagacagacagcccccagttcttctcatcgttcacgtcaaaagcaagcatgtaggtcttggtgtccctgaggatcagcaagtgagcgaaatgctcttggcctcccactggaagagaaaaggagcctctgggtgagaacatgggatggcacaatggtgtctgtcttacaggtgaggaggcctaggtgtgtcagtggccacacagcccatcagtgaaggcccagggctcctttgggccaccgtgtgcccagcccctgctgcatgccca

SEQ ID NO: 620299 - DNA, 553 bp, Homo sapiens
  misc_feature 72, 73, 74, 75, 76, 77, 78, 79, 80, 81, 82, 83, 84, 85, 86,87, 88, 89, 90, 91, 92, 93, 94, 95, 96, 97, 98, 99, 100,101, 102, 103, 104, 105, 106, 107, 108, 109, 110, 111, 112,113, 114, 115, 116, 117, 118, 119, 120, 121, 122, 123: n = A,T,C or G
  misc_feature 124, 125, 126, 127, 128, 129, 130, 131, 132, 133, 134, 135,136, 137, 138, 139, 140, 141, 142, 143, 144, 145, 146, 147,148, 149, 150, 151, 152, 153, 154, 155, 156, 157, 158, 159,160, 161, 162, 163, 164, 165, 166, 167, 168, 169, 170: n = A,T,C or G
  misc_feature 171: n = A,T,C or G
tataacatacattatgcgatatatataaaacataatgtatattatacattatatactgaatataatatatannnnnnnnnnnnnnnnnnnnnnnnnnnnnnnnnnnnnnnnnnnnnnnnnnnnnnnnnnnnnnnnnnnnnnnnnnnnnnnnnnnnnnnnnnnnnnnnnnnntattgtatattatatataatatattatattatatataatatattgtatattatatgatatatattaaatatatattatacacacacacacacacacacacacacatatacctgctatgtacccataaaaattttaattttgtttaaaaaagactgatttcatgccacataagccttgtatgatctggtctcaggctacctctttatctcatctgcctcacctgcctctgccaccctctccctcaccttctctgctccagttacacyggccttcttgctggttactaaataaaccaagcaggctcccacctcagggtctttggatgtactatttcctctacctagacagctctagggctaggattcccagggctctccacatc

SEQ ID NO: 620300 - DNA, 578 bp, Homo sapiens
ccctgtgtacaaatgaggtttaagcagcgccatgttgagtcctggtaacccactgggtaacactgatccagtgttggtcagtttcacacatttacaagagtgtagaactctgatcgcagagtagttgtggaacagcattcatattttacataatacatgttagattatatttgtcctatgtaaactctgacaccaacctgtttaaagtaatttgaaagatgagatgcccccaaataagttcttcatttgaaaaaatagaaactatatccacatccagtcgtctgttttacaaaaactgctcttgtatgactgaagcagacacgcgttcacctatgattatgctccttgatttctcacatccagcagagtccttgcatgggtcaaatctttgcacgtycaaggtcctggctttcctcagagtaagcctgctccttttgcttttctgcttggggtcaaccctgatgactgtcaccctgattcctgccttcctacttcctccagagcttgtctcatcaattgctcctagtgtcctatcctacatcctcaaccaccctctccttctttgccttccccctcag

SEQ ID NO: 620301 - DNA, 578 bp, Homo sapiens
ccctgtgtacaaatgaggtttaagcagcgccatgttgagtcctggtaacccactgggtaacactgatccagtgttggtcagtttcacacatttacaagagtgtagaactctgatcgcagagtagttgtggaacagcattcatattttacataatacatgttagattatatttgtcctatgtaaactctgacaccaacctgtttaaagtaatttgaaagatgagatgcccccaaataagttcttcatttgaaaaaatagaaactatatccacatccagtcgtctgttttacaaaaactgctcttgtatgactgaagcagacacgcgttcacctatgattatgctccttgatttctcacatccagcagagtccttgcatgggtcaaatctttgcacgttcaaggtcctggctttcctcagagtaagcctgctccttttgcttttctgcttggggtcaaccctgatgactgtcaccctgattcctgccttcctacttcctccagagcttgtctcatcaattgcycctagtgtcctatcctacatcctcaaccaccctctccttctttgccttccccctcag

SEQ ID NO: 620302 - DNA, 557 bp, Homo sapiens
cacagctgtgtaagaaggagacagtcaacgcttccaaggaaagaaatagtgcagtcttgggggtggggtgatgatgagagcacctttctcacaaacccacgtgggacagggccttgtctagcaaccgcaaaaataatcgagcaggacgtggtcaatcaagctctttataaaacctcatgttaagtaaaatcattcaagatccaactcaatggccaccttaaacccatgttttaaaagcatgagacagagcacacaattcatgctcaaaggagaacgaggtagcatgcatgctggcaagacgcgcattcaggtttgctcccggtatcaagatgagacgtaaagacgatttatgcactgtcatagaacttgtagttcctcacacaaaacacagaacttcctgggraagtgcctagaaacttctttatctgtatttccccaggctgcaaagtgcacacatttttaaagttcaactcttaaaaaaaaaaaaaagtcagcagaggcaagatttcaacagacgccggtccaaatgttagcaattctagagtggtcaggggttt

SEQ ID NO: 620303 - DNA, 436 bp, Homo sapiens
atctaaagctattatggcaagaggcattgaaaccacagatcaggtttttctggggagtgggggatgaggataattttgttaggtagagcaatactattttttttattaaataaagtgaatccctgtaatgagatattacagctgctgtactttcaccacatgatggaggaatggataccccactcytacagcaaacagtaaccacatgctgcagtgattcaaaatgttgactttattcctaaataaatacatagcaaggactaatataaataggtctttagaaaataggggtttagggggatgttctgagcagtcctagatcccattacatcaaaaaaaaaaaaaagagagagagagaaattgagatagtgagtattaaaggaattctcgggggatttccattcttggcatggactcaggaagccaggacatgacc

SEQ ID NO: 620304 - DNA, 546 bp, Homo sapiens
ggaaggaaaattttatttaaaataaaaaaagttatagtaaagacatagagaacaaatcctgaatccagactacctaactttaaatcctagctctaccacttcctggctgtggaaatgtaggcaagttacttaacttgtctgtgcttccaattcctaatcttaaaaatgtgtgtcataatagtatatacctcactaccgttgtaagagagaaagaggagagagaggaaagaaagagaatgtgtatgatattgtacatgcttagtgtgagagttctgtaagagaaggaggtggcatttgtgactaagtggagtgttcagatttagaagtaagtggcattggcagttgagattgtgagcaccctgagattagggactctgtttttctgtttacacctattctcagtgcctaacatggcaacgggcacataatcaacgctcaataaacgtttgccatcaggcaagtataataatttaataattattatacttgygtgtgtgtgtgaatgtacatgtgaatgtatgtcatgtgtctatatatgaatgtatg

SEQ ID NO: 620305 - DNA, 483 bp, Homo sapiens
gagtaggttcattatcaagggagcaggtttcttataaaaggatgagttaggcctccttctgcctctctctgtcacctaccttttgctcttctgtcatgggatgatgcaggaagaattccctagcaagataccacctcctcaatcttggacttctcagcctccagaaccatgaaccaataaatttctgtttattataagttaaccaatctgtggtattctgttgcagcagcacaaaacagaccaagacatttggtgtcaatgttagctgagtctcatatcttatactcctcaaaaaagtctgtctgttctgccacccttagccctaaccactaatcagtgcacagttcctgtcaaatgacacaagtaattttgtgaaaggattggggaatatttattctgacaagggcattgcagttccttctcaagggcacccamcctcacctctaaacaaagggctctggacctacaaattgagattgaaaa

SEQ ID NO: 620306 - DNA, 595 bp, Homo sapiens
ctttgtgggtttaggaaccctaattgctactttcgccttgctgcctggtacagtaatcaactacaccttgcctctgattattaagtgccaccaattggccttgtccattcctaaattccatcatctccattgagacttgagaccccacttccatggtagattcccacctatccacttgcatcaaccctggggtacagaatttctcaaagatacagagccctcttcaccagtgtgtgtcttctaaccctagggaagggagtggccttcaaggcctcttgaggaacaaagacaggcaggatattctcagktcttacatagtaaatccagtctgacattccttctctgtgactctgtgtttcactctgtgaattatattttctgaattactaattttctcttcaactatgcctaatctgttgtcaaaaatccatgagttttttattgtaatttttacaattttcatttctaggagttctatttgattattttccaaatctaataggttacttttacagttgcctcttttttactgacatgtgtaaggtaagcttttttttttatttctttaagcataaaaagcatagttctgtgtttg

SEQ ID NO: 620307 - DNA, 595 bp, Homo sapiens
ctttgtgggtttaggaaccctaattgctactttcgccttgctgcctggtacagtaatcaactacaccttgcctctgattattaagtgccaccaattggccttgtccattcctaaattccatcatctccattgagacttgagaccccacttccatggtagattcccacctatccacttgcatcaaccctggggtacagaatttctcaaagatacagagccctcttcaccagtgtgtgtcttctaaccctagggaagggagtggccttcaaggcctcttgaggaacaaagacaggcaggatattctcagttcttacatagtaaatccagtctgacattccttctctgtgactctgtgtttcactctgtgaattatattttctgaattactaattttctcttcaactatgcctaatctgttgtcaaaaatccatgagttttttattgtaatttttacaattttcatttctaggagttctatttgattattttccaaatctaataggttacttttacagttgcctctyttttactgacatgtgtaaggtaagcttttttttttatttctttaagcataaaaagcatagttctgtgtttg

SEQ ID NO: 620308 - DNA, 535 bp, Homo sapiens
aaaaactgggtcatttgtctttttattattgagttaaagagttcttttacattctggatataggtcctttaccaaatatatgatttgcaaatactggatctcattctgtgttgtcttttcacctttacgatgatgttgttcacagcacaraagtttttattttaatggagttcaacttatctattcttttgctgtttgtgcttttggtgatttatttaagaaactattttctgacccaaaattgtaaagatttacttctatgttttattctaggagtttttctaatagctattttgaagtctttgtctgctaagtccactatacagaccccttcaatggctatttctgtggcctgtttttttcccttggtttttgcatgtcttgtaattttttgttaaacactggccatcttagctaatataacagctctgaataccaatcccctccagaaattgtttgtttatttgtttggtgatttggctgaaataattccacattctgtttctgctgcaatgtgcagcctctgatgcccctg

SEQ ID NO: 620309 - DNA, 535 bp, Homo sapiens
aaaaactgggtcatttgtctttttattattgagttaaagagttcttttacattctggatataggtcctttaccaaatatatgatttgcaaatactggatctcattctgtgttgtcttttcacctttacgatgatgttgttcacagcacaaaagtttttattttaatggagttcaayttatctattcttttgctgtttgtgcttttggtgatttatttaagaaactattttctgacccaaaattgtaaagatttacttctatgttttattctaggagtttttctaatagctattttgaagtctttgtctgctaagtccactatacagaccccttcaatggctatttctgtggcctgtttttttcccttggtttttgcatgtcttgtaattttttgttaaacactggccatcttagctaatataacagctctgaataccaatcccctccagaaattgtttgtttatttgtttggtgatttggctgaaataattccacattctgtttctgctgcaatgtgcagcctctgatgcccctg

SEQ ID NO: 620310 - DNA, 603 bp, Homo sapiens
ctatttcttttatttttaaaatttttgtgggtaacttctggaaaattgatttcatagttagagttacccttgatggtgctgagatgggtgtggctgacttggggatgagaagtgggtaagttcaaggatgcttgggaggtgaaaaaaatcccaaataggccttttttttttaatggctcacagcctaaatggaattaaataattaaaaattaaatacagtaaagttgattttgtttaatgttataaatgctaatctaatctttattttcctgtgtttcacttaaatttttacaaacttttttggagaaagatctacaatgcttttcctaaagtagctaatgttcactcttaatattttcttttaatatttacattaagtgtgaatctatttttcctattaactgaaaattcacggyaatcatttctgtttataaattagtagtttctggccaggtgcagtggctcacgcctataatcccagcactttgggaggctgagtcaggcagaatacttgaggtcaggagttcaagaccagcctgaccaacatggtgaaaacccatctctactaaaaatacaaaaattagttgggcctgctggcacgca

SEQ ID NO: 620311 - DNA, 632 bp, Homo sapiens
ggtttttccagtgttgtcttctggaatttttatagtttcaggtcttagatttaagtccttaatccatcttgagttaatttttgtataaggtgagagatgaagatccactttcattctcctacaggtgggtagccaagtatcccagtaccatttgttgaaaagggtgtcctttccccacttcgtgtttttgttygctttgtcgaagatcagttgactgtaagtatttgggtttatttctgggttctctattctgttccattggtctatgtgcctacttttataccagtgccatgctgttttagtgactgtggccttatagtatagtttgaaatcatgtagtgtgatgcctccagatttgttctttttgcttagtcctgctttggctatgtgggctcttttttggttccacatgaattttagaattgtttttttctaattctctgtagaattatggtggtattctgatggggattgtgttgaatttgtagattgcttttggcagtatggtcattttcacaacattgattctacccatccatgagcatgggatgtgtttccatttgttcatgttgtctatgatttctttcatcagtgttttgtagttttccttgtagaggtctttcagctccttt

SEQ ID NO: 620312 - DNA, 632 bp, Homo sapiens
ggtttttccagtgttgtcttctggaatttttatagtttcaggtcttagatttaagtccttaatccatcttgagttaatttttgtataaggtgagagatgaagatccactttcattctcctacaggtgggtagccaagtatcccagtaccatttgttgaaaagggtgtcctttccccacttcgtgtttttgttcgctttgtcgaagatcagttgactgtaagtatttgggtttatttctgggttctctattctgttccrttggtctatgtgcctacttttataccagtgccatgctgttttagtgactgtggccttatagtatagtttgaaatcatgtagtgtgatgcctccagatttgttctttttgcttagtcctgctttggctatgtgggctcttttttggttccacatgaattttagaattgtttttttctaattctctgtagaattatggtggtattctgatggggattgtgttgaatttgtagattgcttttggcagtatggtcattttcacaacattgattctacccatccatgagcatgggatgtgtttccatttgttcatgttgtctatgatttctttcatcagtgttttgtagttttccttgtagaggtctttcagctccttt

SEQ ID NO: 620313 - DNA, 467 bp, Homo sapiens
ttagggttttcaaggtaaatgatcatattatcagcaagcagtgacagtttgactttctctttaccaatttggatgccttttatttctttcccttgtctgattgccctggctaggacttccagtactatgttgaagaggagtggtgagagtgggtatccttgccttgttccagttctcagacggaatgctttcaacttttccccattcagtattatatcggctgtgggtttgtcatagatggcttttattacattaaggtatgtccctkgtatgctgattttgctgagagttttaatcataaagggatgctggattttatcaaatgctttctttgcatctattgagattatcgtgtgatttttgtttttaattctctttatgtggtgtatcacatttattgacttgcgtatgttaaaccaccctgcatccctggtatgaaacccacttgatcatggtgggttatcttt

SEQ ID NO: 620314 - DNA, 611 bp, Homo sapiens
tatcaaatgctttctttgcatctattgagattatcgtgtgatttttgtttttaattctctttatgtggtgtatcacatttattgacttgcgtrtgttaaaccaccctgcatccctggtatgaaacccacttgatcatggtgggttatctttttgatatgttgttgaattcagtgagctagtattttgttaaggattttagcatctatgttcatcaaggacatcgtttgatagttttcctttttattatcctctttcctggttttggtattaaggtgatgctggcttcttagaatgaattagggagggttctttctttcactgtcttgtggaatagtgtcaagaggatttgtaccaattcttctttgactgtccggtagaattctgctgtgaatccgtctgatcctggacttttttttctgttggtaatttttaaattaccatttcaatcttgctgcttgttattggtctgttcagggtatctaattcttcctgatttaagctaggggggttatattttcccaggaatttatccatctcttctaggttttctagtttatgtgtgtaaagatgttaatagtagccttgaataatcttttgtatttctgtggtg

SEQ ID NO: 620315 - DNA, 637 bp, Homo sapiens
tatagaaatgctactgatttttgtatgttgattttgtatcctgcaactttattgaattcatgtttatcagttccaatagttttttgatggagtctttaggtttttccaaatataaaagcatattatctgcaaacaaagataatttgacttctttctttctaatttggattccttttatttctttctcttgtttgattgctctagctaggacatccagtactatgttgagtaacagtggtgaaagtagccatccttttcacgttccaaatcttagaggaaaggctttcagtttttcccaattcaacatgatactagctgtgtgtctgctgtagatggcttttattgtgttgaggtacgttccttctgtacccagttttttttktatttttgtttgtttgtttttgagacagggtctcactctgtcacccaggctggagtgctgtggtgcaatctcggctcactgcaacctccacttcccaggctcaagggattctcccacctcagcctcctgagtagctggaagtacaggcacatgcccacatgcctggctaattttttttttctttttttgtagagacatggtttcgccatgttgcccaggctggtctcaaactcttagtgtacccagatttttaag

SEQ ID NO: 620316 - DNA, 569 bp, Homo sapiens
tagctggaagtacaggcacatgcccacatgcctggctaattttttttttctttttttgtagagacatggtttcgccatgttgcccaggctggtctcaaactcttagtgtacccagatttttaaggattttgatttttatcatgaaggaagggatcttgaattttgtcaagtgctttttcagcatcatatggcttttgtccttcattctgttgatgttatgtgtcacataaattgatttgcatttattgaatcatccttaggataaatgccacttgatcatgaagaatgatcttttaaatttgttgtagatttcagtttgctagtattttgtggaggatttttgcatcagtgttcatcagggggatattggcctgtasttttctttctctttctttctttctttctttctttctttctttctttctttctttctttctttctttctttctttcttcctttctttctttcttgtttctttctctcttttgacatgtctttgtctggtttttgtatcaaggtaatactggccacatagaatgagttcagaagtattctttcctcctctagtt

SEQ ID NO: 620317 - DNA, 569 bp, Homo sapiens
tagctggaagtacaggcacatgcccacatgcctggctaattttttttttctttttttgtagagacatggtttcgccatgttgcccaggctggtctcaaactcttagtgtacccagatttttaaggattttgatttttatcatgaaggaagggatcttgaattttgtcaagtgctttttcagcatcatatggcttttgtccttcattctgttgatgttatgtgtcacataaattgatttgcatttattgaatcatccttaggataaatgccacttgatcatgaagaatgatcttttaaatttgttgtagatttcagtttgctagtattttgtggaggatttttgcatcagtgttcatcagggggatattggcctgtagttttmtttctctttctttctttctttctttctttctttctttctttctttctttctttctttctttctttctttcttcctttctttctttcttgtttctttctctcttttgacatgtctttgtctggtttttgtatcaaggtaatactggccacatagaatgagttcagaagtattctttcctcctctagtt

SEQ ID NO: 620318 - DNA, 549 bp, Homo sapiens
gtccttcattctgttgatgttatgtgtcacataaattgatttgcatttattgaatcatccttaggataaatgccacttgatcatgaagaatgatcttttaaatttgttgtagatttcagtttgctagtattttgtggaggatttttgcatcagtgttcatcagggggatattggcctgtagttttctttctctttctttctttctttctttctttctttctttctttctttctttctttctttctttctttctttcttcctttctttctttcttgtttctttctctcttttgacatgtctttgtctggtttttgtatcaaggtaatactggccacatagaatgagttcagaagtattctttcctcctctagttttcagaataggttgagtaggattggtrttagttcttctgtaaatgtttggtaagattcaacagtgaagccactgggtgctgagcttttctttgctgaaagactttttattatggcctcagtcttgttacacgttgtctgttcaggttttggatttcttcatggttcgatcctgata

SEQ ID NO: 620319 - DNA, 525 bp, Homo sapiens
tggagtcaggaatcaggaatctaccctgtgttccattctactgcagctgagctggcacccaagccacaagacaaagtccttcccactcttccctcccctttcctgaagcagaggagtctctccccatggccaccaccaccccaggcccatggcaagtacttcctagccactgccgatgttcactcaaggcccaaggactcttcaatcaacttgtggtgtcagtcctgagcctctcccttcagggaaatgggtttccctgcggcccagggcagttatagaaatgccatccaggagccaagtcctggaattagagaccccagaagcccatttgttgccctacccccactttggtaaagctggtacccaagctgcaagacaaagtcccctttactcttccctctccctttctcaaggagggagggggtctcgctccatagccaccacagctggagatatgctgggtyacgtctgaagccagcatttctctgagtttaacccaaggcttatagcaaatacagcccggct

SEQ ID NO: 620320 - DNA, 634 bp, Homo sapiens
caggtgatgaattctgccaggcctggctcctttccttcaaaggcaatagtttctcttctggcccagggtatgctagaaatgacttccaggatttagagcctggaatgggggacctcaggactcttcctggtttcttattctactgtggttgaactgatatccaagtggcaagacaaagtcctctttactctcccctctcctctcctcaagcagagagaaggagtctctccctgagctgcactgcctgtggctggggaagggatgatgcaagcactcttttggccaccccagctagtatctcattaggtcatgtgcaccccaagtccactgctctgagtccagcacagcaccaggacttgccaaggaattgcaattcttgcggcctaaattgccattcaagtttatttaggatcccagggtgctttagcccatggttgcaggatctgctggaactcaagttctcatcaccaagatggacaatttgcccctggctagggctggtctaaatactccctctttgggtgttggctgagttttaccttgtgttgttttctgctrtgacacggcagcactgagttccaatgcaaagtcccacaatcagtgtgctctcactccccactgtgctctcactccc

SEQ ID NO: 620321 - DNA, 666 bp, Homo sapiens
tctgctggaactcaagttctcatcaccaagatggacaatttgcccctggctagggctggtctaaatactccctctttgggtgttggctgagttttaccttgtgttgttttctgctatgacacggcagcactgagttccaatgcaaagtcccacaatcagtgtgctctcactccccactgtgctctcactccctcaacattctctcactcccctattctctcttcgttccatgaggccactgctagaggatggagaaggatcgtatagctgactcaagactgtctttcctaccctcttcagtgccccttttcttaatatgatgttaaaaccagggactgtggtcactcacctgatttttggttcttatgaacatgctttttttctgtggatagatgttctgtttggtgtttcgtgggagggacaatcgctggaggcttctattcagccatcttgttccrccttctcatctctatttctttatattgatttgtgaacatcttcaaaaccctgcatccttgagaatcttcagtccttcagtgtcatttgaatagttcagctggatctcactggtttattcctttaaacaaataaaatatcataccttttccactaggctacagaaccaataacgcaaggaggggtaaaacgggaaagaatttgagtgga

SEQ ID NO: 620322 - DNA, 666 bp, Homo sapiens
tctgctggaactcaagttctcatcaccaagatggacaatttgcccctggctagggctggtctaaatactccctctttgggtgttggctgagttttaccttgtgttgttttctgctatgacacggcagcactgagttccaatgcaaagtcccacaatcagtgtgctctcactccccactgtgctctcactccctcaacattctctcactcccctattctctcttcgttccatgaggccactgctagaggatggagaaggatcgtatagctgactcaagactgtctttcctaccctcttcagtgccccttttcttaatatgatgttaaaaccagggactgtggtcactcacctgatttttggttcttatgaacatgctttttttctgtggatagatgttctgtttggtgtttcgtgggagggacaatcgctggaggcttctattcagccatcttgttccgccttctcatctctatttctttatattgatttgtgaacatcttcaaaaccctgcatccttgagaatcttcagtccttcagtgtcatttgaatagttcagctggatctcactggtttattcctttaaacaaataaaatatcataccttttccactaggctacagaaccaataamgcaaggaggggtaaaacgggaaagaatttgagtgga

SEQ ID NO: 620323 - DNA, 508 bp, Homo sapiens
ctacacaagatctgaaccccctgagaaataagacaaaggactaacatggaaagaggccaagatagcatcttcgttactgacaaaactaagttgaaggacctagcttttacccgtggcctcgtgcaccttctactgtttgaatcaggcctacttggccacccagtcccaggaaggactgaagcccctctgcagatttccccttggaggatcagtttcctaggcgatttgtcatggagaggtagaacacagtgtgtgactcggggagcttactctcagaaggaataaggaagaaactgagctgactatgcccagtttattctgcccaaatttacagatcagttaagtttttccagctctcctggaagggagtgaataaaggagcagagggaggccaagagtgtcactcttatcaagctcagcccacaaaatttagaacctcaagagtggtgsagaagtatttaccctccaataccacacagtgtttttctgaaaggccccaacatggtct

SEQ ID NO: 620324 - DNA, 626 bp, Homo sapiens
atctcagtctaaaaattcagatgtgcaagaaatattatttctttcattttctgtaaatcaaacttaatttctaatctaagcccactcttgctgggtagatgggaaattcagtctcagccattttgaggattccctccttcacattagtacaaaagctccagagtcctacayaactgtaagacattgagggggttccgctgatgcttagtgccctggtaatgaggagatagtcaccgtgccagttcacacagctccagtggctttgctgataccaagttatgcctgctgctcagagtcctaggccagcatatggaacggccatggttcttacctggggtctttctacttttctagagttctgcctccctttgctctctctaaacccacagatacaaagagactctgggaatctcttgacaatgtgggagaattgcccctttccacgtttctcttagaacccttttttctccaccgaggacacttagctcaacctccttaaaggctttaaacatttccaaacaaattcagaaggagaagtcaaccataattttaccagctctgaagcaagaaagcacagaatctgtaaactgcattcatagaaaaaggagaagaaaattcaaaaatta

SEQ ID NO: 620325 - DNA, 626 bp, Homo sapiens
atctcagtctaaaaattcagatgtgcaagaaatattatttctttcattttctgtaaatcaaacttaatttctaatctaagcccactcttgctgggtagatgggaaattcagtctcagccattttgaggattccctccttcacattagtacaaaagctccagagtcctacataactgtaagacattgagggggttccgctgatgcttagtgccctggtaatgaggagatagtcaccgtgccagttcacacagctccagtggctttgctgataccaagttatgcctgctgctcagagtcctaggccagcatatggaayggccatggttcttacctggggtctttctacttttctagagttctgcctccctttgctctctctaaacccacagatacaaagagactctgggaatctcttgacaatgtgggagaattgcccctttccacgtttctcttagaacccttttttctccaccgaggacacttagctcaacctccttaaaggctttaaacatttccaaacaaattcagaaggagaagtcaaccataattttaccagctctgaagcaagaaagcacagaatctgtaaactgcattcatagaaaaaggagaagaaaattcaaaaatta

SEQ ID NO: 620326 - DNA, 563 bp, Homo sapiens
aaatcctatgacttatcagctgaaaatcattgtatattttacatggatcataaattgtattcttcttattattattcgttcacttattcaacaagtttttgtctagacttttttatagtagttactgttctaagcactgggagcacagcattgaataaaccaggcaaaagtctttcttcccttggagtttatattctaatgggaaatgatataaaataaataagataaataagtaatatatatagtacatgtacattgtgatagatgctaaagagatgaagtcggtaaagggaatgggggattggaaagtggtcaagaaggyttgcaatatttgatagcatggttggggaaggcctccattacatggtgaccatgttaaccattaatattatagtattcttcatcaatatttctggttcttctgagcacatgaaaagattgtatttccttgctacattggaattagagatgccaagtgacttgctttggctgatgaaatgtgagtagaagtgatgtatgctgctttgtcatggaagctttaagggctggtatatgattcatca

SEQ ID NO: 620327 - DNA, 604 bp, Homo sapiens
gattccagcaagtgcccagagttaaaacatcaagtgtgtgactcagtgagactgtcccttttctgtatgaagagaattagcccaaggagcaaccttgatgaatccactctttggcagttaagaaggaaacrgatctatccacaaatcatggaatctaccaaaagctatgtataccaaaagagcatcttcctgcaggaagagagctaacagaaacttggaatggtgagtaacaaataggctatcacctttagttatcccttaccttgcgctaggcattttgcatacattgccttatttaatccttgcaacaatcctaggaaggaggtactgttttcatgccctgtttagagatgacgaaactgaaacccaagaaaggttaagcaacctaaaattacacacccagtaagtgactgcactgggaatccaacctaggtatatctaagtccaaagagatgggattttgcctccatttccaataaggcaagggttgtccttttctctgttggtaactattgaatgagagtcaccttctccactcttacctagggcagctattttgcttagaagatgggtcacttttgatcacatttcttgtcttcctttt

SEQ ID NO: 620328 - DNA, 532 bp, Homo sapiens
ttgcaaacatctggagagaattagctcccaggcctctgtaccatacccattttgtggttctagggagacttgtgtgctaggggatgttgttgcccttaacgagctttctttatggtgtttaactgtaaaaggtaccctcgttaatattaatagacaaagagaaagcaaggccactccactcgtatttagcaagggcttgactatgagtgagaacttcatgccgaagtgggaataatgaataccatgaacacgagattgaagtataagataaagtaaaatatcattatcataaaaygtctggacacttgaaatgagtctaagtctatacctatgctattcaatataataactactaacctcatgtggcttttgagcattggaaatgtggctagttcatattaagatttactataagtataaaacatacactaggttttaaagacagcataaaaatgtaaaatatctcattaatgacttttatattgattgtatgttgataatactttggagatagtaggttaaatgatatatg

SEQ ID NO: 620329 - DNA, 592 bp, Homo sapiens
ggagcagtggtggtggtggcagtggagggttaaakattaagatgcacagagaaaaacagagtttttaagacatggaatgggcggaacatgaaggtctgtgctagtggagctcaggaagcagtgaagggacaagagctaatgtttatcaacattgaaaggctcatgtgctgggtgagccaccactttttacatctcaagaaacataatcataaccctgtgaggtagcttttgtgcccattgtatggatgaggaaccagaactcaaaaacatcaaaatatgtacctgcagctcacaactgatagcacaatccatcggagtctgcagatcaaatccatcccgccactcactcctttgcattgtcagggaaggaggaaagtgaagactgaagcttagctggaaggatagatagaatttaaatgcttccttcaaaacaagaagcctgcaaagcagagaaatagtcctatctgtctgggaggcagcctgctgcagttgacttgaacagctctttgaggccactgtcgcttctgagccatagctgatttagaaaacaaggcaaagaagacagcaatgaggctatacctcaaaccctgcc

SEQ ID NO: 620330 - DNA, 592 bp, Homo sapiens
ggagcagtggtggtggtggcagtggagggttaaagattaagatgcacagagaaaaacagagtttttaagacatggaatgggcggaacatgaaggtctgtgctagtggagctcaggaagcagtgaagggacaagagctaatgtttatcaacattgaaaggctcatgtgctgggtgagccaccactttttacatctcaagaaacataatcataaccctgtgaggtagcttttgtgcccattgtatggatgaggaaccagaactcaaaaacatcaaaatatgtacctgcagctcacaactgatagcacaayccatcggagtctgcagatcaaatccatcccgccactcactcctttgcattgtcagggaaggaggaaagtgaagactgaagcttagctggaaggatagatagaatttaaatgcttccttcaaaacaagaagcctgcaaagcagagaaatagtcctatctgtctgggaggcagcctgctgcagttgacttgaacagctctttgaggccactgtcgcttctgagccatagctgatttagaaaacaaggcaaagaagacagcaatgaggctatacctcaaaccctgcc

SEQ ID NO: 620331 - DNA, 592 bp, Homo sapiens
ggagcagtggtggtggtggcagtggagggttaaagattaagatgcacagagaaaaacagagtttttaagacatggaatgggcggaacatgaaggtctgtgctagtggagctcaggaagcagtgaagggacaagagctaatgtttatcaacattgaaaggctcatgtgctgggtgagccaccactttttacatctcaagaaacataatcataaccctgtgaggtagcttttgtgcccattgtatggatgaggaaccagaactcaaaaacatcaaaatatgtacctgcagctcacaactgatagcacaatccatcggagtctgcagatcaaatccatcccgccactcactcctttgcattgtcagggaaggaggaaagtgaagactgaagcttagctggaaggayagatagaatttaaatgcttccttcaaaacaagaagcctgcaaagcagagaaatagtcctatctgtctgggaggcagcctgctgcagttgacttgaacagctctttgaggccactgtcgcttctgagccatagctgatttagaaaacaaggcaaagaagacagcaatgaggctatacctcaaaccctgcc

SEQ ID NO: 620332 - DNA, 592 bp, Homo sapiens
ggagcagtggtggtggtggcagtggagggttaaagattaagatgcacagagaaaaacagagtttttaagacatggaatgggcggaacatgaaggtctgtgctagtggagctcaggaagcagtgaagggacaagagctaatgtttatcaacattgaaaggctcatgtgctgggtgagccaccactttttacatctcaagaaacataatcataaccctgtgaggtagcttttgtgcccattgtatggatgaggaaccagaactcaaaaacatcaaaatatgtacctgcagctcacaactgatagcacaatccatcggagtctgcagatcaaatccatcccgccactcactcctttgcattgtcagggaaggaggaaagtgaagactgaagcttagctggaaggatagatagaatttaaatgcttccttcaaaacaagaagcctgcaaagcagagaaatagtcctatctgtctgggaggcagcctgctgcagttgacttgaacagctctttgaggccactgtcrcttctgagccatagctgatttagaaaacaaggcaaagaagacagcaatgaggctatacctcaaaccctgcc

SEQ ID NO: 620333 - DNA, 570 bp, Homo sapiens
acttgaacagctctttgaggccactgtcgcttctgagccatagctgatttagaaaacaaggcaaagaagacagcaatgaggctatacctcaaaccctgcccatctgcactaaaacacctcccactgccactctatcaaatggacttggtcgtgggttttgagattttgckaaaaattcagtatgggtgaagtggcatgctcctgtaatctcagttacttgggaggctgaggcagggggatcgcttgagactaggagtttgagatcagcctgggcaacatagcgagaccctgtctgaaaaaacaaaacaaaataaaaattccagcagtatgagttgggaaagttaatagctctttgagcatcagtttcttcttttgtaaataaaaagaaatatgcctgattcacattttgttgagaagacttaatgtgctaattttataaaacacctagcacaatgcctggcacagagtaagcattcgataaatatgcgatccctttccctccacacagttgcacagttgcctccctcgctggactgtcatatgcatatatgcatctttgtgtccccagct

SEQ ID NO: 620334 - DNA, 560 bp, Homo sapiens
tctgcgcccctttctctgcctcaccccatcgtagcttaacaattatttcaatctctcctagaaatagtttataaatacattggtttttagtagttcagaaatgtcaccaaatcacaccacctttcaagcctaaaaaagcggtatccaccattagaagmaagcagcttttctttcatttccttcttgatcattgagctgagatgttttagaaggtatcatttataaactaagatgacttagaaccagcatccacctttcagaggatataaatactctttcgttccacatatggtcccatctggtggttctatacacaaaccatgcctcttggtctggcttccatttataaaatttggcatatgagaaatacagaactgtggttccaggtctggctctcccagtgtttagaaaacacatatctacacctccacaccctggcagtggcccaggcctgaccatgcattcagaatttgagggaaagggtttgccttggaaaacctctagtgaggcagtcttttttgtgatatgatctgactcctctgtagagcttcttacttcct

SEQ ID NO: 620335 - DNA, 521 bp, Homo sapiens
tttctcagcctgcttcctgaacttagtagttttgagagccaaaastttcctatcattttgtagtgtctcagtctctttcagttcaagctggcagtgtttgctgatacaattttcttaaaaactttgttggttttctatgagtcttatcgagattcaatccattagacaaaagctgcactcacaagtcttgtcaaggtaagttattcttcttgggcttcctacaaggttctgtgggacaacaaccataagatccttaggagccctattgtttaatagagaggatctgtaaggcatactcttaagaggcaccatcttaaatctttctgaagtcttaccaaaagtcttacagtcatatgttggactgcaattatataccatgtttctacagccctcctagatttgaactctgtcccaaatccatttcttaattttagcacatttgccatctggaaaagctgtgcatgagagacaatttcttttccaaaccagcaagcgcttgttagtttatatttaacagtcgt

SEQ ID NO: 620336 - DNA, 609 bp, Homo sapiens
acgctgactgtattccaatttgctatttacctattgctgtgttttaaaacactccaaaacttaatagtgtaaaacaataacattgagtttatccatgaaactgcaacttgagcagggttcgataggggtatacttatccctactccacttagctagggctacttaatggaaagggactagaatccactgaaggctcattcactcatgtctggtaattaatactggccattagcttagactgtagctgggctgttgtctcaaacacaatcatgtagcctatccatatattctgggcattcttccaaaatgatggctgtcaccatttgtcacttattccaaggataagtgtttcaagagacagccaggtggaaattgcrtcatctttttcaacctaaccttggaagacattcagcattacttctgctgcatctattcattaaaagtttttcactaaggagtgatgtcagatgagaaactctgaaatttcacccctccaaaaaagcaatgtaaaaactgacaaaaactgtctgaatcaactttttcagaactcaagaaataaactaaagtcttgaagcaagctgaggaatgcctattcaagaaaaacagctg

SEQ ID NO: 620337 - DNA, 583 bp, Homo sapiens
gtcaaagtactgaaagaaaaaaacctgtcatcaactaaaaattctatatctagcaaaactagccatcaaaaatgaaggagaaattaagatattcccagataaacaaaacagagagtatgttgctatcagactttccctacaagaaatgctaaagggaggcttttagcagaatagataaaaaaagacatgatccatttatatgccgtgtataggagactcattttagaatcaaatatacaaataggttgrgagtaaaaggatggaaaaagatattccatataaacggtaactaaaagctggagtggagatactaatatgagacacaataaatgttaaaacaaatgttgttactagaggcaaagaaggatgaaatatcaaggcatcaagaatatatgacaattctaagcatatataacgtatacaacagaaccccaaaatacatgaagcacaaacggacagaatggagaaatagtttagaaatgtcaaaaattggaaacttcagtaccccactttcagtaatgcataaacaactaggcagaagatcagcaaggaaacagaagccttgaacaacattataagctat

SEQ ID NO: 620338 - DNA, 543 bp, Homo sapiens
tggccttacagataaaaaggagtataagggaatacttattgtattccaatagataattgtatgccaacatattaggtaactagatgaattgtattaatttctagaaacacacaaaataccaaatctgattcaggaaaaatagtaaacatgaatagacctacaatgaagagattgcattagtaatcaagaaacacttccaacaaagaaaagtcgaggatcagatggcttccctattgaattctcctgaacatttaaagaatacttgacaccaattcttctcaaattctcccaaaaaatggaaggggagggaatgcttcataactcattctgtgaggccaatattacattgataccaaggccagacatcataagaaaactacggaccaatatcccttgtaaatagagatgcaaaagtcctcaayaaaatacttacaaaccaaattgagcagtatagaaagaggattgcacactatgaccaagtggaatttatcccaggaatggaaagttgattcaaaatatgaaaatcagtatatcacaccatat

SEQ ID NO: 620339 - DNA, 532 bp, Homo sapiens
tgcagtctttggctgtcaaatctgtttgtttgtttgtttgtttgtattttacttttgcttatgatgtcatattccctcatatgttgtaaattttttttaattatactttcggccgggcgtgatggctcacacctgtaatctcagcactttgggaggccaaggcaggcggatcacttgaggaaaggagttcgagactaggctggccaacatggtgaagcactgtctctactraaaatacaaaaattagccaggcatggtggcatgcacctgtaatcccagctacttgggaggctgaggcaggagaatctcttgaacccaggaggcagagttgcagtgagctgagatcatgccattgcactccagcttgggcaacaagagtgaaactccatctcaggaaataaaaattaaatttaaaaataaaattatactttcatgaaaaatggaattttatctttgcgaattttgaagctaatatatgaaacctctggaaaagatttacatatgtatgtttcttagacatcaggaactactg

SEQ ID NO: 620340 - DNA, 583 bp, Homo sapiens
gttgacttcatgtatgataaagaagtaatagaaggatgacctgtctcctaaatcatttgttgggcttattttgtgagtgcttctcttttgytaacatgatataattttatttagttctgtataaattcaaattaagcatataaacatgaatttgttaaaatacatttattattacttctagtaatattaaatataaattcaatatatgtatttggctcctgaaattatctcttaaattattccattttttgcctcgaatcaaaaacagcctagagcatttgtatcactttcaaaaaatgcaaatgtcacctaaaatgaatgcattctgatctaattaaaaattaaatgttttcttcaaaaaattacactaaaacttacttgaaaaaaaaatttaaactgatgacaaaatcatcattatttatactccatcttcctaagcataatgatattaattcacaaagggtaacaaaagcatcagttctcaaattcaaatacatagcctttattctgtgttgaatgaccagggccaatatccatgtagaggatatgctatattgaaatgactgcaccagtttttactagt

SEQ ID NO: 620341 - DNA, 632 bp, Homo sapiens
tttattaaacacatgttatgtctcaggtgcatcacgtgtcttttctcacttaatctttaaaacaatattgagagaaagacattactaaaaaacatttcatacataagcaaacagactcagagaagttatatgacctgttcaagaacacacagcagtgccagaatctgaaactaggtctgcctgactgcaacattaatgctgtctttctactgttttactctgcctctaaatgaaaaaacaaaaaaaccccatacaggtataccttccaccttaggaagaggaaagggtagccaaaaccacttgctctatcaaaatgtacttggagggaaaaaaatgtaccttggtactgggtcaaagacagtcccccaggacaccaatataatttaatatggcacttcttatactgtaaaccattcctttttctttacttgatgcagaaatctcttttctctgygatagaactttctgctccaattgccatggctaatattaaactatggctattttaattttttcagagctgttaagggacatttgcttttgtttgagcctaaatacatttgaagtgctgggagggttaggaatgctggcatattcttaagggtcagtttttcattcatacattcaataat

SEQ ID NO: 620342 - DNA, 659 bp, Homo sapiens
cactgcatctagcaaccatgtttatgacaaaaatacaaaggggtaaaagataacctctccttttctgtctcaacttagaacatcaggtatgacttagataaatggatgaagaaaagaggatgttacaaaaagagaaccatgtgaataaaggaagagagacaagaagaaatgtggcacactgtgaaacaataytagatcaattatgattggagtagagacttgctataggggagtaatggataaaaaaaggtcgtggaaagggagggagtcaggctctggtagaaatggcaggcatgaaggggaaggagcttgagtctgaagaagacttgaaggcttctgagcagaaaatgatatgagaaaacagtgctttagaaagctaaatctggcagcagggtgccagatggagagatgtggccaaccaattgccttctatgcccttgactcaaaggactttatttccttgtatctaaaagtaattgttttataataaaagaatacttttagaaagaaatatctggaaaaggtaggtacattaacctagcctaccacaccagtcaatttcattcagatgatcaagagagtctctagtgacacagctagatcaacttcacactagactgctgctgtgcatacaggagataatggctaactatgtgcca

SEQ ID NO: 620343 - DNA, 351 bp, Homo sapiens
gtaactgcagataaagatatgtaccatgcaggaaaataacagggtgttctttaagagaaaaagaatattagcctaatttagtctgggatgattagaatagactcaaaggaaatgactctgagccctcaaagatgaaggaaaagtgawacaagggttccaggcagagaatagcctgtgcaaagtccctgagtttatgtagactttggcattcaaaaaaatgaagtaaggctgatttagctgaaaggtaatgagtgtgcagtaaatgtgaagaggtcagcagggctcagatgatcccaggccttgaaggccacttgacggttttgttttcatactaagcacaatgggcaacca

SEQ ID NO: 620344 - DNA, 486 bp, Homo sapiens
acagggtgaaacgccgtctctgcaaaaatacaaaaattagtcaggtgtggtggcatgcatctgtagtcccagctactcaggaggctgaggcaagaggattgcttgagcccggsaggtcaagactgcagtgaacagtgatcatgccactgcacttcagcctgggcaacagagcaagactatctcaggaaaaacaaaaaaacaaaacaaaacaaaaacgctgagctggccacagtgagtatggcatgtgaggaaaagcaggaactcagagaaataagatctgatgtctcttgatcctgcctttagattgcccaaagtacttgcccaatgtatagaaagtttattgaattcaccaagaaagatacttttaaaaaataatctagaaagccaagaaaaaggttactgagattttccttcattaattcatatatttaatcattttttaaattcaacaaatattgagtgtctccaacaagggccaggaattct

SEQ ID NO: 620345 - DNA, 567 bp, Homo sapiens
  misc_feature 193, 194, 195, 196, 197, 198, 199, 200, 201, 202, 203, 204,205, 206, 207, 208, 209, 210, 211, 212, 213, 214, 215, 216,217, 218, 219, 220, 221, 222, 223, 224, 225, 226, 227, 228,229, 230, 231, 232, 233, 234, 235, 236, 237, 238, 239: n = A,T,C or G
  misc_feature 240, 241, 242, 243, 244, 245, 246, 247, 248, 249, 250, 251,252, 253, 254, 255, 256, 257, 258, 259, 260, 261, 262, 263,264, 265, 266, 267, 268, 269, 270, 271, 272, 273, 274, 275,276, 277, 278, 279, 280, 281, 282, 283, 284, 285, 286: n = A,T,C or G
  misc_feature 287, 288, 289, 290, 291, 292: n = A,T,C or G
aaggagattggaagagagccccttttgtttgtgtgtacgtgatcaaagctggaagcttttcaacagtgagttactgtgctgaacacagaaaaactaagcctttaaaataagcctgttcaggtttcacggcatatttttagaaatcagtctattcttaagaaattgtgtggcattgtttcatattttactttgnnnnnnnnnnnnnnnnnnnnnnnnnnnnnnnnnnnnnnnnnnnnnnnnnnnnnnnnnnnnnnnnnnnnnnnnnnnnnnnnnnnnnnnnnnnnnnnnnnnnaagctttttgaaaacacagatattcttttttttttccctctctaaaaagacgttgagggaaacagaagactaaatatgtttcctggacacaagaaaagtctgatgaaagccatttttcattttatttccatgctgtgaatgcatattcaggctattcaaactaccgcagcagtctggttctcaagttaaaccaccaaccaccagtccataggggtgaaaaaamctatttttatgcactgtgacatttttaacttgtaaaacattgcaaatgtagg

SEQ ID NO: 620346 - DNA, 543 bp, Homo sapiens
taccttttgtttgatatgaatttatatgtggagaaaaactattttttgaaactttatgaaatatctcattaagtcttatgacattgttcaactagaagagtaaatatcagctgagtttctgaaggacacagcaaaatgggcaattaattcactacatacaccccaaattattgtcattccttgggcctgaatagttctctatagatctggccttttataacttaactctaaacaaaatagggactccttcagggcctttccaagtcattgtctgggaaatcattttatccccaattcttgcatattgtcaaaggacttccatattcattgtttcatgtgatactagcaaaacttgtaaaagactgaataggtattatgatcacaattaatagttccaaggtcacatggataatgacttactttactaggaatagaaatgyaatcttcaggttttcattcctgatcttttcccttctacactccataagctaaataaacgaaaaagaagtaccaagagattagtagctactaaggatgatctta

SEQ ID NO: 620347 - DNA, 630 bp, Homo sapiens
gccaaaatgccaaaattttacatctatgaataaaatttaaaagtgagaaaagcagtttgaaattatctcgtacacagaagtgaagaagccaggtttgaggcatatcgtgaagaattctgcccctcttccccaaaagacaagggttcgccaaattttggtggcattaattaggactcttactcagaatcatcttagtactcatgacattgagcaccaaaacgggacattagacaacagccacacaggtgcagctttaggaccacagcggacttcctcagcacatctaaaaaagggagctagagaagatgcaccaatcatagactatgaataagaaagattatagttcatctactagggaaaatacatttggggtatttctacaagctaagggaataatagaataccaaagttcaggtaacttcaaggctggtagctacaacattgattcaatatcagatctctttggggaatactgcttagaacctgaattcaaatagaacggtcatatttcacaaagttctgatcatagttattatgtctctttatatagcttggattgttcartccataacaagagtccagtgacccaggaacataactgtatttcccctgctgaagcacagtttcata

SEQ ID NO: 620348 - DNA, 560 bp, Homo sapiens
tccctttgtttttctctttttactcttttggacggctgacattgaagataaagacattcacaagcaactgtatatatgggtgaaattaggaagtcaccatgtagacacagtgggaagatacaagttcagaaaaaaayctgaggagagaataagtttacacctcatgctaatacttggcacagagacagctgcaacaataaaaaaaagtcaagaacaaaacagcaaaccctcagaaagaaagagaatccggttatcagagttaacatattattagattcaaatgctcagttttcaagtgaaaatcagaaggcatacaaaatactaagtgtaaaatactgtcaaccaacaatactagattcagcaaaactgttatctaaaatgagggagaaattaaggcattccaggtaaacaaaagctgggggagtttattacctctagaccttccctgcaagaaatgctcaggggagttatttgggatgaaattaaaggaccctagacaataactaaaagctatacaaaaattaaatctgaattaaaaataggcaattttaaaagctagt

SEQ ID NO: 620349 - DNA, 560 bp, Homo sapiens
tccctttgtttttctctttttactcttttggacggctgacattgaagataaagacattcacaagcaactgtatatatgggtgaaattaggaagtcaccatgtagacacagtgggaagatacaagttcagaaaaaaacctgaggagagaataagtttacacctcatgctaatacttggcacagagacagctgcaacaataaaaaaaagtcaagaacaaaacagcaaaccctcagaaagaaagagaatccggttatcagagttaacatattattagattcaaatgctcagttttcaagtgaaaatcagaaggcatacaaaatactaagtgtaaaatactgtcaaccaacaatactagattcagcaaaactgttatctaaaatgagggagaaattaaggcattccaggtaaacaaaagctgggggagtttattacctctagaccttccctgcaagaaatgctcaggggagttatttgggatgaaatwaaaggaccctagacaataactaaaagctatacaaaaattaaatctgaattaaaaataggcaattttaaaagctagt

SEQ ID NO: 620350 - DNA, 560 bp, Homo sapiens
tccctttgtttttctctttttactcttttggacggctgacattgaagataaagacattcacaagcaactgtatatatgggtgaaattaggaagtcaccatgtagacacagtgggaagatacaagttcagaaaaaaacctgaggagagaataagtttacacctcatgctaatacttggcacagagacagctgcaacaataaaaaaaagtcaagaacaaaacagcaaaccctcagaaagaaagagaatccggttatcagagttaacatattattagattcaaatgctcagttttcaagtgaaaatcagaaggcatacaaaatactaagtgtaaaatactgtcaaccaacaatactagattcagcaaaactgttatctaaaatgagggagaaattaaggcattccaggtaaacaaaagctgggggagtttattacctctagaccttccctgcaagaaatgctcaggggagttatttgggatgaaattaaaggaccctagacaataactaaaagctatacaaaaattaaatctgaattwaaaataggcaattttaaaagctagt

SEQ ID NO: 620351 - DNA, 542 bp, Homo sapiens
gagatggaggttgcagtgagccgagatcatgccactgtacttcagcctggacaacaaagcaagactctgtgtcaaaaaaataaaaataaaaataaaaaaataaagtgaatcccacagatttgcttatattctttataactagattragtgtctacaacagggctctttttgactaactttatggggatatacaacaggtgccaaccactccacattccaaaagaaggcaaagacttgctttgcaggacttgcaaagaggtgtccaaaatgttttcctggccttaggctcagcatccccccgaaggttatgaaggaagagctgtggtctccccttggagagattggatggatgctgagtgctcatcttcttccccttccctgacagacaacttgatgtgcatccctggacttacagggacaaagaagtgtccgatttattccagaaaatatttaaaggatgagaggcttgcaaagaggcccagagcaaaatcaaagaaggctatagcctgaaaataattttattcccccgatagcaggccaga

SEQ ID NO: 620352 - DNA, 586 bp, Homo sapiens
gaagagattgccaaggatgtgtccaaatggggtggtgggtaaaagactttgaacgttttccaaatgtatgccaatacatctagactttacttttgagctagaggaagaacaggtgcagccaaaattaattggaaaagtgatagattgcattttgtttgagaaggataattctgctattaaaagagtagattgcaatagagagagtcaagaagacaccagtttcagtggtcattgtgaaagaggacttggtttcatggagctgggggaaagaggtcagagaccatgggcaggawtttgtggtcaacttgacatcgggatgatgtacaaagaaaaggcaaagaggaacaatctgggcagtgatgtcagtcgaaatttgggcagatcgttttgatagaatggatcaaatggaatccaaataaagtaaaattctcaattatgagaattcaattaaataattttgctttaaaggaaactaagatttttaaatgccaaagataaaagctgaaagtcattataactttagtcttccctaaaagtgacttaagcaagaaaaaaaaacagtatatttttgaaactagttaacagg

SEQ ID NO: 620353 - DNA, 597 bp, Homo sapiens
tcagtttctgactcaccctgrttttgagaaactgtttcttagggtcattccctaaggttggaatcgctctctctctctctgttggttagtgccctgtaaacactgacaattttctttctcttcagttcttcattcttggtctagtgcttcagtttccaagtctacatgactatgctacagtgtaaggttatttagacgtacaatttcatgatttctttcttctgggattatttgcttgacttgtgattagcttgcctgatcacagacaatagtaactttttaaccattcttacatgatttcccttttccttaaatttgttgtttctgtattagaagcaggaaaaaagggccaacgtttagaatttgaaaagcagtgtttgaatgcacttgttacctggtaaaccagtcatttactgctatcttacaaatgaccacagcacatggtagacttaaagaacaattatttgcacatttctcaattttgtgggtcagaaactggcagcactcagctgagagactcttctgttttacggggattcacagcgttcactcagagacagatagctggtgggcaggccggtgtcagggaccaaggat

SEQ ID NO: 620354 - DNA, 545 bp, Homo sapiens
atttcccttttccttaaatttgttgtttctgtattagaagcaggaaaaaagggccaacgtttagaatttgaaaagcagtgtttgaatgcacttgttacctggtaaaccagtcatttactgctatcttacaaatgaccacagcacatggtagacttaaagaacaattatttgcacatttctcaattttgtgggtcagaaactggcagcactcagctgagagactcttctgttttacggggattcacagcgttcactcagagacagatagctggtgggcaggccggtgtcagggaccaaggatggcatcactcgtgtgtctggcccttgacagggatgctggaggtctgggctcacctgggaatggagatggcaacacctacatgtgacctttccagcatggcagtctcagagtggatatggcaacagctgcacatgamctctccggcatggcagtctcagagtggatatggcaacagctgcacatgacctctccggcatggcagtctcagagtggatatggcaacacctgcacacgacctctccgg

SEQ ID NO: 620355 - DNA, 545 bp, Homo sapiens
atttcccttttccttaaatttgttgtttctgtattagaagcaggaaaaaagggccaacgtttagaatttgaaaagcagtgtttgaatgcacttgttacctggtaaaccagtcatttactgctatcttacaaatgaccacagcacatggtagacttaaagaacaattatttgcacatttctcaattttgtgggtcagaaactggcagcactcagctgagagactcttctgttttacggggattcacagcgttcactcagagacagatagctggtgggcaggccggtgtcagggaccaaggatggcatcactcgtgtgtctggcccttgacagggatgctggaggtctgggctcacctgggaatggagatggcaacacctacatgtgacctttccagcatggcagtctcagagtggatatggcaacagctgcacatgaactctccrgcatggcagtctcagagtggatatggcaacagctgcacatgacctctccggcatggcagtctcagagtggatatggcaacacctgcacacgacctctccgg

SEQ ID NO: 620356 - DNA, 569 bp, Homo sapiens
ttcaagttggtctcgaactcctgacctcaggtgatccatcgtcttggcctcccaaagtgctaggattacaggtgtgagccaccacgcccggccctagaattctttttcttaaagacaattataatggtaattccgtttaaaatgtcactataaatctatttcatttattactgcatgattttaatctattattccacttaaaagaaaaacaaatcagagaaatcagcaagggggcaataacaaatgtgggttagggtacacagcccactttgggaccatattcaatgaagaataagatgagagaaagataatgtgatttcttttattattattattattattatactttaatttctgggatacgtgtgcagaatatgcaggtttgttacataggtatacacgtgccgtggtggtttgctgcacccawcatcctgtcatctacattaagtatttctcctaatgctatccttgccctagtcccccaccccccgacaggccccagtgtgtgatgttcccctccctgtgtccttgtgttctcattgttcaactcccacctgtgagtgagaaca

SEQ ID NO: 620357 - DNA, 578 bp, Homo sapiens
atcttcagtgcctaccatagagcccggcatgcaatagaagtgtgcgctaactcttccacttatccctgggttaggcccaactcctccagctatagtagtagagtcaaggagatcccagaaaaatctgttttctctgcacccaggcttttaagtcatcatgagcaagactctgccttttcttagtttttccaggtggtgaagatgtggaacagggaaaaaccacataaaaatgcaatcacatgaataaatattgcctacaaaggctggattcaactgaagaccttacactctaaatcaggagcacagactcatgtttatgcctttgtcccaggcaccaacttctcttgaacttctttgctgaccctgcctgaaagtggagttaactaaatcttgtgtagatctgtctcatatcactatttagcccatttgcagataggtatgatattgttaaaatgatgaaaatgccccacgttggactcagttggatattctgctccggcagatcaggttctaactggaatcttggttcacttcacttytgtaggctaagatattctattcgtacttgactgagcatt

SEQ ID NO: 620358 - DNA, 614 bp, Homo sapiens
atcaacttagctcacaggtaatttcaaataaacataatgcttattaacagttccaatatttgactttttgctcaacctaaattcagcaatgcaatgtgctgagatatatcccaataaagaccagctgcttttgttttgttttattttggtttaatttatttcacaaacaagtttctgcatgagcctgaatctttacaatgtgaaagctgtttggattcaagtaggaaatacgtttgaactgatgcataccaaatttccaaaagttcacctttttatcttactgcttagctgttgaataacacaacttttgcttrgtcaagccttctttcattttcttgaagatgaaaatgtaattcttgagttaccttctgaagaacaggttggggaaatgcaaataagagcattactcttctagagtatgaaaagattaccaaatttaggttttctggtcagtaaaattatattttcctaacttgtttactaattacagagtcatttaattagattatcatttcttctttttccattgccatctttttaaatgatgatatttccagaactgctctatttaactgttcagtgaaattacattcatgaagctgacaattattcag

SEQ ID NO: 620359 - DNA, 540 bp, Homo sapiens
tgtgctggcagtttcttggatagtgtctcctattggctgctcttactttctgtctttccattgtttctttgaggtttcataggaacagtcctgttttagttaaaagtgcygctggctcccagggtcccaaagccaatgagtagataatgaatggcaagcaatacctgatcccatacagaaaatgggaaaacccttctctcccacacctgtgccttaaggtagcactgtttatttaacagacttgcaaaaatctaccatgaaaacagtgacttcaacttctaatttagcttttctcccaattcatgctcaaaccaattcctcaaattgagaagcaaggacgagaaatgcttcatcagttaccttcattacagtcgtatctctcgaggtgcactaaattcctttgtcttcaactgattctctcctctcccaacaggagatcaatgtacagaggaatagttcctttaaatccaggagtgcatgcaactaagcaactttagagatgaatggttgcatattccccggagccaattctagttgagc

SEQ ID NO: 620360 - DNA, 646 bp, Homo sapiens
cattccattttaggctagagataatatatattttttgtactggccagatttagctaccaaaatctttaatgtcattctaagtatctataaatacatatatgcataaagtaagattgattgtagatgaatttaactattaaacaaacctgacctacaaatgcctaagtagatctaaaaactcacataaartaatgaaacatagatgagtaatgtaaaagtaaaaatgtaaaagtagccagcataacgctctgcatgatcgtgcttcttttattaccttttaattaattttgtgtgtgtgtgtgtgtgtgtgtgtgtgtgtgatggagtttcactcttgttgcccaggctggagtgcaatggcgtgacctcagctcactgcaacctctgcttcccaggttcaagcaattctcttgcctcagcctcccaagcagctgggattacaggcacccgccaccatgccctgctagttttttgtatttttagtagagactgggcttcactatgttagccaggctggtcttgaacttctgatctcaggtgatccacccacctcggcctcccaaagtgctgggattacaggtgtgagccaccatacccggccccttttaagaaattttaatcaatttattctccccatctgatatta

SEQ ID NO: 620361 - DNA, 646 bp, Homo sapiens
cattccattttaggctagagataatatatattttttgtactggccagatttagctaccaaaatctttaatgtcattctaagtatctataaatacatatatgcataaagtaagattgattgtagatgaatttaactattaaacaaacctgacctacaaatgcctaagtagatctaaaaactcacataaagtaatgaaacatagatgagtaatgtaaaagtaaaaatgtaaaagtagccagcataacgctctgcatgatcgtgcttcttttattaccttttaattaattttgtgtgtgtgtgtgtgtgtgtgtgtgtgtgtgatggagtttcactcttgttgcccaggctggagtgcaatggcgtgacctcagctcactgcaacctctgcttcccaggttcaagcaattctcttgcctcagcctcccragcagctgggattacaggcacccgccaccatgccctgctagttttttgtatttttagtagagactgggcttcactatgttagccaggctggtcttgaacttctgatctcaggtgatccacccacctcggcctcccaaagtgctgggattacaggtgtgagccaccatacccggccccttttaagaaattttaatcaatttattctccccatctgatatta

SEQ ID NO: 620362 - DNA, 553 bp, Homo sapiens
gagttttagtttactctattttgaaggccaggtatgtgtcattgtatagaagaatctgtcaaaaattaggatcacgtttgatgtcacttctgagcaacatgtttcacgaaaggtctgagaactgacttggcaagcctttcaaaatgggaaaattcaggattaaacctgtattggagcctaccgagggaagtagagttacatatgtagtcttcatctgcttgtgaaataactcttttcctttttcattccaaaagaagtaatgtattgactgccttatggatttgattaataaaatgcatcttgctcaaatccagtttttacaagaggtgatggtaaatccctttaaaggagggttttaaggctrtggccgaaatgacttaaggggactaaggcactgaatcgtaaaaccttacctgagatttttcctaggttagataccaatgttttagatacaattttgttggtgtgggtataagaatagcatacactgcttgaaaaagattatactagctgaccacagaatttctgtgttacttatgctggataaccataa

SEQ ID NO: 620363 - DNA, 387 bp, Homo sapiens
tattgattaatacaaatatctcagataaaattctgtactattcctgatagaagtgtattacattaaggaatagcctttaaaattttttgagtaagtcttaagtctcatatctctgcaatgtaataatttatctttctcattgaggtttagttaatagataaggacaatgattatggcrtattgtcatactacttacccatacaaagaaaacatactacttagccatactacttacccatacaaagaaaaacatactacttacccatacaaagaaaaatgaattttgcttccgcatgtcttatttcaaaccactttttaacatgcatttcttcatagatacatatatatttaacctttacatcctaaataggttaaaaagaagttgta

SEQ ID NO: 620364 - DNA, 557 bp, Homo sapiens
attttaacataaatgtatctttattgtctttgtcctggtcttccaatagggaagtttttgtacgtggtacctctttgtttttttgtttgttggcttctactattttcttaattttaaattctaagcctccaggtgtcttgcttataaaaacgattctggattttctacttttaaaatatggtttcttaaccatttgcagttttgctaagaggaaaggagaatctataaagtatgtttacatgaaaggaaaatctctgtataacattctatcaaaactgtaataaagtgaaaattaattattaatattgatatgatttggctgttccctccaaatctcatgttgagatgtgatccccagtgttggagrtggagtctgctgagaggtgttcgggtcattgggatggatccctcatggcttggtgctgtccttccccactctctcttgctcctgctctggctgtatgacgtgcctgctcccctttcgccttctgccatgagcaaaagctccctgaagcttcccgagaagctgagcagatgctggtgccatgcttgtacag

SEQ ID NO: 620365 - DNA, 579 bp, Homo sapiens
gttactttgattggtagaaacaaataagtgcttcttacaaggtctgtcaatctgctcctgcttatgggaagacaaactattcccagccctgtgtaagtactagaaactgtttggcccactgctttttggtgtcttttccctagcctcgtggagtttcatccttccattgcacagataagtactcagagccaaagggaagtaygcaatacaaaggaacactcttgcagatgtccaagactctcctgtgtgccatgtcctcctctcagatactctgcccatcagcctctccaacttcccatctctgtcacctccatctctgtcgcctccatttagtgaaatcaccggtttttgtttgggttcccctccctgttctaggctctggacactgcctccagatagtaagctggggtcattatggaacttaattcattcgtttcccttctctcagggatcacgatactgcactgcctgttggctaatgtctgaaaacaatgatttcatagatacatacatatatgtgtatatgtatatatacaaccctttcctaaatatgtataagtatacatacttatgatttat

SEQ ID NO: 620366 - DNA, 601 bp, Homo sapiens
gactcagccatgaatttgtgatggatgagaaatcttctattccctacaaaggcagaccaagaaacaagacaaaaataaagcccagatgatataaatagacccacagattatcaaaatcaatgttatctaacagaamtttctgcaatgatagaaatgttctatgtatgtgcaatccaatacatgagtgactgcacacatgtggctattgagtacttgacatgaagaactgaattttcttttttatcttaattgatttacatttaaagagccacatgtacctaatggccactgtactggacagcacagcagtagccactaatggaatgcataattctcatgatgataaaggtaaaagataattaatagaaatatttgatgaattcatcaaaggaagaaaaaggcaacatacaacaaatgagacccccaaaaaaacagatattgtataatggtcagcatctacccaaatatatcagtaataagcatgtaatgttactcacaagaaaagaatatatactctaatcgaaaaacaaagattgtcagactgaaaaaaataaacaaagcttaactatatgctgctcataaccgtgacacatttaattat

SEQ ID NO: 620367 - DNA, 601 bp, Homo sapiens
gactcagccatgaatttgtgatggatgagaaatcttctattccctacaaaggcagaccaagaaacaagacaaaaataaagcccagatgatataaatagacccacagattatcaaaatcaatgttatctaacagaactttctgcaatgatagaaatgttctatgtatgtgcaatccaatacatgagtgactgcacacatgtggctattgagtacttgacatgaagaactgaattttcttttttatcttaattgatttacatttaaagagccacatgtacctaatggccactgtactggacagcacagcagtagccactaatggaatgcataattctcatgatgataaaggtaaaagataattaatagaaatatttgatgaattcatcaaaggaagaaaaaggcaacatacaacaaatgagacccccmaaaaaacagatattgtataatggtcagcatctacccaaatatatcagtaataagcatgtaatgttactcacaagaaaagaatatatactctaatcgaaaaacaaagattgtcagactgaaaaaaataaacaaagcttaactatatgctgctcataaccgtgacacatttaattat

SEQ ID NO: 620368 - DNA, 406 bp, Homo sapiens
tccaacctgggtgatagagcaagactctatctcaaaaaagaagaatgctgaacacaggctcccattctcttctggcttgtagagtttctgttgaaatatccactcttagcctgatggggttgcctttgtaggtgacctgccccttctctctagctgcctttaatattttctctttcattttggccttggagaaactgatgactctgtgtcttgaggatagtcatctgtgtactgtctcataagggttttctgcatttcttgagtttgaatgttggcytctctagcaaggttggggaaattttcatggatgatatcctgaaatacgttttccaagtcatttgctttctctctttgtatttcagggatgctaatgaatagtagatttggtctctttacataatctcac

SEQ ID NO: 620369 - DNA, 490 bp, Homo sapiens
aaatgtattcatctttgtaatagcctccccgactgggatgttgaacatctttgttatccccagacaattttcttaaggtttttgccaggcaatcttccactccaatttgcagcccagacaacaatcactatacatcagtttcacctatcttcgaattttatataaattgaaacatgcagtatgatttttgtctgccttccttggcttagtataatgtttttgagagtcatagatattgactctcraattgtatgtatcagtagtttatagctttttactgtttagtagtatgtcattttatggaaatgccataatttgttaatcctgatgtaacctgttgatttataattaagttgtttgtagcttttggctactataaataaatctttaaaaatgtttttatgcaagcctttatgctgatatatgtttataaatttatttttgtatttgatgttaaatagagattattattgattattacgactatgat

SEQ ID NO: 620370 - DNA, 618 bp, Homo sapiens
gtccattataactttgaagttactgctgtgtagtggactgattgcctgcagcgcatcagctcctctttttcctgcttagtagaactctgaatgtgttccagtatctactatactttcatgtagcctatgtkactcaagagaaattgacctttttccatgtaatatgagctcaataaatctttgttgaataaattgcgtttattaaactttattttaacttttcatttgatctcctgtttccccaagtgtgatatggtttggatgtttatcacctccaaatctcgttgaaatgtgattcttattgttggaggtagggcctggtggaaggtgattagatcatggcagtggatccttcatgtacagtttagcactatccccttggtgatgatggagatctcattcagttcatgcgagatctggttgtttagaagtctgggatccctctacccgaccctgctcccttgctcccactcttgccatgacatgctttctctccctttgccctctgccgtgatcggaagcctccagcatcaccaggagctgatgctggatccatgcttgtacagcctgcagaactctaagccaattatttttttttctttataaattgcccagtcc

SEQ ID NO: 620371 - DNA, 618 bp, Homo sapiens
gtccattataactttgaagttactgctgtgtagtggactgattgcctgcagcgcatcagctcctctttttcctgcttagtagaactctgaatgtgttccagtatctactatactttcatgtagcctatgtgactcaagagaaattgacctttttccatgtaatatgagctcaataaatctttgttgaataaattgcrtttattaaactttattttaacttttcatttgatctcctgtttccccaagtgtgatatggtttggatgtttatcacctccaaatctcgttgaaatgtgattcttattgttggaggtagggcctggtggaaggtgattagatcatggcagtggatccttcatgtacagtttagcactatccccttggtgatgatggagatctcattcagttcatgcgagatctggttgtttagaagtctgggatccctctacccgaccctgctcccttgctcccactcttgccatgacatgctttctctccctttgccctctgccgtgatcggaagcctccagcatcaccaggagctgatgctggatccatgcttgtacagcctgcagaactctaagccaattatttttttttctttataaattgcccagtcc

SEQ ID NO: 620372 - DNA, 588 bp, Homo sapiens
aggagcaggattgaaaaaaaatacttgtcaaactactgaacaaaaccataaaataatttagtcttcactttcgaggaaagtataatcctagtgaagaaactgatgagttcaatacatttctgtaaatgttagcagtcaaagtcccagtagaaaaaagctggcaaacacaaattgaatagtttgaagagaatttaatgaagatgtggacaggtctgaggtggggaggaaaggaagtagttcctggaaagagggccacttacagcaaaagtgactttgggttgagggacacagccagcctgcagacattttccaagtcagatagaaaatgtaggtggaaaattctatgccaggcagagggaataagattttacatggcarggaggggtgaaaacaccaaatgtactgaattgatggtgaagtgcagcatcagaagtaggcagaggtgactgggtacagtggctcacacctgtaatcccagcactttgagagactgaagcgggcagatcacttgatgtcaggagttcaagaccagcctgggcagcatagtgaaaccctgtctctactgaacatacagaaattagctggtca

SEQ ID NO: 620373 - DNA, 551 bp, Homo sapiens
tgtcatatgaaaggtcaatgctggtgtctccaagtgtatagaaagttgattatgtttctctgatgaaaattatggccaaacccaggtatttacttttcctctcaagcctwggagttagagtccaggctgggcaacatagtgaggctccgtcttaaaaataataataattatcatgataataatatcaaacaaactacaaactaccttctcctaactcccagtattctcaaccccacttccctatttttctccatagctctgatcactatctgatatattctgtattttccttgttaatttattgtctgtaaatagaaatgtaagttacttgatgacaagtagttttgtctgttttgttcactcctatatcaccaatccttgacaagtgttaggcatacccacattttctgaaagactaaatagtatatttcagataaactggttgttttttaattaacctattttttcctctttctgtatgttgtttttattgtcttcttttgatgcaagcatattttttccacacatgtacaatctattattaaaaattt

SEQ ID NO: 620374 - DNA, 463 bp, Homo sapiens
tattcagttatctgtatacatgaatgtagtgcataaagaatgacagcagtgcatcctgagaaattgggaaagatggccagtaaacaatcaggatttgagagtgaagcaaaaatagtaaacccatactgcccaaactgagatatgaaaatcactgagagcttcattgtcatatgaaaggtcaatgctggtgtctccaagtgtatagaaagttgattatgtttctctgatgaaaattatggccaaacccaggtatttacttttcctctcaagcctaggagttagagtccaggctgggcaacatagtgaggctccrtcttaaaaataataataattatcatgataataatatcaaacaaactacaaactaccttctcctaactcccagtattctcaaccccacttccctatttttctccatagctctgatcactatctgatatattctgtattttccttgttaatt

SEQ ID NO: 620375 - DNA, 463 bp, Homo sapiens
tattcagttatctgtatacatgaatgtagtgcataaagaatgacagcagtgcatcctgagaaattgggaaagatggccagtaaacaatcaggatttgagagtgaagcaaaaatagtaaacccatactgcccaaactgagatatgaaaatcactgagagcttcattgtcatatgaaaggtcaatgctggtgtctccaagtgtatagaaagttgattatgtttctctgatgaaaattatggccaaacccaggtatttacttttcctctcaagcctaggagttagagtccaggctgggcaacatagtgaggctccgtcttaaaaataataataattatcatgataataatatcaaacaaactacaaactaccttctcctaactcccagtattctcaaccccacttcyctatttttctccatagctctgatcactatctgatatattctgtattttccttgttaatt

SEQ ID NO: 620376 - DNA, 560 bp, Homo sapiens
gttgggacatctcagcctctgtaactttcagagccaatttcttagaagtctccttatgcacatatgcacacatgcacacacacaccctgtggattctgtttctcaggagaaccctgactaatatactctataagtttattctctccaaacagctaagggaatcccttaagagagtaaatctgatcacatcagtcccctgctaaagacagtctagtagcttttcttcattcttgaagtaaaattctgagttattttcttgaggggaaagagagacagagagagagagagagagataccaacacacacacacacacacacacacacacacacacacacacacacacacasagagagagagagacagagagaacttgagattaccatttctttactaacggaaaatcccacctgtgttcgttcctccccataatcagctggaaatagaaattagaacgtgtgataacgtggagctccaaataattgacttgtcacttttaaatgttaaataacattgtttatttttaatgatatgaaaaagtgtattttaggaaatgacccgt

SEQ ID NO: 620377 - DNA, 571 bp, Homo sapiens
aagagtatacttacacattattctgctcttgattttgcaactcagtaatatggcttggccatccttccgttattagctaatatagatctttccccttgtatcatggactacatagtattccatagtctggagatgtcatattttatttaataagaactagagtgttgaaaaagcrtttgttgttttcatttttagctccaataaatatcctgtacatctatctggatgaatttttgcaagtgtggatgtaggtaaattccttgcaattaattgagaggtgagaggggaaagggtaaacacactttaaatgttggaagatatcacaaattgcctctaaaatgtgtaaatttacatatctagcaacagtgtcagcattagtcattgttaaactttaaaaccttttaaaacttttagttagtgggtgaaactaacatcttattttcatttatatttctttaattatgaatataaaatttttcctcagcctattttttggccaaaaatattggccattatttttattttactataaattatctgttcatatttttgtttattctttattagttta

SEQ ID NO: 620378 - DNA, 539 bp, Homo sapiens
cagagatttcagagtcaataaatatttttaaatatcttattagaatccttaatcttggtaatcttctaaggtatatatcattaatcttgtttaacagaagagtaaacaatctaaagaagctgaggggagagaaaacaaaaggtatatttattgcgcatctattatatgctaagaattgctgagtgctttactccatgagggtggcgaccatggtcactggtcatggtttgttttggtcaccagcctgtcctcagtatctggcatgttgcccaggacataatgcttgctgaatattatttgctgaaagcttgagggagaatccatgcttccaggctagayagcaatggctggtgaatagcagggctgttctccctgttttggcatgtatgtgtgtggtgcagccacatctgtatacctgtaaaagaaaagccctaataaaactggattactttaagctctgtggcagatccatctattttcagtgactttgggaaaacctagaagaatttttattttcctaccattaagttttcaccttt

SEQ ID NO: 620379 - DNA, 413 bp, Homo sapiens
atgaatttttataccaggtgtgagaacttttgatatattcctttgagtgagaaaagcaagacatacacaagcatgtaaagacagttattgtatatacacaaagccatatcatatgggtatgtacctatatatctcaatatttagagataaaaatatatagagttatagcaatrcaatgcaatgcaaacatgctcattgttaacgtgagttttccggggagtggggtgggtggaaaaaaagccaggaaaagaatgaaaagacagaaaatattgccctaaaaagcagatttcatgtttgtaaaaataggcatgtttcatttaccagttggattatttttagaggagatagaaataaggtacagtggaagctcttctccatttatagagagtaagtaaattagatttctttacatt

SEQ ID NO: 620380 - DNA, 527 bp, Homo sapiens
aatccttgatattttgaaaattcaaatgtcaacaagccacataatatgagaaatgatagtcactggctccatccttttgagcatttctacaaaatgaatcaaaataaaataccaaccctggaggtttattaatctacaagatgtttgagcatttctgtaaagagataacttaataatggtcattaatatttgtgaagttaaaagggagcttgcaaaaataagcagcattttttttctgagacagggattgttttacccagcatgctttttcatgaacatgctaaggacctgaaagatttcccatggtatatgttaaaatttcaaatctaatttaaacaaacaaacaaaaaaaacaacacttacaagctatgcctattayatagattatttaagaaaacagccctccatccttatttgctgcatgtcacacaggagaaagaattcatgcacttctctgactacatgacagaaccttttaaaacctgccagtcactcagtcagtcagccattcaggttttattgcaaat

SEQ ID NO: 620381 - DNA, 424 bp, Homo sapiens
tcctttcacttccatgctgacctgctcctttcctatagctgactcttctctagattgtcctaagaaccctgaacaagcttcttgccacargtacatttcaacttcagaattcatcaaatactttctggtgctctcactggaacagagagagagagagcacacatgaacagttcacattcacaaaataaataaatatacagatgattacctaaacaaaacaatccctctttatttctgaatattttctaaacttttcagtgatttgaagctcatattcatgtgtatttttaaaggtaaattatgtatgataaaaataaaaaagcactggattgaaatcagattcttaatgcaattctacctttctcatctaagtcactatattacatgaagcccatttcctcatttgtaaaataagaaatttaga

SEQ ID NO: 620382 - DNA, 558 bp, Homo sapiens
acatggcaacttcgctctgctaattacaacatatgctaattaaaacactagcacaagcaccatgatagtttataaatgccacatggcaatgtccagaagttacactgtatggtcaagactggggagaaatccctggtcctgggagctccctgccccattcccagaaaacttgtgaataacccacsctttgtttagaatataatcaagaaatggccataaaatagccagctagcagccccccacctagtgctattctgcctatggggtacccgtgctctgcctatggagcagccatccttttattcctttgctttgtaataaacttgcctttactttactctgtcagctcgcccgtgaattcttccctgcatgaagccaagaacccatgtggcctccaggggtgaacctcaattttgggattcgcctgcaatagtactatgaaaggtactaagaaacataacaggcatgatcactgccctcaagaaactcaaaaccaatttggttttgggctagacacccaggatgtagggatcccacatttcttttagtgctacccag

SEQ ID NO: 620383 - DNA, 558 bp, Homo sapiens
acatggcaacttcgctctgctaattacaacatatgctaattaaaacactagcacaagcaccatgatagtttataaatgccacatggcaatgtccagaagttacactgtatggtcaagactggggagaaatccctggtcctgggagctccctgccccattcccagaaaacttgtgaataacccacgctttgtttagaatataatcaagaaatggccataaaatagccagctagcagccccccacctagtgctattctgcctatggggtaccygtgctctgcctatggagcagccatccttttattcctttgctttgtaataaacttgcctttactttactctgtcagctcgcccgtgaattcttccctgcatgaagccaagaacccatgtggcctccaggggtgaacctcaattttgggattcgcctgcaatagtactatgaaaggtactaagaaacataacaggcatgatcactgccctcaagaaactcaaaaccaatttggttttgggctagacacccaggatgtagggatcccacatttcttttagtgctacccag

SEQ ID NO: 620384 - DNA, 558 bp, Homo sapiens
acatggcaacttcgctctgctaattacaacatatgctaattaaaacactagcacaagcaccatgatagtttataaatgccacatggcaatgtccagaagttacactgtatggtcaagactggggagaaatccctggtcctgggagctccctgccccattcccagaaaacttgtgaataacccacgctttgtttagaatataatcaagaaatggccataaaatagccagctagcagccccccacctagtgctattctgcctatggggtacccgtgctctgcctatggagcagccatccttttattcctttgctttgtaataaacttgcctttactttactctgtcagctcgcccgtgaattcttccctgcatgaagccaagaacccatgtggcctccaggggtgaacctcaattttgggattcgcctgcaatagtactatgaaaggtactaagaaacataacaggcatgatcactgccctcaagaaactcaaaaccaatttggttttgggctagacacccaggatgyagggatcccacatttcttttagtgctacccag

SEQ ID NO: 620385 - DNA, 628 bp, Homo sapiens
ataccccttccacctccaaaaggtgattacacattgagtcacaatgtagaaaactgatgtcttatctggactggattttggtagaggttttctacctccatgatgtttgccctgcttatagyttaacattcttgtgcaaaattcaggacactgccttagttttgctgacatctggtatcttcatgaaaaaaactgctctcagctattactactttcctttaatctcttaacttatcaatttaactgtgaacatgtaattatataataacctgctgaagtggatgtttttcaaaatcaaatggtttctctatcattcttaggtcttgcccagcagcagtcaaccatattgggtgttaattttcaagaatgtgagtgaggatacagaaatacacacaggcaattctgagtctcttttcacttatttttataaagtggaggtacttgggaagtaatgctcttatctattttttttaaatcatgaaacacaactgaatacttagttcgaaaggtaatagacctctgcaaagtatatgtcccaatgtgtatttttaatggtatagttgtgaggatttactaatcttattaagataatttaacttttagaaaaatacaggaaatttactagata

SEQ ID NO: 620386 - DNA, 628 bp, Homo sapiens
ataccccttccacctccaaaaggtgattacacattgagtcacaatgtagaaaactgatgtcttatctggactggattttggtagaggttttctacctccatgatgtttgccctgcttatagtttaacattcttgtgcaaaattcaggacactgccttagttttgctgacatctggtatcttcatgaaaaaaactgctctcagctattactactttcctttaatctcttaacttatmaatttaactgtgaacatgtaattatataataacctgctgaagtggatgtttttcaaaatcaaatggtttctctatcattcttaggtcttgcccagcagcagtcaaccatattgggtgttaattttcaagaatgtgagtgaggatacagaaatacacacaggcaattctgagtctcttttcacttatttttataaagtggaggtacttgggaagtaatgctcttatctattttttttaaatcatgaaacacaactgaatacttagttcgaaaggtaatagacctctgcaaagtatatgtcccaatgtgtatttttaatggtatagttgtgaggatttactaatcttattaagataatttaacttttagaaaaatacaggaaatttactagata

SEQ ID NO: 620387 - DNA, 603 bp, Homo sapiens
cgcttcttccctaattatggccttctacagttctttcactacacaggcagtttaggtgggatcagtcctcacacccatggcaagcaggtgtatattagagaatcaataactatcaacctgtcagataacactagaaagcctccaattcttctcttctttccaaatatttggttctccaaatggacctaggcctttgaagcacaaagacctattcagagctgtcttcaatggtggtggttctctgcctagcaactcacccttctggctccaaaacacaatatcattgtttatttttttctwaacttaaaaacagcccatgccttagaagtcaagaccgaactaccttcctgggtggtggaattaatgatatcttttctttctttcttatgaatatagagtagccagaaacaagacaaaattattctttctttcttactgatgtagagtagccagaaacaaaataaaatctattatcttgtaatctgccactttaggtggcagaatatattttaaatgagcttaacgttaaaatacacaatgcattactggtgggaatagaaagtagtacaatatttctggaaattaagctaatagtataagtgt

SEQ ID NO: 620388 - DNA, 575 bp, Homo sapiens
tctagtccatcattgatgggcatttrggttggttccatgtctttgctattgttaatagtgctgtatgtatgtatgtctttgtggtagagtgatttatattcctttggttatagacccaataatgggattcctgggtcaaatggaaattttgttttaagttctttgagaaattgccaaactgctttccataatgggttcactaacttactttcccatcaacagtgtataagtgttcccttttctccataacctcgccagcatctgttagtttttaactttttgataatagatattctgactaatgttagatggtatctcattgtggttttgatttggatttatttaatgattagtgatgttgagcattttttcatatgcttcttggctgcctgtatgtcttcttttaaaaatgtctgttcatgtcctttgcccactttttaatggggttatgtttgttttttgcttgttaatttgtttaagtttcttatagattctggatattagttctttgttggacgcatagattgcaaatattctctgccattctgtaggctatctgtttagcttgttggtag

SEQ ID NO: 620389 - DNA, 587 bp, Homo sapiens
gggttcactaacttactttcccatcaacagtgtataagtgttcccttttctccataacctcgccagcatctgttagtttttaactttttgataatagatattctgactaatgttagatggtatctcattgtggttttgatttggatttatttaatgattagtgatgttgagcattttttcatatgcttcttggctgcctgtatgtcttcttttaaaaatgtctgttcatgtcctttgcccactttttaatggggttatgtttgttttttgcttgttaatttgtttaagtttcttatagattctggatattagttctttgttggacgcatagattgcaaatattctctgccattctgtaggctatctgtttagcttgttggtagtttcttttgctctacagagttcttcagcaaacttgcaaacttttgcttttgtcacaattgcttttggcatcttcatcatgaaatctttgccaggtcccatgtccagaatgataattcytaagttatcttccatgggttttatacttttaggttttacatttaaatctttaatacactttgaattgattttttatgtgtttcaaa

SEQ ID NO: 620390 - DNA, 546 bp, Homo sapiens
tatacacaaagaaaggaaatcagtatattgaagagatatctgcactcctatgtttgttgcagcattgtttacaatagctaagatttgtaagcaacctaagtgtccaccaacaaatgaatggataaagaaaatatgatacatatacacaatgaaataccattcagccataaaaaagaatgaggtccagtcatttgcaacaatatatatggaactggagatcattatgttaagtgaaataagccaggcacagaaagataaacgttgcatgttctcacttatttgtgagatctaaaaatcaaaacmattaaacttactgacatagagagtagaaggatggttaccagagtctggggaaggtaatggggaatttggggggaggtggggatggttaatgggtccaaagagagctagaaaggatgaataaaacctaatatttaatagcacaatagggtaactaaagccaataataacctaattgtacatttttaaataaagagtgtaattggattgtgtgtcactctaagaataaatgcttgaagggataga

SEQ ID NO: 620391 - DNA, 596 bp, Homo sapiens
atatggctggttaaatataaagtggcatgaaaatcaaagttaaataaataataattaaaggggcgtagcaaaaacagcccatatcaatagggctttgtggagaggggacacagcagtaattgagacatgcatttgagaactgctgctgcatccaacacctctgaaggagtaaatatctatgttctaatcagatttgatcttaataggaaatgccatacacaaaatacccacgtgtaagaaggtctaaggtcatggctctgaaattaattctacagtaaatccacacatcaaactccatgaacttcaactggagttaggaaagacaatttcagaacctggctgtgggtggataatttatgatgtggtgtgaaacaagggactttctatacctgagcaacacaaagggctgaatttactgccgtcaattacttttatrcaacagcagggtcagcctctgcccccaattactcatgtgcagaaacagaactggtagcaagaaaatcaacagatcctcagaggttgtaaaagaaacctggaaatgaattgagcagataacattggtctctccatcctctggccctaggcaccaggaaagt

SEQ ID NO: 620392 - DNA, 556 bp, Homo sapiens
cagctccagccatggctaaaaggggccaaggtacagcttgggctgtggcttcagagtatgcaagcacaaagccctggcagcttctacatggtgttgggtctgtggctgtgcagaagaaaagaactgaggtttgggaacctccacctagattttagaagatgtccaggaacacctggatgtccaggcagaagtttgctgcagaggtagagcccacgtggagaacttctgctagggcagtacagaaggaaaatgtgggtttggagcccccacacagagtccccagtgggacactgcctcgtagtgctgtgagaagagagttacyatacttcagaccccagaaaggtagatccactgacaggttgtaccatgtgcctggaaaagctgaaggcactcaatgccagcctgtgaaagcagtggcaggcactgtaccctgcagaaccacagaggcaagcaactcaagaccttgtgagcccaccccttgcattagtgtgccctggatgtgagacatggagttgaaggaaattttaaagatttaatgactgcccagctgggttcc

SEQ ID NO: 620393 - DNA, 554 bp, Homo sapiens
gggtctgtggctgtgcagaagaaaagaactgaggtttgggaacctccacctagattttagaagatgtccaggaacacctggatgtccaggcagaagtttgctgcagaggtagagcccacgtggagaacttctgctagggcagtacagaaggaaaatgtgggtttggagcccccacacagagtccccagtgggacactgcctcgtagtgctgtgagaagagagttaccatacttcagaccccagaaaggtagatccactgacaggttgtaccatgtgcctggaaaagctgaaggcactcaatgccagcctgtgaaagcagtggcaggcactgtaccctgcagaaccacagaggcaagcaactcaagaccttgtgarcccaccccttgcattagtgtgccctggatgtgagacatggagttgaaggaaattttaaagatttaatgactgcccagctgggttcccaacttgcatggggcctgtgtctcctttgttttggccaatttctcccgtctgaaacaggaacatttacccagtgcctgtatgtacccccatta

SEQ ID NO: 620394 - DNA, 516 bp, Homo sapiens
gaggcaagcaactcaagaccttgtgagcccaccccttgcattagtgtgccctggatgtgagacatggagtygaaggaaattttaaagatttaatgactgcccagctgggttcccaacttgcatggggcctgtgtctcctttgttttggccaatttctcccgtctgaaacaggaacatttacccagtgcctgtatgtacccccattatatcttggaagtaactaacttgcttttgtttttacaggctcataggtgaaagagacttgccttgtctcagatgagactctggacttggacttttgggttaatgctggaattagttatggctttgggggactgttgggaaggcataattggttttgaaatgtgaacaggtcatgagatttgggaggggccagggtggaataatatggtgtggctctgtgtcctgcccaaatctcatctcaaattgtaatccctacttgtcatgggagggacatactggaaggtgattggattatgggggcagtttctccca

SEQ ID NO: 620395 - DNA, 643 bp, Homo sapiens
gagtaaaatagcaacagcaggcaaaaatgatactaaaagtacctttgggaattraaaatagtgatgggataaccttctgacacctgaacaatggtggaagtatctgtagaccacaatggggaagagagagaggaacatccattagaacactaaaatattctgaggacatttagtgtaaggataatttaagttctgcatagctgagtaaccctctagggattcttagtgccaatttaagaataaagctcaccaattagaacagtgctgtattctgaaattatacagtgttgggaaaagtaatatttcatgttccaaaatgcaaaaaatagcaatatattactgcatagttcaatttttgaattcaaaaaacctttctgattcatcaagaaaattttaaagtattttgagaaacatgttttgtaaagcagagaactaagtgtgatattttcaagacattattgacaaaaagaacactttttatagaatctaaagacataggttctggtattgtatcttccactcaaaagataagtgactttgaaaaagtcatttaacttctctgagctttctgtttttatttcctctgttcagtgaaaatacctgttctacatacctggcagagtgtagaagaggattaaagtca

SEQ ID NO: 620396 - DNA, 614 bp, Homo sapiens
gggctcaagtgatcttcctgcctcaagcttcctagagcactgggattacaggcgtgagccactacacccagcccaggccttcagacttttgtgttctcttccagctcagctctttccaaaagccagtaaccccatgcaggttggtcctcgctgtgagattctttctgagtagtctactctctgtcccttgtcatcacagtattcttgcttttgagggaataggccctaccagaccagtctgaatctcctgaaatgttggtgaataaaattttgttctgataccacagtgtaagtaaacaaacaaacaaacaaaaagcagtcatcatttccaatttttctagaagatctcaagttgtttttcatgcatatggtgagagaacaagttttttgtttttcttttatcttaaaactgtatatgcttgtgctacccagaacacggtattatgcagtttaagagattctttacatgcttggcgcrgtcaaacatcaatagttctaccttgatagactttcaagtctggaaaaagcttaatgaagttaggagtctttatggcctcatttttttcttttcaactgttagtttaggttccaggggtatgtgtgcagggtttgtt

SEQ ID NO: 620397 - DNA, 498 bp, Homo sapiens
tggtctcacttaaataatttagtactgaatttttcagtaagggaagggaaggagaagaagaataggaacagaaagaggatacgaggtcctgttgttgttctttgtgttttcttcatgacrtaaaagtaaaaagcaagctaagagtcttgagtagggagaaagtaatagatgtttaaggagaatggagaaaatgtggcatttttatcaggagcattttatcaggagtgtgaaaggataataaaatgtagttggatacttgtccaacagtcagggccattctaccttgatgacttaggaatctttgaacatttcaagaactctcattcttcctttctaccagtataaatcttaggctctttaggttacaatacttggcattatctccccccatctactccactactgttacctcttcccttaccaattcctaaatctccaagtcctacttcaaaacaattgaagtagctaattataagatcgatgtaaaagtaattccag

SEQ ID NO: 620398 - DNA, 431 bp, Homo sapiens
gtttgtgggagggaacatcaaaacaacaacaacaacaacaacaaaaacagagaaaaaaagaagtagagaatagaaaaacagtcattctaggataggggatccaagttgggaaagaagagtttccagaagartgggttggccattagggtcagtggttatagaaccaagaaggaaatcagctactgcaggaagaaaaaattggtaaattggttcgctttcaaccgaagttaattaaatgaagttaagtttttacatgctgaaaaatagtctcagagaaacatgcagaacatattttatgttcgtttcttttttgatatttttccagtgtttaagagggacacattttgttttaaaagctagcatataggtgtttagaatctgccccaaatttttaaaagctaatgcatgcaatttaccagtaatcttaacta

SEQ ID NO: 620399 - DNA, 431 bp, Homo sapiens
gtttgtgggagggaacatcaaaacaacaacaacaacaacaacaaaaacagagaaaaaaagaagtagagaatagaaaaacagtcattctaggataggggatccaagttgggaaagaagagtttccagaagagtgggttggccattagggtcagtggttatagaaccaagaaggaaatcagctactgcaggaagaaaaaattggtaaattggttcgctttcaaccgaagttaattaaatgaagttaagtttttacatgctgaaaaatagtctcagagaaacatgcagaacakattttatgttcgtttcttttttgatatttttccagtgtttaagagggacacattttgttttaaaagctagcatataggtgtttagaatctgccccaaatttttaaaagctaatgcatgcaatttaccagtaatcttaacta

SEQ ID NO: 620400 - DNA, 602 bp, Homo sapiens
atttctggacacaccctgggccagaaggaacccgctgccttgaagggaaggactcaatcctggcagcatttattacttgctacatgaagagcccttggactctgaataaccagcagcaatacccaggtactatgtatagggccttgggtgagcctctgagaattgctggcttcaggtgagactcagcacattctcagctatggtggctgctgggcaaaacttcctcttgagaaaagcaggggggaaagtaaaagggactttgtcttgtatctcaggtaccagcatggccacagggaggcagggcaccgagagggttcttggggttcccaattctaggatttgcctcttggatggcgtgtctggacctgctgtgggccagaggggagcccaccgccctgaagggtgagtcccaggccaggcagcactcacaacaagctgacttaagggatgttgggccaggctagstgcagtggttcacgcctgtaataccagcactttgggaggccgaggcgggcggatcacaagatcaggagatcgagaccatcctggctaacacggtgaaactctgtctctactaaaaatacaaaacattagccgggcgt

SEQ ID NO: 620401 - DNA, 602 bp, Homo sapiens
atttctggacacaccctgggccagaaggaacccgctgccttgaagggaaggactcaatcctggcagcatttattacttgctacatgaagagcccttggactctgaataaccagcagcaatacccaggtactatgtatagggccttgggtgagcctctgagaattgctggcttcaggtgagactcagcacattctcagctatggtggctgctgggcaaaacttcctcttgagaaaagcaggggggaaagtaaaagggactttgtcttgtatctcaggtaccagcatggccacagggaggcagggcaccgagagggttcttggggttcccaattctaggatttgcctcttggatggcgtgtctggacctgctgtgggccagaggggagcccaccgccctgaagggtgagtcccaggccaggcagcactcacaacaagctgacttaagggatgttgggccaggctagctgcagtggttcacgcctgtaataccagcactttgggaggccgaggcgggcggatcacragatcaggagatcgagaccatcctggctaacacggtgaaactctgtctctactaaaaatacaaaacattagccgggcgt

SEQ ID NO: 620402 - DNA, 404 bp, Homo sapiens
atgggcattggacggatcccagatgcattcatgcacctgccgtctaccccagactgagtttctggaggtcagggaccrcaattgtcacctacttccccaagtctagtgctgcgactagcatgtagtaggggctcagcaaatgttggctttactacatgacataatgtttcatgcttgattgtattgtatccacagcataacactgtgaggttatgacccttgtccccattttacagaggagaaaattgaggctcagaagagttaaataactatctcatgagcgaacagctaaccaaggggtagagcatggatgcaaacccaggtcttattcctatactatgtatctgccagcttagttcaagcccaggaatgtcctgaaatgttttgagttagaaaccagagac

SEQ ID NO: 620403 - DNA, 527 bp, Homo sapiens
cagccccactggcagggtggagttgggggtagagctggcggcctgctgcctgcaaatcttgctctcaccactcttcattgctgcccctctcagggagtgacttccccccagtcactcagcctctccatgtggctcaggtcagctacaggcagctgtggtgtcatcctgacagttctacaatcaaggaaaggagattctctctcccctggcttcagaaaaaccaaacaatccagacaaggactccaactggcctagagtgggccactagtctggagggtggagggacaggatacactgtggcccgggtgggrcactagtctgaggccgtggctggggtagctgggttgcatgcccttctctacaatcaggtggcagatgggcaaaaagaacagccatccccttaggcaaccttgtcaaacaggccattatctcagttacccatgtatactttcagctttttgtcaaactcaattcctattaattgtggggtagttaaaaatatacccctctcccaaggctgaggttaa

SEQ ID NO: 620404 - DNA, 592 bp, Homo sapiens
tcttggttttccatcagtgcttcgtggagtcccaggggttccttagagttgccttgggtgccgccaggggctgagagagtggagagatgctgccaagcaggcagtttgggcactatttccaccagagcagctctgtttgtatcagttttatgtactggacttctgggtgaatttcaactgagcaatggctttggaggtcgaaagcaagtttggaagccaccggtcttagcagttgctgccagccctgtgattccaagtccatctgaccagtgaggctttttttcaraagttgcttggagattctttttcaaatgaattttccatcacttagatgctgttattgttttttggactgccgggagctatgtgaggacccagcaggatgatttttgaatcttctcatgatgcctagactttactgtcagtaatattgtaactctcaacaatccctataagctgtacagttggtggaggcagagatagttaatacagagggctgggtgtctaagggtcttgcgcagagatacggtccactcagtgatagggccaggcccatggatgaagcgatggtgtcctccaggggatgctgtgt

SEQ ID NO: 620405 - DNA, 481 bp, Homo sapiens
aatccagctgctctgtgtttggcagtcgtgtgaagaggcccgtgtggcacgggattgagacctgccaacaaccatgtgagggagtttggaagaagattctgctaaaaagrcgagccttcagatgagactgcagccccagccaatagcttgactgaagtctcatcacagaccttaaaccagagacacccagctaagacatgcccaaattcccaatccacagaaactgcaagacaataaatgtttattgtaagatgctaagtttcagaataatttgtcacacagcaatggataacgagcacattgcacaacctttatcactactccacatttattactttgttgaccaatctgtactgggacaaaatcaactgtaaaactcaacacataaaggactacaacactggcctctagggcaacaggacgtgctggactcctctcgaaagctagttttgaggtggggggattcgataggctagagaaa

SEQ ID NO: 620406 - DNA, 590 bp, Homo sapiens
aagtgctggaattacaggtgtgaaatttgtgttgttttaagccactaggtttgtggtaactcattacagcagtgattgcaaattaatgtagatagcataggatagtgcctgttcaaatattccctacttccactccctcccttcaccgtgaatgcatagttatttctgacaaaacttattttcttagtctttgtaatcccaggctctagcatggttcttgtaggcacttggtaaatatctgttgcatcgacatgaatgaaagcatatctttaccttttgttgttcatttcaggtttatcttttcctattatataaattttttatggtctcatactttgggattgacagtactcccactgacagacaaaacagaacaataaatttggaaatttcgtattcctaatcggatattgaagtagattgttatgaatatccattagtagttcacttcccctgctgccttgcttttcttattcttagattcaagcacactgttcsgctcttataaatcactccagttgccactttaaaagcctctaagaatgaatgcatcctggaacataaacgctgcaaatatagtctgaaacaaa

SEQ ID NO: 620407 - DNA, 508 bp, Homo sapiens
ggataaatcaatccataataatttatacttaatataagagcagaaatcagtgaaatcccaagcagtactactatagagaaagttaatgaaggaatgagctgatcaattgtaaaggtcaataaaattgacaagcctctgtcaaggctgacaaagacaaaagagagagaagayatgaataaccaatatcatggatgaaacatgggctgtaagtaaagatcttgcagacacctaaagaataacaatgcactgctgtgaacaactctacacacacatttgacaacctccatgaaatgtattactttcttgaaaaatacaaagtgccacaagtcacccaatgtgaaatagatactttgagtagtgctataatcattaagaaaattaaatcaataattttaaatctccccaaaagaaaatcttctggcccagatactttcactggaatactttactagatgtttaaagaagaataaacctgattctacacaatctctttcagtaaagagaagaa

SEQ ID NO: 620408 - DNA, 580 bp, Homo sapiens
acacaaacattgaagtaaaattagatattcattcacacatatttgggatatagatttatgctcactgtgaggccaaggaaacccgaatagagaaatgtagttaaccacatttagtagaaagaaaccttactgaatttaattcagttacatcatacaagcaattactcagactcgcataggtacttccaagttcttcagtatgcaatgactggaagcaaaatataccctttgtaggcattactcaaatatttatttttatatttggtagtagcaaggttattaattggaaaggttagggtagcrtttccagagagtagaaaagcatgtagcagtgatgtctagaatatcaaggattccttttacattcttcctttggggtttcagggtgactttcactgggaacatagaaagacattggcattagtgggattggtttatgatttctgggcattagcctacaaaaagtaaaacataaaattgtaccctagtgcatgattgaaagtgcaatattttggtaaggaaaatatagtagtaaacattcctatttagaatacaaaagtatactaagttaaatttttaa
